United States Patent Application Publication US 2024/0084332 A1 - sequence listing, part 7

SEQ ID NO: 27601 - protein, 322 aa, Streptomyces sp.
MQVKRAFKYRFYPTDAQATELSRTFGCVRKVYNLALAARSEAWTLRQEQVTYNQTSAMLTGWKKTEELAFLSDVSSVPLQQTLRHVQTAFTHFFAKRAKYPRFKTRKKSRKSAEYTRSGFRFRDGQLTLAKMTEPLDIAWSRPLPEGIQPSTVNVSQDTAGRWFVSMLCDDPTIRPLPATDKAVGIDVGLTHLLTFSTGEKVANPRHERRDRVRLARAQRQLSRKARGEGTNRHKARRKVAKIHARIADRRRDLLHQLTTQLVRENPYARDRGPDRAQHGQKPHARPGHLRRELERVPFHAGIQGFLVRARSHRGRPVLSLF

SEQ ID NO: 27602 - protein, 521 aa, Micromonospora sp.
LLVVRSVYRIGELAERVTLSPRQELVEDLPAVVRAEELEGTDLTGAGNPVKVTRIAYSTGLNAGKYAALREQARRLGRVRSEVWQRYGSVTGVGSGLRDRQVRDRWLADGTHVRFGVLANAWKETVRDAMADIAANLASAKLEVRRAIGRRINDPAERKRMLAALAVDRWAADPFLARQMRKHWRRGRSRTDHQIVVRADKYNTVTDGRGRLWLAVPGLERRQMVRIPLSTAVAPTGTLRLILRRGRVEVHYQIDASHMRSSQRPCGGRMVGVDKGYTEALTDSDGTHHGTGLGKLLTAESDRLKERNRRRAKLRSIANTAAARGDHAKAHRITANNLGIVKRDRQAARHRAQVRTEIFTAVHRVIDKAATVVAEDLTKRFAGRKTLGKNINRRLAGWTKGVSAEALRNVSERRGSALVHVNAAYTSQTCHRCGRLGRRGGDRFHCTCCGVVWQADVNAAINILQRAGDPDIALHTPHHVVRQILQDRTDRRRTRLPVQDSSPATAERRANHPNRSTTSKK

SEQ ID NO: 27603 - protein, 336 aa, Acinetobacter sp.
MKTLKLRIKDKHCKMLDQLASEVNFVWNYVNDLCFKHLKRTGHFFSAYDVNEYTSGTSKFCNLHSQTIQAITEELVTRRKQFKKAKLKWRVSNKKSARRSLGWIPFKKVAVKYADGYVQYGKCQFKVWDSYGLSKYTVKTGSFVEDSRGRWYVCLVVDSPEQEQSKAKQSIGIDLGLKDVATCSDGTVISNPKFYRKYEQQLGIAQRARNKKRVRALHAKIANCRKDYLHKASTMLVKNNALIVVGNLSAAQLVKTKMAKSVLDTGFSALKTMLKYKCENAGVLFEEVNESYTTQTCSYCKIISSSSPKGRLGLGIRAWQCILRSSAAQVHSMIGI

SEQ ID NO: 27604 - protein, 397 aa, unknown
  TnpB Polypeptide
MFRTFEAVLAPTIGQQAKLGRLFRLQCELYNAALEERRGVWKQNGRSVSKFEQFKGLSGFEHPVMDFGTVPARGTLTRLDRAFQSFFRRVKSGEKAGFPRFKPSARWSSVEYPDAKCWKIDGGTRKHAGVGRLYLKGVGQVRFRGSRRGIRGVPRTLIVRRVAGKYRMCVTYVLEPEYGPPAPRTPRDIGVDVGVTEVVALSDGTLFPNPREARRASAKLAEAQQDLARKQRGSNRRKRAVERVACQHRKIVMQRQNRNHQISRVIVNRADGGLIVFEDLKIGNMTARVKPRPDPDNPGQFLPNGQAAKSGLNREIHAAGWSQLRQMAGYKAEEAGTRLVVVNPAFTSQTCHECGHISPENRHGTKFCCVKCGHTGHADVNAAKNILGRVDPTLSTA

SEQ ID NO: 27605 - protein, 492 aa, unknown
  TnpB Polypeptide
MAELVSEVRGISSYATYVARNDTELEAELARVTATAPAEAGRQAGVTMPEFLANGRTGKSRKERLLRYSVVTSYRSWQERIKAVNSESDKYISQGWKRTANAAPPSYGEDYINLGAVDHNYALIENNPFTDGEITLKMVIRGAWHRLIFDFDNKRFTEGKVTLPLVKIEEGKPVFIFSVVTDNPVVQFSSDYVIGVDVGINDYATVAVRNTETGKIVHQTTLSQRVHSLWNSVRASEKQVRQLRKKADSLSPYNRQEIMAALDEAQLHRKAASRKKRELAILAAQEIAYLSHFFDNAVVAVEDLSWISNTMQNGRWNRGAFVQWLTHYVGQNGGWVVSVSAFNTSQLCHKCGNEVTHPEYKVSRCSEHGDMDRDVNAAANIAARAVPKVEKARAKRSKNSKLQPQAPLKTPVARVSLKYPGQDRTKNKPTSKRKKHRISKGVNLPISPARVQASRVDTSVLADCGTYGATGTFQAAIKQGTITHKYRLCSPI

SEQ ID NO: 27606 - protein, 524 aa, unknown
  TnpB Polypeptide
LAKNQTYRAFVARPTHILNLDGELLDSAPIMSQLATEVRGISAYATYVTRNDEVLGERLAQAGAIQPAVAGRRAGVAMPEFLVTGKSGKSRKEWLVRYNVVTAFRSWQERTKAVNGESSKYVSQGWKRTMNAAPPSYGEDYINLGAVDRKYALIENKPFADGEITLKMVIRGAWYRLIFNFDNTRFTEGKVTLPVVKVEDGKPVFIFSVVTDNPVVQFSSDYVIGVDVGINEYATVVVRNSVTGKIVHRTTLSQRVHSLWNSVCASEKQVRQLREKATQLLDDRPYGRQAIMAALDEAALHRKAASRKKRELAILAAQEIAYLSYFFGNAVVALEDLSWITNTMQNGRWNRGAFMQWLAHYVSQNGGWVVAVNAANTSQVCHVCRSEVTHPEHKVSQCAQCGVFDRDVNAAANIAARAVSKVEKACKRRSKNSKLQPQAPLKTPIARGSLKYPGRDRTKCTPTPKRKKRVAREVNLPSSPARAQASRLGATVLADCGTYGVPETCKAAINQGDKTYTCGLYNLN

SEQ ID NO: 27607 - protein, 525 aa, unknown
  TnpB Polypeptide
LAKNKTYRAFVARPTHVLDLNGELLEAAPIMAQLTTEVRGISSYATYVTRNDTQLEAGLATAGTAQPAVVGRRAGITMPEFLVTGKSGRSRKEWLVRYNVVTAFRSWQERIKAVNGESDKYVSQGWKRTVNDSAPTYGEGTINLGAVDRCYAVIENNPFVDGEITLKMVIRGAWYRLFFPFDNTRFTEGKVTLPLIKVQDGAPVFIFSVVTDNPIVQFSGDYVIGVDVGINDYATVVVRNTVTGEITHQTTLSQRVHSLWNSVRASERQVRQLREKAARLLNDRPYERQAIMAALDEAQLHRKAASRKKRELAILAAQEIAYLSHFFGNAVVAVEDLSWITNTMQNGRWNRGAFTQWLTHYVSQNGGWVVSVSSFNTSQVCHVCGVEVTHPEHRVSICSKHGMMDRDVNAAANIAARAVPKVEKARKKRSRNSKLQPQAPLKTPVARGSLKYPGRDRTKNAPTPKRKNHSQVSREVTLPSSPARAQAKCLEASVLADCLAYGVAGTSQAAIKQGTITKYRLCSPI

SEQ ID NO: 27608 - protein, 439 aa, unknown
  TnpB Polypeptide
MYKVSENLLLNRRQTFRLYSTKTQEKALLGARRLHCYLYNACVAHREYEYKRNRKTVTYFEQQNLLPEFKRVWTEFAQLHSQSLQATVKRVDLAYQFFFQGLRGKPKYKSIRRYLGWTYPAQSGRKVNSNGKHDTVTLNDLGSTLKMRGKAKAWALTIVYKPSKREWYASFTVNVAVPKPKFGSQSDLKYESIVAYNLGTETAITLFDRCEFYEIANPRFTQRMEEKIRQTAKLKRRKRPPKKGVKASRHWKKINQRESKLKAKVARQRRDWQHKVTSDLARRYDIGVTEKLNTKAMTRMAKGKGQKQKAGLNKSILSVGFATLNQMLTYKIEQKGGPPRPSNHPSAVLSKDWADLRNRYHVCSACGFEIGRDRGSVMVMYNVALNQQPGLGTSLVSLGCLSSTSETRHTGSMKQLGQRKRQKSCHQADGETPSAYAVG

SEQ ID NO: 27609 - protein, 449 aa, unknown
  TnpB Polypeptide
MAYFMGTAYRTLLLSYDLLRHPPDAAEKVSALLKVQEEFRRWAEEWLRGEAEKPRQNPLKYFADKYLHAGKALDWLCGVKTRPKRLRPPLVFNAQLRLDNEKDVGRGVFVDLPKKEIRIRNWGGGTLALPLGDKAVEWILARVREGGRLVLAAAWVSASRRNRAARLYVALVFRREAAPMQPRRLLVVDLNALHNGVSWAVVEEERVVRRGALRPDVSKLIHLQRRIAELDSLCANKDKACEEATAAKSRLWRILQSFGDEAVKKLIQLALQYKAAIMADVPNDKSIRELKEGRYASERKVFLNFGHLRRRLKGLAEWYGVPYREERLYSTICPRCGGKMEEQPNRRVKCAICSFETHRDEAPFYWAQKQYKLLVFSTESSNFILLMSFMEPAAAPAGRGPSARRRLGRQARSGLAPSEAGREAATPPRPARLRRTAQPGLQPPETAGR

SEQ ID NO: 27610 - protein, 249 aa, unknown
  TnpB Polypeptide
MLHRTADTRIGTITIQRDAVGEYWASFAIASDEPFYQKLEKTGSMQGIDLNLIDLINNSDGGTSENKRFYASSQHKLAKAQHKLSRRAEHARAEGRKLQDSVNYQTQRKKVAYLHRKIKRQRTDYLHILSKREVENQDFIAAEDMKVRNLKKNHHLAKAVSDASWRTFLTMLQYKGAFYGKTVVLIPPQYTTQTCSHCGYIMKGEKHLTLSDREWDCPNCHTHHDRDRNATQNILNKGLQIAKDVGLCL

SEQ ID NO: 27611 - protein, 392 aa, unknown
  TnpB Polypeptide
MGGEDIVYKGIQLRIYPNRKQQKQIIENFGACRFVWNQMLSMQIKRYKNNKESRFIGGYDMDYLLPQLKREYPWLKESNASSLQDSCQTLASAYQGFFKHTSGYPKFKSRKYHRQSYKYKQNKKGIRYINNHYLKLPKLGYVRYHGQYSIDKIKSATIERVPSGKFYCVLLIEHENQIQFDKTNKVIGLDMGLADLIIDSDGLKKKSIDFDKNIAQEKRVWERKLARRRSQANNIIAGMRQDKALIVPELDDFKNYVKARQMVAKINEKIANQRKDYLNKITTQLVKEYDVIVIEDLKVSSMLKDHRLARSIANQSWREIRRQLEYKCEWYGKQLIVVSPYKTSQVCSECGYDDGKHELDIREWDCPQCHYHHDRDVNAARNILNKGLKEIA

SEQ ID NO: 27612 - protein, 388 aa, unknown
  TnpB Polypeptide
LKFSSSISKVKVSRMNKAYKFRIYPNAVQTVMFAKTFGSCRFVFNRYLGKRLEMYKSNEKTMNYYECAKDLTGLKKETEYLWLKEVDSISLQSALENLETAYQNFFRRVKNGEKAGFPKFKSKHNNHRSYTTKAVNGNIRLKDGYIALPKIGAVKIKLHRQIPENHILKSVTVSKTPSGKYHASILFEYEQIIEPVEIKTTVGLDFSMTELYVDSDGNEAHYPRYYRRKLEKLKRMSRSLSKMQKFSNNWYKQKRKVAILHEKITNQRKDFLHKESRKIANSYDLVGVEDLNMKAMSQAFNFGKSVADNSWGMFRTLLKYKLEEAGKYFVTIDKWFPSSKTCSKCGFKKDDLTLSIREWICPDCGAVHNRDHNAAINIKNEAVRMITA

SEQ ID NO: 27613 - protein, 351 aa, unknown
  TnpB Polypeptide
LPRSSAATRSTWSSCSSTSSIAVSRGRGRGMVARGSQRGTGRVGPSCSWQQCAAPWSGSQRQTDLRPHLRQEAPTSAGDRARFSCMRGVPRDRGTDFHPQRRHPCRPADDHGGFVGVDRGLSAFAVAATAARTEVGRFPAPKPLQRSMLRLRTRSRAASRTQPRSSNHAKAVRRLSREHARIANMRRSFLHEVSSQLVKTHDRLCLEDLAVTNLLGNRKLARAISDAAWTELARQLGYKAVWYDAELVVCNRWAPSTRTCSQCGQVAPPMTLSERVFCCHSCGLVADRDCNAAANLAAFTEAVGMAAAQAPDRRVSGRMTNASGGEGAGHRDSDGGTGPGEGGTEAHALMA

SEQ ID NO: 27614 - protein, 416 aa, unknown
  TnpB Polypeptide
MVERYVVKAVMFRLKDRVHDIALPDELIWLMKTFRLMVNEAIRAGLQLGLTSRYAICKAVYKGFRKDYDVYSQYIPSACEVAGAILKNHRRGIRQGKRPERPFVKRLCLKCENQTYRLDRETGILDLPIRAREHVTIKLIVSPYHRKYLDDEKLKLGSLTICPDKVIVAFRKDRPVKGLIETVMAFDTNERSLDGVFVSNDDEPLPLRYNTSEVPIIQERHQRRRKRLQQKKAHDRRTKKRLCGREGKREHDRIDDRQRKVALRIVSIAKVRNSAIVLEDLTGLRYKKRSKELTRRLSSWPRRQLHKFICEYAEWNGVTIIFVDPWNTSNDCPVCGRRNVNSRKDGMFRCECSWECDQHISASLNIYLKAIASNEEVARAVKGRPDASWHDLMMSPYDLFTGARMEASRMSGTVGG

SEQ ID NO: 27615 - protein, 504 aa, unknown
  TnpB Polypeptide
MMVTFQTRLSLDLASDALLSSYASLFGRVIRTLFAKTCAGHRLNDLKTPFLKEFGITARQFNACRVGLEGKISSAKELNKKRISGLADTLAFLEKKIRLIKDKRRRHQKKRRLFILQTRLKNLQNREEKVSLCFGSKKRFRSQFALTENNFSSHEEWKAAWQKARESEIFILGSKDETAGNQSCVAAQNGDGTLNLRLRLPHTLSTFGKYLALSNLRFAYGHQEILTALENRKAISYRFKKDRKGWLLFATVERSLPPLVSDQKKGAIGLDLNAAHVALVETDRFGNPLFKKTIPLLTYGKDRNQTLALMGDLFVKLTAYALKVQKPLVIENLDFQKKKRELRESSSKQARMLSGFAYSAFHHNLSSKAARQGVELKTVNPAFTSVIGRVNYSHRYGLSIHHGAALCIARRSYGFSERPPRFPGKIPDGKGGHVALSLPARNRGKHVWSRWRALSKRLRAAHAERFRAKRNRSGDPPIAGSRDGKPSEVAGAIPARESLAALLG

SEQ ID NO: 27616 - protein, 233 aa, Microcystis sp.
SIRFDDPTIKPFPVTDKAIGIDLGISSIVITSDGDKVSNPRHFKKHYRRLRKAQKSLSRKQKGSKNREKARIKVARIHARITDSRKDHLHKLTTQLVRENQTIVVENLAVKNMVKNPKLSQAISDVSWGEITRQLAYKCRWYGRNYIEIDRWFPSSKRCSNCGYIAEKMPLNVREWDCPICGTHHDRDINASKNILAAGLAVSVCRATIRPEQSKSVKAGAKNPSGKKQKPKS

SEQ ID NO: 27617 - protein, 499 aa, unknown
  TnpB Polypeptide
VSRTYPRRPYAAFSKDGEPLNLGEVLDGIRKDAELVAHYALKEMTEQNLALVTYFDRLKPSGAGYMMGLFLPGEVKERFRSGASRLEMLFRERVVSTLRSWVARSEVVNQTYSGYVSSGWKRTVRDSKPESLDLRLSLSATNNQYRRIHVQEDKIVLDLVVQGRWVTLHFPTPPQLLEDGCEPGVPDIWIDDQNRVMFGFHGKTDPGRPEFSSRYVIGVDVGVTNPAAYVVWDVEKKEVVEKSLLGQRARSLSNKIKRAQVQVSSLKKQGRDKEAVSHRRHLSNRRKELSILVAQEIADAAWRYGNALVVFEDLSHIGNTMKFGRWFRGEVLRRTRDMVEADGGRVLKVNAAYTSKRCYVCQSDLDMSDYSQPRCTTCGVTHHRDLNAAANIAQRVNVKKACQTRRRHATKTKRVRRSKCHVRPLKHPGTKNRPTPKAPQNRPRTHTPTRAKEVSKGMCPAESRVSAVDHDTWFQTTSGTTNPKENQATNMVDVVYLKE

SEQ ID NO: 27618 - protein, 501 aa, unknown
  TnpB Polypeptide
VSRTYPRTPYAAFDKNGEPLELGEVLDGIRRDAELVARYALREMTEQNLALVTYFDRLKPAEAGRRMGLFLPAEVKGQFRSGSSRLERMFREQVVTNLRTWAARAGVVDQTYGDYISAGWNRTASNSKPSSMQPRLSLSAADKHYRNMSVTLERISLEMVVQGRWVTLHFPTPPQLLERGCEPGVPDIWVDKNNRVMFGFHGTVDPGRPEFSERYVVGVDVGVTNPAAYVVWGIEKKRVVERSLLGQRARSLNNKIRRTQTQVSALQRKNRSEEAVSHREHLSNRRKELSILIAQEVADAAWRYGNAIVSFEDLSHIKNTMKFGRWFRGEVYRRTRDMVEANGGRILKVNAAYTSRKCHVCQSDLDMGDYSQPRCTVCGTTHHRDVNAAANIAQRANVKKACQTRRKHSTKTKRIRRSKYHSKPLRHPGTKNRPTPKAPQNQKKTHTRPSLQFKEVSVRMCPADNRVSAVDHDAWFQTTSGTTVPKEDLSINAVDWVYPKE

SEQ ID NO: 27619 - protein, 438 aa, unknown
  TnpB Polypeptide
MPTQALTYICKIKNHDQVAQALDRMGLACSKLWNVALSHTRQVWEETGKIPSAYETQKAVQEHYWFKQLPTHTAQAVTQELWRAYKSWFGHRRNGNPQARPPGYRKRNGKVPLSTVTVKRYGFRLEGTTLRLSRGRAVASETGERHLYLELALPPGAETEQVKQVRLVSRNGVWKVHLICEVPVVETSPGKGVAAIDVGIINLAAVVYSDGSTELYSGRGLLTQEYYFAKEIARCKPSGWRPGSRKRAASKRERKLYRKRTQRRRQFLHTISQRIVDTCVEKGVGVIILGDLKGIRRQANGEARSHGKVGNLKLHAWPFDTFAQMLRYKAKLAGITTVQVSERNTSRTCSVCGRLAANSRVHRGLHVCAECGATVNADINGAINILRKYLHGLDKSTGVPVRVGSSLLPTIWPEPSVNRYDWGKPNPLVHVAGSAPAA

SEQ ID NO: 27620 - protein, 438 aa, unknown
  TnpB Polypeptide
MQLTQKIRIFPTAEQQEVLWKLSVRCRLLYNFALAERRKTWEKTGKSVSYTKQQNDLPENEEKYPAYRWVYSKVLQMVLKQLDADYKSFFALWKKGDKNARPPKFKGRKYFTTMTYNESGFKVEKGRVAFAHFYNDVPLEFQIPGKFEFDKVYQVSIFKNGDDFYISITYEKTEKPYIDNGLYQAIDLGITKIITAVNIHGKFLEVKNPRPDKYWQPKIEQVQSRRDHCKKGSNRWTCYHKKLTKMQNKCSNQIRDFQHKLSKKLIENTRANTIIIGNLNVKQMAESNGNDKKKDRSLHRAVQNNGYLSRFARFLTYKARLAGKRVIEISEKDTTKTCCVCGKKHDMKMQDRIMGCDCGNELDRDRNSAVNIMMRFLSQNASVDRLLSFKESILRQTGLATASYSQEALTLQGRVVHGTCAVVLVRYVLAYLISFYVA

SEQ ID NO: 27621 - protein, 374 aa, Pectinatus sp.
MILTKKVRLFPTQEQETKLWQSVGTARFIYNWTLAKQQENYKNGGKFIKDNDLRKEITLLKKDELSWLNDVSNNVAKQAVKDACNAYKSFFKGLVTFPKFKSRKKSKPSFYNDTSKLKVRTKKVLIEKIGWIKTNEQIPDTKYTNPRISFDGKYWYLAVGIEKAKATIKLTNQTIGIDVGIKDLAICSDGTKFNNINKTKTVKKLEKRLKRQQKQISRKYEKSKKKVGENRYQFSKTKNIIKLEKQIKFLYRRLSNIRNNHLHQVTNAIVKTKPSKIVIETLNIKGMMKNKHLSKAISQQGLHRFKTYLQYKCEYYGIELVEADKWYPSSKLCSCCGNKKDKLSLSERTYICEKCGAVIDRDLNAAINLSRYSA

SEQ ID NO: 27622 - protein, 195 aa, Thermoactinomycetaceae sp.
VISIQVVSLRETTFLSMNGTKDPAPWYFRQYEQKLAKAQRTLSRRTKGGSNWNKARIRVAKIHEKIVNARHDFLHPLSTKLIRENQTICLEDLPVKNMVKNHSLAKSITDASWSVFVTMLTYKAKWFGRTIVKVGKTFPSSQLCSACGYQHKEVKNLNLRSWTCPECRVEHDRDMNAAQNILKEGLRLLAVGTTV

SEQ ID NO: 27623 - protein, 409 aa, unknown
  TnpB Polypeptide
MKTYQIRLFPSSNQITKLEELSGIRKDIWNKLLEIEENKYKIDKTIFNKFDLNNLLPKLKEQYPEWKKLNSKAIQTIATELYGSYRSFFNLIKKDKTARPPRKNENNDYHTISWNQSGWIIKENNIIIINKIPFNYKSHLKIKELKIKEIRVKLINNKWLCDLIIDDEIKYEDKLNIKTKILAIDLGLVKLGTGVSNDGEVVVLKNKSKKINDYYQKQIANIQLKRSKTKKGSNRNKKLKSTLNKCYHKKNEQIKQTLHIQSKKLANMNYNTIVIGDLTVKKLMSKEGINKNKKGIRKSFHKSNITMFLQFLGYKCQANNINLTKIDEKWTTQLNCLTGKLFKEKVKLGDRNVKISDTIIIDRDLNSAINIMKRWFGNHIASMNEPLDFSSVIKKNNLFNETQQSLAVV

SEQ ID NO: 27624 - protein, 909 aa, unknown
  TnpB Polypeptide
VGRHLRFRIGIAVTSSVSETALRLRTRSRSLANLSKIQAGKTPSSTSNAGRRPSSAVGRGYARRHQPPNTLNQVRQHYFDNGEYLNYYDAYDQLKNNWNYEVLPSQVAQQTMKQVDRGFKSFFNLVEKKRENKYDADVSPPSYLPKDGFYTLEYPSQSFQVKDDHIRLGVPRAYRDEFECDLTEIQIPFTYDEVRDANIKRVQILPKADAQYFECRVLYEQDIEEVETIDGSWLGIDLGVDNLATCVDHRGHSFIVDGRHLKSQNRWFNKRLAHYQSIKDKQGIEGTTRRLERLHQKRRYVVTDYLNKTVRTITDYCIKNSIETVYVGDGKGWKQNVNLGDRTNQNFVQIPFDKLKQKLKHKLEARGIAFELVPESHTSKCSFYDEEAIEHHDEYIGKRVERGLFEASNRTRYNADVNGAVNMARKATGKPNSDLFKSEKGVERAVDAPRRISLSDMASTTLYTVPIVGIELGQMGVTVAGILLILVLLMGSGFFSSSEIAMFSLSPHQIDAMIEKGERGARAVKSLKDDPHRLLVTILVGNNMVNIGMSSIATTLVGIYIESASVSVLISTFGVTSMVLLFGESAPKSYAVENTELHARRVARGLTIVEKVLWPLITVFYYLTTIINKVTGGDSSIESSYVSRDEIRNMIKTGEREGILDEEERQILQRTLQFTDASAKEVMTPRLDMAAISKDATVEEAMQECMRAGHARLPVYAGSLDNVIGVFDIRELEDADYDTFADLEVEDVVNPTLHVPESKSVDELLSEMRENRMHMVMVLDEFGATEGLITMEDVLEEIVGEILVGDEEHPIEFVDDTEVVVRGDVNIDEVNEALDIDLPEGEEFETIAGFIFNRAGRLVEQGEEFEYRNATLRPERVEDTRIQKVRVTVDRDTANLTEEESSVGGGEPD

SEQ ID NO: 27625 - protein, 484 aa, Keratinibaculum sp.
MKVTVRGILINVNKEARFEINRLMTVFSSAQRYGFKRILEGKMRDGEIEKEISKKYGLNIRQSKDALKKAKQIINSQKILVKDSYDNFSNKVNQVENQLKKAKSQNRKNQLNKRLEKLKKKQQIYKEHIDNNTIPKVIFGGRKNFIKRCKNQISNEEWKELRDNNYYSRGDKTKKGNPNLRIIVKNNMTFLEISTLNKDKNNRAIKIQVPLYLPQKQSKKTGKINGRNYRQKVLDYLETGEAYKVELIKKEDKIYVHITIDESKIREYKEIYTKNNGIIGIDTNPDGFALTKVDKDGNYRWSTYLKQHELLYARTNRRDNLCGELAKEAIEIAKVERCAIAIEDLNFECDREVKKKFRRISGQFTYRNLLSKIETKAKREGIQIIKVKPQYTSKIGLYKYSHQYGLNVHESAALVIGRRAYGYNNEKVPKLLKDKLLTEEEKLTFNHKNNWKQWSIIDKNIKKKGGENPGFWQRNRKSILGIAI

SEQ ID NO: 27626 - protein, 288 aa, unknown
  TnpB Polypeptide
MEMSEVIISYKYRVYPDRGAERKLGEALDTCRWLYNRLLEEISKSKENGVQLKIYDTQNMIPSLKLEKPDLRNVYSKVLQMVNYTIWSNIKGLYALKENGQKVGKLRFKGKGWYKTLNYNQPGFKIDQDHSILKLSKIGNVKIKLHRPIDGKIKGVIIKKSGNKWYAIVQVEQEPEQQISSIKPVGIDLGLKAFAVDSAGYVIENPRFAEKSSDKLKKIQKKLSRAKKGSNNRRKIVAKLGKAYEKINNQRNDFLHKLSRLYVDDYDTICVEDLDVKGLKEKGNCKGL

SEQ ID NO: 27627 - protein, 397 aa, unknown
  TnpB Polypeptide
MLLGFKTELDLNNKQRTLASQHAGVARHAYNWGLAVCKKAIEEKQKVPTAIDLHKRLVAEVKKENPWYYQVSKCAPQQALRNLEAAFKSWRKGERKFPVFKKKGKRDSFYLEGRIRISGNKIKVPIFGWLKCHEQLPAACPKSVTISRRADRWFISFTFEAPEPKLPEKEEVVGVDLGINNLATCSNGRVFANPKPYQKAKKRLKRLQRQVSRKKKGSQNRKKAVKRVAKVHKRIADIRKDNLHKITTYLTRKHRVVVIEDLNVSGMLKNHKLAGSIADCGFFEFKRQLEDKAKLYSCQLAVVDRFYPSSRSRCGHQQKMPLHQRVFRCQKCGFGEIDRDFNASLNLVKWYQTTLSSRGSDACGDSSAGVGSSTRYESLNQEGSNKSSEIQLLLGVV

SEQ ID NO: 27628 - protein, 305 aa, Nonomuraea sp.
VAQLVKRAYKYRFHPTPEQAEELVRTFGCVRLVYNKALEERTRAYTEEGRGVSYTESSAALTLAKMGAPLDIVWSRPLPEGAEPSTVTVSRDAAGRWFVSLLVEEKIAPLPPVERSTGVDTGLTALLTLSCGEQIANPRHERRERRRLAKAQRALARKQKGSNNRAKARLKVARVHARIADRRRDYLHKVTTRLVRENQVIAQVIAVEDLAVRNLLKNHALARAISDAGWRELRRMLEYKTDWYGRTLAVADRFFPSSKLCSVCGTLQETLPLSVRVWVCACGAVHDREVNAARNMLLAAGLAES

SEQ ID NO: 27629 - protein, 360 aa, unknown
  TnpB Polypeptide
MKLTAAIKLLPTPEQAELFKRTLEAANAACDVISQTAWETKTFRQFDLHELSYTHTRAAFGLSAQLAVRCIAKVSDSYKLDKQTQRTFKPLGALAYDNRILRYTLATSTVSIWTLQGRQTIPFVCGERQRELLQHQKGESDLVFGNGEWFLFATCDIEEAEPIETRDALGLDLGIVNIATDSDGESFSGDQIEKKRQWYLNRRTQLQKVGTKSAKRHLKKLSGRQQRFQKDTNHGISKRIVAKAEHTKRAIAIEDLKGIREQVRVKGPQQRARHSNWSFGQLRSFLAYKAQRMGVPVVLVEPRNTSRTCRVCGHCEKANRKSQALFCCVSCGHSAPADLNAAQNIKWAAVNQPLVSAPPE

SEQ ID NO: 27630 - protein, 408 aa, unknown
  TnpB Polypeptide
VLHKVIQVRLYPTKEQQQQLAQTFGCARWWWNLALNKSIQVYKETGKGLGRSALNALLPGLKKAEETRWLADCYSQVLQATTLNLTTAYKNFFEKRAGFPKFKSKHGKQSIQYPQNVKIVDGNIQLPGNIGIVKAKIYRPIEGKIKTVTVSQTPSGKYLASVLIEVEGENPTTTTEGKIYGIDLGLKHFAVVTDGEKVSKYDNPKHLAKYEENLKRKQQKLARKQKGSNSRSKSRKVVAKVYERISNSRQDFLHKLSYKLVSDSQAVIVENLHVKGMVRNPNLVKAISDVGWGTFVNFLAYKLERKGGRLIEVDRWFPSSKICSHCFHQVSEMPLDVREWTCPHCGTHHDRDGNAAINIRSEGIRMLKADGSAVSAVGGEVRPKLGRKSKLRHSPLSTEAHVIVGTPI

SEQ ID NO: 27631 - protein, 152 aa, unknown
  TnpB Polypeptide
VLRKVVSKQGKQSAQYPQNVKVLDGIIKFTDNIGELKAKIQRPIEDKIKTVTVSKTPSGKYFASILFEGKGENTTTSEGKIYGIDLGLKHFAVVTDGKKVFLYDNPKHLAKHQKNRKGQQQKFTRKKDDSNSRRKYRKVVAKVYVGVACAWR

SEQ ID NO: 27632 - protein, 460 aa, unknown
  TnpB Polypeptide
MKGRLKLVMYTILTHHATIFIICVFYKMLVYEAKLKGTETQYRTLNEMLRTGLFIRNKALRYWMDNPGVNGMDLNKYCKVLADNPEFPWVKKLNSMARQSMAERAWLAISRFFDNCQKKVPGKKGYPKFKRSQTRSSVEYKTCGWKLSEDRKYITFTDKFGAGTFKLWGTRDLHFYQIDQIKRVRIIRRSDGYYVQFCINHKREETHELTGRMLGLDVGLNHFYTDSEGNQIENPRFLRKGEKSLKRASRQLSRKKKGSKNRIKAKNRLGRKHLKVERQRKDFAVKLARCVIQSSDLVAIEDLQVRNMVKNHYLAKSISDASWSMFRQWLSYFGQVFGVPVVAVPPQYTSQDCSNCGAVVKKTLSNRTHQCPDCGHIQDRDWNAAINILNKALSILSKMLKNPVGQTEINASGENDLCLVGETQLSKPTRRKRKPKEQSLESPAIFGTLTLRREDVNLPP

SEQ ID NO: 27633 - protein, 281 aa, Burkholderia sp.
MSSARGRHRFGDGAKPNDLTITRKNGEWFASVTLRVSAHTCARARTGDAHRGVDFGLNDWATFDDGETIANPRFVRNEMPRMADLQRQQARKKRGSIRYKQLGKQVAKVHERIGNLRREFLHKTTSRLVASCAVIATEELRTQNMSRSAKGTRDKPGRTVKQKAGLNREILSAGLGMAHNMLAYKAVEAGTRLHVSNTRQLKPSQRCATCWEIVPKTLAQRVHVCPHCGHTAQHGQNAASVALIDAHTPGTGVAARPKPLARQRAKSKSVTRAPATASQDA

SEQ ID NO: 27634 - protein, 404 aa, Nocardia sp.
VNVAKTQVKRAYKYRFHPTGQQERELLRTFGCLRLVYNKALEARTTAWYTEQRRVNYNDTSAMLTTWKKTDELAFLGEVSCVPLQQALRHLQGAFANFFDKRAKYPRFKSKKKSRASAEYTRSAFRYRDGRLTLAKMDEPLDIVWSRPLPVGAEPSTVTVSRDAAGRWFVSLLVETCIAHLPPTPSAVGVDAGITSLLALSTGEKITNPKYQQREHIRLVKAQRSLARKAKGSANRENARRTVARIHARVADRRRDYLHKVTTRLVRENQTIVIEDLNVAGMLRNHSVARAISDASWSQFRSMLEYKARWYGREVIAIDRWFPSSKTCSVCGLLLDHLPLHVREWTCRCGAVHDRDVNAAKNIVAAGLAVTACGGGVRPTRRSPARQPPVKQESQPVKVEIPRL

SEQ ID NO: 27635 - protein, 403 aa, unknown
  TnpB Polypeptide
MLRSYKYRLNPTKSQIRLMEMTFGCCRYVYNWALQTRIEAYQRDKKSISAVDLCKMLTELKKDKAFLYDVSNECLQQSIRNMDQAFVRFFREKNGFPKFKSKHRNRQSFKNINSVHVDLENSRIKLPKLGWVRFYANQTFNGKIGTVTVSKTPTGKYLVSILVDNGADLPSKPVIDPDKTVGIDVGIKDFAVLSNGDVYRNPKHLENSTVRLKVLRRRLARKQKGSARRNKARLAVASIHERIHNQRQDYLHKVSSKIVRENQTIVIEDLNISGMMKNHRLANSIASVSWSEFFRMLQYKSDWYGRNLIRIGRFDPSSRMCECGYIHRDLRLSDREWVCPECGAVNDRDLLAARNIKKFGLEKTNLIGQTKDISPVVNRVGDVEPSTLVGATKRQVISVQTGI

SEQ ID NO: 27636 - protein, 401 aa, unknown
  TnpB Polypeptide
MQIISSYGVELRKQNIPIRQTLEIYRSAVSYLIGIYVQVWEELAEIPDAKRRFNAAEHLVHTTKKNHACFDFDIRFPKMPSYLRRSAIQHALGTVSSYKTRLDLWEKTDGKSGKPKLVYENHAMPVFYRDVMYREGAEGKDEAYLKLYDGHDWKWSCVCLDHTDMEYLRKYWSGKKASAPTLEKRHRKYFLRFSYTEEVTLTKTPVKEQIICSVDLGINTDAVCTIMRADGYTKRLNIEMGRKIAGAIVKYAEENHADVIVFEYLEMQGKISGKKKQKLHLWRKRDIQKRCEHQAHRKGMRISRVCAWNTSRLAYDGSGNVSRNPKNHSICVFQTGKQYNCDLSASYNIGARYFIRELLKPLPVTERSLLEAKVPPVKRRTSCVYADLKELHLQMEILKAA

SEQ ID NO: 27637 - protein, 398 aa, unknown
  TnpB Polypeptide
MIRSSKLSTKFSNKEKKQNLISFIDEYKKVTQFFIDLLWNESGIPKLLPKEITNKATTWLSARAIQCAAKQASGIIRGTKKKNKERQYVYEKLIEKRLFKKAKKLKSFITKNEKPNIKYLNPELDSRFVKTNFENKTSFDIWLIFSSLGNKLKIEIPLKKTKHFNSLNGKIKTGIRLNAKHVTFMFESEVKKKVKGNTIGLDIGINSVATTSNGQFKEKNEHGWTFKKIINKLNRKKKGSKGYNKIQQQRTNFINWNINQLNLKNVKTLKLEKIKNVRKGKRTSKFLNRWTYSEIKSKLELTCEKLGVQVEYVSPTYTSQRCSSCGWVRRGNRKGKEFTCNQCFNTMDADVNAACNIAANLRPIGTKERLLHKNRTGFYWDEVGINFRGQERIVPATQ

SEQ ID NO: 27638 - protein, 432 aa, Halorubrum sp.
MADTATVTKTLEATLVDPTAHKERKLRETVATYQDALETAFDSEASTQSEINDLVTGYDLTSYAKDALKQYVPQLEYSYDADELAEDHPVRFTHRGLQIDHSSTRAHEFCWRVPQAGYGTGFWIPLRINPDQKPLWFDLLDGTVSAGEFRLTQHRASWTLHVTVKYSVEDPEIPDDPTHIGFDVGESTLLTGCALQHDAPTDPFLFDGSRARRIRKEMYTTLKRLQERDSTEWRIEWRFEHFQNALTDIVEKSTTRAVEYACQFDSPVIVLEDLSCIQEQLDHGTHMNRRLHSWAFAQLISRLEDKALEASVPVEFVPPAYTSKTCHECGHIGSRSSQAEFKCTNPDCWVTEYQADINAAANIAHRADPWGESVPWKTGHNDSPRNGCPRDRALERREKNRNNRQMTLSEYSSETSSSNETSPVGSTTGDSK

SEQ ID NO: 27639 - protein, 384 aa, unknown
  TnpB Polypeptide
  misc_feature (330)..(363): Xaa can be any naturally occurring amino acid
MILGKKVRLYPTKEQEQKLWQSVGTSRFIYNWTLARQEENYKNGGKFISDNDLRKELTSLKKTELNWLNEVSNNVSKQAVKDGCEAYKKFFKGLADRPRFKSRRKSKPSFYNDTSKIKVKEKSVLIEKIGWAAIKKNSIPLDTKYTNPRISFDGKYWFISVGIEKEKPIIELTTESIGIDVGIKDLAICSNGMTFKNINKTRVVKQLEKRLRRLQRRVSRKYLKNKEGSKFVKTSNIIKIEKQIKLLHRKLANIRSNYSHQATNKIVKTKPSRVVMETLNIKGMMRNRHLSKAIAKQCLYEFKRQMQYKCEFNGIEFVEADKWYPSSKTXXXXXXXXXXXXXXXXXXXXXXXXXXXXXXXXXXLLSLASRGRVLLARRKLIGWL

SEQ ID NO: 27640 - protein, 254 aa, unknown
  TnpB Polypeptide
HIEFDPKNVKTINIKKLKNGLWMMNITIDTATKEEKAEIKQLKKAKKYDEFIFNKNVDYLSKLKTPKIVAIDLGLIHYIATSEGETEEAPKFLRHSEKKLRMVQKAYSRKVKGSKNQRKAKSKLTKLHYKIACQRKDFLHKLSFRVVKQNDLIIVEDLSIKNMVKNHKLAKSISDAGWGMFKRYLKYKAKKYNKVYEEVNPKGTSQTCICGAIVSKTLKERVHKCPVCGVVEDRDIMSAKVIKSRSEYIKYLVA

SEQ ID NO: 27641 - protein, 231 aa, unknown
  TnpB Polypeptide
  misc_feature (6)..(39): Xaa can be any naturally occurring amino acid
LPGTSXXXXXXXXXXXXXXXXXXXXXXXXXXXXXXXXXXNAIGLDLGISSLLITSDGEIEDNKKSTYKYEEKLTKLQRQLARKQKGSNNFHKQRIKVARLHEKITNIRKDNLHKISSRIVKENQFIFSEDLNIKGMVKNHNLAKSIHDVSWYELTRQLQYKSEWNARIYHKVDRFYASSQLCNVCNYKNEEIKNLSIREWDCPKCSTKHNRDINASINILNKGLEDLGKVI

SEQ ID NO: 27642 - protein, 287 aa, unknown
  TnpB Polypeptide
QAFFRRVKNGEKAGYPRFRGRGRYDSFTYTQSGFSLDSDRLTLSKIGDIKIKLHRPIEGKIKRLNVRKMPTGKWFVSFLVETDTPLELQKTGLSVGVDAGIKNFLTLSDGNYVPNPRFFVTEEKFLAKVQRKLSKLEKGTPERAKALKAVQRVYERISNKREDFIQKVSLNLVRNYDLIIFEDLNIKGMVKNHKLAKHITDVAWNKLVTITSYKAEWAGKRVELVNPCNTSQMCSGCGQIVKKELSERIHSCPYCGLTLDRDHNAAINIMRLGLQSLRITDRCPSLQ

SEQ ID NO: 27643 - protein, 266 aa, unknown
  TnpB Polypeptide
FYSRYDKIRFTETHVRLEKIGWIKLAERNRIPVNSKYSNPRVKFDGLNWWLTVGVEFEPVQDNTPYSEPIGIDLGVKDLAVINTGEKFKNINKSKKVKKLEKKLKRLKRKVSRKYEKGKEGNRYRKTKNIIKLERLIRKTYQRLKNIRMNYIHQITTKLVKTKPEYIVMEDLNVSGMVKNHKLAKAVQEQTLKEFRRQVEYKCEWNGIRLIIADRFYPSSKMCSECGHILEKLSLSTREWVCPVCGTLHDRDLNASINLMKYPVTA

SEQ ID NO: 27644 - protein, 291 aa, unknown
  TnpB Polypeptide
AVKNQAIRDAKSVYRKYKKTDKLPILKKPVCIWNNQNYKINDYLSFPVFINGKSKIIKVKVMLTDYQKQQLNNKLGTLRITKKSGKWIAQIAVDVPEKQNNDKNIMGVDLGLKVPAVAVTSNGKTKFFGNGRQNKYIRRKYKSLRQKLGKAKKLKKIIQIGNKEQRWMKDQDHKISRQIVNFAIENNVSIIRLENLTNIRSTARTSRKNEKNLHTWSFYRLAKYIEYKANLEGIKVEYVNPQYTSQRCPYCGELNKVRDRKYVCKACGFSTHRDRLGAMNIMLAPVVDGVA

SEQ ID NO: 27645 - protein, 293 aa, unknown
  TnpB Polypeptide
KVKRQFKPLGSIAYDSRIMTYKPNNVVSLWCIGGRQKIDFVCHNPDYIPYIKGEADLVYKKGKFYLFQTVDVPEEDVEDVEEFIGVDMGLLEIASLSNGKNFSSKKLNDYREKRQKVRSSLQSKGTKGSKKVLKRLSGKERTTSTIINHTISKQIVQLAKSEGKGIAIEDLKGIRFSASNKGKKFRTRVGKWNFNQLRSFLTYKCLLNGVKLVVVPPAYTSKTCSNCFHIGNRQGKKFTCNNCNSVFDADENAAKNIALLGASANSPEKPSMLYCQVHSFLGLKPIPSLCVGG

SEQ ID NO: 27646 - protein, 312 aa, unknown
  TnpB Polypeptide
DIHSHVLQVVVADLDKAFQAFFRRVKRGESPGYPRFKGKNRFSSFGLKEYGNGFKIDGRRLRLHSVGRVAVRWHRPLPSTPKAVRIIRKADGWYAMFTCEVEPQALPPTGREVGIDVGVASLATTSDGEKFANPKWYRAGQKKLRRLQRSLSRKQVGGKNREKARQAVARHHLHISRERQDALNKIVYKLIQEYDFIAVEDLNIRGMVKNRRLSKSIMDAGWGYFKERLFSKAAEAGRIVVEVNPANTSQTCSSCGQLFPEKINLSVRTVRCSCGLELDRDVNAAINILRLGRSRWALTSAAAGVAQEAAGL

SEQ ID NO: 27647 - protein, 372 aa, unknown
  TnpB Polypeptide
AMKTYKFKLYQHKRNRYLERQINLAGIIYNHCIALHKRYYRLYGKSLNVYALMKHLTKLKKLPKYSDWNSLGSQAIQDIAQRIDKGYKLFFRNREHGIKSSPPSFKKVKKYKSFTLKQAGYKLYSDNRIKIGGRTYKYHKSREIEGKVKTVTVKRDSLGDLYIYVVCETSNNEILPRTGKSVGYDFGLKMFLTASDGKNIVSPEFFKQSQKQIAKLNRELSKKQKGSNHYKQAKRRLAKAHKHLANKRRDFHFKLALNLAGEYATICIEDLNIKAMQKLWGRKISDLSHSSFVNILKYQCSKTGSTVIEIPRFYPSSKTCSACEFVYEELTLGDRKWTCPNCGILHDRDLNAAINIHRVGASTLGGETVRPT

SEQ ID NO: 27648 - protein, 251 aa, unknown
  TnpB Polypeptide
  misc_feature (210)..(243): Xaa can be any naturally occurring amino acid
MMQAFKFRLYPTTTQAIQLNQHIGSCRFVYNWALDQKIKTYEQTGKSISRFDLNKLIPTLKASNEWLGEVNSQSLQGMTKQVESAFTRFFREKTGFPKFKSKKNPIQSFPVPQHYTVNFENNTIKLPKIEPIKAVLHRKFEGEPKTATVSRTCKGHYYISILVEDGKELPVKEAFTEPTTVGIDVGIKDFAVLSTGEKVENPKYLKNSLXXXXXXXXXXXXXXXXXXXXXXXXXXXXXXXXXXFYPAQEQQ

SEQ ID NO: 27649 - protein, 304 aa, unknown
  TnpB Polypeptide
VSESYKTDRSVKHTFKPHGAVVYDQRTLTIKGADRVSILTLNGRTLVPIVYGEYRKLDQNRIKGQADLIYIDGIFYLMLVIDLPEEKQIENPDGTLGVDLGIVNLATTSDGVRFSGEKCESVRKRYSALRARLQSVGTWDAKKHLKRISRKERRFKKDTNHCISKQIVATAKGTNRAIALEDLKGIRSGSTVSKQLRSVLGKWAFYELASFIRYKAQLLGIPVIFVDPKYTSQQCSVCGFISKENRKSQAEFVCQACGYAENADINAAKNIALRAAVNQPIALRSSNQVEERWKGKPTSLGVGS

SEQ ID NO: 27650 - protein, 211 aa, unknown
  TnpB Polypeptide
  misc_feature (121)..(154): Xaa can be any naturally occurring amino acid
MTKQNKAFKFRLYPNKEQKELLAKTFGCVRFVYNKMLTERKETYEKFKDDKETLKKQKLPTPAKYKKEFPFLREVDSLALANAQIHLQNAYKNFFEGRAEFPKFKSKKHKQSYTTNMVNGXXXXXXXXXXXXXXXXXXXXXXXXXXXXXXXXXXLKMGCLPLLLHLSAFLQAQEPSSLMPCRGITGIPISAYLNAIFKISLFTLIPPFQKS

SEQ ID NO: 27651 - protein, 287 aa, unknown
  TnpB Polypeptide
  misc_feature (10)..(43): Xaa can be any naturally occurring amino acid
MKIHTSRRNXXXXXXXXXXXXXXXXXXXXXXXXXXXXXXXXXXIGKVKMAEELRSSGKIMSYTVSEEAGMWFVSVQVELEEPPHPCVAPDSVVGIDVGLATPATASDGTVCTAPAKLKRLEKNLKQRQRKLSKARKGSKNRSKLLRRKQKVQHRINNIRKDATHKFTATITKSHGVDVVEDLDIAEMKSKSPAHLRRSLQASMMGEIIRQLSYKALHLIKAPRYYPSTKRCSKCGNIRDSVGLSERTYICPVCGLQIDRDLNAAINLMNVGAVYPELPVECVASNAC

SEQ ID NO: 27652 - protein, 267 aa, unknown
  TnpB Polypeptide
FKDGIKVKLHREVKGKIGKMSITKTPTGKYYVSIFTEQEVKELPKTNKQVGIDLGLKDFVITSDNKKYKNNRYTKKYAKQLKKAQQHLSRKQKGSNGFEKQKLKVAKIHEKIASCRLDTLHKVSKELVETYDLISVEDLNVKGMIKNRKLSKHIADASWGTFVRFLEYKADWNDKQVVKINRWYPSSKTCNVCGWINQELKLSDREWTCKNGHILDRDVNASRVILKEGLKIYRQGLSITKVEDKSDYLGSTSVETRSPSHRFSVGG

SEQ ID NO: 27653 - protein, 212 aa, Bacillus sp.
VSLLVETEVQELPKTQSYIGMDVGLKDFAILSDGTTYKNPKFFRSLEEKLAKAQRVLSRRIKGSSRWNKQRVKVARIHEYMTNARKDYLDKVSTEIIKNHDIIGIEDLQVSNMLKNHKLAKAISEISWSQFRTMLEYKAKWYGKQIIVVSKTFASSQLCSGCGYQNKDVKNLNLRKCDCPSCLTHHDRDINASINLKNEAIRILTARTAEIA

SEQ ID NO: 27654 - protein, 384 aa, unknown
  TnpB Polypeptide
MRVRDELPALKNWWTALDNVYSTVSQHTVEQIHHDITNLGKSKDKGFKVGKLNWKKPREFKSFTYRQRGFELDKKSGPRDRGLLTLKKVRGETLDIPIKLHRDVDPDDIKHVTVKREASGAWYAAFTIEQDTPEKPDPDDINPADTVGLDLGILNFVFDSDGRAINRLDLSDDRERLVREQRNLSRKRYESRNWEKQRETVAQVHLDMRNKKRDYYHKLAHFYTTNYDAVFVEDFTIRGLLQGPANARNKHEVGWGNFKDILDYHGEKNGCHVEEVSAFNTTKECHKCGVGVEKELWVREHSCPSCGFETDRDYNAALNVKRRGLQKLGLGQSELTSVETGVPAETDDTRFVEVSANAVVEAEIPTRETGSPTLNERAAVVASE

SEQ ID NO: 27655 - protein, 190 aa, Okeania sp.
MSEIKIPVVVDTVIEVRIVPATACYIIEVVYEKTNQPQIHSTSVAGIDLGIDSKVALSTNKPGVKPLLINGKPLKSVNQLYNKRKAKYQSHLKGNRKTSRKIEALTYNRNRFVENYLHNTSKLVVEYLTTNNIGTVVIGKNDNWKQGANIGKKNNQNFTQIPHGKLIEQITYKCQLAGVKVIETARLLHK

SEQ ID NO: 27656 - protein, 459 aa, Micromonospora sp.
VRTIQAYRFALDLSPAQERAVLAHAGAARVAHNWALVRVKAVMDQRVAERTYGTPDELLTPAVSWSLPGLRRAWNAAKGDVAPWWRECSKEAFNTGLDALARALKNWADSRSGKRAGRPVGFPRFKSRRRSMPSVRFTTGAIRVEPDRMHVVLPRLGRLKLHECARKLARRLDNGTARIMSATVRRDGGRWHVAFTCEVERVERNPARPESVVGVDIGIKHLAVLSTGELVDNPRHLAAARARLRTLGRALSRKTGPDRRTGRRPSKRWERAAARVGSAHARVANLRRDGLHKLTTRLAREHGTIVVEDLNVSGMLRNRRLARHIADAGFAEIRRQLTYKTEWNGGRLLIADRWYPSSKTCSGCGTVKAKLALSEREYHCEACGLIMDRDRNAALNLAALAAEFDTAGSGPVAARGADQKTRVRGQVAVKREPGTASAGKTGTVLPQGRTTNRVLARAH

SEQ ID NO: 27657 - protein, 488 aa, unknown
  TnpB Polypeptide
MLIGRRYRLHPTPSQAATLAKWIGCVRAVYNAKVEEERYLAWLRRRSILSPSWSGVPEGERRGSVDQAFGHLKGSKAEKPWFHEVPAQLYRNAIVQWRQAWANHWQNPEHFRRPEKRHRGENDSIWVTRELFAVEGNGRFRIGTKTRALGIVCFKQHRRFRNPASVTISHGADDRWWLSLAFEDGIAVKGNPALLEELAALPADQRAATVVGHDRGIVRAVQTSEGACFCLDERKRRRIARWNRRIRALGKKLARQRNKASRRRAKTKRKLARTHSRIADLRRDHTHQVSRRLVNGTQGRVLVFEDLKLTNMVRRPRPRPAEDGGFTRNGAGAKTGLNRSLLDQALGKILLFSRYKAARAGKIVLTVPAHFSSQECSCCGHTSPANRKSQAQFHCEACGHTENADANASAVIQKRGLAALAQLLSAPGRGAFQLPVEATRPGVHLPKAKAPTKRVSEAPTSPPNRRQGECSFTIRPIGSSICGPGLTQ

SEQ ID NO: 27658 - protein, 488 aa, unknown; identical to SEQ ID NO: 27657
  TnpB Polypeptide

SEQ ID NO: 27659 - protein, 391 aa, unknown
  TnpB Polypeptide
MLVFEFKTYGKANQFQAIDQAIRTTQFIRNKAIRLWMDGQAKSWIELSRHCTLLAHEFPFANNLNSMARQAAAERAWAAITRFYDNCKKQVPGKKGYPTFQQDCRSAEYKTSGWKLSSDRKSITFTDKNGIGKLKLKGTRDLHFVQPEQIKRVRLVRRADGYYVQFCVSVERDDCVEPSGRAIGLDVGLNDFYTDSNGQTVDNPRFLRLGEERLKKAQKRVSKRVKGSNNRQKARIVLGKRHLKISRQRKDHAVKLARCVITSNDVVAYEDLRIKNMVKNQRLAKSINDASWYQFRVWLEYYGKVFGKITIAVNPAGTSQECSRCGAVVKKTLSTRTHVCRCGCILDRDHNSGKIILSRGLATVGHTGSYGLDPCNAWGEVTATKAGVILP

SEQ ID NO: 27660 - protein, 221 aa, Rhodococcus sp.
LGVDLGIVNLPVTTDDDPATLDVRWSAGAVTARRKKNAAMRASLQRVGTKSAKRKLKARRRKEQRFATDVNHQLSKIIVAKAQRTGRGIAVEDLSGIRDRVRLARQQRTQLHSWAYAQLRAQITYKAEMAGVPVAVVDPRNTSRTCSHCGYCDKANRVSQATFRCRHCQWAGHADHNAARNIAARGHRTYRAAQSTAPIAATPPAASGNVSSKPGPSGPSS

SEQ ID NO: 27661 - protein, 359 aa, Mycobacterium sp.
MGRFEVPEEWSVQAFRFTLDPTAEQSVALARHFGARRKAYNWTVAALKADIEAWHATRIETAKPSLRVLRKRWNTVKNDVCVNAETDAVWWPECSKEAYADGIAAAVDGYWNWQQSRSGKRAGKRVGFPRFKRKGRDADRMCFTTGAMRVEPDRRHVTLPVIGMVRTHENTRRIERLIRAGRARVLAISVRRNGTRLDASVRVLIQRPQQPSVRSPGSRVGVDVGVRRLATVADEDGAVLDQVPNPRPLEVALKELRRVSRARSRCTKGSRRYRERTIEISRLHRRVNDVRTHHLHCLTTRLAQTHGRIVVEGLDAAGMLRQKGLPGARARRRGLSDAALGAPPPRQRRPPTPSHPATR

SEQ ID NO: 27662 - protein, 312 aa, Acidimicrobiaceae sp.
LDARTEERLSGIGEANLTKLDWSAWSMNPLWNSVKDQVAPWHREVTSHAFRSGVTNAAVALKNYDESKKGVRKGESVGFPKFKNRHSRQSFTLIEFTKSWSWISEDSRHVRLILPRFPADSRITRRREQLQWMHTTESLRRLKKKVSSGEWTIQAVTISFVGGRWRASFSIRQIVVPTPPAVRQVGPIVGVDLGVKHLATLTVPVVGLSDICGHVTNPRLLDPKSDRIARLDRQLSRRVKGSKNSEKLRLRRQRLAARVTRTRNLYLHRLTAIGWKLRDHCARGPRCGGHGKEVEEENRKDVKAFDSGRGLL

SEQ ID NO: 27663 - protein, 255 aa, Actinomadura sp.
VKLVMQVKLLPTPEQAAALDATLHTCNALANRVSAVAYEKRVFSRAGLQKLVYAELKASGLSAQPALHVIRKTADAYTTLHAQIDAGLLGGQGSRRRRKAESKPATFRPDAAQPFDDRCLSWQMDARAVSVWTTAGRVQGLAFTGKPSHLKTLAEYRKGESDLVFRDGMWFLYATCEIPETDQFDPVDWIGVDRGIVNLATTCDGTNHQGEPLSKYRRAQARRRAELQKKKAAGSRSAARRLTRRKAREAATPRT

SEQ ID NO: 27664 - protein, 164 aa, Actinomadura sp.
MNHAIANKIVADAQRTGRGIALEELSGIRGRVRLRRHQRATLSTWPFHQLGAAIAYKARRAGVPFLEVDPAYTSQTCPRCGHVARGNRPGRDHFCCRRCGLAGPADHIAAVNVRQRARTAWVFVSMPDPSPHRGKVMRPQRGSQWRRGAQRSVNNRAANSAVHG

SEQ ID NO: 27665 - protein, 365 aa, Erysipelotrichia sp.
MQKRVKFRIYPNQTQKNLIAQTLGCCRLIYNKALAMREEAYKNGSKVGYCQTSAMLTALKREDEFAFLKSVDSIALQQSLRDLDKGFVNFFQKRAKHPTFKSKHNHRQSYRTLNQGNGIRIEGKRLKLPKLGFVKVKQSMPIGKINNATIERTPSGKYFAVLNVDFEPQMHINNAGVIGIDVGIKEFYTDSNGNTMENPKHLEEAMDKLAKAQRKLSKKVNGSNNRNKQRIKVARIHEKITNQRNDFLQKISTMLVSENQTICIENLSVKNMIRNRNLAKSMASVSWSKFFDMLEYKAEWYGATIVRIPTMYPSSQTCSQCGYRNKEVKNLQIRNWECPICHTQHDRDLNASINILNKGLEMLAI

SEQ ID NO: 27666 - protein, 413 aa, Marinobacter sp.
MKRLQAFKYELRPDGQQQRLMRRFAGSCRFVFNKALGLQKARYDQGEKKLNYAGLCKQITEWRNAPETVWLAEAPVHPLQQTLKDLERAYTNFFAKRADFPRFKKKGISDSFRYPDPKQIKLDQANNRLFLPKLGWVRYRNSREVLGTVKNVTVSQSGGRWFVSIQTEREVETPIPKGDAIGIDLGVARFAAFDRPLPAFEGDDHLKPLNSFKKHQARLRKAQRALSRKTKFSNNWKKAKAKVQRIHAQIGNARRDYLHKATTTISQNHAMVCIEDLKVRNMSKSAAGTADQPGRNVRAKSGLNRSILDQGWFEFRRQLDYKLQWSGGWLVAVPPHNTSRTCPACRHVSAENRRTQSLFHCVECDFKENADTVGAINVLRAGHARFACEVSDAARSPAAGTHRSDSGKALCPA

SEQ ID NO: 27667 - protein, 398 aa, unknown
  TnpB Polypeptide
VGFKRIVNSNKPDFLKPRLALSVTDKNYRTVRLNNSTVELGMVVNQRWVTFIFKAPVRFREPGVRVIAPTISIDDNNRVMFNWHLEIPVERAPFSDKYVVGVDVGIVNHTTAVVRNIVTGEVVEASFMNQRVRSLENKIKRTKTQIAALYRKNRLDEIESHRKALSNKRKELAILIGQEISDLSWRYGNALVAVEDLSHMVNTMKYGRWVRGMIVDRIKNMVESNGGRVMTVPSAYTSRKCHRCSEDLDMTDYHTPLCQTCQVGWDRDENAAANIASKLQDKDRYKKSCQTRKKHASKTRRRNSKGSLRPLKHPLKKTGPTPKAPQNSPKPNNNHRVHHKHTVIKTHEGGVFPVMCAAGWTLPNDNATVPAVAPEKASDNQPHDYSTDSHRLNDLCVP

SEQ ID NO: 27668 - protein, 401 aa, Methanothermococcus sp.
MMRTYKFRIYPSRKIRETIEEHLNICRYIYNYLLEQKTKNPKLNKKDTQKLITEHKKEYPELKKVHSKVLQMVNNKLWGNLKALGKLKQNGYKVGKLRFKSSKNHYKTLEYNQSGFKLDCKTKRLKLSKIGEIPIELHQKIKGEIKGVIIKKELTGKWHAFFQVEEEPKPLPKTNKVVGIDLGIDGYAIDSDGNKFENPKFIDKTLDKIKKVQKNLSKKVRGSSNYKKTKLKLIKVYDKLNNQKNDFLHKLSRYYINNYDKIVLENLNIKSMVKNRKGQKTLNRHILDGSWRKFINLLLYKAEGAGREVILINPAYTSKKCSNCGCVVDNLKLSDRVFFCPNCGWKIDRDYNASLNILKSGLGESAVPAEGRPLLRVIPYIKVISGLDSPMSQEAPSVREG

SEQ ID NO: 27669 - protein, 243 aa, Methanothermococcus sp.
MPSFQVEEEPKPLPKTNKVVGIDLGIDGYAIDSDGNKFENPKFIDKTLDKIKKVQKNLSKKVRGSSNYKKTKLKLIKVYDKLNNQKNDFLHKLSRYYINNYDKIVLENLNIKSMVKNRKGQKTLNRHILDGSWRKFINLLLYKAEGAGREVILINPAYTSKKCSNCGCVVDNLKLSDRVFFCPNCGWKIDRDYNASLNILKSGLGESAVPAEGRPLLRVIPYIKVISGLDSPMSQEAPSVREG

SEQ ID NO: 27670 - protein, 363 aa, Thioploca sp.
MKQVENLEGKVNYRLLKSKVAQQNLRRLDKNFKSFFRCHQDFKKNPGKYKGQPKPPRFKQKQYDNLIYDYQAFSVKDEAVFLEKGLSFPCPKKLVGKTIKQVEIVPKYRYFEAIFVYEDDETVAKVAPNDKVMAIDLGLNNLATCVTNGAVKPFIVDGRTLKSLNHHYNKRFAKLQSHLKKTRDRQWSNRLQRLTERRNARIADYLHKATRQVTDICVENGIYRVVVGDVVKSLNQINLGKKTNQNFVNLSLGQFINKLRYKLELHGITLEVTNESYTSKASFIDGDSLPKKYEPSIPHTFNGKRVKRGLYRSQNGTTINADANGAYNILINCYPKFSFSELTKKVGEGILDWLHPYTRLKIG

SEQ ID NO: 27671 - protein, 285 aa, unknown
  TnpB Polypeptide
VRIVPKKSCYEVQIVYKIPKTLKNLDNKRGYSIDIGVNELIALTNNFGEQSILVRGRPVKAINQWMNKKISILRSVQTKGMTFKNGYEVPETKEMTRIRRKRDNVVNNYFHKTSRYVIERCLNSRAKNLSIGYNSGWKKDLLNTEDKKMGFKQRQNFAYIPYLKLIQMVQYKAELVGINVSIIRESHTSKCSAVDFELIDHHNEYMGIRGVPRRGRNKKKSIKNGESEFKTYQTRGLFRTKDGYLIHSDVNASYNIGRRAFPELFNEHTLSKKDMLKSPISVQIV

SEQ ID NO: 27672 - protein, 431 aa, Thaumarchaeota sp.
MNHLWKSLRQKRTIAIRYEPSAQLLSYLSDMRDATRMALAHALVDAKLNDGKIPSPIRLRKKTRPWFVSSMPYARHHINPVCSKAVALLRAYRKRHKRLGLPSLEKLSMRIDGELFKMTKDEDDGQVTIRVTVRPHEYEFIKFRPNHKKWDAYSKGRLGEITLTDSRLLLTFVKGLATKPLGDQLVGVDLNFATVDCTPIDGGHQKMMIRHPVTIPTGNIEHIQDSFSRRRRRLQLHVRNPEKRARKLEETRGRQRCRVRDALQKLTTDLVRRYPNATFVFEDLKHIKSRQPKKGRRFRARLNRWPYRMAQMMVDYKSPMATLYPTPRGTSSKCPACGGKIEHPTRIPSDIRWRVSVCPTCGVNYDRNRLASLAIACRGARLCGRPFSVSEDASWHLVRDEYLWHGPVAGETAMIAGGTEEGANAPKEVLS

SEQ ID NO: 27673 - protein, 391 aa, unknown
  TnpB Polypeptide
MIFGVTLVSTTHINHHDGMLLTYRYRIKDATAGRHLERQSRAVNQVWNYCGDVHEAARRHNRRWPSAFDLINLTSGSSKLLGLHSDTVQAVCKQFVTSRDACRRRPRWRGRYSLGWIPFQAPRPIRVGASSITFLSRRYRLWMSRPIQGEIRCGSFAQDARGRWYFNLQVQVPTDMAHGTREVGIDLGLNSLATLSTGEKITAPRVYREYERALAAAQRAGRKHRVRAIHAKIANCRKHFLHGLSARLVRDNRRICVGNVNSCGLAKTSLAKSVLDAGWSQLRSQLRYKAMRHGAQYVEVDERLTTQVCSACGKRGGPQGRKDLVVRDWICGGCGARHDRDINSAVNILISGRNVGLQETEIPSAFQGDDVKSRASASDPGCDRTCATTAP

SEQ ID NO: 27674 - protein, 382 aa, Escherichia sp.
MRRFAGACRFVFNRALARQNENHEAGNKYIPYGKMASWLVEWKNATETQWLKDSPSQPLQQSLKGLERAYKNFFQKRAAFPRFKKRGQNDAFRYPQGVKLDQENSRIFLPKLGWMRYRNSRQVTGVVKNVTVSQSCGKWYISIQTESEVSTPVHPSASMVGLDAGVAKLATLSDGTVFEPVNSFQKNQKTPARLQRQLSRKVKFSNNWQKQKRKIQRLHSCIANIRRDYLHKVTTTVSKNHAMIVIEDLKVSNMSKSAAGTVSQPGRNVRAKSGLNRSILDQGWYEMRRQLEYKQLWSGGQVLAVPPAYTSQRCACCGHTAKENRLSQSKFRCQVCGYTANADVNGARNILAAGHAVLACGGMVQSGRPLKQEPTEMIQATA

SEQ ID NO: 27675 - protein, 396 aa, unknown
  TnpB Polypeptide
MVFGMAKLSITLKLPFYRLNQSKATEFERLTAVNTQVANDLLQVDKKERIKLTSAAFKQVEIGSMWINQTIRNTNAKTKAKYFKRMWLEVNNQGYEVLKSGELYTLSFSLYRGRKGRIPLQVHSASQNQVLDKIVKDDVKLGSLKLCKSKKGIWYALLSVSMEVPDASEVKGWIGVDRGQNNIAVAALSKGFGKFWNGGRVKSLRRQFQRARSSLQAAKQLKEVKRLEQRERRIMTHINHIISKELVQFASDFEMGLRFEDLSGCRQTMKQKKKTKSDAGNNRDAWAFYQLELFTRYKAIRAGVPVESVPAPYTSKSDHRNGVIGKRNGNWFKGFDGYRCNADWNAAQNIGQWLGFSCPLSLQKAVATMVIADSSGEVNDSPLTSEAFKRVDLSLV

SEQ ID NO: 27676 - protein, 391 aa, unknown
  TnpB Polypeptide
MIKTHQVKIEPNEHMRRQIEQLFNYRRYCWNQALGLWNDMYDESLIMNDKQRRPNGSTVRNELVRNKDDWQYALSSRVLQQAVSDLEKAWKNSFNPNMPDHSKPRFKSKKNYKPTFTTDSARLVNGKLILDKPQGVNKADWYGIRLREKVRFDGTLKICTITQKSDGLYANLIMETTNESHLPAKQDVAGVDVNVKRFNYNGGAVDIYPDSLERYYQRITYYQRTLARKRLANPRNFRTKRYTAVKTKLRRDYQKVSELQNDILQKFTSDIVQNYNEIHIEDLNVRAMTMSKRMGKNLHRSLFGRLSAVLNYKCQWNDRKLVLVDRFYPSTQICSECGYRKTDESYGGKQTLSGDSIYHQHQIYRCYECGAILDRDENAVKNIINFKQNAG

SEQ ID NO: 27677 - protein, 389 aa, unknown
  TnpB Polypeptide
MLREFCHLSKNLYNHANYLVRKAFTDTKEYLSYAKVDKLLKADTEYPDYRAMPSAQAAQQTLRLLDKNWKSFFAANRDWKAHPEKYKGCPKLPKYKRKDGYSVLIMTNQTCPLKDGILCFPRKFNGFTVKPLFIENKAAHFQQVRFVPNSDGITMEIIYEIPDTEALPDNGRYASIDIGINNLAAVATNTEAGTFLIKGTPLKAMNQFYNKQLAKKKSICERMNGRHSSQRIAQLTGKRNRKVSDYLHKASRRIIDWCTANQITSLVIGQNKGWKQDIELGKKMNQHFVQIPFANFIQMLQYKAADAGIKVVVTEESYTSSTSFLDGELPTKDFYNKKRRIHRGLFIANDGRKINADINGAFQIMKKVFPNVYADGIEGAVSRPAVVAL

SEQ ID NO: 27678 - protein, 398 aa, unknown
  TnpB Polypeptide
MLIRKAYKFRLYPTPDQTKRLAVQFGHARFVYNHFLHERQEKYAKTGVGSNYQSTARELTKMKRSEEYAWLREADSQVLQQSLMDLEKGYANFFAKRARYPRYKSRKSKESIRYPQWVKVSTEEKRTSLPKVGWVKTVYHRAIQGEIKNVTVSRTKSGRYFASFQVEMEQLEPEYEGNSNGIDLGLREVVVLADGRKYSAPRYLIRAEKKLRRLMQGLSRKCPGSQGRERQRQRVARVHEKVTNQRTDFLHKLSRELVEEHSSLMIETLNIRGMIRNRRLAKGISDAGWGELVRQFEYKGKWYGCQVVKVDQWYPSSKTCSNCGYLIEGKLDLEIRTWRCPQCGCEHDRDINAARNLKKQTTVGTTGSKASGVHVRPDRTMNHQARTMKLEAPQLAAE

SEQ ID NO: 27679 - protein, 384 aa, Nonomuraea sp.
MVQLRYNVRLYPTAGQRQALARAFGCARTVFNDGLRMRREARENGQPYISDGDLSKQVITQAKKTPERAWLGEVSAVVLQQALADLNLAYRHFFASITRKRKGPKIAPPRFRSRKDNRQAVRFTKNARFAITPGGKLRLPKIGDVPVRWSRDLPAEPSSVTVIKDAAGRYFASFVVETADRSLPEVAPEVGIDLGLTRFAVLSDGRKIANPRILRRAAKKLRKAQQALSRKEKGSVNRAKAKAKVAKAHAQVADTRRDFAHKLSTQIIRDNQAVYVEDLAVKGMARTKLAKSVHDAGWSRFVNMLEYKAKRYGRTFARIDRWFPSSKLCSTCGALQDEMPLNIRSWTCPCGAVHDRDVNAAINSLAAGRAERLNACGKTVRPAA

SEQ ID NO: 27680 - protein, 435 aa, unknown
  TnpB Polypeptide
MGYYKAVKVRLDPTPRQERLLASHAGAARFAYNAGLAHVKEAIDAGEKPDWSFYSLVNWWNANKNSLAVGADGATWWQENSKESYCRALESLSKGLSNWSKSRRGDRKGRKVGFPKFKAKGRATPKFAYGTGCFGLVKDDPKALKLPRIGRVHCMENVAALVGDAKVKRMTVSRRAGRWYASLTVERDDTPAKRPTKGGAVGVDLGVKTLATLSDGAVIENPRYLKKSERKLKRAQKSLSRKVQGSNRRAKARMKVARLHAHVANQRLDAMHKLTTRLAETFSDISIEDLHVAGMVKNHHLANSIMDAAFGEFRRQLEYKTTRTGARLHVVDRWYRSSKTCSGCGSVKAKLSLSERTYKCDSCGLTMDRDLNAAINIKVAGSAPETLNAHGETVKRGNRSGCATLVSVKCEPSGGESRVRLGADSRKAVLQATVR

SEQ ID NO: 27681 - protein, 303 aa, unknown
  TnpB Polypeptide
VHSQVLQNVATRLDLALLAFFRRVKAGEKPGFPRFRSYGRYDSFCYPGSGYKVDGGRVFLSKIGHVKVVIHRPLEGKVKTCCVKRTATGKWFVTFACEVEDAPLPTVDSAIGIDVGLASFATMSDGTEVANPRFFRKDEQALAKAQRRLSKEPKPARGERATPARRKRRKIVARVHERIANRRKDFAHQESCRVVGAYDTIAVEDLSVNRMVHNHCLAKSITDAAWSMFSSCLSYKAENAGRRFIAVNPAYTSQDCSRCGHRQKLTLADRMYRCPCCSLEIGRDHNAAINILTLGLQSLGANP

SEQ ID NO: 27682 - protein, 372 aa, Brevibacillus sp.
MQMTMTAKIKINPTSEQIALLRNTLDAYRTGCNYVSSLVFETKQVAQAKLHKQSYGILRSVYLLRSQMAQSVMKTVIARYQSLKSNGHDWTKVLFKKTEYDLVWNRDYSLTQGLFSINTLSGRVKVPFETKGMEQYFDGTWSFGTAKLVNKYGKFFLHIPMTKEIPEASEYTMNQVAGIDMGINFVAVSYDSQGKSLFFNGRSIKDKRSNYKHMRKQLQEVGTASARRKLKRIGQRENRWMTDVNHQVSKALVTRYGANTLFVVEDLTGVRHATERVKIKDRYETVSWAFYQLRQMLEYKALMAGSKMIAVDPRYTSQVCPKCGHTEKDNRNKKKHTFCCKTCGYRSSDDRIGAMNLQRKGMEYIAEVTAQA

SEQ ID NO: 27683 - protein, 465 aa, unknown
  TnpB Polypeptide
MSEITYTQKRDYKEQFQKKAENARRRKETMDTKVFQLKIQENKCNEVQEKFLNHLFIEAKWYYNDCVAFGKSSEENKPWKNDYKKKSVVHYDKDKNPIESEFQFLSGASKQEINKRIGISCKSMCTNLKRGNIKHTKGLQFKSEFNSVPFRQFNNSWKFKGTKIKLQNCSKPYKVRGLEQLLVDGIEFANLSLIQRPSGYYLQITCYVPKEKKEKSEKNYQTVGLDFGCENTLTGYIEETNKSFKLDYRCEQPENQIRVQRKLSRRRVRNFSNRSNKGLRLQRLNRKYYEHQSNQKKDKTNKIIHNLKSYGKVVLQDEMISNWQKSGHGKKISNGILGRLKNRLKSLPNVFVLDKSYPTSKFCFDCFSKNDELKVWDRTYKCPNCGSIMDRDVHAAKNMIAFYHLSELVPMEYRNPKRLKKFILELLGDIKKRVEINSSESIDDIIVSCIQELSGKHEATSLNSW

SEQ ID NO: 27684 - protein, 379 aa, Geobacillus sp.
MFCKEGGKVMHKAYRFRLYPTRTQAELIHQTIGCCRFVYNHFLSEWNQAYETTGVGLSYNECSKRLTALKQTLPWLKAPDSTALQNALQQLAEAFDRFFDGTANAPRFKSKKHPNQSYTAQCNCPKKGRPSIEVDGHRLKLPKLGWVAFAKSREVEGRILSATIRRNRTGKYFVSILVETDIPSLPPTDKQVGVDLGLKHMVVLSTGEKVEHPQYWRRYEEKLAYWQRVMARRKPGGSNWRKARLKVAKLHEKIANCRNDFLHKLSTRLIRENQVVCVEDLRVQNMQKNRKLAKRISDSAWGRLLRMLEYKAKWYGRTLVRVGRTFPSSQLCSCCGRRHVEVKSLDIREWVCPNCGAEHDRDENAARNILQEGLRLLSS

SEQ ID NO: 27685 - protein, 375 aa, Geobacillus sp.
MEREYRRTKTTERYVESQKKRGESMPTITLRLELHNPTKVKQDMYERMTEVNTAFANWLLNHPKLNQATSKLFKEFSSQRFPSAVVNQTIREVKSQKKKQKAKKFRTFWCCFNNQNIKVEKKGAFYTVSFPTLEKRIGVPVVTRPYQEAWLNRLIHGTAKQGAAKLYKKRKKWCLAIAVAFEVKPRHETKVMGVDVGLRYIAVASAGTKSLFFKGNQCAFVRRRYAALRRTLGKAKKLHMIRKIGRKESRWMKDMNHKISRQIVRFALANGVGVIRMEDLAGIRKRAASAKEAGRNLHSWAFHQLQTMIAYKAEMAGIRVERVNPTYTSQTCRCGYRDKGNRNGIHFQCQKCGYTIHADLNGAINIAKAISGFAA

SEQ ID NO: 27686 - protein, 476 aa, Lactobacillus sp.
LFFKFGIRTLVCYNEIIKIQGDIIMAEPWVQEKRSRSKTFAFTEKLKVTLSCTQILQHERALVVQDQLFNYSLNYMYKTYGRKHIDRNIPTGLNRHKLINLIIKKFLNELYQLQRWNVKALSLSSHNAQLFLQTLIVNFAEYQKLLRAGFKWSDKIKFQYKQNIIKDKRGKHKNPHHNSWYKRGHLSFNLKSRTRAVEIQKNTLIQILSAHVIKVPNFGILHLHQNATEYNFTDIKIIKLKRKGDGTYQLQLVHVQPKAKSNIQAEPAIGVDWNMTNNVAYHDSNNKQYQLPQEVIAKADRFEQHINKLKRKRSLMHGRTKNITKKIQKVSAKRAQLLNEAYRKIAIELVGSIQVLVMEKLGAKDMRKSTGKAKNRKLALLKPYEAKQVIQNRAFKQGVTVVEVDAYKTSQVEYGTDVVDKHPLSQREWISPITGKVIDRDHNAAQNILEWGLHPSHHIKVKIFPKVTAAMVSSII

SEQ ID NO: 27687 - protein, 403 aa, unknown
  TnpB Polypeptide
MKSITITAKIKLYPTSEQMVILNKTLSVIRDVLNFVSAFVFGREGIRYLELDHALYYPVRQQFGLRSQMTQSVFKTVLAKYKSMKSNGHPFSKVSFRNFEYDLVWNRDYSISGQSVSLNTLSGRLHIPFELKGMEHWFLAGGRFGTAKLIRKNRKYYLHIPVTLEAENRNILSHIVGIDLGVNHLAVSFDDEGNTRFFSGRTVKEKRAKALALRKRLQACGTKSAKRKLKKLREKETRYVTAVNHAVTKALISQYGAGTLFIIEDLTGIRTATEHVRLKSRYVMVSWAFCQFREMLEYKAALSQSEVLATEPKYTSQSCPVCGNTTKANRNRRKHEICRVYVYTRPIEADRLKLQKEEVESVMWIDYDECLSRIENHTLKNCLNVKELQMVKTWWTEGGRKFR

SEQ ID NO: 27688 - protein, 289 aa, Shigella sp.
  misc_feature (264)..(279): Xaa can be any naturally occurring amino acid
MRRFAGACRFVFNRALARQNENHEAGNKYIPYGKMASWLVEWKNATETQWLKDSPSQPLQQSLKDLERAYKNFFRKRAAFPRFKKRGQNDVFRYPQGVKLDQENSRIFLPKLGWMRYRNSRQVTGVVKNVTVSQSCGTWYISIQTESEVSTPAHPSASMVGLDAGVAKLATLSDGTVFEPVNSFQKNQKKLARLQRQLSRKVKFSNNWQKQKRKIQRLHSCIANIRRDYLHKVTTTVSKNHAMIVIEDLKVSNMSKSAAGTVSXXXXXXXXXXXXXXXXRGAMSGQNQV

SEQ ID NO: 27689 - protein, 320 aa, unknown
  TnpB Polypeptide
MRTAYRCRAYPDTARQQVLNRTFGCVRVVWNRTLAARQARWRLKRTGTTYAQTDRALTAMKKDTALAFLTEVSSVPLQQALRHQHAAFGAFFAGRARYPRFKSRRRRQSAHYTRSAFTLRGGVLRLAKMTAPLRYVWSWPDVDVTALDPAMVIVAREPDGRWYVTRADFLHRASTRLVRQNDLIVIEDLAVKNMVRNRPLARAISDCGWGEFRRQLEYKCQRYGRQLVVIDRWYPSSKTCSACGHLLAELSLSTRHWACPNCGTRHDRDLNAAKNILAAGQAVTACGADIRHSGTPGVRSAVKQETRPARAGIPVLQGGE

SEQ ID NO: 27690 - protein, 200 aa, Mycobacterium sp.
  misc_feature (200)..(200): Xaa can be any naturally occurring amino acid
VVLAEHCRHARYVWNLAVEQHLHWQPGRCAPGYNEQCAQLTAARAEYGWLAAGAQTVQQQALRDFAQAMRNFFSGTHRRPRWRKAGVHEGFRQVGLKPHHVEKVNRRFGRVWVPKVGWVRFRLTRPVPEGVKSYRVTRDRARRWHIAFAHTPQPLPGPCDGSVVGIDRGVTVAAALSTGELLHAPGLSRGEAKRLKVLQX

SEQ ID NO: 27691 - protein, 631 aa, unknown
  TnpB Polypeptide
MVKEKLTEKDFYKVVKTSLKSVLKNPEVNLEKIQDAVVRTHKIITHSLQFLKLFLLDRYENGKFPVFDKTLIGCVIATVSVSGQKREFPKTKELMIELTSFYNNHYLPLTWDDVPSRFLLKGVLGYAEEEIITMYENNIKLHFVEYVERYVNVTWKKKFKIELIRKIAKTEEERQSMIRSLCNNLRKIKNDILNNDGSDYKSIKLYHEWITEQKKLILPNKTFEKNNIFYDLKCSPLDYLPYMIFMMKKVESEKCSIYNIFPMRTNIIPKYIKLDTSSLVQLLVSKGKKSNFNNKIKKYENVLWEFFFKTGKGIFKKHDYSFNHIILTDGVGVNIIFLRKDLIKKKKLPKQKSRPELYIDELGNYNYSDMKGKKIIGIDPGKEDLIYCVDGNSKESNRFRYSQNQRRKETKYKKHRKILQEMKKEKINDETVTEYETELSMYNRKILDIPNFKEYIQEKNFINYTLFDFYSRYLFRKLKFSGFINKMKSEQRMMKNFERKFGTPEEVVVCFGNWEQKKQMKFKEPTIGKGMRNVFRKYKYKVFLVDEFRTSCKCSRCHGGDCKKFMTREDPRPFKDGTLRSVHGLLCCKNINCSCLWNRDCNGASNIYVCAFNALNGIERPEYLRRTNQTT

SEQ ID NO: 27692 - protein, 798 aa, unknown
  TnpB Polypeptide
MSGKPKLMVFSGQVDVDWVSLDPAPPSPSADVQIPPHDPRPLRKTLPKKKPRQRKITANNKDKSPKRGQSTRRSVVSPSLDSGVSAETPDDAAETSDGVPADTTVDEVSDPKQEPHYHVVKTNLANIVTLHTDPCIIVDAVERVHKLAVHTLHFSKLYFMHLLDTGQESPKINGQLFTTIAKVIAENSRCVSNSRVSEATGQLKAKLLDFHIKHYRDTMVSEPLSTLHLGTPLDYVGVHMATVYENNVTLHYYDHLTLFLQSMYPVSPSASKEEKSAVNWLIRQRRKFVMNGAGLYLYVPETKADVEQKETVDPEPLPENDPLLWHIEYLLPNRPIAKGTVNYDMKMPGRWQDYLGCMVYMMKYVESLGHKIYQVFPLRSEMIPKHIRLDTSSIVDLLLSRDATKSIGSKKYHHKHLTEKKDFLWERFFKTDMRYFCPPHLSGPWRFDHQIETDGVSVSILCISKTSGKLASQLSPEEFKFAPKQAHRQSPTVYLDQLQDKSKLQGLKVVGIDPGKSDLLYCASATGERTADTFRYSQKQRNAERKSKKFKRKRENLIKTTLVEGKSVEQWLAELNQFNKKTLDFEAFKAYLAKKNELNFKLFGFYARPVFRKLKWYEHINQQRSEAKMLNRFEKKFGPPEETLVVFGDWCESGHMKYSEPTKGKGFRQLFRRRGYYEWLVNEYGTSKQCYNCQHSKGVNKKFLYVDKRKPWKSELENALSEMDEDSKQVLCHGLLRCESCKMPWNRDLNAALNIQRAALASLAGERRPAYLCRPQKEKNNDDAYTFGGEETCILAHK

SEQ ID NO: 27693 - protein, 417 aa, Clostridia sp.
MKRIKDDNYIEIGYKFRIYPTEEQKAFFEKHFGCVRFIYNYLLNLRMEAYRKDKTNISGYEAKKYIAKLKKQEEYKWLSEVNSQSLQEAAIDLDKAYRRFFGKLSAYPNFKKKRDEQKFKIPQNFYLRETKKGKFYLKVPKLKSDIKVNLHRKIEGATSQITISKTPSRKYFASFNCTVAKNKVFKRKDNKEDKTGIDLGIESFIITDKGEKIKTPTFLRLLERRLKTSQRSLSRKKKFSANFCKQRKKIAVIHEKIANQRLNFLHQLSFKITDENQTIYLEDLNVKGMIKNRHLSKSIADASWGEFTRQLKYKSKWRDKELIQIDRFEASSKICNVCEWKNEDLKLHQRKWLCLECKTIHDRDMNAAKNILKLGQDMSKVKPVEKLTAVFSFKKRQVGSVKQEPLPNIGMHGNLLP

SEQ ID NO: 27694 - protein, 465 aa, Conexivisphaera sp.
MDVTVFPAPEDNGTRAVVVRLLPNGAQGRKLRRLANAAAKLWNELNYGRRQEYFEARRRGLSQLESARRVDMRGTRKELVPKYTEILGAAAWEVERKNYEAWSSFRGLLKAKSKGRLPPWIHPAPPGYWKDEETGRRKLWIPVRHEMYTVDPEAKVIHISRYNLRLRFAGEVRWYGKQERMEIWYDDARRAWYASIAVKVGAETTRNGTKPPHILQGERRSIEVARPIGDKVAGIDLGVNILASVVVGDGAWIIYRGARLKEDYFHFEGRIAKLESEASRAKSAGDEKKYDRLWAEVRRLKRKWAARRTHLYRNLASHLIHELWERGVSAVYVGYPYDIVQERGNKFSVNIWAYRELVGAIEAKAGEYGISVYEVFERGTSSHCAYHEVEVKRGPRGVVTCPVGNHKLHSDLNGALNILRRGSGVLVEGNLRPLSFIVDHSGVAPTNSIASTKGGNAQNPGIYPT

SEQ ID NO: 27695 - protein, 428 aa, Conexivisphaera sp.
MKLWNELNYERRQQYFGARKQGLSERASLNYVDLEDTRKELVPKYTCVLGAAAWEVERKNYEAWSSFRGLLKAKSKGKLPPWTRNVSPPGYWKDEETGRRKLWILVRHEMYTVDPEAKVIYISRYNLRLRFAGEVRWYGKQERMEIWYDDARRAWYASIAVKVGAETTRNGTKPPHILQGERRSIEVARPKGDKVAGIDLGVNILASVVVGDGAWIIYKGARLKEDYFYFEGRIARLESEASRAKSAGDEKKYNRLRAEVRRLKRKWTARRLHLYRNLASHLIHGLWERGVSKVYIGYPYDIAQERGNKYSVNIWAYRELVGAMEAKAREYGISVYEVLERGTSSHCAYHEVEVRRGPRGVVTCPVGDHKLHSDLNGALNILRRGSGVLVEGNLRPLSFIVDHNGVAPTNSIASKKGGNAQNPGTYPT

SEQ ID NO: 27696 - protein, 251 aa, Conexivisphaera sp.
MFAYSFRLMDLGTGMYLAWGSSMRSKKEAFEEAMRMLGEVDVGMEKLITTSDGRYAPNPRVYERALGRLRRLQRELSRKQHDSRRWLKTKRRLARAHERVANTRRDLYLKLGKILAELYDLVVVEDIDVKGLVGKSYRPQRRRLHDVSFYELKTVIEYQMRKYGKDFAAVDPKDTSRTCARCGYVREDLKLGDRVYVCPACGWAADRDYNAALNILARTGRGPPAVPVELRTLPLPTEWQGGAMSREAPRI

SEQ ID NO: 27697 - protein, 307 aa, Conexivisphaera sp.
VDGEALSGAETLGIRVCVEGQYWRYLNGGWELAPEARIRLDPVEDRLVVYLTFEREVEEHEPKGFVSVDVNEDNVTALVDGAAYLLGTDVKKMTLGYDYRRRRIMERHSGSRRAMRRAIKKSGYHRRKEDARRKAARIIVTAAEERGYGIALEDLGERPNENMIRDVGNPQLRYRIFQAAFKGIQKEIEEEAMELGVPVVHVNPKNTSKMCPVHKAPIVYDGSRVGRCSVGGELWHRDVAATWNILRRALGGDGSSAPSLQGPSLDGRPMPLASTATHDPTVIARDLWARSKSLPLQITTVSGSLKR

SEQ ID NO: 27698 - protein, 403 aa, Conexivisphaera sp.
MPTVGLKFRAYAGEEMARALRARLDAACALYNALRSADAEAYRERGKGLTQYELRTLALRLRREHDEFRALFSQVAQQVADRFYEAKERFFEGLARFPRAKKPHRYYSLVYPQHGWKVLDVRPIRSGKKRMMRIRFSNLGEFDVLVHRDFPLDEVARVIVKMNRAGEIYVIFYVEGFNPYTPLPSTGKVGGIDVGIEKLIATSDGQYAPNPRIYERALVRLRRLQRELSRKQRGSRRRLKVKRRLARAHERVANIRRDLYLKLGKILAELYDLVVMEDIDVKELIGKSYRSQRRRLHDVSFHELRAMIEYQMRKYGKEFAAVDPKDTSRTCARCGYVREDLTLGDRVYVCPACGWTADRDYNAALNILARTGRGPPVVPVELRPLPLPTEWQGGAMSREAPRL

SEQ ID NO: 27699 - protein, 513 aa, Conexivisphaera sp.
VGAIRFAGESVALLSLHVYYWVDVRRSGDGTTTQPGTAGVGTIHGRHGRPAPEDNGTRAIVVRLLPNGAQERKLRRLADAAARLWNELNYERRQQYFGARKQGLSERASLAHVDLKGTKKRMVPKYTGVLGASAWEVERKNWEAWSSFRGLLKAKSKGKLPPWIHPAPPGYNKDRESGRRKPWLPVRHEMYTVDPEAKVIHIPRYNLRLRFAGDVRWHGKQERMEIWYDEARRAWYASIAVKVGAETTRNGTRPRHIVRGERRSIEVARPVGDKIAGIDLGVNILASVVVDDGAWIIYKGARLKEDYFHFEGRIARLESEAARAKSAGDEKRHNRLWAEIRRLKRKWTSRRTHLYRNLASHLIRGLWERGVSTVYVGYPYDIARDNGNKFSVNIWAYRELIGAIEAEAREYGISVYEVYERGTSSHCAYHEVEVSRSPRGVVTCPVGDHRLHSDLNGALNILRRGSGVLVRGNLRPLSFIVDHNGVAPANRIAPTKGGNAQDPGVDLGPQGPG

SEQ ID NO: 27700 - protein, 422 aa, Conexivisphaera sp.
VARVARTVVVRSARLPGRTLDILAELRGMYRDMVELLVQYAVENEMTSFMLLKAEKYGELRSMHPELPSHYAYTACQDAATRSKSFLRSRRRGRAKGRYPEVRRISMWLDDHLWRPDGLTAIRISTHRGWVKVELEPSRQYWRYLNGGWSLRPEARIRLDPVEDRLIVYLTFEREVEEYEPKGFVSVDVNEDNVTALVDGAAYLLRTDMKEMTLGYDYRRRRIMERNSGSRRAMRKVIRKSGYRRRKEDVRRKAARIIVGAAAERGYGIALERLGKRPNENMIRDVGNPQLRYRIFQAAFKGIQREIEEEAMELGVPVVHVNPKNTSRMCPIHRAPIVYDGSRVGKCSEGGESWHRDVAATWNILRRALGGDGSAAPSPLGPSLDGRPMPLASTGAHDPTVIARIRGRGASPCRRSPRFRAV

SEQ ID NO: 27701 - protein, 409 aa, unknown
  TnpB Polypeptide
VAFNNINVKLTEVIQVEYSFEFSKLCHLAKNLYNLANWYVRQEFFNLNNLLNYYDLDFILKNKQAYQILPSQTAQQILKYVNRNWKSYFRSLEEYKSNFKKYKKRPKIPQYKKKNGESIAIFTNQQCRIKQGCLNFPKSVNINPIKTRITERLKEVRIIPSGVKYKVEIVYEKEEKDLGLDKNHILSIDLGLNNLITAVNNNGCKPFIIKGGMIKSINQYYNKQLAYYRSIENKKGNFTDTKRIQKLHVTRNNKIITLFHRISKNVIEYCTLHNIGTIIIGYNHGWKQKINIGRVNNQKFVQIPFLKIVKQIEYKAKLKGIHVLTVNENHTSKCSFLDNEPIRKHQTYAGKRISRGLFKTSKGVLFNADVNGAYNIMKKAFPNAISVDGIEAFGLMPQIIQQNIIDSII

SEQ ID NO: 27702 - protein, 389 aa, Streptomyces sp.
MVTSVKIVTQVKLLPEAGQAAALRSTLRTVNELANWVADVAFAHDVPREYELRKHTYAHLKAQGLGAQAAQHVIKKVRDAYTTLHANLLGGNLGKPGSKRRIKAESKPIAFRPQAAQPYDDRCLSWQYDQQTVSIWTTAGRIKNVRFACSAGALKTLQQYRKGESDLIERDGIFYLVAVCEVPEAVPYEPDGIIGVDLGIVNIATTSTGYQAAGRRLNRYRKRQLALRSKLQKKRTRSAERRLKERRSREARHVKNTNHVIAKTIVTEAERTSAGIALEELKGIRQRVRLRKPQRVTLHSWAFAQLADFIVYKARRAGVPLVYVDPAYTSQMCCECGHTDKRNRVDQGLFICRNRGVVAHADRNASHNIAARGAVVWTAGRESRVPATP

SEQ ID NO: 27703 - protein, 383 aa, Streptomyces sp.
VRPCRVQRHGRAREDARKAGQPFPTAGHLSRKLITEAKQTAGRSWLGEVSAVVLKQSLRDAESAYRNFFASLKGTRKGAKLGAPRFKSRKDTRQSIRFTANARWSITGSGRLNLPKIGAVKVKWSRTLPATPSSVTVVKDAAGRFFASFVIDTDPAADAARMPESDRTIGIDLGLTHFAVLSDGTKIDSPRFLRRAEKKLKKAQKELSRKQKGSGNREKARLKVARAHAKVADARREFHHQPSHRLISENQGIAVEDLSVAGLARTRLARSVHDAGWSSFVNMLEYKAARYGRTLVKIGRFTPTSQTCHACGTVDGPKPLDVREWTCTACGTLHDRDRNAALNIKTAAGLAVSACGAPVGPGAVPAQREETGSHGFSTGNRAA

SEQ ID NO: 27704 - protein, 322 aa, unknown
  TnpB Polypeptide
MHTVQLLLKTSKYERHEIDRRFHALAHLHNVCVKHARKCMIRLQHDKRYAELRQLYNELVKKEKMSKEEKSQKKKLAKQLAAYRTEQGLSKASLEHYLKVCGKQFSKLLSSQQIQAEADRVWCGVERCLFGNGKELHFKKLMDFDTIGGKSNKNGARFDPDAMYVNWLGLSLKCYLPKSENSLSYVWESLKGKISYCNIKRLMFSSGWRYYAEIVVSGDAPTRVSIGTSTMGIDPGVSTIAGVSEDACVLEELAPNAIQYEKKIQKISQSMDRSRRISNPNKYNEDGTINRSNRDPWKYSKNYVKMCRLLKSLYRKKACLYR

SEQ ID NO: 27705 - protein, 244 aa, unknown
  TnpB Polypeptide
MRIRGCVKEGAELVYAAAWVREGRRGAALYVALAFRRKAEPIQPRRLLVVDLNALHNGVVVATVEERRVLRKGVLRPHIAKIEHLQRQIARLDSLCAEREDGAVCSRAASTKSRLWRLLRQWEDKTAKKVVEFAARFEAAIIADVPNDNSIRKLKEGKYSAEKKALLNFGRLRHRIRELAERHSILYREERLYSTICPVCGAKMEEMPDRRVKCQCGFEAHRDEVPIAWAVKRFHELITPLFPP

SEQ ID NO: 27706 - protein, 194 aa, unknown
  TnpB Polypeptide
MTYSVKIKHAQKLCAGRTPRLWAQAKGINDDIVVKTAQFIVDMAVRYDVDCIVMERLDLTGKKRGSRKMRLHLWKAKYVQSMVMEKAHRNLIRVARVCAWNTSRLAFDGSGKVSRGKEADLPSYSLCRFASGKQYNCDLNASYNIGARYLIREHLKTLPATVGQAVTAKVPELAHRSTNTLSTLRDGGTGESRD

SEQ ID NO: 27707 - protein, 482 aa, unknown
  TnpB Polypeptide
MSNEYIVRTVMSSIEFYDGAQEILEKLGIILGSLRNTDYVALVASERSDAQLTNKQRRDFLLSQGLNMRYADSIIGSNNEQLVLAKRTSKENITDWRKELSTIEKNLSKNPSGKKKDSLIKSKESIEKKISLSENKRPSVCFGGKSLFREYTRAIEQSTLSLELENDFKNKRMFLEFKGQSGYVSGNTMIHVDLEKQELTLNLTQSLAEQIGVEDTRIPLGVINIRNSGYLQNFSYCIENRVSTSYEFVWNRKKQCWRVHVSTRINQSHIEEKNKSKKTVDKNRVCGIDQNSGFITATIIDENGNPVEKRTWYHSSSKDVQDIVNELTLWCNRRGCYTIGIESLKSLSGKKRRSSGSFSGVNRVVSLIPYGKFRTCLLNKSDFSGIEIVEVNPYRTSKNTSQWKEDCFGITIHEKASYLIARRTLGLSISRKHRQRTSRCAVGVINNGLSLPNTTDDSTVNDYSTCSDRIPVENTRHLTRLE

SEQ ID NO: 27708 - protein, 367 aa, unknown
  TnpB Polypeptide
MLKAYRYRIYPNDEQKEQIVKTFGCCRFVYNQTLAYRKDIYEQEKKSVSKTDCNNYCNRELKKTYEWLKEVDKFALTNAIYNMDSAYQKFFKEHAGFPKFKSKHDNHKSYTTNFTNGNIAVDFENGKIKLPKLKKVKAKVHREFHGQIKSATISQVPSGKYYVSILAETEHEELTHRNQNIGLDLGIKDLCITSDGRRYENPKTIKRHERKLSRLQRQLAHKEKGSSNYRKKKKEIALCHEKITNTRKDYLHKISHEIVSENQVIVSENLQIKNMVKNHHLAKSISDVSWYELTKQLEYKSKWNGREYVKIDTFYASSQLCSVCGYQNSETKNLSVREWKCPVCGTKHDRDINAAKNILAEGLRQIA

SEQ ID NO: 27709 - protein, 415 aa, unknown
  TnpB Polypeptide
MHLTAKVKIYPTEEQQKVLWGLSDRCCSLYNLALAERKDVWKLERKSIKYVDQQNKLSEFKKKNPEYKIVYSKTLQGVLKKLDANYKSFFGLRKNGDVTARPPNFRSRNFFQTIVYNQSGFKIANGKISFSHNVNNVPLDFEISKVFPNIKQLEIYNDDPYHGKGDFYISVTYEVAVPEYVDNNQYQAIDAGITKIVTCINLKGKIHEIKSPRPDKYWQPKMDKIKSRRDRCKKKSRKWIKLHGNYRKMEKKKSNQLKDFQHKLSKKMVNNTKANTIIIGKLAVKKMAQSKKLKGKRKRAMNRSTQNQGYLSRFIEFLTYKAELIGKRVTKIDESYTSKMCYVCGKLHEMPLWMRNMECDCGNYIDRDQNSAINIMYNFLSQNALWTGFQQFAENLRQTGLPMSKRFLESFPQMT

SEQ ID NO: 27710 - protein, 357 aa, Symploca sp.
MEYCPSPFVDLAFVAFFQGLRKRPKFKSLRNYSGWTYPGSAGWKVYTNGKHGKVELRDLGLSIRMRGKVKQWGNPTTLTIVYRPSLNRWYASFTVEVPTVEAKYGSTSDLKYESIIAYDLGTSTALTTYDGSEYVELTNPRFLRNKEQEVKRKSKLRRRKVAPNRNKKIKPSNRWKKARKAVSRLQRKVSNQRLDWQHKVTSDIASRYDIGVTEQLRVRNMTRKAKKGSKRKKQKAGLNKSILDVGMSALNKMIGYKIEAKGGLLIVLDTKKVKPSQRCPNCGKVHKHWAELSSRHHVCDACGFEIERDQGSALVMYQVAINQQPGDGIALVNVDASSSTSKRRNCKDTGSLKQLHF

SEQ ID NO: 27711 - protein, 209 aa, unknown
  TnpB Polypeptide
VAVSAALSTGELLHCPGLRPTEQVRLRLLQRRLARARKGSRGRGRVKAAIARLKAREVDRRKDWAEKTSTGLARRFDLIRIEDLHITGMTRSARGTIDRPGRGVRQKAGLNRGILASGWGLLAHRLEDKASGRVQKVSPAYTSQRCSACGIVDGKSRESQANFACRSCGYACNADVNAAKNIAAGHAVTARGRSLLGERVNREPQLPPS

SEQ ID NO: 27712 - protein, 247 aa, unknown
  TnpB Polypeptide
MSRYRLEPTLAQETILARHCAHARYVWNLAIEQYSWWWPGRDHAPGYCVQAAQLTEARAAFGWLADGSQVVQQQALRDFTQAMASYFAGAHGKPTWRKAGHNEGFRNVAVKPAHVRRLSRNVGQVWIPKAGWVRFRWSRTVPAARSYRVTFDRAGRWHIAFAAIPHPHLGPGDRPGRRHRPRSGGLGGVIHRRTAALSRSAPYRTGTASAAAAQAGPCQEGLPRTRTGQGRDRAAQGPRSRPAQGLG

SEQ ID NO: 27713 - protein, 385 aa, Okeania sp.
MFSPVESTDLESISKKSKKIRIYLNCEQRKLLRQWIGVARFTYNRTVEYLQQPETKANWRAIKGDILSNLPEWAKSVPYQIKSIAVRDACIALREAKAKYSKTGQFQQVKFKSRKNPVQSCYVPKSAVSAKVVYHTKLGQIKFSESLPKSFGDCRLVVVRGQYYLCLPVDAPKHQIENKQRIVALDPGVRNFLTLFSENSFGWIGSNDMGRIQRLCHHLDDLISRLTKAKSKTKQRMKKAANRLRSKIRNLIDELHHKTALFLVQNFDVILLPTFEVSQMTIKSSRKLRSKSVRQMLNWAHYRFELFLKHKAVEYNKFVVDVSEAYTSKTVSWTGEILNNLGGKKVVTGNDGFRLDRDLNGARGILIKSVVEKFSTTLGDTPSVS

SEQ ID NO: 27714 - protein, 536 aa, Lachnospiraceae sp.
MTDEEYKKILKQFHKLSDRHILVVEADMPYSDVLKVVALSNKIRKAGNELVHLMRKNYDQLLRTKRYRKLLKLYGDTENKDKRKTLAKQLNKMQAEYNVTWDFCRTSMIPIGKKYGIDAVFALTKAEDIWRGMEKCLYGNGKTIHFSKYGELPCIRAKQINRGIPISVKNGKLQFKLGKVAFGIQINDRFQTDEVNAIMDYLANPEIIDNEAINILVEDAYCIDTYRPCYATLVPKIIRGKYRIYLHLTIESKAKPKYDKYGNLRHKYGKGMIGADIGTQTFAYTSDTEVGLKNLSERGNSIQTSERKERLLYRAMDRSRRAANPQNYNDDGTVKKGHKTWKYSNHYKKLKTKHAELCRINAVNRQLAINEDVNHLRSLGDVFVTEPKNASKLMKRARETTKNDKGRFNRKKRFGKSIKNRCPSGFQTTIEKKFKVTGGTYIEVPNNYRASQYDHTADDYIKKKLSDRLYKLQDGTEVQRDWYSSFLLYCYDCKTEDIDKEKCIASFGKQYNKEKALITWIKANKIRILNSGIKVA

SEQ ID NO: 27715 - protein, 515 aa, unknown
  TnpB Polypeptide
MSSVTRTISLRPYACRETKTGKGLDLHNILEEIRNDATLCAEEAFKHITVENLKKLSQHDGLKPAVAGRRMGIQFSVPGRGTGRSRFEWMIREYAVSQLRSWHERCKVSTGQNNKYVSTGYQRTANLNKPDFLKPRLALSVTDKNYRVIRQSGSTVELDMVVNQRWVTFRFKAPERFTEPGVRVIAPTISIDEHDRVMFNWHIELPVERSPFSDTYIVGVDVGLTNHTTAVVRNIETGNVVEASFMNQRVRSLENKIQRAKTQIKSLRQKGKYDEITYHRQALANRRKELSILIGQEIADLSYRYDNALVSVEDLSNMVNTMKYGRWVRGLTVQRITEMVESNGGRVMDVNPAYTSQLCHRCGTKLEANNYHTPTCSVCRVGWDRDENAAANIASKLKDKHKKSCQTRKKHASKTRRRNSKDATRPLKHPLKKMVPTPKAPQNQPKNRDTHNIHHKQTVVKKRGGGVYSVLCAAGQPLLYGVTVPAVAHTHGSDKKPHDYSYNGTSLTGCVYTKE

SEQ ID NO: 27716 - protein, 181 aa, unknown
  TnpB Polypeptide
MWFFDAQQVENGIKYPRSSKHIKRLYRKKQNAVKDYLHKVTRWLAEYCKKERISCVIIGDIRNIRKGKDIGHKTNQKFHGLPYNKLYIMLEYKLKLYGISLTKQEESYTSQCSPFSPEISKRYAEASNRKERGMYITDGVRYNADAVGAFNILRKYLSVSGKQKELSVTGLKNPEIIKVAV

SEQ ID NO: 27717 - protein, 405 aa, Mycolicibacterium sp.
MQMRYRYRIEPTPAQQQVLARVFGCARVVFNDALRVRDEAYRAGVKLSDSEIQRRVITAAKTTTERAWLSEVPSVALVQSVNDSRRAWRNFFDSGSGKRKGRRVGRPRFKSRKDHRQSFRLTRNGFSIRANNRLFVAKVGEVRVRWSRDLPSTPSSVTIIAEPDGQFYASFVVEVPASPLPVVEQEVGVDMGITRLATTATTDGGRSDIDNPKHLGRKLRKLRRLEREKSRRQKGSANRDKSRRKVAVAHNQVARARRDYHHQQALALVRDNQVIHVEDLNIVGMVKNRRLARAISDAGWGQFVRIIGEKADLYGRSVRTVSRWLASSKTCSTPGCGHRLDELPLQIRQWMCPACEVVHDRDHNAAKIILAAGRAERLNACGASVSPPNTRDARGDEAGSTPTAA

SEQ ID NO: 27718 - protein, 406 aa, Sulfolobus sp.
VKLRVKVDYSTYSALKEVEKEYREVLEEAINYGLSNKTTSFTRIKAGVYRTEREKHKDLPSHYIYTACEDASERLDSFEKLKKRGRSYTEKPSVRRVTIHLDDHLWKFNLDRISISTKRSRVFISPTFPKIFWRYYNKGWRIASEARFRLMKGNVVEFYVIFKRDEPKPYEPKAFIPVDLNENSVSVLINSKPLLLETNTKRITLGYEYRRKLTITGKSTKDREVRRKLKRLRERDKKVDIRRKLAKLIVKEAFEGKSVIVLEDLPRRTPEHMIKDVKDKQLRLRIYRSAFSSMKNAIIEKAREFGVPVVLVNPSYTSTVCPIHGAKIVYQLDGGDAPRVGVCEKGKEKWHRDVVALYNLARRAGDVSPVPLGSKESHDPPTVSGWLRAKSLHSIMNEHKMIEMKV

SEQ ID NO: 27719 - protein, 224 aa, Sulfolobus sp.
VVKDGKAFLKVVFEKPLENVEPKESVAVDINMSEIVVGKDNTHYIRISTRLHEVHHWKSLAESLQGKYPKRWRENKRILHRIRSFNQKARRISLEKWGSGFVEIAEDFGANVIKLESLKNLVKNVDRLPKEFRDKLYLMQYRRIQYWIVWQARKHGILVQYVNPSYSSVSCPKCGKRMEEKGYRWFRCSCGYENDRDVIAVMNLNGRGSLALSSAHQMRDVNPN

SEQ ID NO: 27720 - protein, 362 aa, Sulfolobus sp.
MRNKLIGSREALDNFQFVTINGRVLFNEKERVVRIARAYSQVVKSAIKPLFDGKSIDELTKEFYNVLPNYIYLETALKQAKTIVDGLLEREEEKDKILHAKIRKFWFASRGNKSDKGNRNVKFHVFQDHVEVKVKDPWGKWVYGKAYFGKEYLSLLHELEELASNKEEGYGAVISFEEKPMIHLQIPLWLYLKHFSSPKPVGYGLIAGFDLNSDRLNVVVVNEEGKVVTKKTWWYSDVTRPGFPKGKAMALRLNALSQALNFLSRIGVDYVVFEDLFLVKKRKFTRSKSGNRKITRFAKKQLLIHGVIKALRLGFNVILVNPKGTTNSEDHEKVMREKGFDRHTASAYLIALKGLGMLNDIK

SEQ ID NO: 27721 - protein, 360 aa, Sulfolobus sp.
MRNRIICSREALENFQFVTINGKVIFEDKDKIVRIARAYSQVVKSAIRPLFDGKSIDELTKEFYNILPNYIYLETALKQAKTIVDGLLDREKDKILHAKIKRFWFGSRGNKSDKGNRNVKFHVFQDHVEVKVKDPWGKWVHGKAYFGKEYLPLLHELEELAERKEEGYGAVVSFKHYPMIHLQIPLWLYLKHFSSPKPNGYGLVAGFDLNSDRLNVVVVNKDGKVVTKKTWWYSDVTRPGFPKGKAMALRLNALSQALNFLSRVGVDYVAFEDLFLVKKRRFTRSRSGNRKVSRFAKKQLLTHGVVKALRLGFNVVLVNPKGTTNSEDHDRIMREKGFDRHTASAYLIALKGLGMLNDIK

SEQ ID NO: 27722 - protein, 363 aa, Sulfolobus sp.
MMKSKLIGSMEALDNFQFVTINGKVVFEDKDKVVRIARAYSQVVKSAIRPLFDGKSVDELTKEFYNILPNYIYLETALKQAKTITDGLLDREDEKGEIIHARIRRFWFGSRGNKSDKGNRNIKFHVLEDHVEIKVKDPWGKWVHGKAYFGKEYLPLLKELEELSKRKEEGYGAIVSFKHYPMIHLQIPLWLYLKYFSSPKPNGYGLIAGFDLNSDRLNVVVINKDGKVVAKKTWWYSEVVSHGFPKEKARALRLNALSESLNSLSRIGVDYVVFEDLFLVKKRKFTRSKSGNRKVSHFAKKQLLIHGVIKALRLGFNVILVNPKGTTNSEDHERVMREKGFDRHIASAYLIVLKCLGMLNDAK

SEQ ID NO: 27723 - protein, 397 aa, Thermoplasmatales sp.
MVILKKTYRYRAYPSQSQKSALNRQMYLSKQIYNLLLEQSQKHFKETGKTFTKYDMNKWITKLKKKNPEFNELYSQVCQNIADRVSKAYQNFFRRIKERKHGKKIKLGFPRFKSYISSLTYPQSGFKPEKKKVFISKIGRINFVNHRDMEGKIKTMAIKQTKSQEWYITFSVENEETPLFSNNKPQVGIDLGLKEYATMSDGTKIPNPRISNKSIDKLKMIQRRLSNKNKGSKNRRRAKIKLARISEHIARQRDDFLHKTSHHLVNSYSLIAYEELKIANMMKNHHLARQITDVSWGNFIQYLCYKAENAGCRVVGVNPKNTSRTCSDCGNIQDIELSERTFLCQKCGMSKDRDLNASINILTTAGLAGSNASGDVVRPQLQEAAVVESGTILGGSR

SEQ ID NO: 27724 - protein, 397 aa, unknown
  TnpB Polypeptide
MKTIYKTYKCRMYPTAPQKELLDRHFGCVRFVYNYFLNDRKEQYKATGKSDNFFAQEKKLAVLKRNENFSWLKEVNSQSLQYALRCIDTAYANFFKGNARFPRFKSKRNRNSFAVPQHCSVVGGTIIIPKFKAPITIKASREILGKVNSMTVSRDCDGKYYVSILTEQEYEPIEKTNSIVGIDLGLKDFVITSDGNKYANHKFLSKYEKLLKRAQKHLSRKRKGSHSSEKQRRKVASIHKKVANSRNDMLHKVSTDLVRKHDVICCEDLNVKGMMKNHKLAKSISDASWGTFITYLQYKCEREDKILIKINRYFPSSQTCSKCGHVNKSTKNLSVRMWKCPNCGASHDRDVNAAINILNEGIKMNTSAGTVDYTGGGDVRLLSIRSGCLRSRKPTGL

SEQ ID NO: 27725 - protein, 439 aa, unknown
  TnpB Polypeptide
VLKTLKRTVRVESDFLNEWKYCVLREVEEYQKKIVNEMIEIILSEALLTTRKKLHERFYSDYKEKYPFLPSRVIEGAYVVAGRIVKSFRERKKEGLTRKDKPEYKKVLITIPNMINWKFNNVSVSVLTHKGWVDIPLRFTKQFIHYLYEGWMVSQELKLRLVGRKVHLWLTFEKEVESKEGNYISIDVNENNVTLAVFESFKLKELRRYEIGLGKLVINYSIRREEITKEHSTKDEVVKKKLRKLRERERKLDILRKTVKRITDLARSLKAKVVVGKFSSRSKGKMEGNKTAKLRHRIHQWGVIKFVDMLKTQAIDVDEVSESYTSSINPFDGEKLKKRKQIVEKVIKVFNPYLMTGSAHEGGGIKVLKVNARYLEGDEVLLERDSIAPLNIARKVDGRVLVFPSTSPNDLRVNVYDPLRGVPVAELEVIKSKEKLRHG

SEQ ID NO: 27726 - protein, 233 aa, Flavonifractor sp.
MGEKMEYSYKFRIYPNVEQRTLIQKTFGCSRFVYNHFLAQRIAEYTATGKAPTRFQQDKSLTVLKQEIDWLREPDKCALQNALKDLDSAYKNFFRSAKSGGNIGFPQFKSKRDRHKSYKTNSNIAISNSHVRLPKLGFVKCRVSKEVRGRILSATVSQNPSGKYFVALCCTDVEIAPLPSTGAVVGLDMGLKSFAITSDGVEYPNHKFLTKSTRKLARLQRQLSRKSKGSKRR

SEQ ID NO: 27727 - protein, 464 aa, Moorea sp.
MRKKGKTKTKKSQPLPLIRTDVWRLVTKPKEKKMMLMTVASNRKYLLPLVLIINAQWSNLGVKTSPGQVAVEKMIHLTASNLNHKHSYYQKIVSKYPCYRKFPSYLRRAAIADAIGIVSSFQSRYRSWQSGNRFRHTNKPHRLTVMCKKYPALYKSKQVLYGKDYQTVALKVWSKKDWIWLNNIVVKNKGKNRHLGSGNKLNSPSLVVNKNKCKLSMPVQIKPVKKEETDYVCSVDLGINNAATAAIVGRDGTARTFINPARGIDYRNKLDIMIAKKAKQTSNLTGQKLLKGLCGGIKRKSANQNLEISRKVGRQIVQFAKKHKVKVIVLENLWGWKAKAGKKRSLMKQKFHLWCHRKIVELITDKWTELGGDVQIINSKYTSAVAFDGSGKVRRSPTNYSLALFKSGKQDHADLNASYNIGARYWDCLIVEDKNFSRVYDSKSSDGILRTPIVLGTLRNLAVS

SEQ ID NO: 27728 - protein, 402 aa, Shigella sp.
VKRLQAFKFQLRPGGQQEREMRRFAGACRFVFNRALALQNENHEAGNKYIPYGKMASWLVEWKNATETQWLKDSPSQPLQQSLKDLERAYKNFFRKRAAFPRFKKRGQNAAFRYPQDVKLDQENSRIFLPKLGWMRYRNSRQVTGVVKNVTVSQSCGTWYISIQTESEVSTPVHPSASMIGLDAGVAKLATLSDGTVFEPVNSFQKNQKTLARLQRQLSRKVKFSNNWQKQKRKIQRLHSCIANIRRDYLHKVTTTVSKNHAMIVIEDLKVSNMSKSAAGTVSQPGRNVRAKSGLNRSILDQGWYEMRRQLEYKQLWRGGQVLAVPPAYTSQRCACCGHTAKENRLSQSKFRCQVCGYTANADVNGARNILAAGHAVLACGEMVQSGRSLKQEPTEMIQATA

SEQ ID NO: 27729 - protein, 469 aa, Nocardia sp.
VGNVGGVCDGGVVTEQVTVLQGYRFALDPTPDQEAMLRSHCGAQRKAFNWGLGLVKANLDQRDAERSYGLAEEELTPLVGWSAYGLRKRWNQTKDIVAPWWRENSKEAYSSGLANLAAGLSNWTKSRAGNRSGERVRFPRFKSKRSAMSCRFTTGAFGLADTDRRHVQLPRIGQIRTHESTRKLARHIERGTARIRSATVSFTRGRWFASFSVEVERTQRAPTQPDAVVGVDLGITHLAVLSQPVPGFSDACGMVANPRRLERAQRKLRRLQRRAARRSSPDKRTDTTPSKRWQHTTAQIARLHTRVANARSDGLHKLTTALTDRFGTVVVEDLHVAGMLRNHRLARRIADAGWSELRRQLDYKTTRRGGHLTVADRWYPSSKTCSACGAVKAKLRLSNRLFYCYACGHHTDRDLNAARNLAAFATRIDHGASSPSRGATKNEPDGRPSKTSPAGNGHRHGNTPEVNVA

SEQ ID NO: 27730 - protein, 351 aa, Shewanella sp.
MPTKTLKVRVKDKHRSLLIQQAKAVNFVWNYINELSSCAIKERGRFLSAFDIHPYTKGANKELGLHSQTLQCIAKEYVTRRVQFKKVRLNWRKSGGARRSLGWIPINTGAAKWKNCQVFFNGHYYSVWDSYGLSQYQFKTATFNEDARGRWYFNVVVEIETRPSSGAASVGVDLGCKEAATDSNGNGVTGRQYRKLERLLGLAQRAHKQQRAKAIHAKIRNRRKDDLHKYSRQLVNENAAIFVGNVNSLGLAKTKMAKSVLDAGWGMLKTMLEYKCAHAGVVFEEVNESYTTQTCWCCGEIPASSPKGRTGLRIREWTCSGCGTAHDRDINAAKNILAAGHGRLAVGIHLL

SEQ ID NO: 27731 - protein, 402 aa, Lentzea sp.
VRTAYKCRAYPTPEQAAVFNRMFGCARLVWNKSLDERTARYRAEGVPTSYRETDAALTSWKRTEELAFLSEVSCVPLQQTLRHQHTAFQNFFAGRARRPRFKSRHGRQSAHYTRSAFRMRNGALTLAKTRFPLRFAWSFNHVDLTVLAPTMVVVSREQDGRWYVTFAVDIGAPAPAGPTGHVIGVDLGLTNLLVTSDGERKATPQQLEIKTRNLARYQRRMARCLRGSRNRLKAKVKVAAAHRKVCNARRDFLHRTTAQLVRAADTIAIEDLHVAGMIRNRNLARAISNAGWGELRRQLEYKCERAGRTLIVIDRWFPSSKKCSACGHVLVEPTLSTRHWTCPNCRTRHDRDLNAAKNILAAGRAVAREVSGDACGADVRRQGLALPLSAVKQETRAARHSA

SEQ ID NO: 27732 - protein, 411 aa, Lentzea sp.
VQLRYNFRICPTPGQRDTLARAFGCARVVFNDALHARRTAHGNGVPYLSDGELSKRVITLAKTTPQRAWLGEVSAVVLQQALADLNVAYRNFFASVTGTRKGRKVAPPRFRSRKDNRQTIRFTRNARFAVLGNGRLRLPKIGDLDVRWSRELPAEPSSVTIVKDAAGRYFASFVVASKQDETLPAASSEVGIDLGLTHFAVLSDGTKVAAPRFLRQAARRLRRLQKSLSRKVKGSSNRRKAVVKVARAHAKVADTRRDWQHKLSSAIIRDNQAVYVEDLCVAGLGRTRLAKSVHDAGWAAFSSMLEYKAARYGRGFARIDRWLPTSQTCSECGRIDGPKPLSVRSWTCPCGAVHDRDINAAKNVLAAGQAESPNDRGAQVRPALVLAPRRETVTRPDAARSTRSVEGIFVL

SEQ ID NO: 27733 - protein, 326 aa, Paenibacillus sp.
LSLTSASTHHCVHSPQWLQEPDKFSLQNALRNLADAFRRYFNKQNHAPQFKSKKHPIQSYQTNYTNGNIEIVGTRIKLPKLGLVKFAKSREIEGRILNATIRRHPSGKYFVSVLAEVDIYPVIPSDHSIGIDLGLKEFAVMSNGERIENPTYIRKYEPQLARAQRSLSRKQEAAKKAGRPLSDSRNVQKNKRKVALLHERIMNSRQDFLQKRSTKLIRENQVICLEDLQVRNMLQNRKLAKSISDASWSAFRTMLEYKAKWYGRTISILGTTYASSQLCSACGHKNKEVKDLKIRVWKCPECGVYHDRDSNASMNIRQEGLRLLTI

SEQ ID NO: 27734 - protein, 432 aa, unknown
  TnpB Polypeptide
LNIRVNLIKEEKNMLLSHKTDIQLNTTESNIVGHMCYAASKLWNVCNYERRNFKELGMVRYPDWYDQKARLKGNMWFKSLPSQTAQEVCKLVDKSWKSFYTLIKSKGIQNPKPPRFKQSGMTITYMQNAIVHVSGSKRVRLSLPKQLKEHLKHTYDICDNYLYLENKIFQNTDVIKQIKIYPPDQKNVCQVIVIYDVKDVEKMQDNGHYLSIDLGLHNLMTCYDSGNGKTFILGRKYLALERYFHKEIARIQSVWYGQQSAKGIKYPRSSKHIQRLYKKKQDAVTDYLHKITMYLTEYCKKQGITCVIVGDIGNIRKNKDMGHMTNQKFHGLPYNRIYIMLEYKLKMYGICFVKQKEAYTSQCSPLSPEVTKKYAAPSNRKKRGLYRDNTETYNADAVGAFNILRKYLSVTGEQKELSVKGLKNPEIIKVAV

SEQ ID NO: 27735 - protein, 513 aa, Vulcanisaeta sp.
VGLPCYVGLSIRFIKPCFAGWLVPGLVPFSFLDEPVGRLPTVFANLGTESSKSRGKGKRKQDENRRTVRLRLLPSGSQERKLRRIADATARLWNELNYARLVQYRESGEIDFRGTEHEFYHRYRDRLGVNAGQVINLNNWMWNSFFELSRLYKQGKLPKFMGKPSPPGFWKDKVLGKRLLRIFVRNDRYYLEPINNGEGYLVLKDWHLRIRYAGRIKWSGRQGTLVIKYESGRWFAYVPITVGEKPARSNPKGYVRGIHEKIQIEKPRGNNKAFIDIGLNNLFAVVFNHSDTAILIKGSTIKSEYYYWKREIRTYQSVRDWLRNHGFESWRKYHTYYLHAVYKRRERLRHYYRTAIRFLAKTLWQMGIDEVFIGYPYMVSQDNGNEYNANIWWFNKIINWLKDVLEEYGIKLNVVNEYGTSKQCSICNVEHEKGRVKRGLYVCELTGIKINADLNAARNIAKKVGYKTPTPKKILSFIVTTNGVKPITPKEGQQPRPPRLNPPKKGREGGHLL

SEQ ID NO: 27736 - protein, 377 aa, unknown
  TnpB Polypeptide
MEYSYKFRLYPNTEQQTLIQKTFGCARFVYNHFLAQRIAEYKATGKAPTRFQQDKMLTALKKELLWLKEVDSIPLQAELQNLDAAYQGFFRRVKKGKKPGYPRFKSKRGRRKSYKTKQHVSNGKPTIYVDSNHIRLPKLGLVKCRVSKEVKGRILSATVSQTPSGKYFVVIGCTDVDIEPLPSTGAVVGLDMGLKSFAITSDGVEYPNHKFLTKSLRKLARLQRQLSRKSKGSRNREKARVKIVRLHEHIANQRNDAIHKMTTQLVRSNDIICMEDLSSKNMMKNHKLALHVADAAWGEIRRQLAYKADWYGKELVVIDRFFPSSQTCGCCGYQNKEVKDLGIRFWTCPQCGAFHDRDINAAQNILEEGLRKRASAA

SEQ ID NO: 27737 - protein, 370 aa, unknown
  TnpB Polypeptide
MKITLKCKLNPSEEQKQILDYTLQKCLEAANYISHVAWARKCFNRVALHHLVYRDIREKFGLTAQLAVSVKDRVAFSYKAKRNHIHTFKRPFLPLSPGRSFRLIGTELASISTLKGRQKIPLALGEYQRRWLKDRAKKICESLLVKRGQDYFLHLTIEVEEPPSKDPQGFLGVDFGINNLAYTSDGESFSGEGVEQTRQKYEKLRAELQQKGTWSAKRKLKKLSGKERRFKRSINHLISRRIVDKALTTGRAIVLEALKGIRKRTKRRKSQNGRFHKWAFGELRRFIVYKAQLAGVQVFFAPPAYTSQRCPACGYTAKHNRPSQGKFLCRVCGFSDHADHVGALNLVWAAVSRPDVLRPAWGGGRTSCRL

SEQ ID NO: 27738 - protein, 401 aa, Pelotomaculum sp.
MIRVLKTTFRTSKHELDRLFACNRESARAWNDCLSYAKEYHKTNGKWISKTDLQKLTKGRYHLHSQSIQAVQERYLDARTNAYRAKQTGYGHIHYPWRQKKNYPTWWKKDGFTIQPNGKIELSMGIHNGKREKPIIVHIHRIPPGKIKEIELVWDRKLMLAMSYDDGAKPQENPNQSIAAIDMGEIHGIAAVADIGEALLITSRKLRSVKRLRNKKLKELHQRQSHCKKDSRKWKKYTCAIARIGSKTDNQQRDILHKMSRKFATWANGHGVKTVVIGDVEGVQKNTSRCKKNNNVQKRRSRNLNQKLSQWPFGLLLAYLTYKLAALGIDLNKIDESYTTQTCPVCGRKKKPSGRIYQCHCGYTCHRDVHGAKNIYAKFKYGEIRTLDWSVEKIMYLRPAS

SEQ ID NO: 27739 - protein, 329 aa, Bacillus sp.
  misc_feature (300)..(301): Xaa can be any naturally occurring amino acid
MILAKKVRLIPTPEQEQVLKNHAGAARFAYNYCKRMSDRYYKLFGKSVSQLDLQKRFTKIKKRKKYEWLKDINAQVPKQASKDFDKTRKHSFEKYKNGYHTSYKSKKDLIQGFYANYERLIIGKKVVHIQSIGEVKTSQQLPRNKKPSNPRVTFDGRHWWISVGFQEDFESQALTNESIGVDVGLKELFVASNGTKERNINKDAKVKKLLRRKKSAQRDMSRRFKKGAKFQSAGYEKAKIEHLRLSRKIKNIRNNLIHQATANLVKTKPMRIVVEDLPISNLLKNKKLSKAFLFQKLNFXXRLKQDLFMLRRKIRPFSSTRRTVEFKNT

SEQ ID NO: 27740 - protein, 292 aa, Streptomyces sp.
VSFAHRGEQWADRVTANRAVAYRIHEDVSRGRWYVTASWTVPAVHAVPLEAARTGGLIGVDTNADHLAAWRLDTHGNPTGNPRRFGYDLSGTAAHRDAQVRHALIRLLHWAERHHLAIAVEDLDFTAETTREKHGRRKRFRNLISGMPTGRLRARLVSMAAELGIPIVAVDPAYTSRWGAQHWRKPVTSKNRKTTRHDAAAVAIGRRALGHPIRRRTAPPPHDRSDRAGHRTVQAEPGTPGREGNRPRIPGPRTRSVRAGRGENAVDQNAQHRSGRSAEHGFWGQDSLPLSL

SEQ ID NO: 27741 - protein, 383 aa, unknown
  TnpB Polypeptide
MKLTLQIKLLPTQEQFTFLKNTLIEANTACNEISDIAFTKKLYNQFKLHKEVYHPIKSSFNLSAQMVVRCISKVTDSYKLDKKTKREFRPLGAITYDARILSYVKEGISMWTVGGRLKIPFVCHNEKYIPYIKGEADLVLKKGKFYIFQTVEVPEEDVKDIEEFIGCDFGLNTLVATSDGINHSAEWLNTYREHRQKVRSSIQAKADTSKRSTKRNCRKLSKRLSGKERTTVNLINHTISKSIVASAKEQGKGISIEDLTNIRFTSKRRNKKFRTKLGKWNFADLRAKLEYKALLNGVKLVVVNPAYSSQTCCECKHIGKRTNKVFKCTNINCKVDTIDADYNASKVISLLGQTVNSAEKSTMYCSLHSLSGLKPIPSLCVGG

SEQ ID NO: 27742 - protein, 479 aa, Massilia sp.
MDDIAHLPCLSGWNLPWSVRSNEFCSSIPPTMLLSHRIRIEATSEQRDYFARAAGTARRVWNFALAECQRMVSCGQRPDVVVLKKQFNAIKYTHSDWLDSEGKPWLRTIHRDAHAQPFANLGSAWGRYFSALKAGKPAHPPAFKRKGRCRDSFYVANDRLRLEGKSAILPKVGRALLAEALRLPGKIMGASVSREANHWFLAVQVDVFDDAALLPRSADSIVGVDLGITVAATLSSGEKLAAPLPLSAELRRMRIRSRRQSRKLQAAKAGAEIAGEIPKGTRLTFSQNRKKGAHALACLHTRIARVRSDFLHKLTTRLCRENQAVAIEDLCVKGMMANSRMARAISDIGFYEFRRQLQYKALRYGTTIVVADRWYPSSKLCSHCGAKNSLLGLGELSWTCICGAYHDRDVNAAVNLHRLATGALAAAMALPVASQAVTPGTAAGRLPAEGGKVTPVRNEYGRQDGSGQEEDGANVCTPS

SEQ ID NO: 27743 - protein, 341 aa, unknown
  TnpB Polypeptide
MKARYQYRLYPTNKQKGLLSQLFGCVRVVWNDTLAYCQELDQQGEKKPKYTKLSRRLTQIKKTEKKQWLTEVSSIPLQQFLRDLETAYSSFFVSCKVERKGKKVKPPKFKKRKSQQSVRFTDNSFTVHQYHVTLAKIGDLKVVWSRPLPSKPSSVTVIKDAADRYFLSFVVEIRPETLPNNEQTVGIDPGIATFATLSTGEKIEAPKPLKKRLKRLRKAQRNFSRKQKGSNRREKARKRVAKIHAKIKDTRTDFLHKLSPRVVREKQTIVLEDLNTSGMVKNRKLSRAISDLGWRSFRDMLSAKSDKYGRDFLIISRWEPTSQRCSCCGNIGGKKRQNYEN

SEQ ID NO: 27744 - protein, 225 aa, unknown
  TnpB Polypeptide
MLHVPVRQNNENTATVRQRMQAGCRILCIQFTNSDAFAVGVVLDGTGQEIAVKFWKGGNEYSHHCRKLLEKIQKSQEATGGRQTGRVDQKYWMHLKHLSEHYGHQVTSQILRFAVEQDVSVIVLPRYNQEYSRNVMKGSGNWGPLHLSTRIRQYLDYKAWKNGIIVIEVHATGISKICAKCGAEIIRTDTRTELCCCANGHQTNRYLNAVRNLGKKCLTQFGRGA

SEQ ID NO: 27745 - protein, 374 aa, Escherichia sp.
  misc_feature (2)..(76): Xaa can be any naturally occurring amino acid
VXXXXXXXXXXXXXXXXXXXXXXXXXXXXXXXXXXXXXXXXXXXXXXXXXXXXXXXXXXXXXXXXXXXXXXXXXXXKRGQNDVFRYPQGVKLDQENSRIFLPKLGWMRYRNSRQVTGVVKNVTVSQSCGKWYISIQTESEVSTPVHPSAPMVGLDAGVAKLATLSDGTVFEPVNSFQKNQKKLARLQRQLSRKVKFSNNWQKQKRKIQRLHSCIANIRRDYLHKVTTTVSKNHAMIVIEDLKVSNMSKSAAGTVSQPGRNVRAKSGLNRSILDQGWYEMRRQLEYKQLWRGGQVLAVPPAYTSQRCACCGHTAKENRLSQSKFRCQVCGYTANADVNGARNILAAGHAVLACGEMVQSGRPLKQEPTEMIQATA

SEQ ID NO: 27746 - protein, 159 aa, Methanosarcinaceae sp.
LQSSKEDYLKSKKVQRTKQKPDMQHQNFMGKISKQRNELQHKVSSKLISENQAVALETFNVCCMLKNHCLAQGIADASWSYFISKLKYKSKWYGKTILRIDQFERSTKRCNICIYHNGKSTLTDRGWQCPDCKTNNYRDINVVINIKTFALYKQNLIGI

SEQ ID NO: 27747 - protein, 397 aa, unknown
  TnpB Polypeptide
MRTYKLKIPYSVELDTLNAASASVWGECLALQEVWCYMHGSWGYFPCIKSCELWMDKQLTKFQPLHSQSIQEIRSRYFKNWYGFRVLRRNGDKTARPPHKEKRFQTTTWKKSAIRFKEGLFGKQVVLSNGRRGKSLVVDLPKDFDMKQTPALINLVYNRGQYELHFVYKIDERVESEAEGIVGVDIGEVHPMVSHDGVVTEIFNGRYIRSLYRLRNKVIASMNTKIDRCERHSQRWWHLVRRKWKRIKKIDNQIRDGLHKHTTKFVKLCEERGIGTIVLGDLTGIREDIDYGKKSNQKLHQWAFGKITQMITYKAKSLGIKVEVINEAYTSQTCPACGNRTKPNKRSYKCKCGFEYHRDGVGAINIRQKYLGCLGTPVAATMASPVGIRLEVRCCSA

SEQ ID NO: 27748 - protein, 453 aa, unknown
  TnpB Polypeptide
MLKQKYTTVTQLHEVNNKDIIEYFENASVYFCKLQRKAFHIFKNENIKGNKVEYNKLRQDFMKEHNISKRTAGSILKDIQGKLKTLMGLKKYEVSQKEQKIKNLKEEIEKLDKKISEFQEKMKNKMKVNHLKYWNLKKSRAFKKMRLNKFQMRLEQLKWETDTEHYKLCFGTKKFLKSDKNKFISQRDSQMTFIGSQDETGRNSMFQLAYNNRNNQFDIKLRKDFGFDNKEKYVYGKCYFNNHKNKLIEALANKNSTPLTYSIIRKNGRYYLHCTFEYRMEDKSSFLTRKEYGTIGVDFNKGFLAVSEIDKNGNLLNTKKLYYRFGQGSKTKSDLEKIILYIVRICIETGKDLCIENLNFKNTKSKASKGRTDKDKKYNNMLHSLAYSLFNRLVTNIAFRNKVDVKKVNPAWTSWIAENKFCNRMKLNIHNGAAYVIARKGMGIRDKYLRKTG

SEQ ID NO: 27749 - protein, 416 aa, unknown
  TnpB Polypeptide
MDRTMVVQLNPTPQERSILDRTMHEHTACFNAVCRLGFEQGESNGVELHKATYYPLREEFPDLPAQLVCAARVKATEAVKSALTWKKKQEARYPKLVAKAKKQGKEPPAFKPVRCPQSKSAPIRYDARSYWVKWQTMTASLASVVGRLEITFTIPKHAMQYVGGKVCSADLCFHHGRYFLHIVVSLPDPQIPPTGEVVGVDLGLSHPVVTSQKQFLGERRWKEQERRIFRLRRKLQAKGTKSAKRHLKKLSGKLLRQRRDHDHVLSKRIVQHTAPGSTIVLENLTNIRERATQRKGEGQRRLHSWSFAQLYSFVEYKAEAKGISVERVDPRHTSQTCSRCGHQARNNRRSQSLFLCRTCGYCLNADLNASYNIREKHLAFLASIGRPFAGGSPSQAASCLDPTGSGTSPRIYPWGT

SEQ ID NO: 27750 - protein, 491 aa, unknown
  TnpB Polypeptide
MAGMGDGRVVHQAYRFALDPTPRQERAMLRHAGARRWAFNRAISVYRHQREEHTREQAAAVEGGRAVVAVRQPGFQVMNNAFNAWKSGRTEGLPDWWAATHRDPAPVWIREISSMVSLWAIREAHDALSRYFDSAAGRQGGPAIGFPQFAARKSSPTRFKVSGGRSGARPSGSRHIALPIIGPVRTHESTRKLLRRIANGTVVVKNATISQRAGRWYVAFNCEVLATAKVRPGPSRRQRAGGIIGVDVGVKVLAALSTGELVPNPRAANRYRARLTRAQRAASRCERGSRRQQDLYRRLARLKHGEANLRRARLHELTTRLVQSHDHVVLEDLAIKTMTATGRGSVDQPGLRVQQKAGLNRAILDAAFGELRRQLTYKTTWYGARLTVADRWFPSSKTCSACGWRHPNLTLADRLFLCRGCGLAINRDLNAAINLRQLAGAGALPIESPLRSSTPLRGRRKNARFGEKPAPGQTAGVRRAAQDRKVLASIC

SEQ ID NO: 27751 - protein, 317 aa, Moellerella sp.
MKENTDFSWLNDVSSVPLQQALRHQQSAFANFFAGRTKYPTFKSKHHRQSATFMSTAFKYRDSKLYMAKSKEPLDIRWSRELPSTPSSITISKDSAGRYFASCLCEFEPKSLPISAKTVGIDVGLKDLFVTDTGFKTGNPRHTAKYAKRLALLQRRLSKKKKGSSNRAKAKLKVAKLHAKIADCRMDNLHKLSRRLINENQVVCVESLKVKNMIRNPKLSKAIADASWSEFVRQLEYKAEWSGRSLVAIEQFFPSSKRCHCCGYTLSKLALNTRSWVCPECNTEHDRDINAAKNIKAAGLAVLALGEFVNPKLHHAA

SEQ ID NO: 27752 - protein, 421 aa, unknown
  TnpB Polypeptide
MYKGIKVRIYPNKQQRELLNKTFGCCRFLHNKMLEERNKIYEDLKNDKEQLYAHNYRTEKQYKEEFLFLTEVDSRALQSERENLFQAFQKFFRGLHKGKKIGYPKFRSKKQKQTYTTYNINNNIRIDQASKRIRLPKVGWVKYRDNREINHPIKHVTVSKTRTNKYFVAITVEVEIDVQPLTAIQLHKIEAFDMSAPNFLVSETVELTNPRFYRKQERKLKRLHKLLSRKQKGSQNREKARFRLARFYEKIHNQKKDWIHKLTHSLSTQFDAIILEDLNIQGMQQLNSGLSKSVTLDFSWYQFISYLKYKLKWLGKHLVLVDRFFPSSKLCSVCGQITNDLQLSERTWTCQCGTTHKRDVNASNNLKEEGLKILQEQGITIISDNDATVGTTGSHASGDRVSPVSAGGGQGTRNPSAFRQW

SEQ ID NO: 27753 - protein, 371 aa, Lyngbya sp.
LPEFKEFWTDYKELGSHALQDTVKRVDLAFQRFFKLRSGYPKFKKSRRYKGWTYPCKSGWKALTDGKNGFLKITNLGTLKMRGQARDWGKPKTCTILFKQGKWYASITVDCVPTRYQTDLGAIGLDFGTHHAIADSKGNITDHPRFVKVAQHQINKIAKTSRRKRPPKRGVKASRRWRKANQAIARIQSKIARQRQNWQHQVSTQIVSCNSLVATEKLNLKGMTRKSKGKNKRQKSGLNRSLLDVGIGNFKDLIKYKVTEAGGFYIEIPTQKVKPSQTCPNCGHQRKKALADRVHHCVNCGFQCDRDVAAAMVMLNYASGKCGLGVSPSGAIFQDRGMERASTDADETTSTCLVSGLKVSQVKRQKRTSQQ

SEQ ID NO: 27754 - protein, 380 aa, unknown
  TnpB Polypeptide
MCNVKAYKYKLKVNKAFEANCHQTLNVCRELYNASIQERRDAYQINHVSISYQTQSGQLPEIKALRDDVKAIYSQVLQDTLKRSDKAFQAFFRRCKSGETPGYPRFKSKDRFDSFTYPGTGFSLQGDKLFLSKIGSCRLRLSREIEGKIKTCTLKRECDGWYVIFTVEGGKSKSLPKTGQVVGIDVGLENFATLSTGEAIANPRFFKQAEPLLANAQRKLSSKQRGSGKRKAAKKTVSKVHRKIQNQRQDFAHKLANGLLKRFDELHIEDLNIKRMTQDGNFSKNIHDVAWNTFFQITTYKAVDAGKLVKKKVSAYTSQDCCECGQRMKLTIRDRIFVCSNCSNRKHRDHNAAINILNGRASRREQMLSESPSKTPALSV

SEQ ID NO: 27755 - protein, 383 aa, Lactobacillus sp.
MLKGIKLRLYPNQTQQNQLGQMFGNNRFVWNQMLAMAKDRYRNNPSSHFVNGYKMDSLLKALKQEYPFLKDSDSTSLQVVNHNLDQAFQMLFKHQGGYPRFKSRRASKQSYTGKASLSVVAKRYLRLPKLGFIKTSKTNQLRDCKVKRYTVSYDATGRYYLSLQVETEIDEFTKTGAVIGLDVGVADLAITSDGVKYGTFNAKWLERQVRVWQSKFTKRKQRATVAMHQWNHNHKTVKMELRDYTNWQRARQLKARYQAKIANQRRDYLHKVATNLVKENDVIVIEDLRTKNLMRNHHLAKSIANASWYQFRTMLEYKCAWYGKQLIVVSPKDTSRICSTCGYNSGPKPLSIREWTCPQCHAHHDRDVNAAVNILHNGLKATG

SEQ ID NO: 27756 - protein, 441 aa, Microcoleus sp.
MFQVITAKLKLNLNAEQKALVAQTALAYRDALNYTSQVAFDAGKTSNGLKLQKSVYNELRERFGLGAQMACNVPRQVSATYKTLWTKVKQSNDAIAKGYTKKRYKGLDRVPKYVSRTCTLNYQRDYSFKTEQRVSIITLAGRIVVTYDGYNKHLDLIVSGSKIGAAKIVYQRSSKTYYLMVSIEVETPEVDPLKITRVSGVDVGMRYLAVETDLQNKSKFYSGSSARHKANRYHKARRTLQRKDTRSAKRRLIALSGRERRFIADVNHQISKKIARTNSLIGLENLTGIRERTKSKAGDKASKKQRKANRNKAKWSFAELHGYIDYKANLNGSLATKVPAHYTSQSCPKCGHTSTGNRPNKGLLFRCECCNHELHADLVGARNIAIRTLLVRQDWTSTGSLSASPDVSGCETKAEILQRFSELRWSSDTSPHHSGTPLDAG

SEQ ID NO: 27757 - protein, 155 aa, Microcoleus sp.
VKGSSNRYKAKIQLAKHHAKIANLRKNTLHQVTTYLCKKHARIVVEDLNIGGMLKNHKLAQVIADCGFHEFKRQLEYKAKKFGCEIVVADRWFPSSKTCSSCGHIQDMPLKERVYNCGSCGHSMDRDLNAAINLSRLAFTVKAYGGITAPMLPTK

SEQ ID NO: 27758 - protein, 217 aa, Nocardiopsis sp.
LDTHGNPMGAPRRFDYRLSGTAAHRDAQVRHALTRLLRWAHGCGVRAIAVEDLDFTDAKSREKHGRRKRFRQLISGMPTGRLRARLLSMCAEAGIGVIAVDPAYTSMWGAQHWQKPTTSKKRKTSRHAAAAVAIGRRALGHAIRRRMAPPPHHRSDGAGHRTLQTGPRGPGREEDRPRACGPRTRSDGARRGRNAVDQNAQDRSGRSAEHAQPMLSL

SEQ ID NO: 27759 - protein, 294 aa, Frankia sp.
VKLPRIGRVKVSEAMGALTGRLAGGGARLLGATVSRAAGRWFVSFTVQVDREVPTGPSGRQRTAGPVGVDLGVKHLAVLSTGETVPNPKHLTGSLRRLRTASRAYGRSKPGSAGRAKRAARLARIHARVASRRRDGLHRLTTRLAKTHDTIVVEDLHVAGMVRHRRLARAVSDTGMAEVRRQLSYKTSWYGSALVVADRWYPSSKTCSGCGWQDPNLSLSDRTFACQSCGLVIDRDLNAAVNLRHLVAASTSETVNARGADRKTQPAGRVAVKRESGTAQADQTGGASPRGEAA

SEQ ID NO: 27760 - protein, 400 aa, unknown
  TnpB Polypeptide
MLLTEITVIKPSNRLLYKACDELCFLSKNMYNTALYIQRQNYQEGKPFIKEWDMYKLLETQKNPDYYAMNTKVSRYVVKQLDGDFASFFSSLKSKKEGNHNQKVNPPSYKEKAKGRNIATFYKKALLKRTYNKEGLIHLSKTKIKFKSNIPFEQIQEVKVVPKNGYYELQVVYNAEETKPVVSANYAAIDLGLNNLATVVTTNSTSFIINGKPLKSINHHWNKKKAKHQSKLRKGVGTSKRIKNMSNKRTRRVNDYLHKASRTLVNELVKQSISKVVIGYNDGWKENINLGKRNNQNFVQIPHSKFIKMIIYKCMLAGIETILKEESYTSKCSFLDNESVEKHEIYMGKRIKRGLFQSSDGTLINADVNGAYNIMKKHLRIEPSALDLVQVCSTPKVLKF

SEQ ID NO: 27761 - protein, 368 aa, unknown
  TnpB Polypeptide
LELHRALCWDALCLPSLGDQRCYRKGPVVSVESGELGKKRQPGWPAATDHPTLYQGCIALEMEVLDTQEAFVRIAVYTGQVWTWMQYPVNSSRYTVQRLLEADWRRQSPTLVLRAHGAELHIPQVKKIEARKVMERKQDPDLVTVAIDLNVKNLAVITVRQKAAIIETVFVTDHGLDAHRYRHLKRIARKQWQAGKPVKGEHSNQQLWRHIDRLNEDAAHTVARRIAAVCARYPGCILLFERLRTIKPGPGSKSRRMNRKRANQLRGKINAHAKDKAYVHQVVTVEVNPHGTSQYCARCGAKGERFSYRGGKRITEKWGKLFFCPVCHYEANADFNGSVNVHRSFYREWHWKPRQAKAPLPPVVADGT

SEQ ID NO: 27762 - protein, 466 aa, Halobiforma sp.
LFSSPAFPKSTERSVSSPDAGWPYAKGVPAEPPVAPDRSPAAERGRAEKRCRHHDRVPTEHSVRLTARQRKPTTSVVGDQFRAFQPVTIDDSRLDSALADEAAALDIGANNLLACTTTTGKQYLYEGRDPFDRFHETTHEIADLQSELEDGRYTSKRIQRPYRRRTRRRNHAMDTLARDLMERLHRWRWDGLRRRPHGRPRDPLSVRTNEKLHAFWAFRRFIDRLACTAEEYGITVEVRSEAWTAQECPACGSREDTTRHRETLTCSCGFEGHADLAAPETFLRPYESIGRPMARPVCLKWDDHSWSALTRRDRLVRTPEIGDFWGRHHALTVSTRSTETGVSASRRKSLAWWFGMSRDPQREESHGFSRGGDVNVLVVLRFRERQQNRLVVAVQFDHLPCLLVLVFRSAGSDLVLAVRQVLELDESVVSLGFPLLARPEKRVVGRLEFDGDAVDRIPVVVLYEHG

SEQ ID NO: 27763 - protein, 399 aa, unknown
  TnpB Polypeptide
MIRLSYKYRLKPSLGQATVLQEQLRLCRLTYNALLEHSLSERRAGRGTPTHKALTYLLPEMKAMEPGLNNVFSQVLQNVCRRVRSGFESYWNRKRAGLKAHLPRFRGEDRYDSLTYPQFGFRLKDGVLCLSKIGGVRVVQHRPVEGKVKTLTVTRSRTGKWFAVFSSEVEEKPIPGRLHSVGVDFGLNSLVALSDGTLIEAPRSYRNAESRLRRVQRSLSRKRRGSRNREKARRRVASACERVANRRRDYAYKTARSIVNRYERVYVEDLKVQGMMGNRRLSKSLGDAGWGMLRNALTYMAERSEGVTAFVNPRNTSQLCSRCGAYVKKDLSMRVHRCPECGLTIDRDVNAALNVLKRGLEIGLERAEYTPVGEVTATQLGEAGQVASVSQEAHLFRGG

SEQ ID NO: 27764 - protein, 311 aa, Escherichia sp.
  misc_feature (20)..(20): Xaa can be any naturally occurring amino acid
  misc_feature (51)..(52): Xaa can be any naturally occurring amino acid
  misc_feature (67)..(67): Xaa can be any naturally occurring amino acid
  misc_feature (136)..(136): Xaa can be any naturally occurring amino acid
  misc_feature (166)..(166): Xaa can be any naturally occurring amino acid
  misc_feature (197)..(197): Xaa can be any naturally occurring amino acid
  misc_feature (212)..(212): Xaa can be any naturally occurring amino acid
  misc_feature (285)..(286): Xaa can be any naturally occurring amino acid
LSGLTKTSSRIGLLFPDSKXATETQWLKDSPSQPLQQSLKDLERAYKNFFXXRAAFPRFKKRGQNDXFRYPQGVKLDQENSRIFLPKLGWMRYRNSRQVTGVVKNVTVSQSCGKWYISIQTESEVSTPVHPSASMXGLDAGVAKLATLSDGTVFEPVNSFQKNQKXLARLQRQLSRKVKFSNNWQKQKRKIQRLHSXIANIRRDYLHKVTTXVSKNHAMIVIEDLKVSNMSKSAAGTVSQPGRNVRAKSGLNRSILDQGWYEMRRQLEYKQLWRGGQVLAVPPAXXLACGEMVQSGRPLKQEPTEMIQATA

SEQ ID NO: 27765 - protein, 562 aa, Fervidicola sp.
MPKKQKKDKFSMTICGEFFPEVYPAFRSQKWSRGEEDPLETEMRLFSSCMRWAFNRLLEGISRDEIKKLGQELFGINSRYADDARLKAQALLDSQKELLELEIEETKNKLSRARKKLGTAMRKLAKAEERGNAPDIVEKLRLAVKGQNNRVASLEKKLAELEVHLKNGTIPKVVFGGRKLWEKVCKGLAARDEWQSSRKNRLYSRGDETKGGNPNIKVSFDGQDFRLAVSISHLSQQRGTDKLGRPKMSKAPRVEGKLWLPENHRDLVRIWLAMKLPYTVELVRTPEDRYIAHLTLDLGGMKEPDFTKGCLALDINPDGIALCNISAFGQPEPWPEDFKIPCPGNLGKYEGEFQVITYPNGFLYISIPDLAYTCGFRRDYLIGVLAKVVIDIAFFLGKSIAMEELNFNKDRLDTNKKFNRMASNFPFARMVEAVCRRAVKEGVPFKLVSARHTSTIGYWKYTKRYAVPVHCAAALSIGRRAMGFEERVTKELKQLIVQIKQELTCKVDPHTPREGRGMTRKVRACLRRLEEKLLLHNGLTRWQQEAFYSVWHDLKELALSLR

SEQ ID NO: 27766 - protein, 295 aa, Caldilineaceae sp.
LKKGQRPRRVGFFRYRKRGRHMAFTPTNGRNTIRVAGNRVRIPAIGRVRMTEPLRFAGDILSATVSLEADRWFIAFQVDTGEPAPPKRPGPTVGIDMGLQVLATLWDGDERPQIVNPRPLQEALAELRRIDQAISRSLKVHGRHRTSHRREALYARRQRQYARVSHLRNDHHHRTTTAIAKRGGTVKGETLPIAGMPRNRRRGRALGDAGLGGFVRQLAYKCAWYGTAFQRSARWYPSLEDLQCVRGREAVAAAIGAHVPLSAMRLRVRPGRERRPQPPGVRHGSQVGRRQRGDP

SEQ ID NO: 27767 - protein, 352 aa, Caldilineaceae sp.
MGQGPFRNPFDNGRCNLEKALTRHYRGQRGEGPRSGYPKFHKRRSNEAYEASCGHPERLRLDGHSVHLPKVGWVRMAEPLPDGARPLQVHVRRDAGRWFVSTVCAYDTEHPKATGQGPVVGVDVGIKTLAFTSDGRRFANPRALYRAERKLRRADKAVSRSRNTHGRNRHSERRSEMYEERARLHRRVRWQRETAHREAASAIAKSAGTVVIESLNVGGLMRNRRLSKALSDARIGHFLRELQWQCTKRGVRLVVADRWFPSTQIGARCGCRPDRKLDLGVRLYRCAECGWVCDRDENAAIHLAHVAPAAWETQNGHGDGVSRTRSHPPAAVDEVPRNPDPVPGALMPDALL

SEQ ID NO: 27768 - protein, 222 aa, Hydrocoleum sp.
LPKTDNSVGIDLGIKTFATLSNGQKIDAPKPLKKRIKKYRKLSKSLSDKTRGSNRYEKARLRIAKFHAKLKDTRTDFLHKLSTKIIRENQTIVLEDLNVSGMMKNRKLSRAISDLGWREFRTLLEGKAEKYGRDFRVINRWEPTSQICSSCGFKGGKLDLSVREWECLNCGTKHDRDENAAINILVAGGQSETKNGRGGKHKTTAKVAAVNETSTRRGAKAR

SEQ ID NO: 27769 - protein, 303 aa, Hydrocoleum sp.
  misc_feature (87)..(87): Xaa can be any naturally occurring amino acid
MKARFKYRIYPTPGQKYRLAKLFGCVRVVWNDSLAYCQQKYKLGEKKPTNSELQKLFITQAKKTEYREWLSEVSAIPLQQSLNDLNXRLAKLFGCVRVVWNDSLAYCQQKYKLGEKKPTNSELQKLFITQAKKTEYREWLSEVSAIPLQQSLNDLNQAYQNFFQSTKGERKGKPVKPPRFKTRKSKQAARLTKGGFKLGQHKVYLAKIGQLKIVWSRELPAIPSSVTVIKDSANRYFLSFVVETCAKLLPKTDNSVGIDLGIKTFATLSNGQKIDAPKPLKKRIKKYRKLSKSLSDKTRGSNR

SEQ ID NO: 27770 - protein, 228 aa, Hydrocoleum sp.
  misc_feature (12)..(12): Xaa can be any naturally occurring amino acid
  misc_feature (228)..(228): Xaa can be any naturally occurring amino acid
IPLQQSLNDLNXRLAKLFGCVRVVWNDSLAYCQQKYKLGEKKPTNSELQKLFITQAKKTEYREWLSEVSAIPLQQSLNDLNQAYQNFFQSTKGERKGKPVKPPRFKTRKSKQAARLTKGGFKLGQHKVYLAKIGQLKIVWSRELPAIPSSVTVIKDSANRYFLSFVVETCAKLLPKTDNSVGIDLGIKTFATLSNGQKIDAPKPLKKRIKKYRKLSKSLSDKTRGSNX

SEQ ID NO: 27771 - protein, 182 aa, unknown
  TnpB Polypeptide
VDEESISTTKDGYRIKSGMVSSKADKYYVSILVEVPDTKIVNHNKEGIGIDLGLRDFAVVSNGKTYKNSNKSKRIKKLEKQLRREQRCLSRKYENLKKGESTQRANIGKQKLKVQKLHHKIDNIRTDYIHKTIAKIVKTKPSYITIEDLNVSDMMKNGHLSKAVASQFRTKLSRRQKFQCKF

SEQ ID NO: 27772 - protein, 409 aa, unknown
  TnpB Polypeptide
MKTYQIRLFPSKEQINKLQELSDVRKDIWNKLLDIEQIEYQSNKTIFNKFDLNNMLPELKEKYSDWKKLNSKAVQTISTELYGSYRSFFNLIKKDKSARSPRKIESADYHSISWNQSGWMVKEDNIIIINKIPFEYKSNLNLNELKIKEIRVKFIRNKWLCDMVIDDTVEYKDKILVETKVLAIDLGLSKLGTGVDNKGEMIVLKNKSKKINNYYQKQISKIQQKRSKTIKGSNRNLQLKKSLNKCYHKKNEQIKQTLHIQSKKLVNMNYNTIVVGNLNVKKLMSSEGVNEKKKGIRKSFHQSNINMFLQFLKYKCQAKNINLTKIDEKWTTQLNCLTGKLFKEKIELKDRKVQLSDTIIIDRDLNSAINIMDRWFENHFASMNKPLDKSGVVKKYNLFNETTTSLVSW

SEQ ID NO: 27773 - protein, 384 aa, unknown
  TnpB Polypeptide
MKIMRAYKTEIEPNNVQHTVLLKHSGAARFVYNWGLARRKEEYEKTGRSSNAIELHKQLTALKRTEFTWMYEVSKCAPQEALRDLDRAYKNFFETRAGHPRFKRRRLGAGSFKLRGSIKVFHDSVQLPKIGMIRLKEKEYLPTQGVHIPSATVSEKAGKWFVSLQVEEEIEAQNNTGPTAGVDVGISKLATISDGTVIANQKPLSRFERRKKRIQRSLARKARGSNNRARTVIRLARYELKVSNIRKDAIHKATTMLARTKSVIGVESLNVTGLLRNHHLAKHLADASLGEFLRQLKYKAKWNGGAVVEADSFFPSTRRCSSCGSVKDEMSLSERMYKCVNCGFEADRDLNAAMNLASVAASWAETQNACKSGEGHATKAGAPR

SEQ ID NO: 27774 - protein, 300 aa, Gammaproteobacteria sp.
INYKSLKSKVAQQTLRRVDQNFRAFFNASRDFVKNPKKYTGKPRPPSFKQKQHDNLVYDFQAFQIKGSTIVLEKGLEIQLSKPLIGKNIKQIEIIPKHKFFQAVFVFNDDDCFTNQKVKFFKTVEQVELNKLDKNGEFVVKQFAIHKKVMSIDLGLNNLATCVTNGVIKPFIIDGRRLKSINAYYNKRKAKMQSKLEKRGKKWSRRLQNLTDWRNAVVNDYMHKATSYVVKTCALNGISKVVVGDVVKSLNHINLGKRTNQKFVNLSQGQFVEKLSYKRRKTRYRISGGRRELYFKSEFC

SEQ ID NO: 27775 - protein, 385 aa, Streptomyces sp.
MKLVVQVKLLPSPEQAAALLATLRACNRAADHVSQVAFGSGVKDRNGLQKLVYADIKTTFGLSAQPAVRVVKKVVDAYSALAASLKAGRLGGPGSKRYRSAVGAPVGFRPEAAQPFDDRCLSWQTDARTVSIWTVDGRLRGIRYTGSPDQLKTLAEYRRGESDLVRRGGKWFLIATCDLPDPEVYEPVDWIGVDRGIVNLATTSDGSNYQGRRLNRYRRWQARKRAELQARRTRSATRRLGARAKKEQRHATDVNHRISKEIVSVAQRTGRGIAVEQLDGIRERVRLRRDQRGTLSSWPFHQLGQHLAYKARRAGVPFLEVDPAYTSQRCPRCGHTERANRSTRDHFSCRRCGLAGPADVVAGVNVRNRARSAWVFVTTPVPAPA

SEQ ID NO: 27776 - protein, 361 aa, unknown
  TnpB Polypeptide
MKLTIQLQILPDADQKAVLLTTMARFNEAATFAARAGFEAKVFAQPSIHKLAYREIRDRFGLSAQMAVRAIGKAVECFRRDKAKCPVFKRRGAVTYDERILGFKGVDRVSLWTMTGRMVLPLAYGEYQAERFDRIKGQCDLVYRGDKFFLLATVDLPEPPPSGVKDFLGVDLGIAVIATDSDGNAHSGKAVEAIRRKHNLQRKRLGKRNTKGAKKKLKRVAGQEARFRRHENHCIAKAIVGLAKDTGRGIAVENLGGIRDRLPVWSKESRNRLSCWSFSQLVAFLEYKARLAGVPLVKVDPRNTSRTCAECGHCEKENRTSQAKFSCQVCGHQANADRNAARNIRALAQSNGAIGLASLTA

SEQ ID NO: 27777 - protein, 385 aa, unknown
  TnpB Polypeptide
MSRYRLYPSAEQELSLLQHCADARYVWNLAVEQHGDWRPGRKSAPGFAEQCRQLTAARRDNDWLRAGSVNVQQQALRDFWRAKAAFFKSGFGHPSWRKRHRHEGFRITDTCEVRKLNRHWAQVKVPKVGWVRFRLTTPLPTAKSYRVGLRNGQWHVAFAVKPDPIPAPGTGEVIGIDRGVTITAALSDGRTLNCPQLTGRERARMRKHQRRAARAPKGSDRKTAEHAAAARIKAREAAVRKDWCEKTSTMLARTFDVIRFEKLNIRNMTCSAKGTAAEPGRNVRAKAGLNRGILAQGWGMLRCRTEDKAPGRVEDVPAPYTSLRCSACGWIDKRSRQSQAVFLCVTCGFTCNADLNASHNIAAGHAGGAARRKPASVREPTVSAA

SEQ ID NO: 27778 - protein, 292 aa, Haloterrigena sp.
LRFTHALEQLRHAIQSDAWRVGTAEAMRRNEKYELHINITHTEANIQDKEDSRMVVGVDINEDCVALAALHEDDIVDSVVIDFPEIKEERHRYFTMRKRMQNNGKSSFDRAFEQQEERFVHDQLHKVSRQVVEWVSQFEKPVIVFEDLKEMRNSIDYGTRMNRRLHSLPFRKLREFITYKAAFQGVPSDEINPEYTSQACSLTECEQTTRANRNKKRFKCVNCGRQDHADRNAAINIAKKGLATLDRNVPALKTLPNVRKLRRQASGCVTQPTVTHDTARGHHADGVAGVSD

SEQ ID NO: 27779 - protein, 334 aa, Haloterrigena sp.
MRTVRTFEASIANPQQVGDDLDQLGWAASKLWNVSRYYAQEQWDDTGEIPDDGELKAELKGHERYTDLHSQSSQRVLEELAEAFTGWFAKRRDGDSRARPPGYRKRGDSHPRSTVTFKAAGFKHDAQFTRVRLSKGRNLKEHRSDFVLCEYELRPDVDLTEWDIQQVRAVYTYEEWRLQFICRKSIDPDPPGDGVAGVDLGISNIAALSFGSESILFPGNALKEDEYYFGKQKAKCDDSRSNERLRLDRKRTERRTHFLHTLSKQIVSECVERGVGTIVVGDLEGIRDNENGESRNWGSHGNLDLHGCLLPTSSNPVADELRRENGTGVTELAA

SEQ ID NO: 27780 - protein, 390 aa, Microcoleaceae sp.
MEQAHRYRFYPTPEQESLLRRTLGCVRLVYNKALHERTQAWYERQERVGYNQTSSMLTQWKKEEDLDFLNEVSCVPLQQGLRHLQTAFTNFFAGRTKYPNFKKKHHGGSAEFTKSAFKFKNQEIYLAKSSEPLPIKWSRQIPKGCEPSSVTLSLHPSGRWHISIRFDAPTIQPLPVSENAVGIDLGITSLIATSNGDKIANPKHFKKHRKRLKTAQKNLSRKQKGSKNRERARIKVAKIHLKISDSRKDFLHKTTTQLVRENQTIAVESLAVKNMVKNPKLALAISDSGWSELIRQLDYKCRWYGRKLVAIDRWFPSSKRCSSCGQIVDKMPLNIRDWMCPSCGCNHDRDVNASKNILAAGLAVSVWGASVRPEQSKSVKASAMKQKLKS

SEQ ID NO: 27781 - protein, 234 aa, unknown
  TnpB Polypeptide
MLGHCAHARYVWNLCVEQESHWRPGRAKMPGFAGRCHQLSEARAAEPWLAGGSVIVQQQAIRDHDQAMRNYYAGTHRRPSWRKAGRDEGFRIVHLKPRDVRRLNRKTGEVRIPKAGWVRFGWSRQVPQDAKSFRVTRDQAGRWHVAFAVVPEPVPSPGNGEVVGIDRGVAVSAALSTGEFLHAPGFFGAGAEAAATAGAQACPRPARFESPRSGPARHCSDQGPWPAGMPATLT

SEQ ID NO: 27782 - protein, 387 aa, unknown
  TnpB Polypeptide
MAATEPAPSIRTLRLKVKREAYAWLKSAAIEVNAVWNFANETSYKAARPFAGPSRFLSAFDLDKLSAGACECFERIGSGTIQRVNSEYATRRRQFKRSKLRWRKSYGSHRSLGWVPFKAEQLRRKGKCLRFSGKAIRVFEQALLEGVRCRSGCFAEDAVGDWWLCVAVARATMRSYAPRQAVGLDLGLKDTVATSDGLRLEAGQFYRHIEQKIALAQRRAHKRQAKRLHRSAARRRKDALHKFSRSIVNRYQRIVVGDVSSLKLVKTRMAKSALDAGWGMLKRYLQYKGREAGRDVIIVNEQYTTQTCSSCKSRTGPREVSGLNARIWMCGECGDIHHRDVNAAKNILFTGRCPPSVRGNESPGSVAEPSQPYRRCEAKDSALTAAA

SEQ ID NO: 27783 - protein, 398 aa, Thermoanaerobacter sp.
LKIIVKRVEQIQINKNHELWPYCDKICFAAKNLYNYANYITRQEFINNKKWIRYRKLNKMLKEHETYKNLPAQTAQQTLRLLDRNWKSFFRAMKEWNKDKEKFNGRPNLPKYKKKNGRSVAIFTNQQCKIKDEHLTFPKTDLKLKTRITGKLKEVRIIPKGSVYVVEIVYEKEIAEIQRPPKRIAGIDLGLNNFVTLINNIGIKPIVINGKVIKSINQYYNKKKAELMNYVGEKGISNRIEKLTLKRNNKIKDLMHKISRFIVNWCKQYNIDTLVVGYNSRWKQEIGLGKINNQNFVSIPYYQFINMLKYKCEEERINLILVEESYTSGCSFLDREEVSKENYDPSRRIKRGLFRSNKGVLINADVNSAYNIIKKVFPQAFAEGIEGVGLHPVRLNVA

SEQ ID NO: 27784 - protein, 479 aa, Alicyclobacillus sp.
MIGYRFRLYPTKEQEKILLRWIGCQRVIYNAKVAEERYFRTFRNHLVELTGMPIPVDQTYAQFVTETTAFLRDVPSVVLRNGAALWRQAYLRYQRGLAERPKFKRKSGEQSVWLTSEVFSFQPVVDWQTGDVLRYQLIVGTKKFPVGELVYCAHRPHGIPASIHIKVSHGRWYVSFSCDDGTCSPDEADIAASMRTLEQDALLERTLGLDRGVAKPLATSDGRVFDLLPVQKARIQKCRKQKVRWQRRAARRQDGSRNQQTAYARASRYDAYETNVRWDYAHQTSHRLVADDRYELYVFEDLLIQNMTKRPKPKQDAKGRFVPNRASQKAALNRAILASAWGQVLTFTRYKAQRTGKLVVVIPPAYSSQACAVCGYTHPDNRQTQAEFVCLRCGHRANADHNAAINIARRGVAKIVSGEFERELEEAKAKVKRVRLRKLGSERSEVTPVESPLVGPVGTQASHGSEKQEVPLETAETSA

SEQ ID NO: 27785 - protein, 413 aa, Geobacillus sp.
MKMTFKYYPKLTPLQQSIIEELSYHTTKLYNIVNYDNRENGFKNYIETERLYKQNYHTQFLHSHTYQWCLKILEQNWKSYFASIKDYEKNPNKYLGKPKPPKFKNNKNKKNEVIFTKAGIRYKDGILKLSLSKIMKDKFQVQSLNFDMKNVKIPVNLSRIQQIRIQWDKSSKMWYLLIIWDKEVENKVTGNNVMAIDLGLDNLATCVFKDNEQCIIFSGKHLKSKNAYYNKKIARLTSIAMKQCNDSKNFKRTKKIIKLQKKRNDYIKDKLHKISKKIIELALTMNCNTIVIGDIRGIKQENYAKSFVQIPQQELVNKIKYKAELVGLKVVMINESYTSGCSAIDLEEINKANYNKSRRITRGLFKTNNGMLINADVNGALNILRKYIKGIPRAIQIARDNGCLNHPLRIRVV

SEQ ID NO: 27786 - protein, 402 aa, Geobacillus sp.
VKNLFVTRVEQHQIKRTNVLWQMCDDLCFKSKNLYNYANYIIRQEFVNNNKWIRYNSLDKMLKQEGVYKKLPAQTSQQILKLLDKNWKSFFKAIKDWSKNKDKYLGKPKLPKYKKKNGRNVVIFTNQQCKIKDGYIKFPKTDLKLKTKVTEGLQQVRIVPKGSIYIIEVVYKKEIPDIIRESNRVVGIDLGLDNFVTMVNNIGETPIVINGKGIKSINQYYNKQLSYFKSILKKQNGLDWSKRLEKLTLKRNNKMKDFMHKASRYVVNWCVHHNIDTIVIGKNDNWKQEINLRKRLNQSFVQIPYDMFIKQLQYKCEEVGIKIVLTDESYTSGTSFLDGEAPTKENYDKSRRIKRGLFRSNKGILINADVNGAYQIIKKVSPNAFADGVEGVGLHPVKLNVA

SEQ ID NO: 27787 - protein, 665 aa, unknown
  TnpB Polypeptide
MKKSKPKVKEKKKDDENFDYMKTNKDNINNMIKDQTILPIINDLVNRTNKIVIHAYQFIKLYCVYQYENNLQFPVIDKEFIGDVFKVLTIRKCNKGGYTENTIPDKLKGLTNFYKTHYANTISNNETIYYDKLSYVLPYEAIDMTTNINNNIQEHFIDHLNKYVNIVFNIKEKSAQITKENKDKIIRKELHKKLYDEIGKVKKDLINFSDFTSDTIYHDWIRTQKNKLFPNKNSFDKNSIHYDLKSNTQDYLISMFHISNELEKLNEVRIQHEEKQIRLFNVLPLRTNIVGKNICIDTCALISNFLGDEPTSTHLKDYKKENNQYDLWNSFFKLNKRVFKKGQKYTFSFMIRTDGISGCSLFVRTDNDGNPLKKTNKNKKCCEEVNIDYIEKTELTDELRSMKVVCADPNHADLIYCGAKDENGNLQTFRYTQNQRRLETRLKKYNKIIDKINKKTKIQDRTIKEIETTLSNYNSKTCNYNKFMEYCVEKNNINYKLYNHYEQRLFRKLKLNRFTNTQKSELKMVNNFSNKFGKPENTIFVMGDYDKGDYHMKGLEPVICKKFRRIFKNAGYKTFLVNEFRTSKLCNCCHSELEHFLERPSQKPKYKKQNKTEICHGLLRCQSVKHNCEIIHNRDKNAVQNMLNIVSSVFNTGKRPDAFCRAINS

SEQ ID NO: 27788 - protein, 444 aa, Lactobacillus sp.
MKRMSSLACHFGIKLRFYPSSKQKKIIKLNYDAQRFVYNSYVGRNRTNYHARRFLASRQCQAMPFVFSALNRYETELAETVAANNELLAKPKNIRNAYSFLRVKEIDSLALANTIQNYQKAWNNYRKIGHGIPTFHKKRSDWSYQTNCQYPKQLEAYLDNGTAKFIDDKHVKLPKLGVVRIAGFRKLIEARLLNHIPTRIGTVTIKKTADNQFYLSMQLGSDVSFVKDLPKTQSQIGIDLNLDNFLTESNGAMVANPRFYRKAKKKLAHAQRVLSRRQRRAKQEGRNLRTASNYQKQRLAVAKLHDKIRRQRADFLQALSTALIKNHDLVVAEELRSKNLLKNHALSQAISDVGWRSFLNMLAYKAQLYGKEFLTIDPKYTTQRCHACGSIMGQNGYRKLTLRDREWACPMCHTHHIRDWNAAINILEKGQKLWQNPKTKEKAA

SEQ ID NO: 27789 - protein, 269 aa, unknown
  TnpB Polypeptide
MPYEVGELPPQPPGGDALEAVDQTRDRHRGREVHQQVHVVALPVELGHLGPEVRAHIPHDLLHALQVLGAEDGMPVLGDENQVGMEERRLRKAQKALSRKVKGSANRDKSRARVARVHAQVADTRRDWLHKESARVIRESQAVYVEDLCVAGLGRTRLAKSVHDAGWSAFTSMLEYKARRHGRTFGRIGRFEPTSQVCSACGAKDGPKPLHVREWACAACGTVHDRDVNAARNIAALGHREAQNACGDGVRPPLAVAAVSETGTHRGAT

SEQ ID NO: 27790 - protein, 405 aa, Nostoc sp.
MQKAFKVTLIPNHKQEILINKSIGCAKFVYNHFLALKQELYQTEKKTLTYNACSQRLTLLKKEIEWLQEVDKFTLQNSLRNLETAYKNFFADLKKAKGKKGVGFPKFKKKHGCKQSYKTNLTNGNIQVIKNRLKLPKCGWVRFHKSQDVIGTIVNVTVTRTLSGKYIASILCETEIEKHPQVSQNIGIDLGIKSYLVTIDGEVVDNPKYYRIQKRKLRSYHKKLSRSVKGSNNRAKAKIKLARTYQRITNLRDDFLHKLSTRLIKENSIICIENLQVANMVKNHKLASSITDASWSKFVAMLEYKALWHDRIVQKVGTFYPSSQTCNHCGFINPLVKDLKLREWSCPSCDNYNLRDVNASLNILSEGLKILTAAVGVPEALNACGELVRPGAIQAELVEAGITRL

SEQ ID NO: 27791 - protein, 446 aa, unknown
  TnpB Polypeptide
MSSLKAFRYQLRCKPGQERQLQRWAGQLRWLWNQALAEQKARHARSEPYASYVDMCHWLTTWRNAPATVWLASGPVHPQQQVLKRLDEAYKRFFARTGGFPRFKARGLEPGLRFPDPRQFTLDAANGRIQLPKIGWVRLRYSRPAGTGGPCGVAGTLRNVTLTSEGSGAGVRWYASIQVQGDEVLPAADLTPTLGIDLGVAAFAATSEGVLVAPLGALKRQQQRMRSYQRSVARKKKGSCNRKKAVKRLAALHRRIARQRADWLHQLSTALVNEHPVIAIEDLKVAAMSASARGTIAEPGRRVKQKTGLNRAMLDAAWAEFRRQLQHKTAACGGAVIAVNPAYTSRTCRCCAHECADNRKTQAIFSCVACGHTENADVHAAKVILARGIAAWRESGAKPANHKPTNQTAAGHAATACGGALRRARRASAAGAAPAKQEPTEEVAHT

SEQ ID NO: 27792 - protein, 366 aa, unknown
  TnpB Polypeptide
MMKIQMGMKFRIYPNQTEKARLAVQFGHARFVYNSTLAARKKHFELTGKGLSQFDCNKRITELKKDENFSWLKDADSQVLQQKSADVDIAYKNFFNHTAGYPSFKSKLNEQKIRYPQRVNFIDNTTYLPKVGYIRTKFHRPLVGSQKSVTVSKTKAEKYFISVLCEYETDQPVHNGPSVGIDLGLKDFLVTSEGAKTKHPKLLKEKEAKLKRSQRSLSRKVKGSKNRAKARLKLAIVHEKLTNARKDFLHKESAKLTSEFGFIGTESLKVCNMVKNHCLDKAISDSGWGEFVRQLEYKSTWKGGYVFKIGTFFPSSKTCHKCKHINSDLKLSDRLWTCPGCGSILDRDINAALNILEEATAGAAGI

SEQ ID NO: 27793 - protein, 382 aa, unknown
  TnpB Polypeptide
MYRAYKFRLYPNDEQRILINKTFGSSRFIYNYYLNKMKDNGYTSVYNNISDYTNKLKYDATFLQEVDSTVIKNSLFNLERAYKMKFNTTGEYPKFKNKYTKNSYNTTAVYSKYNGNEYSAIELDLKNKIVKLPRLNWLKIRGYRNLKNINGKIISANISKEPTGKYYVSILYKVTDVISNKLPRTIVGIDLGIKKLLTLSTGKTYENNKYIAKYEKRIKRKQKELSRKIKGSENYKKCKIELAKLYSKLSNARKYYTHKITKEITDEYGIITCESLNTKSMIINGKKNNLSSKINDATFTEIIRQLSYKSKYKGKKFYQINSYYPSSQICSRCDNQDKKYKDLKERDYSCTKCGQVLDRDLNASINIMNEGLKLYLKDLCVS

SEQ ID NO: 27794 - protein, 394 aa, Macromonas sp.
MAIETQTKTLKLRLKDKHAGFLREHARAVNFVWNFCNELSVKHFERKREFMSAYDMQPYTKGASAELGLHSQTVQAVQEEYCTRRKQFKKVKLRWRTSRGSRRSLGWIPFKASALTYKNGQVWYAGKPLSLWDSYGLSKYKLGTGSFSEDARGRWYLNVTVAVGCKPEVRVPLSRAALGIDLGLKEFLTDSEGGSVAAQKFYRDMQEQLATAQRANKKQRVRAIHAKIANRRKDFLHKLSTKQVNEHCAIFVGDVNAAALAKTTMAKSVLDASWSAYRTMLQYKSHWAGTWFKEVDERYSTQECHVCHQRSGPKGRAELDVRSWTCEHCGTKHLRDHNAAINIRDRGLAWLEQQFADTKVLRGEPQSILNKAFEPFGAKVAAGRGRLAGGIPAL

SEQ ID NO: 27795 - protein, 316 aa, unknown
  TnpB Polypeptide
VKLVVPVRLYPDAAQHTALRDTLTLCNEAASLVSAQAFQMRVTSRQPLQRLVYGDLKQMGLSAQPAIHVARKVSGAYATLKANIRAGNLGDPGSKRRVKAGSKPITFRADAAQPYDDRCLSWQFDRRTVSIWTTAGRMAGIRFRCSDAQFARLREYRQGESDLVHRDGKWFLYATCDVPEPDLTDPGGFLGVDLGIANIATTDDGTRHSGKYLNRQRHRSRHLRRKLQAKGTKSAKRLLRKRSAAPVGPVEFLLRGEHGSRLVNTWPCSAVSSSGASHLPDRLLRGQGELIALGLGGGLGFGRAQRRVVLFGVASP

SEQ ID NO: 27796 - protein, 238 aa, unknown
  TnpB Polypeptide
VKIKQHRALGKEETIKSVTVSKKAGRFFISILVEFTPQEIEKVISSKNSKAIGLDYSSPYFYVDSNGNSPSNIHFFRESEKKLAKLQHNLSRKVKGSSNYKKELLKIQKLHLHIANQRRDFAFKEANRLTEMYDIICFEDLNLSNLKRTLKLGKATSDNGFGMFRTIVKNKCEEKGKLFIKIDKFFPSSKKCRHCGNINKNLKLSDRIWTCPYCKNPIKRDLNAAINIKEEGLRIALL

SEQ ID NO: 27797 - protein, 543 aa, unknown
  TnpB Polypeptide
MDKEVLKMLTEKKSDSNFVTVECLLAFDKDEDKGRVLTLMRKFSSMVRFAYKRLMGGAERKELKKLLAQKYGINTRYSSDAIVLAQQTLESCLEREQNPKKLVFGSRELFEQLNKKHLTGKRRETLRQKWEERRYGILYSRGDKSKEGNLNLRLVNLNNQWYLRINLGNGEYVWAKVIRAAKRKTDKWAGFISETEHAAKTGDWFPYTVRLKLRNGRIYAQFSREERLPEVAVTKDNGVIGIDINAYPFHLALAHATKDGNLEKYERISLDRLLEGSSDKREYLSWQTAHQVIEIAKRERKAIVVENLEKLPKGKRGDGLPKLRQRMHKWVYKGLLQKIEIVARRSGIQVIKVNPAYTSIIGKLKYSPLYNIDKDTAGAYVIARRGLGFKERLPKNYRGLLKDADFLSYTIAKIEDKIAKLKQEVREEKNEYKRNRLKSVLWKTRNELDTLLIYLRESGESESATQQTVNRKMERVRGLTHVRQKSWQVLSVALAFSCLESLRDFSPLKRVIFARDWVGVAKRNGLVPLTGQGTTVLNMYSFV

SEQ ID NO: 27798 - protein, 390 aa, Nonomuraea sp.
VFEVKLVVQVKLLPTPEQAAALEATLYAVNIAARQVSRLAFEQRTFRNYDLRKHTYEQIKAAHGLAAQAAQHVIKKVADAYTALHANLRNGNLGKQGSPRRLRAESKPITFHPLAAQSYDDRCLSRQIDAQTVSIWTVRGRVKNLAFTASADQLKTLAAHRKGESDLMHRDGMWFLIATCDLPEVPLNHPGGFVGVDLGIANIATTSSTGTGTGTGTRHSGKGLNAVRHRHRELRRRLQAKKTKSAKRLLKRRRRAETRFAANTNHVIAKQIVTEAERTGQGIALEDLQGIRERVRLRKPQRVTLHSWSFHQLGSFIAYKARRAGVAVIYVDPSYTSQQCSHCGHVDKRNRPDQETFACTSCGFAEHADVNAARNIASRGVTGWAVSHAA

SEQ ID NO: 27799 - protein, 392 aa, Caldilineaceae sp.
VDLPHSTTIHRTYQVRGYTSASGHARVREVLRVCQQLYNRALGECRAIYRLTGKTVSKYTQMKWLTTWRRESQKLGDIDVRVARGALVRLDRAYQAFFRRVKAGEGFGLPRFKPIQRYRSIELSAVRPGMVKGNKIRIKGLPLIRIKPSRPLPDAELKGIHLVQNGKILSVNLVYAEAAQPPPASERAVGIDMGVNERMTFSTGETVARRTPDRARERRLRRAVARKQKGSKSRRKAVETLARHKRKEAVRNRNDCHAITSALAAQYGLICIERLRINNLTASGGTRKRGLNREMLGQTWGVIRQQLSYKAEWAGRQLVEVDPAYTSRTCSECREVQPKPRVYRLFRCSGCGHVEDRDVNAARNILERGRGFAAGGATVEVVDSCRAAGNIS

SEQ ID NO: 27800 - protein, 288 aa, unknown
  TnpB Polypeptide
MLIVPYSNSFKKTHQEVKVKLPSVLKDKKIKEIRIIPKQHSRYFEIQYTYEVKEIQRELNKENVLGIDLGIDNLCTCVTNTGASFIIDGRKLKSINQYYNKINAKLQSIKDKQKIERTTLRQKRITRKRNNRINDYLSKAARTIVNYCLNNDIGKLVLGYNEDFQRNSNIGSINNQNFVNIPYGKLRDKLIYLCKLYGIEFKLQEESYTSKASFFDGDEIPIYDKENLQEYVFSGKRIKRGLYQTSAGKLINADCNGALNILRKSKVVDLSVLYNRGELNTPKRIRVV

SEQ ID NO: 27801 - protein, 488 aa, unknown
  TnpB Polypeptide
MASEVNFVWNYVNDLCFKHLQRKQQFFSEYDIAKYTKGASKECNLHSQTIQAITEELVTRRKQFKKAKLKWRVSDKKSARRSLGWIPFKKAAIKYADGYVQYGKHQFKLWDSYGLSKYNVRTGSFVEDSRGRWYVCLVIDSPKQEKPMATKAIGIDLGLKNIATCSDGVVIASPNYYRKYEQKLGIAQRARNKKHVRVLHAKIANCRKDYLHKVSSKLVKENALIVVGDLSAKKLVKTKMAKSVLDTGFSALKTMLKYKCENAGVWFEEVNESYTTRTCNFCRGDTGPRGINGLGIREWQCMECGTLHDRDINSALNILALGHERLVGGIPSLEAGEDVKNDIAAILAVDKNLGLGYKNNILFKNSIDMSHFSNISKQYRYCVVGRKTAESLNFKLKDRELLVLSKTSSLTKEDILNTYSKFIIIGGNEIYSLFSKEITTWYVTLFNNVATDVDVYLNKDIYSLILTYPSTVLYQNEELTILKYTKVT

SEQ ID NO: 27802 - protein, 374 aa, unknown
  TnpB Polypeptide
MQITHKFRLYPSKEQEGKLLETLELCRQTYNYFLSQWDGKNKIPSRFELQAQLPSLKRDKPELKNINSKVLQMVLYQLYSNLKALSQLKKSGKKVGKLRFKGKGWWKTFCCNQSGFKITKTRKRLDILHLSKIGDILIRVHREVKGKIKQVIIKRHSSGKWFACICVEQEIQIEKRNVRSVVGIDVGVKHFLTDSDGRQIENPKFYEKTLKRIEVAQHWLSRRQKGSRNREKQRVKLAKLIEKVVNQRDDFLHKLSRFYVENYDLIATENLNIKGMVRNHNLAGRILDASWGKFLQMLSYKAENAGGMVVKVNPRGTSKEYKFGNLDRDYNASLNILMRGWDSPKTPVEMGPLRELTQVPVSSVVEAGSPHPSG

SEQ ID NO: 27803 - protein, 366 aa, unknown
  TnpB Polypeptide
VKINRAYRYEMKPNADQRILLAKHAGTARFAYNWGLARRITLYQEEKKSTNAMVQHRELNQLKQTEYPWMYEVSKCAPQEALRDLERAFKNFFAGLKTGKKAGFPKFKKKGVHDSFRLTGSIKIKDKAVQLPRLGVIRLKEKSQTSGRILSATVNREADRWYVSLSCETEISDPIPVKGEIIGIDVGLKHFAALSDGAKIEAPKPLAKYLKRLKRLSRKHSRKQKGSHSRRKSALALARLHRRIRNIRQDFLHKLTTNLAKTKSEIVVEDLNIRGMLRNNRLSRHIADVGWGEFRRQLSYKTVWYGSMLTTVNRFYPSSKTCSNCGHVLEEMPLNIREWDCPSCDTHHDRDINAAKNLQKQARRIA

SEQ ID NO: 27804 - protein, 330 aa, unknown
  TnpB Polypeptide
VAKKSRRYGWLKEYDSIALQQAVINLDVAFSNFFNPKLKAGKPTFKSKHGRQSSYHCVGIKVLDAAIKIPKILPIEARLHREITGMLKSITLSRSATGKYYASLLCDDGMEAPAKPALISNVTGLDMGLAHFVIKSDGNKIASPRHLINASRNLRRKQKALSRKKKGSANRRKARIQLAAVHERVASARADFQHKLSRAIVDENQAVIVETLKTANMMKNHHLARAIGDAGWSGFITKLEYKAAEKGVHLVKLDQWFASSKTCHCCGHKMSEMPLHKRIWQCPECGVEHDRDINAALNIKRKGILELQAAGLVVSAHGGQRKSVTQTVAA

SEQ ID NO: 27805 - protein, 418 aa, Lactobacillus sp.
MAKLSMKKLPYHYGLKVRCYPYSQQKAIIKRNSDASRFVYNELVAINRELYQLKQVKLPLDTVQRRIYQLEQRKKTTKNISDEHLFLCHKDIDSLCLANAKQNYAKAWKAFRKVHRSGIPVFHKKSYCWKYQTNAQYSDKAVLPSLLNGTVKFLDRNHAKLPKLGLIRTSAVRGKIWHMRDVVRIGTVTVTKDSADCFYLSFQLGSTQPFIGAVTFTNEKLGVDLNTENFLTDSNGTVVANPRYYRKVLKQLNRQKRKLSRRQVQAKREHRPLRDAKNYQKQRLLVAKMQVKVAQQRLNFLHNLTTELVKNHDLLVAEELRSRNLLKNHALALSISDAGWRIFLQQLQTKADLYGKTFVTVDPRNTTQTCSKCGCLLRGDNKLTLRDRSWQCPQCQTKHQRDHNAAKNILAKGIDQLA

SEQ ID NO: 27806 - protein, 405 aa, unknown
  TnpB Polypeptide
MRRLQAFKYELMPAGEQRRRMCRFAGSCRFVHNKALALQKESYRQGGKKLGYAGLCKLLTQWRNSPDTAWLADAPVHPLQQTLKDLERAYANFFAKRADFPRFRKKGRHDSFRYPDPKQIKLDQGNRRVFLPKLGWLFYRNSRDVLGTVKNVTVSWSGDKWFVSIQTEREVEPPTPRGDAVGIDMGVVRFATLSNGKFHAPLNSFKRHQDRLRKAQRAMSRKIKFSGNWKKEKSRIQKIHARIGNARRDFLHKTSTMISKNHAIVCIEDLRVRNMSKSAAGTLDAPGKNVRAKSGLNKSILDQGWFEFRRQLEYKLAWAGGWLVAVPPQNTSLACPRCGHVSADNRRTQARFECRQCGFEEHADVVGAINVLRAGHARFACEVSGASRPPAAGTHRSDSGAALCA

SEQ ID NO: 27807 - protein, 335 aa, unknown
  TnpB Polypeptide
MVRRTQEEKDGRWPCSRLQVAPSQPGLRLLAQRLQDRQCHLPQDRPEVRCGRHHRHEPDAMAQARREAPLARRHPRAREPADTALHQRPCRLDPSDARVRQHAPAVAKNRQWQGRHRPCCVHTLALSDGTFMDMPKPSKAELKRLRYLQRRMARQDRTNEAKGGRAAKFASKRRQRTLTEFNTLQGRIVRRRNDWIEKTTTTLAKANILVAMEDLDVKAMTKRPKPRPDPAKPGQYLHNGARTKAGLNRSILSNNWSRLMKRLNDKMDANGGRLAIVPAAYTSQTCHQCGHVAKENRESQAVFRCVECGYQANADVNAAKNILGRALVKTGGDTA

SEQ ID NO: 27808 - protein, 418 aa, Moorea sp.
MKHKAVKVRIYPTKEQIQVLDQHFGCARWWWNYALNQCIETYKETGKGLKQSALNSMLPKLKKEKETEWLKECYSQVLQAVSLNLSRAYQNFFEGRAKYPRFKSYHHRQSIQYPQKVKQVGDCLKFPGKLGVVKAVIHRPLDGVIKTVTVSKYPSGKYYASVLMECESKAVKPYKDGRVMVRKEPLKAIGIDLGIKDFAITYDGEKTSKFSNPKHLAKYEKKLAKKQRIAARKKKGSNARSKARKIVAKVYERIGNVRQDYLHKLSRKIVNQNQVVVVENLNVKGMVRNHKLAKAISDLSWGTFVNFLSYKCEKEGKVLIQIDRWFPSSKTCSNCHYRIKELPLDVRSWVCPSCGTHHDRDGNAAKNIRAEGIRMLSSSGTGEVNASGEQVRPKRGRPSKLRHSSVKLEAYTVSNGSV

SEQ ID NO: 27809 - protein, 427 aa, Nocardia sp.
VNGQVKRGFRYRFYPSEVQAAELSRTFGCVRKVYNLALQARAEAWTLRGERVGYGATSALLTAWKRTEELAFLAEVSSVPLQQALRHLQTGFTNFFAKRARFPRFKSRKKSRASAEYTRSAFRWRDGALTLAKMAEPLDIRWSRPLPAGAVPSTVTVSRDSAGRWFVSLLCDDPAVRPLPATDAVVGVDVGLDHLLVLSTGEKIGNPRHERRDRERLVKVQRALCRKQKGSSNRARARVAVARVHARIADRRSDFLHKITTRLVRENQTLVIEDLAVSNMVSNRKLARAITDAGWRQFRRQLGYKAKWYGRQVIVVDRWFPSSKLCSVCGALVARMPLHVRTWTCGCGATHDRDVNGARNILAAGLAVSVCGADVGPQRNPPGGRSAAKQKPRGASRGSLLVHEEEEVNCGTTRLRRRRAPACWLPR

SEQ ID NO: 27810 - protein, 412 aa, unknown
  TnpB Polypeptide
MTTIQQVEKHIIKKSHPIYSMFCDYTHLAKNLYNHANFLVRNEFTNTGKWLRYQELDRILKKDVDYPDYKNMSAAQSAQQTLRLLDGNWKAFFKSIKDWSKNKDKYTGKPKLPKYKPKGGRMVFMLTNQQVRLKDDLLHFPKSFKGFTMKPRCIYLSNFKKINQVRIVPNNQVFCVEIVYSISVDDTLLSDNGRYMSIDLGLDNLATIVTNTSLNPVIVNGKGLKSNNQYYNKKKAHYQKVAKQMNNKFYTNRLYRLTQKRNFKIEDSLHKISKFIVTSALSNDIHTIVIGNNKDWKRDISLGKCVNQSFVTIPHQKLIEKIVYKARNVGINVILTEESYTSGTSFIDGECPKKEFYDKKRRKYRGLFVSNQGVSVNADVNAAYQIMKKVFPNVFADGIEGAVFHPVRVDII

SEQ ID NO: 27811 - protein, 364 aa, unknown
  TnpB Polypeptide
MRKTFKYRLYPTGHQAQALDAQLGEACRLYNAALQERRDAYRHAGISLSYYDQANQLKDIRAEDACGLANFSCSQDVLRRVDKTFKAFFSRVRRGETPGYPRFKPRSRYDSITFPSYGDGVRLRDNGKLYVQGVGEVKVKLHRPVAGRIKTVAVKREAGRWYVCFSVEAVAAPDASIYDDIGIDVGLSSFAVLSDGTVIDNPRWYRQAQAKLRIAQRRVARRKRGSKGRRKAVQLLQRAHAHVRNTRRNFHHQTARSLVDRYSVIFVEDLNIKGMARGMLAKSVSDAAWSSFLQILRDKAEEAGCVVLGVNPRGTSQTCTCGAPAPKTLSQRWHDCLDCGLSLARDHVSALLIQGLGRSLVGLT

SEQ ID NO: 27812 - protein, 428 aa, unknown
  TnpB Polypeptide
MAKPKKLLGTQQNLLNCDAETKAILTYLCEQSNSLYNCGIYWARQIFFKTNRIVSKYDPIYAVGDNIHAQAMPSVAAQQTLLSVSEAFKSFKGLRELFFKGELDQKPKAPDYRDSGGLFKVAFPNIGAGKPTLVNGLIRFPLGLRVKRWFGLKEFFLPLPANLDFDKVKEFTLLPKNGAFYLECSYALTKVETRLDLDQALAVDLGTSSNLMACVDTLGNSFLVDARQAKAMNQLYNKRVANRKAGKAQDYWDSTLDRFTRKRNHQMRDMVNKAALLVAKHCLEHGIGTIVIGWNDGIKDGCNMGKKSNQQFVQMPLARIKTRLEQLSLIYGFRVVQTEEANTSAGSYLDGDSLPAHGCKPDGWKASGRRIKRGLYRSGDGSLVNADLNGAANILRKVANNLGIDLSRLGRRCLTTVGRMRLWATPKV

SEQ ID NO: 27813 - protein, 247 aa, Escherichia sp.
MASWLVEWKNATETQWLKDSPSQPLQQSLKDLERAYKNFFRKRAAFPRFKKRGQNDAFRYPQGVKLDQENSRIFLPKLGWMRYRNSRQVTGVVKNVTVSQSCGKWYISIQTESEVSTPVHPSASMVGLDAGVAKLATLSDGTVFEPVNSFQKNQKTLARLQRQLSRKVKFSNNWQKQKRKIQRLHSCIANIRRDYLHKVTTTVSKNHAMIVIEDLKVSNMSKSAAGTVSQPGRNVRAKSGLNRTILD

SEQ ID NO: 27814 - protein, 534 aa, Verrucosispora sp.
VKTVQAYRFALDLTAGQERDVLAHAGAARVAHNWALAKVKAVMDQRTAERSYGVPDERLTPSLSWSLAGLRKAWNAAKPDVAPWWAEVSKEAFNTGLDALARGLKNWADSRTGKRAGRPVGFPRFKSRRRTTASVRFTTGAIRVEPDRMHVVLPRLGRLKLHESARKLGRRLEAGAARIMSATVRRDGGRWHVSFTVEVERAERGPARPGAVVGVDVGIKHLAVLSTGEMVGNPRHLVAGQRRMRALGRALSRKAGPDRSTGQRASKRWERAAARLGRAHARVANLRRDGLHKLTTRLATTYGTIVVEDLNVTGMLANRKLARHIADAGFAEIRRQLAYKATWNGAGLLVADRWYPSSKTCSGCGAVKTKLALHEREFACEVCGLVIDRDRNAALNLAALAAQFDTAGSGPVAARGADQKTRVRGQVAAKREPGTASAGQTGTVPPQGRTIDRVLTKAHWKVTVCQACGSVASGVAAADGSVVRPAPREDVPGGCPAGVDVRPADDRCACLGCGTGADAAGRASGRWSCRARTA

SEQ ID NO: 27815 - protein, 373 aa, Methanobrevibacter sp.
MKTVIKGYKYRIYPTKEQEIQLAKTFGCCRFVYNQMLAKKIELYKTEKKSLSKFDSKKYMTNQLKKEYPWLKEVDKFALENSIFNLQDAYQKFFKEHTGFPKFKSKHNHYYSYTTNFTNNNIKVLFDDNLVQLPKLGKVKTKLHRIFTGKILFAAVSRVPSGKYYVSFNVECEHEELPQNNNKIGFDLGVKEFLIDTNNNHIENPKILYKYEKQLKKLQRQLCKMQKHSNNYKKQTKKIAKLHEKIANIRNDFQHKLSSQIVKENQIIISEDLNISGMLKNHNLAKAISDVSWSEFTKQLQYKAQWNDRIYHKINPWFASSQTCNECGNINKEVKCLSIRQWVCSECGAIHDRDENASKNILKQGLKELGINA

SEQ ID NO: 27816 - protein, 397 aa, unknown
  TnpB Polypeptide
MKLTEQIQLYKSIKLCELCHLAKDVYNTANYLVRQAFFRENRWIRYYELNELLKTSIPYRALPSQTSQQVLRALEQNWKSFFNACRERRVHPEKFQGNPKPPKYKRKRGEFVVIFTNQQCAIKDGYLRFPKRVELEPIKTRVTNPLHQVRIVPKGLYYVLEIVYEKESIDLKLNKDRLIGIDLGLNNLLTIVNNAGLTPIVIKGGIVKSTNQFYNKQLAKYKSLTDKQGFHASETRRLQRLSLKRNNKIRDSFHKASRFVIKYCVANNIGRILIGYNATWKQEINLGKKNNQNFVAIPFLQLIHQLQYKGELLGIIVDTTNEDHTSKCSFLDDEPITHHERYLGTRTTRGLFKSKNERIINADCNGAYNIAKKAVPNAFVADGIEGVGLHPVLVKLS

SEQ ID NO: 27817 - protein, 625 aa, Rhodococcus sp.
MDDVAAVPASLSGRVSGRCGRHGINDGVSTTPRQFAFTTRAHVAVDDATGERIGLDDVDTRVGWLLDLIAAAGAELVSRLWHPATFDVLAAGRDRQERRLPTQGHVAAARLGWDPHYPEGVYVPSRVTRVVTAQVMATLRTLTFRDTAIAALSTRFDPDTGVVAPPIGSGDHVPSGFARGVRRQLAARARRDGGAPAGRLRITDVQGPPQTSAMARLSAADRQLAQLAVTVAERELMLTVKLPTCPAPAGRAQWRSIRLTAAIPEHLHRRAITDWHLPTLVLDRRGLLWRCAATELAPAAEMAGTVAVGVDWSPSTLGAAAIAADNPEGLVSDYRGFTYDDRGLGIKLARLQAEGQLLHRKAARLTQLAATAPPEVRAQLEEKIAVLDEHRTAVGIKRGKINRELAFHFAHQVTAYADAAGAHVIAVEDLTTLETRGHGRVNNNRAAKSARRKAVTALAHTAAGVGIAVVSVPARGSSALCPGCDEPLARPGGYHTAWCPSCRVGGNRDHLAGVNLAKRALLGKNKVTRRRGQMPAIRVAEHAPVRPSRDKHAPTPSRPRHRRVRRSRPTVTPRLGVTPKQHVPAPQASVWDTVKLTPPHGDAGSRDTRTSPTPATPVADSMRFT

SEQ ID NO: 27818 - protein, 454 aa, unknown
  TnpB Polypeptide
MEGTVLKDQNGYFTILGNNQVLTRCRSRGALKKKTDVLVGDHVEYEANKGFEGVITKVYKRKNQLYRPPVSNVDELVLVSSICTPDLNRGLLDKMILLAENANMSPVICINKCDLDEVSAKRVCEEYEKAGYPCIYTSTYTQDGLDDLKKLLRGRIIVFSGPSGVGKSSILNYFLGRSYFTSGAVSAYTGKGRATTRHAELVPFKTGVFLMDTPGYTLLDIDLLDVDELGFLFKDFRPYLGKCYFNNYKNELIKALQNKNSTPLTYSIIRKNSRYYLHCTFEYRIENKSNFLTRKTYGTIGLDFNKGFIALSEIDRNSNLIGTDILKYRFGKGSKTQSDLEKCISKILKRALETGKDICIENLNFKAKKFKTEKAKTKKGKQYNNMLHSLSYTLYDKLITNISFRNKVNVIKINPAWTSWIAKNKFCNRMKLNIHIGASFVIARKGIGIKDEVK

SEQ ID NO: 27819 - protein, 443 aa, unknown
  TnpB Polypeptide
MSTVERNVYCASYSLPYSGNESLVNAMHKSKNLYNATLWYYRQALEDHRKAKEENRDPVTEYPDYYKMERKFRDERQINYFDLPQKVSQWVLKDVQSDWRAFAKLVVWKKSLPDSDPRKQQEISPPHYKYKDGHARLRYTKQAFSLKAVPGKIMPSGTDTALDIPKFVNPYRITQLVIEPEGDRHMRITFIYKVDMCDMLADNGKVAGADLGVNNLVTIGTNVGRGIIVDGKPLKSVNQWYNKRMAELRSLNGILYEKEINRKVETQRHRKTAKMERLSRNRRNWIRNYLHWASRRIIDFIASAGITTLVVGKNVGWKQECDMNKVNTQNFVQIPHARLIGMLSYKARQLGIACLTSEESYTSKCSFLDNEEMCHHDRYAGRRTKRGLFISASGKKINADLNAALNMIRKVIPNAFQAQGIEALVVAPVRLLWRTKLEIGAFH

SEQ ID NO: 27820 - protein, 115 aa, unknown
  TnpB Polypeptide
MYIPAKIESNKSEDLNIKGMVKNHNLAKAISDVSWSEFTRQLRYKAQWNDRIYHKIDPWYASSQLCSGCGCQNKEAKCLSIREWVCSECGSTHQRDENAAQNILKQGLRELDISA

SEQ ID NO: 27821 - protein, 372 aa, Alkanindiges sp.
MKHRAYRYRFYPTPDQVKLLAQTFGCVRFVYNSILRWRTDRYYQSKENIGYLQANARLTELKKMPEFAFLNEVSCVPTQQVLRHQQAAFKNFFEGRSKYPTFKKKTSKQSAEFTKSAFKYTDGKIYIAKSKEPLDIRWSRDLPTSPTTLTISKDCAGRYFVSCLCEFENPILPKTNKTIGIDVGIKHLFVTDNGHKIANPRYTAKYKNSLAKAQRVLSRKKIGSANRIKARQKVARIHAKISDCRLDNLHKLSRELINENQVICVESLRVKNMIRNHCLSKHIADASWGRFIAMLTYKADWAGRRLALIDQFFPSSKRCSSCGYILDKLNLETRFWTCPKCKNNHDRDINAAMNIKTAGLAGLAFGENVSPV

SEQ ID NO: 27822 - protein, 427 aa, unknown
  TnpB Polypeptide
MCYAAFKLWNVCNYERRRYKELGLEKYPDWYYQKKAHKGDLWYRQLPSQTAQETCKQLDKAWKSFYVLKKTGGIKEPNPPRFKQDNIPITYMQMGIRHEKGSDQLRLSLSKDLKSYMEEAYGIHEKFLYLENKIFRNMDHIKQLRIYPPEDGKCDLIVIYEVKEPEPLSLNGHYLSIDLGIHNLMTCYDSGNGRTFILGRKYLSLERYFHKEISRVQSIWYAQQSGNGIKYPRSSKHIKRLYRKKQNAVKDYLHKVTRWLAEYCKKERISCVIIGDIRNIRKGKDIGHKTNQKFHGLPYNKLYIMLEYKLKLYGISLTKQEESYTSQCSPFSPEISKRYAEASRQKPGNRLIHVAVPLRGRWACADHSLPLHRNPRKVQCSRIPEWLSGRLPGRRSLQPFQQLKRECDPSIYRWSEELVIQLQPKRS

SEQ ID NO: 27823 - protein, 380 aa, unknown
  TnpB Polypeptide
MLRAVKIRLYPNKTQEQTLNKVLGCYRFVYNQMLAQKQKAYKADKTNLKVTDLSKWFHGTLLKDEQYAWLKEQNTKVMKQAIRQMDGAYQKFFKQHNGFPKFKSKKDKQSALFPYEAISKHNTFETRNISLTTPLKNIKFRCSDLYFRRLQKYNKNIRSATLSKTKSGNFFLSILIEMEDTELKRFEHTNKQVGVDLGVKDFVIKSDGEVFENKHFFKKEEKQIKKLQRQLSKKVKGSNNRKKAQVRIAKLFERITNKKDAYIHYVTNELLANFDTIFMEDLNVQGMLRNHHLAKAIQEIGFYKFRDTLVNKATANNKRVVFVDRYFPSSKTCSVCGYKKRDLMLSDREWVCPNCGTHHDRDINAAVNILLEGQRMLVAE

SEQ ID NO: 27824 - protein, 408 aa, unknown
  TnpB Polypeptide
MNIKSWFLTKQITAHNKNSQKSYVQTFFSARAERMVSDAIVTKARRIRIYPTQQQKQLFKQWFGVGRKVYNTCINHFNEKDIEFNGWMNMSTVVLAELTEDYIKSVPYQIKKIAVKDSYIARQTNCKKTNKTGKPFKLRYKSRKNPVQSCYIPKSAVSENGIYHTISGKQKFSEREWMKNDICDCRLINDHGRWYLSVPQKITTMPTENQGGIVALDPGVRNFLTYFSEDGRFGWLGIHAFDRILTLNLKRDHLLSRLALTKDNKKKCNLKRTLNRTYHRIQDLVDELHWQCINYLVHNFSVIVFPPFEVKGMTKKGRKLRKSVVRSMLSLRFFEFKERLKQKCNECGITYIEQNESYTSKTNSFTGELMSNLGGKEWFMYDGIKVHRDLNGARNILLRAMRDSSAAD

SEQ ID NO: 27825 - protein, 500 aa, unknown
  TnpB Polypeptide
MIPATSVEHRLVQRSAVFALDPTGPQNRALFAHAGAARFTYNRLLAEVQANLSQREAEKSYGLEGEQLTPSLSWSKFSLQKLWNARKDEWATWSGENGSRAYRTGASNLARALENWSTSKSGKRAGAKVGFPRMKKRATAKLSINFEDTAHLASGSTGVTVPRLGRIHLLGDVTGLRKDLAAGGKINSTTISYRGGRWQASFQILAPIPTRHQHRARTTRRQPVVGVDVGVKDTVVAATPDGREVMRIPAPRHLKAAATTIARLQRKAARQVGPYDATTRRRQTPSAGWRRTQADISRLHARTSHLRANHLHHITASLAAQFETVTIETLNVKGMMAKPAPRPDDAGGFERNGRAAKRGLSRSIADASPGELHRQLDYKVSWAGGQLARVDRFFPSSKTCSNCGVVKAKLPLSARVYSCEDCGRSLDRDLNAAINLARHTAGHPHAVSGSGSGLVSGRGAHSRPPGRHRPNDTATPPESRGLLRQKAQTVSSTRRKSQLT

SEQ ID NO: 27826 - protein, 446 aa, unknown
  TnpB Polypeptide
MSDKISIIHRSLKIRLYPDKNQKILLNKTFGCCRLLYNERLAEHIEWYNANKGLPKDQRSKFKGKLPKQLREEKYEFLSDAIAEPLIQSQRNCEQAFSNFFKSITKQRKGKKVGFPKFKSKKQHRDSFSIYMLPKNCLDWEHRLVAIPKLKQVKFRHAEDKSKKWIGWFKEATIRSMTISRNACEEYWCSILFEREQDIYSTICPIKAIGLDFSPNSLYINDLNEVAPGFRKAKQENKKKLTRLQRNLMKKQKDSKNREKARIKLAQFENHIANIRRDYREKETLRLVRTYDIIGIEDLNLQGMMKFSHNAKNYVDCSWYSFVTRLEQKAKSNNCLIIKSDRFYPSSKTCNHCGYVNKNLKLSDRTWICPKYEAEIIRDQNAALNLKENALKILLEEIKSSLLLEQQEVMSMEDMEINLCNSEICGVSVEVENQSGDALKKKLFGL

SEQ ID NO: 27827 - protein, 385 aa, Lactobacillus sp.
MIKTQVVKLKVNKTMQKHLDNLCDYRRYCWNKGLETWQLMYEAHTLNRKDNPSPNERRVRDELVAKKEDWQYELSARCLQLVVKDLANAWKNFFDKAQSDWGKPSFKSKKAPRQSFKTDRAKIVNGKLRLDKPRSVSKEDWFDLSSYGALKMSEVKVVSIFKEKNAYYAALPYEEKIEYKSKTHQKTAVDVNVGHFNYTDGQINVLPVKLQKLYKRIKHYQRMLVRKREINGKSAIKSNNYSAVRTKLQRDYRKVANIQNDLLQKFTTKLVDNYDQIVIEDLAVKDMMMTHVASKGMQRSLFSKFRQILTYKCDWYGKELILADKTYPSTQRCAKCGYVKTGDEKITLQGNQKHGTKHNEYICYKCDYSNDRDENAVLNLLALAR

SEQ ID NO: 27828 - protein, 287 aa, unknown
  TnpB Polypeptide
MAWKPLSKGMVNISLRRLSKSLKRFLAAKKHDIPYVGFPRFKKPHRWHSIQLRQYGTESNRRDVMLASDTNHLSVPAKIGKSIEIKLHRPLEGTPITLRRKQRALCRRKKGSHRRRKAAKSVAQTHLKIRRQRRDFHFKGAKQFTDTHSIIVVENLCINTMVRNHSLAKSIMDARWGAFLAILSVKAENAGHRVVRVNPRSTSQKCRACGAIVQKTLSVRTHMCPFCGSVADRDVNAAKNILQSVSGQGMAIRSQRTGVPAASPEKPLASSYRELSLSPVALFSGKE

SEQ ID NO: 27829 - protein, 110 aa, Okeania sp.
VRPRDYASSLAERAPRDHKLAIAISDANWGELVRQLEYKAEWYGRKLVKIDRYFPSSKRCSNCGYVVEKLPLNIREWDCPECGIHHDRDINAAINILAAGLAVSVCGARF

SEQ ID NO: 27830 - protein, 270 aa, Microcoleus sp.
MLVFEFKAYGKKQQFDAVDEAIRTVQFIRNKALRFWMENEKVDKYALNKYSAVLAKEWTFCDDLNSMARQSSSERAWSAISRFYDNCKKKVPGKKGFPRFQKDNRSVEYKTTGWRLANDRKSITFTDKNGIGKLKLKGTRDLHFYQRSQIKRVRLVRRADGYYVQFCVQVDRSEKIEVTGNAIGLDVGLKEFYTDSNGVAVENPRFLRKGERKLKKVQRRVSKRVKGSQNRRKARVILGKRHLKISRQRKDFAVKLARCVIQSNDCVAVR

SEQ ID NO: 27831 - protein, 399 aa, unknown
  TnpB Polypeptide
MKLRYQYRFYPTDQQRQSLAQLFGCVRVVWNDALAFCKDSEKLPSYNELSKQLTQCKQTEERKWLKLVSSVPLQQSIRNLSTAYKNFFDSINGKRKGKKINPPKFKSRRSKQSATFVNSGFVVKDDNRVYLAKIGFLDVAWSRPLPSLPSSVTVIKDAANRYFVSFVVEVNPEQLPDNGQAVGVDLGIIDFATLSTGEKIKSPKPLKAKLKRLRKCQRNLSRKQKGSNRRGKARLRVAKLHAKVKDTRTDFLHKLSTRLIRENQTIILEDLNTSGMLKNRRLSRAISDLGWRSFRTMLEAKSVMYGRDFQVISRWEPTSQRCSCCGEIGGKKELSVREWTCLFCGATHDRDINAAINIKVAGGHPETLNGRGGNRKSTSVVAPVESSTHPLFTQLSLFG

SEQ ID NO: 27832 - protein, 103 aa, unknown
  TnpB Polypeptide
MLVGVKLLDNLNISATGMVGRTFVKIDRWFPSSKRCGHCGYIVDKLPLNVRKWDCPKYSTHHDRDVNAAKNILAAGLAVNVCGANVRPEQSKSVKASARSQRL

SEQ ID NO: 27833 - protein, 372 aa, unknown
  TnpB Polypeptide
MRAYKFRIYPTKAQEKELNSHLRQSKESWNEMLEFTKELYNNYGKFPTKNTLREFVKYRGLYSQVGQELVDRFYDSLWKKSSPKAGFPRFKPLDRMKSLAYPQFGFSLGEKLKVTPFGEFSIKKHREVKGIIKTLTLKREASGKWFAIFCVQEEKRSPKENKGEKVGVDLGLTNFAALSNGRFIKNPRYFRKHEECLAHLQKRQARHKKRSKNWKKAKRKVAVEHERISNSRGDFLHKLSHELVNTYSLIALEALKSKEMAEQNFGKSIHDAGWNKFANMIAYKAEGAGCKIVFVNPRNTTKECSCCGAVVEKTLSERTHNCPICGLSIDRDLNAARNILTRATAGTAGSNASGDETAVSSRKEDATRFIGL

SEQ ID NO: 27834 - protein, 183 aa, Geomicrobium sp.
MNNHRFTKAMRQKLAREQRKLSRRAEGAKRRGTPLHMAKNYQKQKRVVARLHEKVANQRKDFLHKLSTDLIKNHDAIVVEDLHAKGMLRNRKLASVISDVSWSMFVTQLTYKADWYGKQLIKVDRWFPSSQLCSSCGHHDGKKGLHVREWSCSACHTPHDRDINAAVNILQEGLRTAGAAGIA

SEQ ID NO: 27835 - protein, 445 aa, unknown
  TnpB Polypeptide
MNIYSTYDIRIPTNEFSKAFRDTVDKYRAAVAFFINVRLSEAPVFAALKTQHDQLRKMELLTHMTKGNPLPKYSFGTDFYKFPSYYRRAAIAEALGKVTSYESNLKRWHSTHTGKRPGKPTAGHVYPALYRDNTFIRVDSLTAQVKVWIHNTWDWITIPLRKTDVSYIQKHCSGRKECVPTLKRKHKYWVLSFSFEEKVSLIDVPLEQQIVLSVDLGVNSACVCTAMRSDGTILGRRFLHLFKEEDSLSHSLNKIKKAQQHGNYKTPSLWAKVKGINDWISVLTAQFIVDTAVLYSAFTIVMEHLDVRGKKTGGHSKHQRIHHWRSQYVQRMVTDKAHRLGIRISRVNARGTSAYAFDGSGKVIRGKDAGFKTNAICRFQSGKTYNCDLSASYNIGARYFIREILKSVSVTERLRIEAKVPQCSKRSTSTYATLISLCAELHASA

SEQ ID NO: 27836 - protein, 421 aa, Bacterium sp.
MEHRYKVVQVKLNLDRRTREYCKFLQQESARVWNDTVNYHWNHVNDNDGKWLSATELKAITKGGQYNLHSGSIQSVIEQFCENRKTAKILRESNPLIKYPYKTKKHFRILWKGTGNAPAFKVKGRKIYLSNGKGNKPLKLNLPKSLASLQPVTVQLIWRNGYWLSLTIKTKNPLSIGVGCGYVACDMGEIHAMTLTDGYDSLVISGRKLREVKQYRNKRLAELTKAMSRCKRYSRRWRKLNRTKKRIMERTRRRIKDLNHKITYKAIKWCLDHNASNIAVGYLNGIAQNTKGRLPRKVRQKISQWEYHKQKQYLIDKGAKVGIKVIDVSEAYTSKTCPYCGTINPTNDRNYSCSKCNLKCHRDVVGACNILSMAYYGALVPDRMFRPPTTKYLRIPFTPKRVRRVKGKSSSSPDVGLASIQ

SEQ ID NO: 27837 - protein, 345 aa, unknown
  TnpB Polypeptide
MQCRCSDWTCWMEWTIFPRGENPAVYGGSESDNPKRFANDAMDGYSTLFRTIKSICLHRLYMAIQVTRTYIGSIQNQRQVQSGLDSLGDSASKIWNVARWTADRIWDETGKIPDVSVLKAYMKNQACWKDLNAQSSQKVIEELSDAFQSWFDLRQKDDTANPPGYRKHGDERPRSTVTFKEDGFKHDPDNNRVRLSKGSNLKGYWSDFLLCEYQTRPDVDLSEVNSVQNVRAVWNGDEWELHFVCKVKLKTNDSTGNEVAGIDLGITNIATVAFPDEYVLYPGNSIKQDKHYFKRSEYDTEGKNGPSNKSTWARRKLADPRDTFSTFSQTPSSQSVSNVVLERWQ

SEQ ID NO: 27838 - protein, 404 aa, Moorea sp.
VFNLTYEFKLKPTKQQSKIFEDWLEQCRKVYNYGLAERKDWYKSRSCQINACSVRSEYIIPTNAKRPTYASQCRGLTAARKTIEQLRAVQVHVLQQTLKRLEKAFVSMWEQGHGFPRFKKHGQMRSFVFPQLGVKPLEPGRVKLPKIGWVKLRQSREIPGLARVKQARVIKRSSGWYVMLTLAWDVNIPQVMPHGEALGIDVGISHFVAVSNGALFPNPRPFKRLERKLKLLQRRVSRKRIGSGNRRKAQKKVSKLHERIANIRKNYYWELAHNLCDWAGMIFVEDLNLKGLARGMLGKHCLDAGWGQFFQVLEQCCFKRGVYFQKVDSKKTSQVCPNCLTETGKKTLAERVHRCENCGYTTDRDVAAAQVVLLRGLAAVGHTVKMLSEGKFVGIPMKKESSSF

SEQ ID NO: 27839 - protein, 404 aa, Streptomyces sp.
MIRAYKFLMRPTTGQQGALAAMLADHCPLCNGALQERRDAWRHTSKTSVKYGGQSAQLKDIRAFDPERQGRWSFSSQQATLRRLDKAFAAFFRRVKAGEVPGCPRFRGVDWFDTVDFPRGGDGCRWDSTPHHPVARVRFQGVGHVKVNRHRPVAGRVKTVSVKREGRRWFVVLTVEQGRPEPLPETGSVVGIDLGIASFLADSDGTFVPDPRHDRKAAARLKAAQQGLARFPRRRARDRTANHQRAVDKVARLHGKVRRQRLDHAHKTALGLVRAHDVIAHEDLKIRDMSRAPASKPDPEMPGGFLPDGAAAKAGLNQSINDAGRGVFLTILHAKAESAGREVIAVNPRNTSRTCPQCGHIAAENRPTREEFHCVACGHTAHADTVAATNVLRAGLARHHANPA

SEQ ID NO: 27840 - protein, 375 aa, unknown
  TnpB Polypeptide
MHKRIYTFRLSPTSHQRTLMENTLEVCRCVYNTTLCVRKTAWEEKKESISKFDTYNLLPEWKKENPEFTSVYSQVLQETQERVDFAFRHFFRRVKTGQTPGYPRFKGKGWYDSFTYPQYGGGVKLRESGLFLSKIGIIPVVLHRKISPLASIKRVTIKKKAGEWYASLFLHFSIFPICRNSKQKGIVGVDLGCRTFATLSDGSKIDNPKFTGTAGGKIAKAQRRLSRSETGTKKRTKARRALLKVWQKVDNQKTNFLHQESRKLVNRYNALVFEDLDVSEMVKKSKWKSLTKSILDSNWGQFVSLCSYKAENAGGKVIKVNPRNTTKTCSRCGALVEKTLNDRIHSCPFCLLKMDRDLNAAINILRLGQKSLASA

SEQ ID NO: 27841 - protein, 361 aa, unknown
  TnpB Polypeptide
MRRTSRIYLNNTVNKGKIEKLKEFLNLYKNAVNYSIVYLWASHDNDNNNLPRLEFTHRIADRYGFTARVSQCVAKQAKETVLSQNELSKRRRRMPRVKSAIANLDSRFVKIEPFNGHFDMCLKFGSGIPKLTIPFSWTKHTNKFRDTGWELAKAIRLGYNRKGLFIDLFFEKERPKLKEEGAIIGIDSGFNTMLVTSDGQYIGGELKDKIKRGGRRRKSWHHYIETEANRFLKQLNLDNIKLISLENLKHVKRGKRGKFSRKVNRLLSFWLYAKVGERLKQICAELGIRISLKSPWKTSQRCAVCGNIDSRNRRGKRFLCLSCGNETDADYNASMNLEALGLAGVYSLRSLPTLSMEGSSI

SEQ ID NO: 27842 - protein, 630 aa, unknown
  TnpB Polypeptide
MNWGMTGIRAPDLEAGRIDDEAAAGIRLSRPVQGLLAAAQSGWIGSWQGDTGQLQDRAHQADGLPEEQTINLLKGQPQRDNGIGVNDGPAGTADRKVAFRPFGGETIAQVDRQIAALSKGSTAAPPGHFPLEMAHQVNNGYYDSMEFKTQPAEVMMPPPEVRRRRVRASAGMLLAQEAAAQLKNDVYSELRWAHAQHERLPSVYAMCHQLKAASAGIALGRAKQVQHAIADAFAMFRSFRSNVFAWAKDPATRPGKPRPPRFYRRGQRARVCFDYQDLKVREHRLYLPASFGVDVLTLVKRDGEPLLGPGDRLVEVRVEPCRSRQWVHLDLIIRRAASAEQRLRAGSLLVDLGVARLATCLDDKNLTAFFVDGGVAKAILQRGAKWHARLRSEAALGVRHGKARARALARRSARQMEDLIKKVALQLVTYAKVQGLARVVAGRNKAWKQEVNLGKKQNQLFTFIPHQKLIEALRTKCVRAGIEFVETEESHTSKTDHLACEAMGPKPRGYRWLGSRRPRGCFRSSTRFIIQADVNGCIGLGRKAGGEQWLNDFIGRLGSSPGTRLVPRKVHVNGRHVPVPSPGVRMPHCRGLSSKAWISTKVALVKAGLIPDLQGVASATYKSQGFPKAA

SEQ ID NO: 27843 - protein, 630 aa, unknown; identical to SEQ ID NO: 27842
  TnpB Polypeptide

SEQ ID NO: 27844 - protein, 436 aa, Streptomyces sp.
MRLICLSLFRDAWRETAVAFWFVRLRYNYRAYPDASQRRALARAFGCARVVWNDCLRDRKEAHAAGLPYVTSAELSRLRITQAKRTDERAWFADVSAVVLQQSLRDLDAAYKNFFDSLKGKREGRKAGPPRYKSKKDTRQSVRLTAGAFSLRENGTVYVAKVGELAVRWSRPLPAAPTSLTVTRDSCGRYFLSFVVDAEPDLLPKAEADTGIDLGLTAFAVLSDGRKIGSPRFLRRAEKKLKRGQRELSRKTKGSKNWAKARRKVARCHAKVANRRRDFQHKASTQIIRDNQAVYVEDLAVSGLGRTRLAKSVYDAGWSAFVRMLEYKAVKHGRTFAQVDRAFPSSQICSACGFRDGPKPLHVREWTCGACGTVHDRDHNAACNVLFEGRRIVAAGRAETRNACGVPVRRARVPAQRGEAGSPRKGQTAQTGTPGP

SEQ ID NO: 27845 - protein, 401 aa, unknown
  TnpB Polypeptide
MIIQKAVKVQIYPKDSDKELLAKHFGVRRFIFNKFLEIRQKEYLQNKKSIGYNACSALVTEMKKNPDFQWLKEVNSQTIQAALKDLDGAYDRFFRKIAKFPKFKSKHDNRQSFKVPQHFIVDWEAHTLKIPKFKESFKFRGTFSGKISKINSITISKNASGKYFASIQGEFEIEPKESTGEIIGVDLGIKTLLVDSNGTEIKNERFLKKKLKKLKYLQRQHAKKKKDSKSRNKARIKLAIQYQKVTNQRNNYLHQVSSKLINDNQIIVIEDLAVKNMIKNHKLAQAISDVSWGSLISMLKYKANWHGRQIIEISRWYPSSKTCNECLHLMPSMDLSIREWDCPSCGAHHDRDVNAAKNILRQGLNLMSGSGIESDSKQKLGEAPTIVGSMNPENTRSLVVY

SEQ ID NO: 27846 - protein, 436 aa, unknown
  TnpB Polypeptide
MFEIISKNNNMYSVLDTEDGVIEAYSFLDIISYIQSGVDIQGVSLVNDEYVFEIDNLTVHRVIKGYKFRLYPNKEQQTYFQKCFGCCRFLWNHMLADKIAYYEEHKKSLDTQPPAYKSEYSFLKEVDSLALTSEYRDLNTAFKNFFRDSSVGYPKFKKKHDNHKSYTTYNQKGSVSVVDKYVKLPKIGYVKMKQSQPVLGSIKNATISQVPSGKYFISFNIEIWVAKLPNTDKEIGLDLGIKELVITSDREHFENPKTLYKYEKQLAKLQRQLAHKKKFSNNWYKQKHKIALLHEKISNIRKDNLHKISHKLVMETQLIASENLKISNMIKNHHLAKSIADVSWYELTRQLDYKSVWYGRLYVKIDTYYPSSQTCNYCGFKNPITKDLTVRDWTCPQCGTYHDRDENAANNILTEGKRLVKLSKMTGNFDDFQIAS

SEQ ID NO: 27847 - protein, 425 aa, unknown
  TnpB Polypeptide
MQTSANLIPISHKIELKPNNKAITHFKKAFGCARLAYNWGLAKWQENYKQGIKTTALSLKKEFNAIKKEQYPFVYEVSKYATQEPFINLDKAFKKFFTDLKQGKISYPKFKRKRDNQGSYYIGGDHVIIKDKKYLKVPNLGLVKLKEKLRFNGKINSVTISQKADKFYASFNMQILKDEYIKTHKSVENNRLNVGIDLGISSFVTLSNGLSIKAPKPLNKFTRLLTKRQRQLSKKQHPKTKSEAMQGVKKSNNYTKASNKLSKLHNKISNIRLDFIHKLTSFLVRNYKRISLETLGAKNMMKNHRLAKSLSDISIAKFNEIIEYKARYNDVNLYRADRFYPSSKMCSNCGAIKSKLNLSQRVYICDECGYKIDRDLNASINLHKQLGQVLSEVTPVEITAMLDELAINHLATSIVEAGIQWKVYL

SEQ ID NO: 27848 - protein, 454 aa, unknown
  TnpB Polypeptide
MTRKSLSIALVNTPLRYLVTKTRCTCILKTQWRPCLILLIFSIDQSILQAMLRLQAYKFHILPNGEQQRAMRRFAGNARKVWNLALARQQEKHALGEKFTNAFGMSAWLLEWKKEYPFLVESPSQTLQQVMGNLQSGFKNFFEKRAAHPEFKKKGKSSDSVRFPQGFEIDAKNNRIKLPKLGWIRYRNSRDILGTPKNITVSCVAGKWYAAIQTEREVEDVRHPASTSVGIDVGIARFATLSDGSHIEPLNSFKKHQARLARYQRAMARKVKFSSNWKKAKAKVTKLHQKIGHVRQDFLHKTSTILSKNHALIVIEDLKVRNMSRSASGTKAVPGRSVRAKSGLNRSILDQGWGEFRRQLEYKQARSGGDVLAVNPRNTSRTCPACGHVSAENRRTQARFACVECGYENNADVVGAINILERGHRLLACGEVAEVRRSVKQEPTEATTGELALV

SEQ ID NO: 27849 - protein, 475 aa, Vulcanisaeta sp.
VYLGIVREVVEYAVKNNVTSATQLHELFYGKYRLEYQGLHSHLVIQAIRQASEIAKSFLRRKRKGLVSKPYPEVRSVSIRFTEKAWSYEQFVKSIAPVRLSLSLLGERREVWLRPHKRFWLFWWRVLSGEAELASTLIIKRRTNKWYAVFVFNIKPKKEEPKSIIAFDINENTVAVSRIDIVATIDKIASWNRQYATPQLYMIRTDFGRLARRYEAIRNKIIEKLKPEFALPSGKYVNVTNTREYRKWVRKLREGVRKVGRVRHVASELTKSPSIIVTEELGENPQESMIDGIEKNELRHRIKQIPFKALEKAVEDKALERGSRIFRVSSYRNSRVCPIHFTRLEKTNDWHVLYCPRGHYVDRDYASVLNMAWKLTPESWTKAFWWNMKKDMNWRKYEGKSNPIIPKYIIQHLYAILKTLTASEQSPAMPARAKPMNHHQIQNEGGGEETSQKGRRSEPQLEDIEDMVLVITVEQ

SEQ ID NO: 27850 - protein, 564 aa, unknown
  TnpB Polypeptide
LELILSKNKKKEYITYKTYYQNNNDNIFIQDCMNLILKYTTKRFAYLKKHNLLGTYDKDDCDDYRKAQFYEDENKVEHLILDARYARAIDKSIQAKCDSLIKCKQNNLESKLIKLEQLQNEFDKAQEKYHNSKVSKYSEKEAYKNLEYKNKVLQKITSKIETLQYEINNKIYNGIVFGGKKLFKEQFKENINFEIWKEKWHNRGNEFECGGSKSENYGNKQFQLKFSKTIKNKHYFDLHVNVPYQLREKYGSVYILKNIYFPRGNDILKQNHDNNVAYFKDLNNYNNLKKKLEKENKSITGLQKPNIDDYYCDTVSFLIKKHYNGKMGIHASIPRKIKQVITEDRKGVIGIDINYDNISLSEINHLGKLLHSKVYKFNFGSNNKSGYREQMINKAIKEIVLYAKEKKKHLVIENLDFFKTKMKQLKKIDKKYNRMLHSLAYAKIKERIRINCLLQGVVSKTVDAAYTSMLGKTLYTKKYGISVHQAAAYVIARRYYKLEEYYEAPKIEFIYKDKSCSLTIPVDIYKKQDVNKKAKTTNFYKELYRWLSSEFKAPSRFYKKALTS

SEQ ID NO: 27851 - protein, 639 aa, unknown
  TnpB Polypeptide
MDDEEDNPNFTVVKSTLNHFCNNHFIKSTLQDYCFQTNILLNETYLFVNLHINRMLEHNLTSKYKKLDETFFNNVFMGLNSNVKDETKRFKHTELNNTYNLYKESLPTDFQHADTKNKSQLLTEMALQLSTITGNHLKLNFYKRFYNYLKLQHHEIDCKTIYNIVNHILMNKTKYDESKDLEIKKQPLVIQYRTKFLNKTIDELLKLDVWIVLKQLREILIFNEITLLKEQEMKLDYKLRTRNARLFSMLPIKQLSNLSYMTITRNPLYYLLSTSLGNEFNTIQNENGKNLTNVKNFTETTYKQVCNEFFNIKYYETTKMEFHYFTTDGKTVSIVLKRRDYKPPRRKTKQEIEESKNEPKEKKKPIKKETKKKPVKKEIELNKKNLELIGIDPGLRMVFVGCKNTIDTTTNKNHIMKLSSKQYYNDIKSMRMTTKLNRLIERNNLSSLFSSTTPSRRTSKIEQLSLCIRTITEKLHKLIRTLMESKVRKWKFDKYRYQQKKIVEICKMLSGKTTPKEERNVIVGWGNWSNPNNSIIRGHKRGPVKRIVKELRRWCRVETIDEYNTSKKCSKCYNDTEKMKYSSPEGMRTVNDVLRCKNEMCRTYFDRDINGARNMLKKLKIKLGLEEQVVELTRTTIEV

SEQ ID NO: 27852 - protein, 360 aa, Dehalococcoidia sp.
MEQVTTLKLKLYKPTQAKQEVYQTMAGRCTEFANTYLGLVKELRPRTSKQAGEYSGPLPSAVLNQAIRDICSKKKARKFKHLWPGFNSQNFRVEKEISQDGGAVWKASFPTLEKRVGVPVVVQPYQEKRLDRLLSGEARQGTAYLVKKGGSWYIHLSMTVAVEQEQKPEKIMGVDLGLIDLLVASVSGYTLFFPGGELAYVRRRYANLRRELQKAGAHRALKKLDDREHRWVTDVNHKISRALIDFAITQGATKIHLEDLTGVRWTKQQRRKQRKDPGRSLHSWAFYQLQQFVEYKAALAGIAVEYVNRDKTSVACSRCGEVVESRPRGRWFICPRCKKIKHIDANAADNIAQAISGLAA

SEQ ID NO: 27853 - protein, 471 aa, Dehalococcoidia sp.
MGRSKTPSFITEFPLATNSEQKHVLNSRFEAGRQIYNACLGEVLKRRDMMLRSKIYRAARAMPHKTEEEAKARSKAFKEAREKYGFTEYSLHDYVGIIRKSWLGEHIDSLAAQKAATRAFDAANKTVIGDAEKVRFKRRGELESLEGKNNASGIRWRDGKVVWNSLELETLINVKDPVIAHGLSSPVKYVRIVRKIIRGKTRFYVQLVCEGKPYRKEKNKVARGKIGLDVGPSTIGEVNNAGAGLDLFCRELDNLQKTIGACQRKMDRQRRINNPDNYNPDGTVKKGKKKWVSSKGYLRTCAKFAELNRRQAAHRKSLHGKLINDILRRGDEIYLEKVSYKAWQRVFGRSVNCRAPGMFVSGLKRKADSGNGQVIEFPTGSTALSQRCHCGRKLKKKLSARWHSCDCGVTAQRDLYSAFLARHIKEDGNGKRYLDIGSAAAEWPAVKSLLDAAIEDVRKKYWYKAPASFGL

SEQ ID NO: 27854 - protein, 392 aa, unknown
  TnpB Polypeptide
LIVTEKIRIYPNKSQRILIDNILWYCKETYNKLLEIHNSERLIDEKKKFSKYDYHRLMKTFEKPKGFQVHSQVLQQVGERLAVAFSMFFGKVSKYPKFKSIRSFRSFTYPQNTGFSLDPIGKRIYLGKFGKVKAVFSREINGTPKRCTIKKFPCGHYYAFIAVDNGDSLNQQPILVRQRTRVGIDLGVSRFYTTHDGEYLESPRFLRKKLDKLRAAQRKLSRKQKGSNNWRKQVLKVARIYEIVKNSRRDHHFKVAHYLVNKFDQIVCEDLQVNTMFRKKHESKQRRALRDVGLYEFLVILEWMCQKYSCTLTKVPPQNTSQVCSRCGSIVKKDLSVRIHSCPHCGLIVDRDINAAVNILNKSNAPVGTTGGVMTEVITPTLVEMSLVCGIN

SEQ ID NO: 27855 - protein, 363 aa, Okeania sp.
MQSIKTKLKVNNYQKTILAKHAGVARHAYNWGLATCIKEYEETKKRPSAITLHKRLVAEVKSVNPWYYDVSKCAPQQALRDLERAFKNFLTIPGRGFPKFKKKGRKDSFYLEGSIKIFQGNYIQLPRIGIVKTYEILPSYRVKNVTIASFRGASLTKKADSWYISFKYNFEPDSTEKVGGTIGVDIGINTLATCSDGSKFANVKAYRQAKKRLIRHQRAVSKKVIGSKNRIKAVKKLAKVHKKVADIRADALHKLTTWLAKNHSTIVIEDLNVSGMLKNHKLASAIADCGFYEFKRQLTYKCEWYSSELVIADRFYPSSQICSNCGHQQKMPLHLRTYECSECGFETDRDFNAAVNLKNYVYQ

SEQ ID NO: 27856 - protein, 395 aa, unknown
  TnpB Polypeptide
MKTILDSLCDYRRYCWNQGLELWNTLYESRLIGLPVELRAKIKASLTDKTIEFSEEEQALRALFPTPTERVVRDELVAQKADWQFELSARALQQAIKDLATAWNLFFNNQKTANKPSFQSRKKPKQGFKTDRARVINGRLVLDKPHAYKREWSSIRFKGANIPDGKLKLCAVTRTKGKYIATITMDVETVALPKTGKKTAVDANIDHFDTTEGQTSLKPEVLDRLYAKVRTYQRQLARKRKVNKNYRHSKGYHATRAKLQATYERIRNVQNDVLHKFTTDLYRRYDTVVIEDLDVKGIQMKKKAKNLHRSLFGRFRQFMEYKAEKFGKTLIVADRFYPSTQRCSNCGHIKTGDEKITLSGNAKHGTKHHEYVCYHCGYEDNRDHNAVLNLLALAK

SEQ ID NO: 27857 - protein, 514 aa, unknown
  TnpB Polypeptide
MRAQTPSYVVSNKIQLPESIAKLLEKSFRISNSAYNEALSFGLKRFEALKRNSTYQDLLEARRLAVAKRDALKKAKKKDKELTKQIKGYNEALFELRKAYSLTESELQKHLAQQRRKPGSPYQQFNAGEIQVIAGQAMKTLEKVLFYQIKPHKVRFRSKFDLDVSFRNRVNTTGTRLEPSDRKDIAYRLYIHKASTFVDIPVKAFNKYQQLSLLRSEKIKYVQIIRKTIRGKKVYYLQIVCQGFPPSKVTKGQGVVGIDPGISTVAFASPSEVALVDLVPKNITRKEKLLKQLDRKIERSRRVNNPECYDERGKIEKGARFKRPSNRQMRLRNRRRKVYRSLSEERKKLQGQLVNRLVSQASRIRIEELGVKGLQKRSRDIRMNPKTNRPYSKKRFGKAIFRAAPSTLRAALEIRAFQLGIEVEVISPKEVKPSQYNHITQTFEKKPLSTRVYDLTDSYPGVQRDLYSAFLIGHIEKGHYQQEQLNQDFPDFYEQMKGFLQQPIETERLAWYLN

SEQ ID NO: 27858 - protein, 454 aa, unknown
  TnpB Polypeptide
MVSSLLEPGALREARPVLRGVTYRNVSRLPDPTVKQQILLCKSAGTARFAYNYGLARKQEVYTESGQSISAIDLHKELTTRKHTDLPWLKDVSKWIVQNALRGLDQAYEHFFRRVRERKAGKKHQNLGFPKFKSKSQGRGSFRLDKPIRVSEDRIQLPKLGTIRLKEHSYIPTSGVKVLSATVSEQAGRWYVSVLVEEQVPPVVKASGQPIGVDLGISSLAVCSDGRAPLANPKALRTHLKRLKRYQRHLSRCQKGSKNREKARAQVARLHARIATLREDALHQATSSLVHAPLSQSERIRLKTHLASLLPRPKTKAEQKKAKKQVKKLIQQTTEINAPLRPQMMVLEDLNVEGMKRNRKLARAVSDVGMGEFRKQIEYKSLWNGEMLLFADQFFPSSKTCHCCNWKWEDMELADRIFLCQNPKCRLYQIPQDRDINASENLVELGYEYLRSLR

SEQ ID NO: 27859 - protein, 392 aa, unknown
  TnpB Polypeptide
MPKYHRTYQHRAYTSRAGYDRIAEVLRESARLYNASLEEWRWAYRAGVSVSLYSQYRELTAVRAEDEFWGGVSIQVGRGVLRRAERARQAFYRRVKAGEKPGYPRFKSGRRWHTIELANVTASMVKTRGNYSAIHVKGLPEIRLRKGLVLPDGDLKALTLTLRGRRLFVNTTYEAELAALVESDVAVGIDMGVSDRLALSNGETVRRRRKPHKKLSRAQRRLSACRKGSHRWRKRRAVLANQQHRERVRNRNECHRVTTELVRRFGLIAVEDLQIKNMTASAKGTIEEPGRNVAAKTGLNRSITEQSWGLIRNQLQYKAEWAGRELIVVDPKFTSQRCSGCGVVSSDHRQRKRYNCAECGMTEDADINAARNILDSALAGRRWPDIRLPAAS

SEQ ID NO: 27860 - protein, 547 aa, unknown
  TnpB Polypeptide
MTIPSMYTKAFVSDSLTREKYEELLAHAMCVQGYKNELSRLVASNLLFFLDMSKLTFLKWARHNFNGELSSNFDAHAITDVFTAYENKFKALTRSISFERIALKGFELHARNTKHHKKGDLKRAVNKRERTPLSICLTYLARYGNDGIVDYVKSHIGEDEKKTSFYENILRCIEKYSFDRLMRLAVQRRERSLGRYAHPIVFKSPTFRGRSRKKAIVAWNKNYGSRINAFVSLSWGARKSMDIPIKYAKGWHGRMSEWRKKNQDYEYTLAFDEQSHEVRVLLCKEGERHIPTVDETDEVVGIDVNVKHNLLTLSDGTVYDYDRELVADYASCCGRVDELKSMSNDYVVGKRRQRKLDALKRKMVKEEENMAADMCKSLSERGVRHIAMENLDNGFGKSYVRDKANEGLNFNRIVSFLGISSVKGIVEHVARKYGVAVSTVHSSYTSKMCPICGCIDDGNRETQEGFKCVECGHECNADVNAAVNIRDRVREAVLHSALLKQLVNGAYKPKPLSRDRVKETLLTLRRNHRIRGGSERDESPMRTFGHV

SEQ ID NO: 27861 - protein, 527 aa, unknown
  TnpB Polypeptide
MRTQTPSFVVQVELHLQDNVVAHLNKSFHIADSAYNETLNFGLKRFSAMKKNERYQELLEIRREVVKAKEDVKKKIKKETDKDIKNTLKAEAKEIKAQLEEIDKELGKIRMDYGLTRYQLSLWLLERRKETKVYQHLNSAELQVIAENAYQTLSQVIFYKTKPEKLKFRSKYSLDHSFRNNVNKQGTRLVESEKSNVAYRLYIHKKSTFIDIPVSAFTEYQQMQLLRADKIKYVQIISKTIRGKKVFYLQIVCQGIPVTKIQKGEGVTGIDPGISTVAYVSKNSCELVDLVPEKFARKERLIQNLSRKIERSRKVNDPDAYNEDGSRKKNVKFKPLSKRARRLAVRRQTAYRKLTEARRKLQGELVNRIISESSVIKIEDLDVKSLTKRKRETRINPKTGRPFSKKRYGKAVFKAAPGHFRTLLVQRAHSTGCKVDVISPKKTKPSQYNHITGEFEKKELKIRIYNLTDEITDVQRDLYSAFLIAHIENDEYLNEQLVENFDKFYNNMKEQLHKLRQKPTRLSWYVE

SEQ ID NO: 27862 - protein, 409 aa, unknown
  TnpB Polypeptide
MHCYLYNSALADRRDSYKREGQSVSYFDQQNRLPEFKKVWTEYKALGSQALQATLKRVDFAYQRFFTKKGGYPKFKSIRHYSGWTYPASSGWKALTDGINGYLDLSNLGKIQMRGSARQWGNPSTCTILNRNGKWYASITVNCEVVRVTGNGAIGLDFGLHHAVAMSDGTIIDAPKFLAKAAKQIKKANKEKRRKRPPNRKKKVKASNRYKKAQRKVSVMIRKVGRQRQDWVHQISSNIVSGNSLIATEKLNIKGMTHKAKKGSKRKAQKTGLNRNMLDVGIGMLKSAIEYKVNEAGGSYTEIPTQKVKPSQTCPMCGLVQKKELSERVHNCSCGCIEDRDVAAAQVMLNWVLYGSTVSGTSIVKRGESGSTPTPTYCGGLQQLGSKKRKKHSLLDGNLETPSSRSRVG

SEQ ID NO: 27863 - protein, 492 aa, Sutterella sp.
MKKSTTASYILELEVVFTPSQRREVEARREVARVIYNTCLGRVMKRWRSVQGNPKWRTALRRVQEINAIGDPSPDEMKERTALRKEMREVEKDFGLTEYELHAFVKEVNVHFDRRISINEAQVTATRAFRTFEKYRYGHCKKVRFLPKGAEVTVENKSNNFGLRVVGQELAWKDLRAPLVVKKGDRYAEDAFLDRTKYVRLLSRTIRGRRRYFVQIVKEGKPPRKNRTVGSADSAVGIDIGPSAVAYYSTGEKKAAIEPLAPNACCEELDRKVGRLQRCMARSLEANNPDAKDENGRWKKGVKLNKSKRWEKNRVKLANLKRRLAVNRRQDHEKAANRIIALGTDVRVEDTPITSWTKRAKETTVRKKDGKINRKKRFGKSVANHAPGLLLNCIARKLGNVGKELKRVKSSKVKASQRNHVDGSCRKKELSERWFEVDGRRVQRDLYSSWLIAHVMENGEEIDLIACQDDWPNFLRAQAEALAKAPKNLGIL

SEQ ID NO: 27864 - protein, 760 aa, unknown
  TnpB Polypeptide
VGARLDVEHVATETITLTRTFGMVPASRADIVEPALLDRVVVAANAFIKAGGTLDPAMLEGTTVVAVKRFYAAAREAPWLDPALEATRLRERAWRCASQIAFYALQEYRRRCTIIPAIASAIQGIPLVQIRERTFPSNELVDSTREGLKGKGLPCGCLSTVYLSNIARHARHLLESALRTTYCCEIASGIKTIANAQDKIIDAITSELQDGLNDLPSEIIRTMSVQLTRRVKDRARGRGNPAGKHRLDALVDGILHGKGLGTWQQARRSWRKVVMPELESRNRSLDMAIIAGGAVKAVLATMTVDEAIAAMFSVRQPPRIDIPGTTTPDPARVARERALISARNRVGAALWLILGPDAEMLLKGMVSNPERHVLLPRCKKQAIPLAIDDGQVYRLEYKVGGKTGSAVSATVQFSLEKGVIRTFSLRGLDRIDEMLAWGFLPARGTITRKPGGGLLLHLPFQRKCTPGRFPGSKEGSEKSKTKHVIVAGVDLGLKHLAWLSVGACKRTAAADGSWEPVDKDCPEIARYCIDQPQLAGKKDAWFAGAASPVLNVKRKLVALQARARALQRQKALLRRRYRGRFKQAWRYFVARREWQRCWRKIQHVHDEMTRQVATRIVAACKHHGVGLLRFEDLSWSSHSDKRVSGPWLATWQVHWFFSQVQERAILLARLAGIAVELVDARGTSKRCSACNAVGVRNGKTFSCTDPDCELMIDSDLNGARNVRLAPKSSRLYAKGEGARYRPFACHVSTSPNLDKIREDV

SEQ ID NO: 27865 - protein, 330 aa, Chromatium sp.
MGAAKIILPSLPEWAESIPYQIKKIAIEDGYKAFSNGVRKLKQTGKPFDLHFRSRKHPKQSCFIPSSAVKDAGLYPRIAGSLKRAEDFPDNPRDSRLVFEHGRWFVIVPYRAPIMPTENQGRVVALDPGIRTFLTGFAEDQAFKIGHGDFARIARRCYHLDRLISKIAKARCRQKARLRKAAQRLRWTIRDLVDEMQFQAIRFLLNRFDLILLPTFETQAMSVKSRRKLRAKSVSAMLGYAFFRFGQRLESAAKQAGKAVLRVNEAYTSKTASWTGELKQIGGAKTITSGGVTVDRDHNGARGIFLRALGDTPSLRNECASVGACEQTLS

SEQ ID NO: 27866 - protein, 442 aa, unknown
  TnpB Polypeptide
MTKKVKKRVYKDRSNIITLTERHIIKENHAFFNECDELSFKAKNLYNATLYVQRQSFFNRDVKFVNYYDVNKEFTINNQFDYRELPSKVSQQIQILVDRNFRLYFTLLKKKNKGEYDKPVRIPKYLHKTKGRFVVPYPKDAISLKTDGFVKLSKTGISIPTKVGKNSIVGVRIVPKGNHYVMEVLYDVVKQDIETDYSRVAFIDPGLNNLMTVTSNVFNPIIYNGRPVKSINQLANKNVSKRQSTRPVWKPNARTKNKDRIQQVLLPRLESDNSKLTKSIWSKRANRINDYFQKITSDLMNHLVSNNVKTVVFGHNKGQKQDINLGEITNQNFVNIPFTKLISMLSYKCLLAGINFVVNEESYTSLCSFVDGEEICKHEEYAGNRIERGLFRTSSGLLINADVNGSLNIGRKYLESIGEYSNKLHNELLNHMVNPKRRTIRI

SEQ ID NO: 27867 - protein, 424 aa, Azohydromonas sp.
MNAPRNLRKTTLRLYPTLKQEAALHALLRSHQQLYNAALEERIDCYRKTGESLTFAAQCKSLTALRKQCPEWAEAANCSSQQMTLRRLDKAFAAFFRRVKAGQAPGFPRFKSLARFPGFSFKGHGDGWRFTPGADWRHGTLRLSGVGHLRARGNARQGGDVRASDVLHRDGKWYLSLTLDIGTPQRERTGNAAMAFDWGVQTFFTGVDHAGEELRLDNPRWWQTEKDHIIGLQQAVSRKRNKRSNRRRKAVQRLASARAKTARRRLDWAHKETAKLAGRFALVATEGLRIANMTRSACGTMEEPRKNVAQKAGLNREILDTAPALFTSLLRCKVLETGGEWVEAPTLKLKPSQRCPACWALAKKSLSMRTHTCAQCGYTEPRDLASARVVLNWALGTQNGQELAGIGARGRPCETPSFAQQRVE

SEQ ID NO: 27868 - protein, 544 aa, Azohydromonas sp.
MAERCVFTYQTRLVLAPEQARALEAYAELHGRAQRRLHAELRAQRDLNGLKREFLARFGLTARQFNAVRIELDGKVQAIRQRRPQLIEEAKARLAKARRLVDKLAQTCPGTNKLHQKRRRLAVLEQRLAALQRDEAQGRVGLCFGSRRLFHAQYKLHANGLSSHEQWLAQWRRSRSRQFLVLGSQDETAGNQTCQGAVCEDGSLQLKLRLPDALMQHCGARFLTISGVRFAYGHGALVSALAMSRLVPVSTRAGRPTSKRVRRAITYRFLRDDKGWRVFASVEIEPAAVTTSRVHGCIGLDINADHLAVAELDRFGNLVDARRLELPTRGKSSDQAKALIGDAAVQIAALAKARGKPLALEKLDFQKRKAELEAVDPARARLLSSFVFSKMIAGLKAASLRAGVEVFEVNPAYTSVIGAVNHAQRRGISVHQGAACAVARRGLGLREAPAVREAIVPLRNGGHVTFAVPARNRAKHVWQQWSGIRSALKAAHAAHWRSGRSKDPPAPLSPATRASSAHRFSTVQSRGANRSQHCSGGVLDDVPF

SEQ ID NO: 27869 - protein, 366 aa, unknown
  TnpB Polypeptide
MKQVIVVKLEPSQEQYQALLKTVEAFNRGCQYAADVAYEKRLANKIALQPFVYGTLRSEFGLSSQMAIRAIAKAVEAYKRDRRIHVKFDVHGAMVYDPRIMSFKGLTQVSLMCLGGRELVPMRYGAYQAARIDRAKGQVDLILRDGTFYLYVTVDLPSAPPIESQDVLGVDLGIVQLAVDSDGEAHTGAGVKQCRRRFQRLRQGLQSCGSKSAKRHLKRIRQKESRYQRWVNHNISRHIVNKALVEQRAIALEDLTNIRERTRDSVRKTQRYERLSWAFAQLRAFVAYKCEAAGIPLIIVDPRNTSRTCLACGHCAKENRRSQSEFLCVQCGFQANADHVGSVNIRRKGLEARGLVTGPTDALSLA

SEQ ID NO: 27870 - protein, 416 aa, unknown
  TnpB Polypeptide
MYLTVKQQVKHLSKEDYKTLRDLCHIAKNLANQAIYNVRQYYFSEGEYLNYEKNYALLKTSDNYKMLNSNMAQQILKEVDGSFKSFFGLLKLARKGKYAFKDCRLPNYLSKDGYTTLVIGFVRLNGNKLILPYSNAYKKTHKCVEITIPPILLDKKVKEIRIIPKANARFFEIQYIYESECIQRNLNINNALAIDLGINNLVTAVSSKGKTFIIDGKRLKSINQWYNKQSARLQSIKDKQHIGRKPTNKQKAIARDRNNKVNDYMNKTARIIINYCISHDIGTLVIGYNETFQKNSNMGKVNNQTFVHIPYGQLRFKLEYLCEMNGIVFVKQEESYTSKASFWDKDNIPVYNNDNPQSYTFSGKRIHRGMYQCLNGQCLNADVNGALNILRKSNVVSLVGLYSRGVVDTPVRIRIA

SEQ ID NO: 27871 - protein, 543 aa, Thermus sp.
MKSSGRAILPHRRPSVIGEAASQERPRKRKKEKAFTGAQALLVFPSGEDHKATLDLMRRFSAAVRYAYNRLLEGQPREELKRQDGPLCTFFRLNTRYADDAILKAQALLDSARERGEDPRKVVFGGRKLFETLRRKHLSGKPLKRLKREWREKRQGLLYSRGDKTKGGNLNLRLLVKDGALWLRINLGDGSYAYALVKTSHPNRSALLQRVYASLPYNVELSLKEGKVHATFTWEEEPAPLVATKEKGVLGIDINADPYHLALAVVGPDGNLRKHLTRSLEEVDRAPNKGAKELLLWKVAHQVVSLALEEGVAIATERLKHLRKSRRGDGSGRAFRGKQHRFAYASLLRKVHSLARKRGVQVVEVNPQETSTIGMLKYAPLLSLSKDVAAAYVIGRRALGFAEKLPKSYGKLLQDEGFRDHVQGFYASRVRELRAKKAQEQNPYLRRRLSREIGRAKRHLSLLSSLQGSSGSQREVTDGRNSPGANPWRVLRVGTFLPLLGREVPRDLSPLKPILFGGSWEGWKGGLGPHPGGGPECANVRST

SEQ ID NO: 27872 - protein, 396 aa, Acaryochloridaceae sp.
MLVFEFKAYGKQKQYRAIDEAIRTGQFIQNKCLRYWIDTPKVSKHDLNKYCAVLAAEFPFADDLNSMARQSSAERSWSAISRFYDNCKKQSPGKKDYPKFKKHNRSVEYKTSGWKFSENRKKITFTDGKNIGTLTLKGTRDLNFYDLKSIKRIRLVKRADGYYVHCCVSVDLQIDLEPTGNAIGLDLGLKYFLADSNGETVEPPNFYRASERQLNRANRQKSKKYRKGIKPQSKNYHKARMSYSLKHLRVSRQRKEYCKRLAYSVIQSNDLVAYEDLNVKGLARNRHLAKSISDAGWSTFRQWLEYFGNKYGKVTVAVPLHYTSQNCLSCGETVKKTLSVRTHVCPHCGFMADRDHNAAMNILQKGLRTVGHTGTDTLGEFDPLASLEKSCGVTVG

SEQ ID NO: 27873 - protein, 447 aa, unknown
  TnpB Polypeptide
VGKAVIEEGNPAKVDEVMLESRRVFNEVLIKLLDGVKVSDKDIQSFLVGNTKQRIIAKARETFKSFKELEEKGEAEELRIYENRPLPLRMNFGEGYNLWIDRDGRIWFRITLIPRKEYVKGYLEFSKEQEEIVKKAIEEKKKAIKLRKQGIDYTPEYDITIAELVKRKGEYYLHITITRNLPVKSIRYAAGIDVNEDNVTITVYDLMARKVVDSFIVDYAIIKFIRHYWFTIRKRLQEHGAKSKRKLGFTEREHRQIEYFLHFVSRRIVDYLTGKYSGLIVFMEDLDGIRNGKDRDKGKRMNRRLHAWPFHKLQQFLKCKLEWIGIPVKFVDPGDTSRRCSLCGVLGIRHKKLFACPNGHKGHADRNASVNILIRGCIMHLHVPYSAFRSMKLPNFRMWGLRRDESRGWGIVNMPLPAGVEPFTAAQRQEAGKLRFQREEAAGFSLR

SEQ ID NO: 27874 - protein, 365 aa, Okeania sp.
LSKRLYLVGSSQDQAFQILFYYYSQKRDLVNTKDKFPEYKLIHSQVLQDCTKRVKLAFDRWFKADKNGTRLGKPRFKGKGRYRSFCYPQIKQDCIEGNKINLPKIGKVKLIQHRPIPEGFQIKTVTISRKADGYYVTLSLEDKSVPQFTTEVKPTSENTLGIDMGLKDFLVTSNGESVPIPQYYRSSQKRLKTLQKRLSCKKKGSKRWLKALLAVAKQHKKVADKRKDFHFKTANELLSKAEVIAHENLNIKGLAKTRLSKSINDAGWGQFLSILTVKAGNAGQKTIAVNPKNTSQDCSNCGEKVPKELDIRTHSCPHCGIVIDRDLNAAINIKNRAVGHSVLKARGARRDTGARKREVHTIASA

SEQ ID NO: 27875 - protein, 403 aa, unknown
  TnpB Polypeptide
MYLVEQHIITVNDKRYKDLDRICFLSKNLYNAALYIIKQEFLSTGKWIRAVDLNKKMVAENNIDYRAMSGSSSQQVLMVLDKNLKSYFSAIKAWKRDNKKFTGCPKFPKYKHKTKGRNVFSYSYAQFKHRGDFIYFPKKEGLSPLKTNCKEGTVKQVRFVPKSDCYVIEVVYELIAKKQLDDNNRIMSIDLGVNNIASIVTNVSNKPILIDGRRLKSINQYYNKKRSDIQQQLKKVNGKENSRRLMSLTRRRNNKVKDYLHKASKEIINICLKEDITTLIVGHNDGWKQNVNLGKRNNQNFVSIPFEMFISMLRYKSERQGLRFVEVNESHTSKCSSFDLESVGHHDTYVGRRVRRGLFKTRDGILINADINGSYNIMRKVKGDAVMPLHTGFGYNPVKKFIN

SEQ ID NO: 27876 - protein, 244 aa, Okeania sp.
MPIPQLRDNPDYYSQKRDLVNTIDLFPDYKLIHSQVLQDCIKRVKLAFDRWFKADKNGHKLGKPRFNGIGRYRSFTYPQIKLDCIQGNKINLPKIGKVKLIQHGPIPEGLTIKTVTISRKAGGYYVTLSLEDKSVPALTTEVEPTLKNTLEIDMGLKEFLVTSEGESVPIPHKYRKSQQRLKALQKRLSRKNKGSKRWLKALLAVAKQHKKADANPRRRQLACGTPTKRGNADQERERAPSSGR

SEQ ID NO: 27877 - protein, 414 aa, unknown
  TnpB Polypeptide
METPRTVPVKLDVDSDDALLLRDTVDEFLWAANYVTRHAFQGRYVTTSKTTLHHDTYDDVRNETALHSNHVQAARNKAAEACKSVVEKWKHGKKASMPHFTSPHVVYDHRTATFHDDYVSLATTDGRIEADYILPVNERGMPHAEYYFSDEYETTGAELHYSNGNWMLHIHCKRGVESDTPEQETPENGTVLGVDLGVNTLAVTSTGTFWTGDEFDHWRREYEKRRGDFQEHGTRWAHENIQAVGRKEEGRFKITLHRISNELVADAREHGCTVIAFENLTDIRERTGASWGHKWAFNRLYEYVKYKAAEYGIDVEQVPPENTSRRCSHCGFTHPDNRDGDEFECLECGYENHADYNAAKNIGLRYLRRNQTGGDGGAPVGVRLNSGTLNVNGAYEPPADDSDRTGVHAESHRL

SEQ ID NO: 27878 - protein, 187 aa, Psychrobacter sp.
MGSVGIDLGLKESATTSMGDKLTIKQTQKWANKLAVAQRAKNKKRVKAIHAKIKNTRLDLIHKFTTKLVKDNSLIVVGDVKSRSFTTRKTNLAKSTYDAGWFELKRQLEYKCKHAGCQLEIVNESYTTQTCSYCLEISDSSPKGRAGLRIRGWTCAECGTWHDRDTNAAKNILAVGLDRLAVGIPSV

SEQ ID NO: 27879 - protein, 440 aa, unknown
  TnpB Polypeptide
LECSGWRPTLGKAVEIAAKREFEVKTAHRIALDSTDRQRTYLTKAAGTARFAYNWALAEWQRQYQAKKLDHSLPSPSKSALRRALNAVKREQFPWMLEVTKCAPQEAIRDLGVAFKNFFEGCALRKAGFKGRVAGYPQFKKKGQHEAFRISSPRTKVEEVSGKRRSYFWIPNLGWVRMREELRFQGKLLSAAVSRVADRWQVSFCVDVQVNPAKAENQSEVVGIDLGVRALATLSNGDVEEGPKALRRWSKKLRRLCKSLNRKKEGSANWKKAKNALARLYARIANQRNDVAHKLTSELTKRFGTIVIEDLNVAGMTRNKSLAKSVADASMAEVRRMLEYKTARRGGRLIVADPWFASSKICSSCGHKLDSLPLSVRRWQCPACGVTHDRDLNAAINLKNLAARNAVEACGKASSGAWQKSPRTKLALVKQEENVKVNFG

SEQ ID NO: 27880 - protein, 648 aa, unknown
  TnpB Polypeptide
MESKKKENIYPLKKQLKLLDCQFNLLVNIAIRSRLNALKHHQEDIVELINKTWKNFYLLVLLLKKFPKIQKITLSMLGSLPKNNWMTFLDKLNTFKKEELNMLHIPLLQILLQELTLKEKAFKPFWTPAYKDLSERLLSPIEIGYPDSDSTFSNLLSKKQEETSSFLMMKKINLQNKNSLKTYYQLSTSTVANKWEKENIKLKSTLKALKIKLRTTKQQRTILDEWIDTSRYVYNKTIECINNKHPINFNSLRDKLVTKDTKKNNKEYKDYTIELDRLNSEKKDLKKQIQLNKKNIEKYNETVIQLGKQEQLIMDKKKSRISMAKQLSYQKNEDINDWECNTHKDVRSGAIQDICDAYKVAFTNLRDGNIKYFKMKYKKKTEPSKCIRLAKNMVKNKNGIIEISPEYFKESKNFQMGKKTIKKYKDLKIEHDTRIIKQKGEYWLIVPIPIEKSSTNSSVDNYCGIDPGVRTFMTTFGNNNCMEYKEDKNKLSKINNKRTLLLDKLHNVIKSKRVYKKKLNKLEIRKENLLNEMHWKVINDVLNRNDVIFYGNIKSHDIVKNNKNRNLNRNTNDLKFFKFKERFLFKAYEKNKKIFLVNEAFTTQTCSCCGFHYKHGSSKIYECKACKKVMDRDINASKNILMKGIMNL

SEQ ID NO: 27881 - protein, 374 aa, Nitratiruptor sp.
LKLAVKIKLNPTKEQYQTLLDTMEEFNNACNYISEYAFANQIYSKFKIQDAIYYDIKERFKLSSQMIIRAIAKVASQYKRDKSFCHQFRKDGAIQYDKRVMSFKGLEKVNLWTIDGRQNIEMVITGYQKRQLSRGTGQADLVLVDGVFYLLPIVDIEEPPQIDTKDFIGIDLGIVKTAVTSFGDIFDGELIEKVRQKYFKVRRSLQKKKTKSAKRRLKKIGQKEARFRRNLNHKISKEIVEVAKGTSKGIAVEKLQGIRKQTVRKRQRARHHSWGFHQLQQFLEYKCKLNGIPFVKVAPKDTSRACSRCGYVSASNRQSQSDFRCKACGFAINADLNAAINIAQRAARSISSYVSQPYAVELSTASPRLQAWGS

SEQ ID NO: 27882 - protein, 494 aa, Cyanobacteria sp.
VVFQNLSDDNFQYSKTAGSTKAITFCNIYQIQQIDITTAIGYYQNQRTDAKVTPMAKAKNTIGVQQILLHPDKQTKAILEYLCQQSGKLYNNGVYFARQIFFKTGKLLSGKFDLIYESSVSKSMVAQSIPSTPMQQTLMSVAEAFKSFKGLRDLYFKGELHFRPRPPNYLKGSKLFKITYPNSGGQKPVLIDGSLKFSLGLTVRRWFGLSEFYLPMPSNVEVSSIKEFTILPKNGAFYLELSYEIKKEKHDLDINRALSIDLGTADNLTACVDTLGNSFLIDARAMKAMNQLWNKKVSTRKQGKPERYWDKWLDRVTRKRNHQMRDGVNKAAKIIIEHCLKHQIGTLVIGWNEGFKESANLGRIENQKFVQMPLAKLKERLKQLCSLHDIRFVETEEAYTSQASFLDGDSLPKYGEKPDGWKASGKRIYRGLYRSSDSSVVNADLNASANILRKVASNLSLDLGLLGRRCLTTAARVRLWLKPSLSAESQRLQT

SEQ ID NO: 27883 - protein, 176 aa, Anoxybacillus sp.
LLQENVGAVVIENIQLRQQHDTDRRFNRLTHHFKKKKLTETILRRGLRLGVRIKKVNPAYTSVIGRFKYMKKYGLSVHESAAFVIGRRGLGYRERLPKELIDTIKAKVKRHLIAVLGSMEESYKQSKSGKKQRQYLGMMLKKIENFKFKEEHEWSLWNMFHKFCWLNQYQIQLKEV

SEQ ID NO: 27884 - protein, 402 aa, Salmonella sp.
VKRLQAFKFQFRPGGQQEREMRRFAGACRFVFNRALARQNENHEAGNKYIPYGKMTSWLVEWKNATETQWLKDAPSQPLQQSLKDLERAYKNFFQNRAAFPRFKKRGQNDAFRYPQGVKLDQENSRIFLPKPGWMRYRNSRQVTGVVKNVTVSQSCGNWNISIQTESEVSTPVHPSASMVGLDAGVAKLATLSDGTVFEPVNSFQKNQKKLARLQRQLSRKVKFSNNWQKQKRKIQRLHSCIANIRRDYLHKVTTTVSKNHAMIVIEDLKVSNMSKSAAGTVSQPGRNVRAKSGLNRSILDQGWYEMRRQLEYKQLWSGGQVLAVPPAYTSQRCACCGHTAKENRLSQSQFRCQVCGYRANADVNGARNILAAGHAVLACGEMVQSGRSLKQEPTEMIQATA

SEQ ID NO: 27885 - protein, 397 aa, Halorubrum sp.
MASDDKYHRRTLITRLELRSAEDAQLLLDTIDEWRDGCNIGSDLAWETCHTKSDVRNHAKETIKKETELGDQHATLACHEVAGVIKSCIERRKQDKTATQPQFTSRSMVFDRRTLTVFPDQGKITLTTLGDHSRVHADLALPENPDGYQYDYLTDDEWEYTESTLHYRNGEWYIHLGYRTPKQDADESTTEYGAVLGVDFGVNQIAVTSTARFFGAGELNHYRRECERVRGELQGTGTQSAHRTIEQLSGREQRYVKHVLHSVANGIVEEALAHDCAGIILEDLSDIRDDLPFAQWHSEWAFRKLKDFVEYKAEYEGLFVDTIDPRNTSKRCNECGFVHGKNRHSEAFECRHCGKQNHADYNAAKNVAELYLRRGHQPPCGRSVSQYALKSGSRTPS

SEQ ID NO: 27886 - protein, 547 aa, unknown
  TnpB Polypeptide
VAQTETPIAPAKPKKPKKPPTLINAFQYRLYPTPTQVAKLEHVLNTHCNLYNDALRDRTAEYALTKKSLTYMDQQGMVPGRIRSGDIGTTRNSMVQTIRRIDAAVNGFVKRVVKWRASGSPEGVELGYPESVDLDDFKSVVWSPGEGAKWMPERQRVRITPDVGEIKAVVHRPHQGTIKTITITRRDRRWFVTLTCDLGAIPQYRAGRMIGIDLGVSKLAATDDGHFVENPRFFEDSAPRLEAAQQVMERRKVIPPKVPNRPEINPATGRKWPRYSENYRDAKTAAANIQRDTANRRRDFIRKAVHGLLETRDGLPDPVGILVLEDLQIKQMIMAVNVKMAKEEKARKEAEANGLPIPMAEPGAGKRPRRGMAKALHDAAMGGVHLALTQLAARLGVRVILVNPANTSQRCSRCGGMPEVPKTLDERKHKCAACGYTADRDTNAARNILALGQEMLRQEEADRPGKEAARLRMEAALLRKEARELAKGVAGLDTPADPAETDDRDGDHADLSVPMRLTARPSPDPAVMIPIGNHVRQMARMKQLVLI

SEQ ID NO: 27887 - protein, 469 aa, Chloroflexi sp.
MATATKTIRQKLEYRDGISHYFETTQELFNRVAAFYFGVIEAHPAILSFPPTQALTKLEQLTHVTATNVNPVMPLLEVATNVPALFRRAAIHAALGQAHAFFTSLAKWRKQKEEWEAKLQRKQNRSPKDQTQRSPKFKLRPPVPPRHWNRSVTFYAGQYKELNEDFILLKLYNGQDWGWFKFGHSGRPLPQGEEWKMGSPQVVRKGKGKGKWDYRLHLPFLKSFSSPAKAEKQVLANPELKICAVDLNLEENLAVATILNSEGTPLVTRFIKGGREVNGFRKRLLGWIAINRSKTGLLKEGETDNIRLWQQIKDLDENTAHRVSRRIVEFANQNGATVIVFEHLSNLKPQKGKYSKRSNLKRAYWLKGKIFNYTKYKAWELALLCCRVSPYNTSRECAKCHAIPLVRYAEGQGQPREGYKVGAPLVYCPVCGMRGNADRNASIVIGQRFLARYQNLKEKPPTSLPAMVG

SEQ ID NO: 27888 - protein, 379 aa, Chloroflexales sp.
VKLTPSTAQAGLLAETSRLFTAAFNAVCRVGWEQQITNGVDLHHATYYPTQADYPALVSDLLVQARVKATEAVKSAFALQKAGRKVGMPQSDACPPRYNLHTYRVDWESQTVRMSTTGGRQTIRFAVPDYCTHYAGYPVDTADLIHRNGVWWLHVVVSVPAPAVEPTDEIVGVDLGIAQPAVTSTNRFLGKPAWKAIEGRRFYLKRQLQRKGTKSAKRHLRKMRGTQARFRRDCDHVLSKQIVQSASPGATIVLENLKDIRKRSKIRKQTKTSRRVHSWSFAQIKSFVQYKAEERGCTVAGVDPRHTSQACSCCGHTARNNRRSRGRFVCRVCGFELHADLNAARNIAAKYHASEGRSPAGGLPVNQPIVSVPVPRHQE

SEQ ID NO: 27889 - protein, 502 aa, unknown
  TnpB Polypeptide
MECVRRAVAVEVESPPPELYAVEEPYRRIVEEVAAYVAERGRLEKEKYNELYRRFRKQYHLPAQLIQQAINQGVETGRSFLQRKRDSRVHKPRPEVRRVSIRFAKDSWSYKKAVGSAAPVKLALSLPGGRREVWIKPHKRFWLYLWKVLRKEAELASTLMLKRRGKWYAIFAFDVAPKRKPPAEAVAFDVNENIVAAARLSLLATVNRIASWNRQYVNPAVYSIETDFGRLAKRYEAVRNAKLEELKRKYPYAGRDEEERRQNVADTREFRRFTRRLREGRRKEGRVRQIAREMTKSPAVVITEELGKNPQEEMIGVEKRAEKSVKKKVEKRELRHRVKQTPFKKLVRAVEEKATEGGSVVFYVSSFKNSRMCPIHFAKLEDGGDWHVLRCPHGHAVDRDAAAVFNMLWKTTPTGWVKSVWWDVKEARKRLKKGIVPREAVRKANPIIPRPIVHAVLASLGALKAGGKWPAVLARAAPMTPAQDVDEGRARAPPRPKGTPAL

SEQ ID NO: 27890 - protein, 280 aa, Aneurinibacillus sp.
MSPAFKRQYGKVKIQFPTNLDPDCICEVRLLPKYEAQFIEIEYVYKLNVQQPALDKMQALAIDLGVDNLAACVATNGASFLLDGKPLKSYNHWYNKENARLQSIKDKQGIKVLTNRQVRLVTKRNHFVRDYLNKAARYLINYCLNNRIGKIVMGHNPGWKNKVKMSKANNQKFVQIPHAQFMAKIENLCDRYGIEMIRQEESYTSKASFLDNDPVPIYEEGKKYSFSGRRIKRGLYKSGTGQVINADVNGAANILRKSNHRFLGRVAMGCLTNPQRIALS

SEQ ID NO: 27891 - protein, 399 aa, Lactobacillus sp.
MELTKTVKIQIKLAAESDGDLLRQAMEQYRLACDDTSHYVFNNGLVLNTTKLQSALYRDLRTKFRLKAQMAQSVLRNVTARYKTVRTQLKQKPYRYQDEDGEWQTQTKDLTWLWYPIQFRRPQLDLVRNRDWAIRKNGSFSLNTLDRRITVWPVLNHWLDYFDGTWKLGTAKVLARGGKWFLHISAAKEVPDYEQKQTAHVVGLDRGLRFLGTAYDESGQTTFYSGAKILAKRRRFKKLRAQLQAKGTKSAKRVLKRINQRENGWMTDINHQLSKALVDRYGSDTLFVLEDLTNVRFATEKVAKDRRYEQVSWAFYQLEQFLTYKAAAVGSHVLKVSAQYTSQRCPHCGKISKQQRDHQQHEYRCVCGFRSNDDRAGAMNIQELGRRWLNGTAKPKYTK

SEQ ID NO: 27892 - protein, 386 aa, unknown
  TnpB Polypeptide
MYTTTTIKHHRTNFLDSLAHESGRCYSKVVSLVRKTHAKKGFWLSKNDAQKYLRLRGYCLHSQSVQACADSYFDALDAYFQVRKVNPDAKPPKRTPKHFKVRWKSTAIRHKDGKLILSNGRGRAPIVLEIEEMETKPRYVEMYFHRGHYYFALVDKINVPPKQETGIAVAIDMGEIHPIVSHDGENTIIYNGRFVRSIVQYRNKVNARFQAKMDRCEKQSKRWYELLKAKRRTLDKINAQLKDAEHKITSRFISDCEKAKADTIVIGDLNGIRDRAKFAKKSNQKIHQWAFSRIAEKICYKAERVGIRVIFESEAYTSQTCPKCANRKKPTNRNYHCKHCGFKYHRDGVGAINLWSKVSGYLLYPVVGELAAPLGVKFHWHLSRSG

SEQ ID NO: 27893 - protein, 470 aa, unknown
  TnpB Polypeptide
MSYVFTYTTEIKNKNYNQSLCKYISDWTIIFNKIQRKVWQQIKAEYKEKGEIKSKFITALSEDEIELTARTKNSIFLNMIGRFQSIKELKNYELENIDRRLEKLEEEIVEIKDRIKRLKLKKDEDIFGLSNKEEEEFKNTKHKLYWKLNRKNKLFQRRNNLDKEIKEGDFKICFGKKYLLKNDYNKFIAQRDSELFFVGGAAETSCNTNFQLLYNPRKNNFRIKVRKEIDLESSKYEYGEIYFNQKRTKQIRQILKNKSSALTYRIKVKNGEYYLQLIFTLKHTTEDCLTRSSNGVFGIDFNKSFIAVTETDKHGNMVQTYNLDYRFGLGNKTKSDLELVIEQVVKEALNKGKDVVIEKLDFKIKKSKMESKKDKRYNEMLSSLAYRVYGSIVKSKCAKNKVYLHEVNPAWTSYIGKNKYSYQRKLNIHTAASFVIARRGMKFIDSIGKKKMRLKRKKRKKYEKRKVNNK

SEQ ID NO: 27894 - protein, 402 aa, Escherichia sp.
  misc_feature (64)..(64): Xaa can be any naturally occurring amino acid
  misc_feature (95)..(96): Xaa can be any naturally occurring amino acid
  misc_feature (111)..(111): Xaa can be any naturally occurring amino acid
  misc_feature (139)..(139): Xaa can be any naturally occurring amino acid
  misc_feature (167)..(167): Xaa can be any naturally occurring amino acid
  misc_feature (178)..(178): Xaa can be any naturally occurring amino acid
  misc_feature (210)..(210): Xaa can be any naturally occurring amino acid
  misc_feature (219)..(219): Xaa can be any naturally occurring amino acid
  misc_feature (229)..(229): Xaa can be any naturally occurring amino acid
  misc_feature (241)..(241): Xaa can be any naturally occurring amino acid
  misc_feature (256)..(256): Xaa can be any naturally occurring amino acid
  misc_feature (312)..(312): Xaa can be any naturally occurring amino acid
  misc_feature (329)..(329): Xaa can be any naturally occurring amino acid
  misc_feature (336)..(336): Xaa can be any naturally occurring amino acid
  misc_feature (343)..(344): Xaa can be any naturally occurring amino acid
  misc_feature (355)..(355): Xaa can be any naturally occurring amino acid
VKRLQAFKFQLRPGGQQECEMRRFAGACRFVFNRALARQNENHEAGNKYIPYGKMASWLVEWKXATETQWLKDSPSQPLQQSLKDLERAYKNFFXXRAAFPRFKKRGQNDXFRYPQGVKLDQENSRIFLPKLGWMRYRXSRQVTGVVKNVTVSQSCGKWYISIQTEXEVSTPVHPSAXMVGLDAGVAKLATLSDGTVFEPVNSFQKNQKXLARLQRQLXRKVKFSNNWXKQKRKIQRLHSXIANIRRDYLHKVTTXVSKNHAMIVIEDLKVSNMSKSAAGTVSQPGRNVRAKSGLNRSILDQGWYEMRRQLXYKQLWRGGQVLAVPPAXTSQRCAXCGHTAKXXRLSQSKFRCQXCGYTANADVNGARNILAAGHAVLACGEMVQSGRPLKQEPTEMIQATA

SEQ ID NO: 27895 - protein, 397 aa, unknown
  TnpB Polypeptide
MIKAHKIRLHPTTEQATYFAKAAGTARFCFNWAVAEWQKQYEAGGKPSALALRTQFNEIKKEQFHWVYDVTKCAVEGAFMGVAAAFKNFFEGRKAGRKTGFPKFKSKKRSRPSFYLANDKFTIGDHWIDVPKLGRVNMAESLRFTGKIMSARISKQASWWFVSITVEMPDEIVYNLNPPVGVDVGLNRLATLSDGRRYENQRPLVHQLKKLRRLNKELARRTKGGKNWLKTKDKLGRLHHEIGCIRLDWLHKLTTEIATTCGIVAVEDLHVKGLIRNRCLSRSFSDAAVGKLLDFLESKVPRQGAMLLKVDRFFPSSQLCHCCGARKTDLTLADRVFVCPDPDCSSAGDRDENAAYNILLEALRVFGLNLNMPSGVVATTRRKTAWGPGVRPKKQML

SEQ ID NO: 27896 - protein, 316 aa, Moorea sp.
MMIILEFKAYGNKAQYQSIDEAIRTVKFVRNSCLRLWMDNKGLSKYDLNKYCKTLAKNFPFANELNSTARQAAAERAWSSIASFFENCKKKVPGKKGFPKFHKHCRSVEYKQSGWKLSPDKKSFAKRRLCRITFSDKKGIGKLKLKGTWDLWRFDKKLIKRVRIVKRADGYYVQFCISVDVKEQLKPADATVGLDVGLKEFYTDSRGKTEPNPRFYRAGEKRLKFYQRRVFRKKKGSSNRRKAINRLGRQHLKISRQRVGVGEACAKRIACASRIEHAKRLARCVIRSNDLVAYVRAACRKARLKGQKSSKKPLSC

SEQ ID NO: 27897 - protein, 384 aa, Lyngbya sp.
MLTLTYEYKLIPDRQQIEVIEHTLSEGPSVWNYALRERKDWLASRKSPVNACSLKQEYIISPDAPYPNYHNQAKSLTKAKKINEVLKSVNAQVLQQVLRTLDRAFADMQSKKLGFPRFKNKYRMRSYAYPQMLKNCVKGNQIKLPQLGWVKFRKSREIPDGFELKQARIVRRASGYFVMLSLQLDISIPDVPFHGHPLGIDLGLDKFLATSDGELVDRPRFLNQLQRKRKLLQRRLRNKKKGSNNRQKLNQKIARLHQRISDTRKDWHFKLAHHLCDQAQSIFIEDINFISWAKGMFGKHTLDASFGQFVTLLNWVAWKRDVFVAKVDKNYTSQICPNCGFYAGKKLLSEREHNCPECGYKTHRDVAAAQIIRNRGVEEYALLA

SEQ ID NO: 27898 - protein, 417 aa, unknown
  TnpB Polypeptide
MIEGQRQNKNKNIGLSMKATMLKRMNQTCRVYTVKIDESSLSKLQKEQLKLLFLEAKWIYNYIISQPDVFSVKIGDVITKKNRDFEDVEIELKQIGSQMKQSVVKQIQSQIKTLSTLKRKGNTVGQLKHIKEYKSLNLKQYGTTYRFNRNKVKLQNIKGWLRVNGLKQIPKGVDMANAKILNTPKGYYLAITTFIDNDKIKENDKIDEVIGVDFGCKTSFTLSNGEKINASVQESDRLRRLQRKFEHQKKGSERRYKTLKQIKQEYQKLNNKKNDITNKIVSYLSSYKTVVIQDEQISKWKIKHGNKIQHSVLGRVKEKLKMKPNCAVLNKYLPTTKLCAKCGTYNDNLKISDRIFVCPNCGNKEDRDIHAAQNMVWLYENNLGVGRTEVKRVELQRIITEICCGKEAVKREDHPLV

SEQ ID NO: 27899 - protein, 374 aa, Peptococcaceae sp.
MGMTEPVKKAFKVRIYPTPDQQAQINKTIGCARWVYNHFLAWHVEVYKAEKRYMSYTECSAMLTQIKATPNTGWLAEVDKFALQNSLKDLDESYKNFFEGRAGYPKFKSKRGPKQSYQTNLTNNNIRIDVKHHRIKLPKVGWVEYAADGREIGNIINVTVSRTPSGKYSASILCQVKIKPLNVATGEVGIDMGLKKFAILSSDEVVENPQYYVKAQEKLTKLQRTYSKKKKGSKNREKARIKVARQHEKVVNQRRDFQHKVSKKLVDENKVISMEDLRIKNMVKNRKVAKAISDAGWGEFRRMVEYKATWYGRTVVIIDTFYPSSKLCGKCGTKNAMLTLSVREWQCPVCGTIHDRDINAARNILAEGKRILAS

SEQ ID NO: 27900 - protein, 398 aa, Kribbella sp.
MSRFRLYPTPTQHAALLEQCGHARYVWNLALEQWSMWTRDRAPTPGFTEQCRQLTEARAASDWLRVGSQTVQQQALRDFAQAVRNFYTGTHRRPTWRKAGVHEGFRIVGAQASRIVKLNRRWAKVLVPKVGWVRLRLSRAVPNSKSYRVTCDRGGRWHLAFAAVPPPIPAPGTGEVVGVDRGITVSAALSTGELLACPGLSETEHARLKRLQRQLARSRRCSNRHERVQAAIARLHARVADRRKHWVEETSTDLARRFDVIRVEDLRIPQMTRRPKPKLDPERPGNYRPNRRRAKAGLNRGILAHGWGLLVQRLEDKAPGRVERVKPAYTSQTCAVCQHCAPENRKSQAVFRCVACGHQANADVNAAINIAAGQAVSARRETPPGVSPKREPQLTTSA

SEQ ID NO: 27901 - protein, 416 aa, unknown
  TnpB Polypeptide
LYLTVCQQLKHLSKEEFLILRELCHTAKNLTNQAIFNVRQHYFEHGKFLSYEKNYALLKTSENYKILNSNMAQQILKEVDGSFKSFFSLLKLAKQGNYAFQSCKLPHYLPKDGYATLVIGFVRLHRNQLILPYSNAYKKAHKPICITIPPILTDKTIKEIRIIPRSDARFFEIQYTYQAEMIQRNLNPNHALAIDFGINNLMTAVSNRGESFIVDGRRLKSLNQWFNKRYACLQCIKDKQHFGRNTTKQQAALQKKRNNQIRDYMSKAAQKVIQYCIRKEIGTLIVGYNTMFQGSSNLGRQMNQVFVNIPFGMLRRKLKYLCELNGIRYVEQEESYTSKASFWDQDKMPVYGAPGSECPVFSGQRIYRGVYKNHAGKKYHADINGALNIMRKSNIVSLDALYARGDVDTPVRIRIA

SEQ ID NO: 27902 - protein, 371 aa, Clostridium sp.
MILAKKIRIIPTTEQEQQLWKSAGTARFIYNWTLARQEENYKNGGKFINDGDLRKEITLMKQTEEYKWLNDVSNNVAKQAVKDGCNAYKRLFKGLAHKPRFKRKRKSKPSFYNDNIKFKVKSNMVLIEKVGWIKTSEQIPIDVKYTNPRVSFDGKYWYVSVGVEKENPIVKLTDESIGIDVGIKDLAICSNGMTFKNMNKTRLVKKLEKRLRRLQRKISRKYDLNKEGRKFVKTSNIVKLEKQIRLLHRKLSNIRNNHLHQATTKIVKTKPSRVVMETLNIKGMMKNKHLSKAIAQQGLYEFKRQLQYKCEFYGIEFVEADKWYPSSKTCSECGHVKTKLSLSERTYICEECGCVIDRDYNASINLSRYSA

SEQ ID NO: 27903 - protein, 268 aa, Virgibacillus sp.
LQEVFRRLDNAFIKFFRKEARYPKLKKYKDYNSMTFPQFGHKPNSHHRYAASFATNENLQLSKLGQIPIHLHRPIDGTIKQLIIKRQGTRWYAIFCVERQVCPAPINRDLAVGIDIGLNKYAVLSDGSYRENPRFLRQTEKKLKRAQQKLSRLKRGSANYMKQVTKIHKLHEKVFNQRRDFLHKFSFNLAKEYSVIAVEDLNIRQLVKNKRLSKSISDAGWGMFRSMLSYKCGRNGGILIKVNPEFTTQDCSKCGNRVKKFIDSHSYL

SEQ ID NO: 27904 - protein, 453 aa, Planktothrix sp.
MLVLEFKIRAKTEQYKAIDEAIRTAQFIQNKCLRFWMDNKGVGRYDLNKYCRVLAHEFKFASELNSQARQSSAERAWSAIARFYDNCKRKVPGKKGFPRFKKNCRSVEYKTTGWNLDLKTRKAITFTDKKGIGRLRLVGSYDLHFYQPEQIKRVRLVRRADGYYCQFILAVDVQIKTEPTNKTIGLDVGLSAFYTDDQGNKVDNPKFLRKGEKKLKRLQRRLSKKQKGSNNRKKARQRLAKFHLKISRQRKEFSKRVAYSVIHSNDVVAYEDLRIKNLVKNHCLAKSINDAAWYQFRVWLEYFGRKYGKATIAVPPQYTSQNCSSCGKTVKKSLSTRTHICSCGCQLDRDENAARNILRIGLSTAGHTGTFGLEPISALGELTSTLIESVLSGQVDSLNKESNVTSLGDVTVRVSTTLAIAEFDAQTRFQALAMQGDVAQGLEVLDRLDALNQ

SEQ ID NO: 27905 - protein, 564 aa, Nonomuraea sp.
MAGKRLRTIVAPFTVAAPAGARIRDRLRLSERDVEVLTAVGRHLGSHACVDLAERIRIGDVKAARNRRAERKKRLTAVSSSRWAGAMTRTSEDQYQLALRCLHDERAGLRRAIAMISKRLPVVCGDREGRIRGYADQEERWHKQRRLQVLTARLTRVEDRIDKGRPAIAAGGRRLAKARHHLTDAELSEQQWRRPWEARRMFLTADGETGAPFGNYTITVDPGDDSVTIVLPEPLRHLANVPRGRYRLAGMVRFHHRREDWLDRVQANRAVRYDITHDPDRDRWYLDASWSTDAPALPCPDQLAASGARLLSVDLNADHLAACVVDACGNPIGQPITIPTVLTGPASQRDGRLRQAISELIHLAHQHHCAGIAIENLGFADARATGRETMGRGKRGKTFRRTVAGIPTARFRERLRGMAYHRGLLVVAVDPAYTSRWGAQHWQRPLQQQTKQNTQQNTENMVTRHHGAAVAIARRAFGHGIRRRPGVTARHQRMAARRATGQTASRPPAHGTASPQRTAGTPPEGGKTCRSPGDQLTPLPAPKTVRGAPGPNPGPVYGDAAHVG

SEQ ID NO: 27906 - protein, 408 aa, unknown
  TnpB Polypeptide
LVNKNYLTAKIKLKPTGEQIDILWQLSEAARQIYNLALEQRRMLRNNFRANTSYNEQSAQLTQIRKEYFSSLHSQTAQSVLKDLDEAFKSYYALLKTDSKARPPKFRGKKYFYTLTYPQNSYHFESNDLVLHNPDRLTLKMADFRDIPRTKAIKQIEISEEKGNFYASVTCEVTPEQAAKTGKIIAFDPGVKTILAGFDGEQFVTVDGTIIKKTQKHYAHTLDRLQSKIDQSKKGSKRHSRLIKAKKKALRKRSARVKQVSHCISKTLASMEYDAYLIGDWSKKDSLANTKSRKGNRTINRAVQNQLPLVKLTDYLSYKTALKSKQVRKVSEERSSQTCSNCNHIQEIRLTQRIFHCESCGTKINRDDNAAVNLYRWNAGPVKGPFDKLERIRLRFVFGRFNACLTSA

SEQ ID NO: 27907 - protein, 410 aa, Micromonospora sp.
VQLRYHYRVYPDAAQREALARSFGCARVVFNDGLRLRQRARENGEKYVSDAELSRRLITEAKLTPQRAWLGEVSSVVLQQALADLNVAYRNLFNSVTGKRKGRKVAPPRFRSRKDNRQAIRFTKNSRFTVLGNGRLRLPKIGDLHVRWSRSLPSEASSVTVIRDAAGRYLASFVVQTNQDETLPPVDPEIGIDLGLTHFAVMSDGAKVTAPKFLRRAARKLKRLQQDLSRKQRGSQNRKKAVVKVARAHARVADTRRDWQHKLSTAIIRDNQAVYVEDLCVVGLGRTRLAKSVHDAGWASFRAMLEYKAARYGRTFARVDRFFPSTRMCSACGRINDKMALAVRAWDCPCGAAHDRDINAAKNIKAAGQADFNDRGAQVRPGLVPAPRGEAVTHPNPACSTRSVEGISVL

SEQ ID NO: 27908 - protein, 419 aa, Halonotius sp.
MHYAYRFRLDPTPSQRERLDYHRDTCRQLYNHALTEFNEIPESAGTLNQRVRQVRDQLPDLKEWWDDLTDLYSTVAQATVMRIEDSVKALSELKQQGYKVGSLNWKAPQEFRSFTYVQSGFEFDSKDGHTVLSLTKLADIPVVKHREIPDSETIKEVTIKKEPTGEWVACVTVDGKETPEKPERPERCVGIDVGILKYAHDTDGRAIGSLDLADERERLQREQRKLSRKDHGSNNWEQQRQKVAQCHQQLKRKRRDFLHKLSNYYATEYDLVAVEDLHIKSMLESAGNSRNTASAAWNTFTTMLSYKCDREGTHFVEVDPAGTTKECASCGVATDKPLWVRKHSCPACGFEMDRDANAAINILSRGFDKLGVVHSEGTTPVETALPMFASDSVSGVDTKRVIETGSPTLKDRPAQAVSE

SEQ ID NO: 27909 - protein, 469 aa, unknown
  TnpB Polypeptide
VIVLSVALDQFRFKVAADLGKDFSKVADCQFRQHIPAVFCDKDQVRVKAVNYVPASAKIHVVSIRPMCMMVDMERMRGYVYRLAPTEGQERQFRQFAGVCRLIWNLALEQRRVWGRSHGCNFHTASADLKALRAEFDFVGEVSQTAQQQTLRDLDKAYQAFFAGRTGYPRPRRKGESDQFRFMGREVSVRRHNRRWSEIRLPKIGWVRFRDTRRMDGTIRNATIRLTALGWQVSIMCKCEVAEPTRLPGSVGIDRGVTVPLMLSNGDQFHLPASLAKLDRQHKRAQRVAARRRKGSNRWRKAIARASKLKARQARIRVHWQHQASRRIADSFGTVVLEKLRTRNMTRSAKGSIEAPGVNVKAKAGLNRSILNVGWFGFEAKLAYKLAERGGQLVRVNPAYTSQTCSACGTVDSRGRKSQASFVCPCCGFRANADLNAAINIERRWNTPLLDVEACGSAAQDASTLLAVA

SEQ ID NO: 27910 - protein, 460 aa, unknown
  TnpB Polypeptide
VLWQMLICSVNDHGVFQDLALRVRLYPTDDQEAFFGQIAGCTRLVYNTALVQRSFLWRQYQRAEGRSLSWYTQKAELPALKQAAPFLKDVPAHCLQMALFDLNAAFRNFFEGRAAYPKPRRRYEHDSFRFPDRKQVRLDSRRGLLYLPKCGYRKGNNGPIRCRFHRRIKGSLRSVTIVRDGNHWYASILYRVKVEVSEPINDNVLPEEVIGVDCGVAVPFMTSDGEALGYFVDPRPGAGRAKRAKRLQQQLARCRKGSKRRRRARARLAAFKAREKRQRKDMIEQASARVARKGKVVVLEDLRVRSMTASARGTAEDLGRNVAAKAGLNRAILDKGWGMFRVRLGQKLARKGGRLLAVPPGYTSQRCYACGHVAATSRLSQERFECVACGHEAHADYNAALNIRLLGLLRLGLADPNGFSAGTAVTARGAFGVSRAAKRECSLGSGGMPPELASSGCIAV

SEQ ID NO: 27911 - protein, 378 aa, Methanomassiliicoccus sp.
MFRTIKIRLERTVELIETVNEFNKACQCVLDWGRMNKQYNKNKLHHATYKGIREDFPSLPSGLVVTARDQASDMLKRDKFKHKIRKRPFSSIRYDKRTLNVWLEHGYLTISTVFGRKRYEFNLPEYYRQYQSWKIKSAQLIVGRNACFLNTVVEGEAPPLSGGDRRLGIDLGINNIAVCSDNTFYNSKHLKNVKGKYRHLKAELQSKGTRSARRKLREVSGRERRFVRDLNHRVAKEIVNKPYDVFVFEDLTGIRDRSKFNSKLGSWSFGELIQFVQYKAEALGKQVMLVDPRHTSQTCSKCGHVSQNNRKGRQFTCVQCRFTLDADLNASRNIAAFSTREGGRLRVSEPNVASDEAEGRMAVEAEFSCKPVSLLVGS

SEQ ID NO: 27912 - protein, 257 aa, Methanomassiliicoccus sp.
VDHRELYIPCLKLRLDISHLPLFEKVNHIELDKEYAHVMVTVNELPICEVEQWVGIDLNSTGHVAVVANPSTGKVQKYGKEVPHIHKKYSKMRNNLNNEGYPKVAKEKIRNKENRISKDLNHKISREIVNNAAQQGCGIKMERLSDIRTTARTSKSTRASLHSWSFYQIQMMIEHKAKLRGVPVAYVDPAYTSQQCSRCGRIGNRNGKDFSCPHCGHVDHADVNASFNIALRPPLGEGNGRLHADRDACKGRIDTPQ

SEQ ID NO: 27913 - protein, 263 aa, Methanomassiliicoccus sp.
VISDRKELYISCLKLRLDISHLPMFEKVNQVELDEECAHITVTINEIPVREVENWIGVDLNSTGHIAVVANPATGKVQKYGKEVPHIHKKYSKMRRHLYKEGHPKVAKEKIRNKEKRKIKDIDHKVTSAIVKEAVRQECGIKLEWLDGIRETARTSRSSRASLHSWEFYRIQQEIEYKAKLRGVPVAYVDPAYTSQQRSRCGRIGNRDGKDFTCPHCGHVDHADVNASFNIALRPPLGEGDGRLHVYRDACKGRIDTPQEAPA

SEQ ID NO: 27914 - protein, 391 aa, Moorea sp.
MVEKAYRYRCYPTPEQETLLRKTLGCVRLVYNKALAARTEGWYERQERISYKQTSSMLTGWKKLEELEFLNEVSCVPLQQGLRHLQSAFSNFFAGRAKYPNFKKKRNGGSGEFTKSAFKFEEGQIYLAKCKEPLPIRWSRQLPTGCRPSTITVKLDPSGRWFVSLRINDPTDHKLNPVKKQIGIDLGISNLFTTSDGDKVANPKHFNKLYKKLRLAQKSLSRKVKGSKNREKARVKLARIQAQIADSRRDHTHKLTTQLIRENQTIVVEDLAVKNMVKNHKLARAISDANWGELVRQLTYKAEWYGRELIKIDRWFPSSKRCSCCGHILEKMPLNIREWDCPQCQTHHDRDINASINILAAGLAVSVCGATIRPEGSKSVQAGAMKQKPKS

SEQ ID NO: 27915 - protein, 480 aa, unknown
  TnpB Polypeptide
MIAIKLPYQTSQEDKNIIFKYQKNQNNIIKFIFNRFKDAGAEVSGIEIRKQIKDLNNIFIDSWMIESSIFKARELFSSSKENNSKVIFGGRKLFLQRCQNKITKQEFQFKKISPLYLVGERLQKGNRKVALDIKNNKILLKFNRETHIELTLPNLKKNLKQKLFRLEELMNKKLIPMTFSINQEFLYLSFEEIQNSDIIKISKKQNRIMALDLNPNFIGFSILDWVNEEKFNIVKTGMISVKEINDKEFNIKNLKYELKKQEVSGEARKQIFNKKYSHIKNKRKHEIVEVAKQLYNIAKSHNIEYFSIEELNIKPRDNQKGRRYNRLINNNWNRNLLEQQLEKRLKIIDIKMLRILPQYSSVIGNLVYRNLRLPDPILSSIEINRRTFKFVGKFIKKVNSYDRIVLPSFKSLRKIVSISLEEIGYKLKSTILNWKDLNDWMKEIKTLNLRYRVSLAEAKPPASVLSLKSSKSLVKVFEFC

SEQ ID NO: 27916 - protein, 215 aa, Salmonella sp.
MKRAYKYRFYPTTEQAELLAQTFGCVRFVYNSILRWRTDAYYERKEKIGYLQANARLTALKKEPEFAWLNDVSCVPLQQSLRHQQTAFANFFAGRAAYPAFKSKRHKQAAEFTASAFKYRDGKLYMAKNKIPLDVRWSRPLPSVPSTVTISKDAAGRYFVSCLCEFESASLPITSSMVGIDVGLKDLFVTDTGFRSGNPRHTAKYAARLALLQRR

SEQ ID NO: 27917 - protein, 531 aa, Ferrimicrobium sp.
MIAVMRTKVQAQKVSDLTGGKVLLDDGKPTRKVALAGDFEQYRDALESVSVLFGLCDDTGEKAPTGWTVTGASFELEWPKDPKSASLIRSHFGARRVAYNWALAKVKSDMEAKKRDASYPSTPWTLEALRKQWNQEKDEVAPWWGDNSKEAYASGIADLVQALSNWSSSKHGSRKGKKVGFPKFKSKRKDQNRVRFTTGAMRFEDDHRTIVLPTIGALRSKENTRRIQRHLAKNNARLLNCTLSERWGRLFVSCQMAVRTQIVSPSGQSPKAGKAGVDLGLRSLATVADSNGSITIFPNPAPLRATLTERRRVGRTLSRRIPGSHGHRRAKAKLVKLDRKAVYIRRESIHQLTRYLVDNYSEVKIEDLNLAAMKRSMGRRAFRRSVSDAGLGAFRPTLTYKAERVGVKVVVVNRFFPSSQIHHNCGGRLTGAKLAKRLTCDTCHVEVDRDENASLNIRDWSVISCGLVESSALFVPRPFGTGGSSDDGMTHHLERACKTGSNTGRAWRGKNDSWTSEHEVRDENLVKGASK

SEQ ID NO: 27918 - protein, 373 aa, unknown
  TnpB Polypeptide
MKLIAQVRLYPTKDQYAALKQTLETANAACDFISARALQAQVFHRYGMQNLTYYEVRERFNLSAQMVIRCLAKVADAYRLERRTPRTFKPLGSIAYDDRILSWYTDRNEVSIWTVDGRQRIPYGAGERQRELLQSRQGETDLVLFNGMFFLLTTCELPDPEPRDVAEALGVDLGVTNIATTSDGDVLTSAPVERNRQRMQRLRADLQARGSLSAKRHLRKLAGRQRSFQKDINHQISKRLVAEAQRTNRAIALEDLTGIRARTRARGAEQRARHSNWGFAQLRQFIDYKARLAGVPVVLVDPKYTSQQCACCGHIEKANRRSQSEFLCCACGQAAHADVNAARNIALRAEVMPPIVSDASALADVAPETSPRL

SEQ ID NO: 27919 - protein, 439 aa, unknown
  TnpB Polypeptide
MITGRKYRVKALGKESREMFFTWSAAQMLIYNALVQERMYFLGFFRKFGGKLPPIDQKYSHLINREDGAYAWMHKVPSQIFRNGAVLHKKAWSNYFAGITRQPIPKRVKGADRSLWLTQELFSIKQVSKNWYELSVGTKTISGGRFLFKAHRPFTEPVSVHLKSSGTEIFISFSCEEEFQQYPETKAEKIARLSQYGKDELLNISFGIDRGVVTPFQLSDGRRFDYSQTQKDRLKASERRKKHYQRMMARRIKGSSNWKKAKEKARRCSRYAAYVRRDFAHKTSHAIVGNESVEIIGIEDLKIKSMTARPEPKKFEDEEFLPNGANAKAGLNKAILEKAWGLTERFIEYKAQRAGKLIIKVPAPYTSQTCSRCGCQAKTNRKSQALFRCTHCGFTQNADRNAAEVINAKAVELFHSEGIKPKEVRRTMRLRHKPACASA

SEQ ID NO: 27920 - protein, 417 aa, unknown
  TnpB Polypeptide
MEVRRTVRVKLDMDSDDAALLHDTVDGFLFAANYVVDHAWGGDKITTSKAQLQRETYDDVREQTPLNAGLVQNARNKAADALSGVVARWSNGRDAGKPQFLKPTVWYDHRTATFYGDHVSLATTEERVEVEYVLPDDETGTPHGEYLHNDDYEVTGAELHYRDGGWFLHIRTKAEVEPDTPEQATTKHRTVLGVDLGVNNLAVTSTGTFWTADGYNHWQREYERRRAGLQQRGTRWAHENINAVGQKETGRFTTRLHRIANGLIEEAAENGCTVIAFEELTGIRERTGASWGHKWAFDRLYEYVEYKAAERGITVEQLDPENTSRRCSTCGFTHPDNREDEAFECLKCGYQNHADYNAAKNIGLRYLRRNQTGDGGGAPLGVRLNSGTVNVNGAYEPPASTEARTGVHAESHPFTGG

SEQ ID NO: 27921 - protein, 410 aa, Vibrio sp.
MKTLRYNYRLKPTAAQEATLIEFGSYARGLWNFLLSENKRQYEVDESFVFYNEMASKIKEIKKLPEFAWVKAFDSGAAQQVARDLDAALRKGVSKTDRQRFPRFKVSYRIKKQHNDSYRAVNNSNCIRVEKGTITLPKVGAVPIVLHRNLVSKIKTATVQYRHGHWEVSLTQEVVCDEAKRVLKSIAGYDINSKQTVVGSTGLTIDNPKYLKQERVKLTRLQRQLSMKKKGSGRWKKAKARLNKLHGAIARKRMDFAHKTAHRIANESDIVVFEDLNVAGMQKFNGKMVADNIMGLISNLTQYKVELRGGVHHEIGRFERTTGVCSSCGQHHKLTLKERHFTCTNCGLFSDRDHSSAIAVERKGEFDLMANGTVVRVTSPNTQQKSGVKTKVFALAKLSSGAEEIDKVAA

SEQ ID NO: 27922 - protein, 252 aa, Sulfolobus sp.
VIKEDKVYLSFRYRLPWFTPLDFLAINSNLYTLDAYDGEKFVTFSLKELYSLKYGMELRRGRIQRFASKHGRKGKVLMEKYSHRERNRVLDYIHKFVNKLLEMYPLTLFAVEKLSKQEMFRDANDSLSKKISRTVWRSIHCVLKYKAPLYGSFVKEVNPHLTSKSCPGCGWVSRKVGGTFRCVRCGFTLDRQLNASLNIYLKMCGFPHVREIPRVWVGVIPLKGWRDMSGAMPRDFGEAQGLRIDIKYYEIL

SEQ ID NO: 27923 - protein, 417 aa, Sulfolobus sp.
MWRAREKSNKIQLSFKYKVYPTREVEEKLLRVMQVEAKVYNALLDAVNNARKEGKKITSKDTQNMLKELKIEGKELVYSKVLQMVNNQLWYNINSLHKLKKKGRRVGKLRYKKIMKTINYNQSGFKVQGDKLFLSKIGEIKVLFHRPLEGEVKGVIIKKNVTGWYAIFQVEVEKKPLEKTGKVVGIDLGVEKLVTTSDGVVVENPKVFDKVERRMKILQKLLSRKKKGSRNYEKVRKKLAKLHEHVKNLMNDYIHKVTSWLVEQYDEIYVEDLDVKEMVEDSESKVLRKHILHSNFSKFVSYLSYKAERAGRRVVKVDPRNTSKTCARCGHVKKDLTLTDRVFVCPKCGWVADRDYNASLNILRAGSGLPLEPVDREPLLYIPFSEGVYSKFLERSRKSSSRGGDAPSVTVDPKSPP

SEQ ID NO: 27924 - protein, 408 aa, Sulfolobus sp.
VERTIKLRVRVDYITYSALKEVEGEYREVLEDAINYGLSNKTTSFTRIKAGVYKTEREKHKDLPSHYIYTACEDASERLDSFEKLKKRGRSYTEKPSVRKVTVHLDDHLWKFSLDKISISTMQGRVFISPTFPKIFWRYYNTEWRIASEARFKLLEGNVVEFFIVFKRDEPKPYEPKGFIPVDLNEDSVSVLVDGKPMLLETNTKRITLGYEYRRRAITTGRSTKDREVKRKLKRLRERDKKVDIRRKLAKLIVKEAFESMSAIVLEDLPRRTPEHMIKDVKDSQLRLRIYRSAFSSMKNAIIEKAKEFRVPVVLVNPSYTSSTCPIHGAKIVYQPDGGDAPRVGVCEKEKERWHRDVVALYNLRKRAGDVSPVPLGSKESHDPPIRWLRAKSLHSIMNEHKMIEMKV

SEQ ID NO: 27925 - protein, 235 aa, Sulfolobus sp.
VVGIDLGVEKLVTTSDGVVVENPKVFDKVERRMKILQKLLSRKKKGSRNYEKVRKKLAKLHEHVKNLMNDYIHKVTSWLVEQYDEIYVEDLDVKEMVEDSESKVLRKHILHSNFSKFVSYLSYKAERAGRRVVKVDPRNTSKTCARCGHVKKDLTLTDRVFVCPKCGWVADRDYNASLNILRAGSGLPLEPVDRKPLLYIPFSEGVYSKFLERSRKSSSRGGDAPSVTVDPKSPP

SEQ ID NO: 27926 - protein, 390 aa, unknown
  TnpB Polypeptide
MTTKKIYKRIKQKIYPNKTQEILINQTFGCSRKVWNLLLSDYNNTGKLNEVSFYKKQHQYSYLKNVDSLALANEKLNLQKAIKHAKNNKYGRPHFKNKFRKQSYTTNVVGNNIKILKNKIKLPKIKQPIKVRTKRFEKLNKSFKLKGATVIKDKTNCYYVSLLYEFELDIKDQDTIINSFTQIKSVGLDLGLLYFIVDSNNNHIKPLKKEIKPLYDKLEKEQRKLSNKLKANTKEMINNKPIYKKPLSDCKNINKQKIKIAKIYKKIHNKIKDFANKLSFYYITHFDIISIEDLKISNMLKNHKLAKSIQQQAWGMFTSMLEYKAYWHNKILVRVDTYYPSTKTCSVCGNVQDITLNERVYHCKSCGAIIDRDYNAAININNEGLRILGL

SEQ ID NO: 27927 - protein, 384 aa, unknown
  TnpB Polypeptide
MLYYILVKGGVIMNLTLTAKIKINPTNEQATILKETMDAYRKACNFVSEIIFHSKILTQAKLHNTTYRDLRSQFGLRSQMAQSVIKTVIAKYRTIKSNGHSWTLVHFKKPQYDLVFNRDYSLNKGLFSVNTLEGRIKVPFEIKGFEEYFDGTWTFGTAKLVYKHGKWFLYIPMSKEIEECDLKNINQVVGVDFGVNFVITTYDSNGKTFFWNGRRIKHQREKYKRLRKQLQQKRTPSARRRLKAIGQRENRWMQDVNHCISKALVERYGANTLFVLEDLTGIRRATEKVRKKDRYTMVSWAFYDLRQKIEYKALKHRAKVITVDPKYTSQTCPKCGHTEKDNRNKQTHTFCCKNCHYQSNDDRVGAMNLQRKGIEYIVEETIQA

SEQ ID NO: 27928 - protein, 334 aa, unknown
  TnpB Polypeptide
MLLSYKYRAYPDATTEARLNGALDTCRWLYNKLLEECNAARENGLTPTMRGMQARIVTLKDENPALREVYSKVLQMVNYTLWSNIAALSQTKKRGGKIGKLRFKSASRYRTLNFNQSGFKIDREHSTITFSKIGTFPFTMHRPYTRKVKGVLITRSGDRWYVIVQAEQEVSEPKREGRSVGIDVGLNSFAVDSDGAVIENPRFYEHSLKKIKKLQQSIARKKRLSQNWKKAKCRLEKVYDHITNQKRDFLHKLSRQYVDTYATICVEDLDVKGLKEKGNFPGLHRSIHDASWGRFYSYLAYKAESAGTNLIKVDPRNTSQMCANCGSIVKTSLS

SEQ ID NO: 27929 - protein, 571 aa, unknown
  TnpB Polypeptide
LRALRDPFVVAAPAGARIRTRLQVTAAEAAVLRQVGEHLGALASKDLAVRCADGNSDAQVKAYSRRFRKQELTAASSSRWAGAITRTSEDSYQLRMRNLKAEVQSLHTRVKVMTERLTRPAGSQDGSGRPGYADQAERYRKQQRLQVLSARLAAAEATLASSRLSVCRGGRPLAHTRHHLDDAKLTSAQWREQWTAQRLFLCADGEADKAWGNETIRWNPDTLNLQIKLPAPLAHLANARFGRFTLAGPVDFPHRRAEIAAQAATGAVRYDITYHPAKKRWYLDASWKTDPAAPLTLEQVRYGPVVAVDVNVGHLAVATLTADGQPINAPITIALNLAGLPATTRDARIRGVISQILRVAADNRCGAVVIEDLNFEESRIQGRERQDNRPRRGSKGRAFRRSIAGIPTGQFRGRLVQMASNAALAVVAVDPAYTSKWGAEHWLPTLKTQFNNKLSGHHAAAVVIGRRGLDQRAKRKGERVTDPHQRMKRATPPHGVARVGELRNPFGGPSRAVAPGLITVTAVQGQVNRKDSRRPSSDGSKTERPNRQTSTKEAQDRSGPPTIADPLLRRV

SEQ ID NO: 27930 - protein, 455 aa, unknown
  TnpB Polypeptide
VLSGRRYLVRLTPDQTLYAEQVAGICRAVWNTGLDQRRQYRQRGGWINYHQQAKELVEAKREDELSWLAEAPGHCLQQSLMDLDKACRAHGTRAVNFRSMDRWSPSFRFPEGKHMQLQRLSARWAQVNLPKFGQVRLRFTRELGGQIRSATLTRDGVHGDWYISILIEDGILAVTCDPTLPAVGIDRGVKVALALSDGQMLDQQFTTSAEQAGIAALQRKAARQHGPRTPGTSGRKGRRAPSKRWLATQARIAKKLASQRRRRDDFTAKTARTLVAGHSLIMVENLKVAQMTKRATPKPDPENPGVFLSNRSAQKSGLNRAILAKGWGKFLLALTHQARYTGTQIITVPAAYTSQRCHHCQHTSPENRENQAEFLCIRCRWSGNADYNAARNILAAGLAATGRTSPGTRAASTTKPPELQVLGIPVREGGEDVNCCRVPYGVYTWTTREVAGVVR

SEQ ID NO: 27931 - protein, 267 aa, Oceanobacillus sp.
MKEDILYLPSAQKSSVKTVGLKLNTHRDLPQASKIKHVTVTMNTKGQFDVSICVEFPLEIESIGTPTNILGLDYSQSHFFVDNEGKKANYPHYYREMEERLVKEQQILSRRKKGSKRWEKQRLVVSRLQMKAANQRKDWLHKKAYALAKRYDMIVVENLDLRAIRQNKYYAKNQQDNGFGYFRQYLTYKLEQQGKYFIKASKDFASTQLCSTCGYKHTALKGNATIREWDCPSCGSHHDRDRNAAFNLKQYGERYTKEEILPQTVVV

SEQ ID NO: 27932 - protein, 394 aa, Streptomyces sp.
VLTDRLQALRADWEAGRVRVVRGGKRLLNTRHHLDAAQLTEEQWLTRWQAERRFLQADGESGKRFGNETIRVTPDGEISLRLPAPLAYLANAPHGRYVLASRVRFAHRGEQWADRIHANRAVAYLVHEDPARGRWYLTASWTNPAVQTVPLAAVRAGGMVGVDTNADHLAAWRLDTHGNPTGAPRRFGYDLSGTAAHRDAQIRHALIRLLHWTRRHHLALAVEDLDFTAETTREKHGRRKKFRKLISGMPVARLRARLVSMAAQLGIPVVAVDPAYTSKWGAQHWQQPLTGTARKPTRHDAAAVAIGRRALGHPVRRRTAPPPHDRSDRAGHRTVQAPPGIPGREGPRPRIPGPRTRSVRAGRGAKTGDQDTQHRSGRPAEHQSWQQDSLPLSL

SEQ ID NO: 27933 - protein, 542 aa, Streptomyces sp.
MGGLRELAAPFVALGPSGVAVRDRLKHLTAEDEHVLRLVGDHLGALASRDLKARCAVGLDHDAGGWAARKRAVTGASSSRWAGSITKATHDQWALARRSQLAHIQSLEAGVRMIAHRLSLPVREKGNKHAPGGYASRREWHAKARRLHVLTDRLQAARADWEAGVVRVVRGGKRLLNTRHHLDAAQLTEEQWRTRWQAERRFLQADGESGKRFGNETIRVTPEGEISLRLPAPLVYLANAPHGRYVLASWVRFAHRGEQWADRIHANRAVAYRIHEDTARGRWYLTASWTNPAVQTVPLAAVRAGGVVGVDTNADHLAAWRLDTHGNPVGAPRRFGYDLSGSAAHRDAQVRHALIRLLHWARRHHLAIAIEDLDFTGETTREKHGRRKRFRALVSGMPVARLRARLVSMAAQLGIPVVAVDPAYTSRWGAQHWQQPLTSKKRKTTRHDAAAVAIGRRALGHPVRRRTAPPPHDRSDRAGHRTVQARPGVPGREGPRPRVPGPRTRSVRAGRGANAGDQDTQHRSGRPAEHESWQQDTLPLSL

SEQ ID NO: 27934 - protein, 542 aa, Streptomyces sp.
MGGLRELAAPFVALGPSGVAVRDRLKHLTAEDEHVLRLVGDHLGALASRDLKARCAVGLDHDAGGWAARKRAVTGVSSSRWAGSITKATHDQWALARRGQLAHLQQLEAGVRMIAHRLSLPVGEKGSKHAPGGYASRREWHAKARRLHVLTDRLQAARADWEAGVVHVVRGGKRLLNTRHHLDAAQLTEERWRTRWQAERRFLQADGESGKRFGNETIRVTPEGEVSLRLPAPLAPLANAPHGRYVLASRVRFAHRGEQWADRIHANRAVAYRIHEDPARGRWYLTASWTNPAVQTVPLAAVRAGGVVGVDTNADHLAAWRLDTHGNPVGAPRRFGYDLSGSAAHRDAQVRHALIRLLHWARRHHLALAVEDLDFTGEATREKHGRRKRFRALVSGMPVARLRARLVSMAAELGVPVVAVDPAYTSRWGAQHWQQPLTGKTRKPTRHDAAAVAIGRRALGHPVRRRTAPPPHDRSDRAGHRTVQARPGVPGREGSRPRVPGPRTRSVRAGRGANAGDQDTQHRSGRPAEHESWQQDSLPLSI

SEQ ID NO: 27935 - protein, 249 aa, Streptomyces sp.
VQTVPLATVRAGGLVGVDTNADHLAAWRLDTHGNPTGAPRRFGYDLTGSTAHRDAQVRHALIRLLHRASRHHLALAVEDLDFTSETTREKHGRRKKFRKMISGMPVSRLRTRLVSMAAALGIAVVAVDPAYTSKWGAQHWQQPLTGKTRKPTRHDAAAVAIGRRALGHPVRRRTAPPPHDRSDRAGHRSVQAPPGIPRREGPRPRVPGPRTRSLRAGRGANAGDQDTQHRSGRPAEHESWQQDSLPLSL

SEQ ID NO: 27936 - protein, 393 aa, Streptomyces sp.
MLPKDKRTLAAADAAIRQARKDIDWLAALPAQAAQAVLKTYFQAWKNCWDGRAEAPTFKARFRTVMSVDVPQGRDLQIKRVHRRWGMANIPKVGRVRFRWTKDLPIGKAAGTDNKITGARLVKDALGWHIAFRIQILVTAPEPHTGPEVGIDAGVTLPLALSDGHHQDHGRPARLPDGTADRDKWLNPDEKAKLLRLEQRAAHRKSFRKPGQKTSNRLKRTYDQIASLRATAKRRASDWQHQTTTHLARTYGVIVVEKLDIPNMVKSARGTIENPGKNVAQKSGLNRSISQEAWGRTVTMLTYKTARHGGTLHKVPAPGTSRRCSMCGFTTPGSRESQAVFVCKNEGCGWSDNADHNAARNVLHLYRMGHALVPAAGRAVVRRPRGVKPATAR

SEQ ID NO: 27937 - protein, 561 aa, Streptomyces sp.
MADLRPIAAPFVAPGPSGVAVRTRLKDLTPADEKVLRVVGAHLGSLASKDLKARCVDGLEHSIESWAARKRDLTPHSSSRWAGSITKATHDQWALARRGQAAHVQSLEAGITTIRHRLSLPVGQKGTKRAPGGYRSTHEWFHKTRRLHVLEDRLEHVRADREAGRVHVVRGGKCLLGARHHLDKTQFTETGWRERWEARRWFLQADGESGKRFGNETIRITPQGEVSIKLPAPLAHLANARHGRYVLAGKARFPHRGQEWADRAKANRAVAYRIHHDTGRGRWYVDAAWQIPPTQTVPLEAALADGVIGVDTNAGHLAAWRLDTHGNPVGRPRRFFYDLSAGAPHRDAQVRHALTRLLNWAKTCGVNAIAVEDLDFQAEKTREKHGHKRRFRQLISGMPTGRLRARLTSMADATGITIIAVDPAYTSKWGAQHWQKPMTGITRRTTRHDAASIAIGRRAQGHPIRRRTTPPRAHQSDVYGHRTVQADRRAPGREEPRPRIPGPRTRSVPPDAASTRATRTPNTVRDVRGEQAWVQDSLLLTDQERWVGSEGCPRFLRRSTS

SEQ ID NO: 27938 - protein, 395 aa, unknown
  TnpB Polypeptide
LNGGWSANAMLNMVETHRNYKYRLYRCDKKDRKLRHKLFVASLIWNHFVALQQRYYRLTGQYITLMAMNKHVLKLRRTGKFKLWKGLYSQCCQDVCRRLDDGYQRFFKKLAKGRPKFRKARKYSSFTFPQSGYTVKDNTVSIDGTVYKFVKHREMGGSLKTLTIKRDKVGRLWLVFSVIEKLAVSEASTGESGGFDFGLKRFLVNDSGKHYPNPLYFTQNLHKTRKLNKVLSCKVVGSKGYKRARRELAKHNGHIANKRRDHHFKLAHELCDVYDTLYFEDLNLQGMKALWGRKVSDLGFASFLTILKWVAFKRAKIVIQIDRFALSTKTCSGCGARHDLTLRDRILSCACGLVIDRDHNAAINIKVFGASKTYQTVGQPQVRLRSRVDGRSPCL

SEQ ID NO: 27939 - protein, 392 aa, unknown
  TnpB Polypeptide
LLKSNEVCQILELVRAYSVPIRDDRVWGLITWYVKTLQNAIDIIWDNIEWRYSFLELVRRGGKLTTVISWKVRIPIIPKDRAFKKRLREELMKDNPYVAHWVDAVIRTAYSIMENWRKRYLRGRARKVKPRIRRRFARCKITLMKIDYQAKTIRITLKPGEYLAISWRSTWFEHRVRGWTVGEVIIKDDRVVIPFKSSEEIYVRKVIGWDSNELSLDGYEPSIGFIHVDLKPLQSIKIVYERKKAIAQRRGKRELYEKYVRRERNREKDFINKPSAGLRMLFPNTVHVFEDLDKEDLVSRKKRRKRNARTPWRRIHRRMSEVTLTAYVDPRNTSRECPRCEYVVETQEEEEENQDAGFSHGNEPEEAMKEELWVGVTPSGRSPVIWIPEKGS

SEQ ID NO: 27940 - protein, 538 aa, Acidithrix sp.
MGMWSFLDSKRDFRDAMKKADVYPQDVNVHLVDQAAFDAVDTWVRHIESVLAIENVKAKIHKHYRDNEMQQHFAYTCLTRYAWIGEITQGRVPAINLKVLVGLGGKEHAQVVRYLHRVLRKALSKHKNPRAHAMRSMALAETLYATFTTMAIPKNHTCNPEDRRCRQPHLSQYVKIIGAKTNARIALSLVGVSRVSGDIRLVAEKGSKCATVHVVYGIKAPEKATGPIDAIDWGVTEVCTDSKGHKHGISLGEILEEFSEKNNATGKVRGKAHARTRSLRKVNTKSKKAPRIARNNLGHKKQARRRERAQASVRTLSGQATKEVIYGKGNRTRARGKVPQDPTQRPRLLATEDLSYLRGKAKSKKMSRICSTWMRSENEGRMVVHTSIGGVDAKTVNAAYTSQTCPEPTWGYVSSDNRQGDTFHWRNPYWDCNRQGDADHVAATNLKSRLTDRQISVFTAYTEVKVIQNERFRSRKESRVGARIVLQGITGNGVQGACIEDRATAHGRTPSKPRRRKPVVEGGNVFDATDSQSPEHTV

SEQ ID NO: 27941 - protein, 350 aa, unknown
  TnpB Polypeptide
MICRKTIKCELVNPTEKKLDLLNQEWVKYQDFIRLENMGLDWIADKIPIHSVYKAQARWYWNKYKKQDFPMSLNNQVLKIAESKNKISEYWARIPVKGKRGGIWVAIKPHKPFPDGYKLGESKLFKQKGKFHLHVVIKKEIEIRQTYDNVISVDMGEKRIATVLHQGKPVFMGKEVRGIRRHYAYLRKKLGKKKLVKTIKKIKQRESFKINQILHDISNEIVSMAKETPNSAIAIGNLKGIRKSAKNKGKRMRRIVNNMPYFKLTFLVTYKANWEGIPVIKVNEAWTSKTCPKCKRIGKRVNQGLFKCLSCGYQANADYIGATNIRDRALGYTPEVRAVLQPESIQEVQA

SEQ ID NO: 27942 - protein, 239 aa, Moritella sp.
  misc_feature (86)..(97): Xaa can be any naturally occurring amino acid
  misc_feature (166)..(190): Xaa can be any naturally occurring amino acid
  misc_feature (231)..(238): Xaa can be any naturally occurring amino acid
LKLIAYKYRFYPNNEQVTILAHTFGCVRFAYNSALGFSKAQYELGNKTNYNDWSKNLTQLKKNPNFSWLKAVSSVPLQQSLKHLDXXXXXXXXXXXXGYPKFKHKHGNQSASYMSNCFKWSADKQLLILAKMKQALKIKWSRPFTGTPSSLTVSKTKSGKYFVSMXXXXXXXXXXXXXXXXXXXXXXXXXLAICSDGTKFNNPRLTNKYAKKLAKASRKLAKKKKGSNNFXXXXXXXXC

SEQ ID NO: 27943 - protein, 505 aa, Acidocella sp.
MRTDLLPSNMTAAKEAQVRAVLAAYRRGAVMLASEQWRLFFETGRFNKNHDKDKTTFAAVIGAANRVQMCRYQVVGQLDSWLSNRANDFRDVVTRSTLDPDTKHMLHLINRLGAWFSRHEIAMKETGEIVPGAIRHLARSIMRHVMRKHRRPDMRRISMRLDQRAACLEDPIKASQNERIGWWINMSTMTKGRKIAVPLLTYDRHEQRGGRLCNGVLVTEDRESSALSFGVVSDIGEDCEASRNAYQPEREVMALDFGLSTLFATDDGALLGKGWLDALHGYDQRITRIARGQQRHGRKPRDSARYRKAVASLRGWIRTEVGRVLNALVAAKRPAALVLERLNFQNPTLSRRLNRIIQNCGRSVIKAKLADFHDRFGITSQEVNPAYTSQTCSCCGYVDKRNRRSQSTFRCLWCGSTLHADVNAARNIGQRRALSIGSVFQSKASVLTELVRQLGERRVHSTRSGGKGSTADPRLSNPYFGGGKPISVRMSGQTTAPDMVLAMST

SEQ ID NO: 27944 - protein, 299 aa, unknown
  TnpB Polypeptide
MIVVEFKLAGAASQYAALDEAIRTTQFIRNKCVRKWIDERGVTPSDLNKYCAILAKEFDFAGKLNSQARQAAAERAGAAIPRFYKNCREKTPGTKGYPRFQKDGRSVEYKQTGWKLDESRTHLTLTDGFKAGTFKLRGTRTQDLLGYALDQIKRVRLVRKADGYYGQFGLDADRRASVEASGKAVGIDLGLTHFYTDSTGATVENPRHPRRSEQALKRLQRRASSKVKGSRNRAKARGRLARKHLKVSRQRKDFAVKAARALVMSNDVIAYEDLTVRHMVKNRRLAKSISDAGWRAFVT

SEQ ID NO: 27945 - protein, 439 aa, unknown
  TnpB Polypeptide
VQLRYNYRLYPTPGQQQALTRAFGCARVVFNDALGARQEAFAARLPYLTDAELSARLTAAKATPERAWLSEVSAVVLQQALTDLNVAYRNFVGSVTGKRKGPKVGPPKFRSRKDRRQAVRFTRNARFQVLPGGKLRLPKIGDVPVRWSRALPSAPSSVTVIKDAAGRYFASFVVATEPGPLPATERVLGIDLGLTHFAVLSDGRKIASPRFLRRAEKKLRRAQRALSRKEKGSKNRDKARVKVARAHERVTDARRDFQHQLSTTLIRDNQAVAVEDLAVKGLARTRLAKSVHDAGWSAFVAMLEYKARLYGRAFYRIGRFEPTSQVCSACGTRDGPKPLGVRAWQCRECGAWLDRDVNAAINIAKAAGLAVSACGAQVRPGLPRHSAMKQEPSQVPHDAVRQESPAALRQERKSTCVHSRGKGLPWPTLSSCGSARLSC

SEQ ID NO: 27946 - protein, 466 aa, unknown
  TnpB Polypeptide
MVLKKKKKLTMAQKLQIVQKTIKEKGDDYRIPLRPYYYKDAHNLRYEKQNTNSWFDSYIHYSSMMYQRPNPFFDVGCSKKTKFDDISSDGMMTMQIKLFLTDNQKIIIEKWFDMFTLMYNETIRLIKSKMFDKKEIPSITRLKKELIAQKNKIKNKSKITIIVNGKSKNISVDMHLLDYAINDALNRYNSCMTSLEKGHIKQFRLRYLKLTKPNKIIKIERLAFKKNTFYTTSLGKIVTCSTPNFNYYENVKSIATLTRRGNEYFLLLKHKKKLQKGTSANNSIGIDLGTNPFVTGYSDLEVIQIGRNITKNMKNRLKIIDKINGHETFTKNKINKVIQKKYGKIKNMINDMHWKVANDLTAIYRNIFVGNWSTKKTGQTEINPMIKRIANQLAIFQFKQKLKYKCEQKKCNYKEIDESYTTMACGRCGNLDRKIGGKKIYNCKRCKLVVNRDVNSARIITMLGMN

SEQ ID NO: 27947 - protein, 455 aa, unknown
  TnpB Polypeptide
MKAPITMNQAQVYGISKQNSKEIFQFFQKNFGCTRKVYNLCVDSCYKQLEQAGYTNGDDLPEFSFPKVSALKKDYPYLKEADGLGLANSVLDFQKAYKTFRNQKDCSAYRKSALRRDRSGKEPLSFRGLKGIPRFHAKSAGYFSYRTACQYPKEGNALKRPTIRLEGSILYLPKLKQGVKLIIHRKLPEDAHILNVTVFMDTDGTYQVSICYSYTFLMEMDYREAAAQEQPLPKETRFLGLDYSQKDFYVDSEGRKANYPKYYRRSGQKLARLQKSICRKEKDGKNYQKNMRKIQKLHAKIKHQRHDYLQKLSTELVSRYDVIVVEDINLRAIGGCLSLGKNLHDNGFGLFREMLAYKLWKKGSCLVRIDRMYPSSKTCSVCGVVKPDLKLSDRIYICPECGCVIDRDYNAAVNIREEGKRIFLTYLKEAMEKAEEAKIRQEAAKERRQKKKKTA

SEQ ID NO: 27948 - protein, 418 aa, unknown
  TnpB Polypeptide
MFKGYKIRLELNDKQRTLALKHAGVARHAYNWAVELTTVAFDNHEKILGSIDLHKLLVKDVKSEYAWYYDSSKCAPQQALRNITTAWVRFFKELKDGTISNKRKAYIRERKRKGLPIKESKLNSIGKPNFKKKGVNDNFYLEGAIITKGNKIKVPAFGWIKMSENIGEQKIKNVSISRTADHWFVAFKVEAEKCYTNKTKEVVGVDLGIKTLAVLSDGTTFYAVKAYHRNKRKLAMAQRAVSRRFVREAKAQSKNYKKAAKKVADLHYKIANIRMNATHQLTTYLAKNHSVIGIEDLNVSGMAKNHKLASAILDGGFAEFRRQLEYKVEWYGSKLIIADTFYPSSKLCSCCSNVKADLKLSDRTYNCDSCGISIDRDLNAAINLRKLAESYSVTLACGEAKTICSADSLGETGMKQQV

SEQ ID NO: 27949 - protein, 365 aa, unknown
  TnpB Polypeptide
MKLTLKIKLLPDAKQADILKRTIAEFNAAADVVSEIAWKNKAFNKFKIQRLSYYVIKAQFKLSAQLIIRLIGKVSDSYKLDRKVQRTFRKYGSITYDSRVLAYKNNTVSLSTIEGRLKGIKYICHNPDYIPYIKGEADLVFNKGKFYLFQTVEIPDEDIKDVEDFIGVDFGQTNIAATSDGKIFNSEQLKVVRKRYAKTRASMQSKGTKGSKRALRRLSGRERRFATVTNHTIAKQIVQQAKEQNRGIAIEDLTNIRKNAKAKSRAQKTELNRWSFYQLRQFLEYKSKMSGIRLFAIPPAYTSQTCSSCQHIGIRKGEKFSCNNCGYKAHADVNAAKNIATWGRIVNRPENSHDMSCILSHNVQG

SEQ ID NO: 27950 - protein, 218 aa, unknown
  TnpB Polypeptide
MLKAFKYRIYPTKAQRSKMEETLELCRWTYNETLAYRKNSFEQEGKSISKYETHYLLPEWKKNKPELTEVFSQTLQNVQERVDLAFKAFFRRVKAGEAPGYPRFKGKGWYDSFTYPQLGFKLSFGKLRLSKIGDVKIKLHRPIEGEIKRLTVRRSSTGKWFACFSVEIDDPPKPPWKDGLMAGIDVGLESFATLSNGEKIDNLRFFRSEEKALAKAQR

SEQ ID NO: 27951 - protein, 463 aa, unknown
  TnpB Polypeptide
MIRTYEYRLYPRKRETVLLDRLLREHQDVYNDALTQAKRFFETQRKHQKAITQWPYFREWRKQAGMLANASSVQHTLRRLDKAYSAYFRRLKAGETPGYPRHKGSTRFKSVEYTYGDGCSLEYDEAYDHFMLYVQNIGNIKIKLHRKVPDGAVIKHVILKHKASGWYVYFMLELPQKQLPLPLFNCQPNVGIDMGLLRLLSLSDGTLIDNPRWLRQSLAELRRAQRRLSRAEKGSSRRKDKGQVVARLHEHVACIRRDFWHKLTTWLVKSYGLIALEDLELSFMTHNHHLSLSAHDAGLGTFQTLLAYKAVDAGALVVFVNPAYTSQVCSGCGTVVEKDLSERSHVCPNPECLLELDRDVNAARNVLQLVFNSAWIKPSGANVGASKAERSLRSRLVYDGVGELSFMASSCGSRTQNYVEKSLILEVRQHHRLRDGVDHIAAKRVQEGKDLCNPLFGETGESL

SEQ ID NO: 27952 - protein, 329 aa, Helicobacter sp.
VSYPRFKRKREYQGSFYIGGDQVKIIQGDKKDYLKIPNLPKIKMTEKLRFKGKINGATITQRGNKFYVSIQIDITQEEFNRTHKPIANNHTLGIDTGIKAFASLSNGLQIQAPKPLNRLTRRLKRLSRQLSKKRHSKTKNDGVKKSRNYLKASLRLNRLHTKIANTRNDFLHKLSTALVRHAKTLCMESLKVKNMLKNSKLAKALSDVSISAFNTLLEYKAKCYGQEILRADVFYPSSKTCSSCGSLKKDLTLSDRVYKCGVCGAVVDRDFNASVNLVKHLVSGVPTEFTPADMTALLSDFAKNGLVTSMVETGIQQKPLKFFSIDRIL

SEQ ID NO: 27953 - protein, 375 aa, Helicobacter sp.
MLVTRVLYAKYLNLGKLEQLKLQAKRLGVLRSAIWQEYGALKGLGKTDREIRNLWVSQRRDFKVSANAWKETLRDCFSDIKLYKEAAKSSVHKAIFNHYPTDKERKEAFIKLKKDTWIEDSFLHRLMRKAFKHGKNKVYNQIIVRSDDYSVFGLNSQAWLSIPSLIKNKRVKIPLNTTMDYAPTGTLRLIIRNGVLENLILKNNLGRKKLNRRDSQQKSMVKTKIYTACHQVVNKAKIIVCEDLTYKFSKKSQSKTINRRLNTWVKGIIASALKCVSECRGSTLHLVNPAYTSQSDSFSGGLLLGQRKGDYFYRENGEVVQADYNAARNILARYFDTEISRFMSYEKVKAILLRRTDSYRLATASSKTLVAKESK

SEQ ID NO: 27954 - protein, 371 aa, Helicobacter sp.
MLIAYKQKLYNSSKNKQIDKLLRLYGICYNHCIALHKRYYRLYKKHLNFYALKKHITKLKKTTRFAFLKTLGSQTLQELVERIDKAYKKFFKKQGRPPRFKKVANYQSFTFSQCGYKIQDNIISFNGYRFKFVKTYDLVGKPKTLTIKRDNLGDYFLCLVCEKEDEPAKAECLKPFASEPACGNSVGLDFGLKTFLTCSNGTQIPSPLFFSKFLPLIKSCSKSLSKKKRGSHNRLKARLRLARLHRKIKNLRTDFFYKLANSLSKQYATIFIEDLNLKGMVKLWGRKVNDLAFGEFVAILERKTQVIKIDRFYPSSKTCSSCGAVKKDLSLKDRVFSCPSCGFSLDRDLNASINIHRVGASTLGVEAVRPA

SEQ ID NO: 27955 - protein, 403 aa, Frankia sp.
VIVQLRYGFRLYPSAGQRTALARACGCARVVYNDALRIRETARAQGLPFPKTGDLSKLLITEAKKTPERAWLADVSAVVLQQSLRDLDTAYRNFFDGLKGKRPRMGAPRYKSKRDTRQAVRFTANARWSLTPGGKLRLPKIGDVEVRWSRRLPSAPSTVTVIRDSAGRYFASFIVETGEESPLLETPAEIGIDLGLTHFAVLSDGTKIGSPRFLRRAEKRLKKAQRDLSRKKKGSANRAKARVKVARAHARVADARREFHHQLSTRLIRENQAVAVEDLAVKGLARTRLAKSVHDAGWSAFVAMLEYKTVRYGRTFVRIGRFEPTSQVCSACGVKDGPKPLAVREWTCAVCGTVHDRDVNAAVNVALAAGLAVSARGAQVRPAPVPAPRGEAGTHPKPTPTAA

SEQ ID NO: 27956 - protein, 329 aa, unknown
  TnpB Polypeptide
MGKNLSVTPARYKSEFPWLKEVDSLALCNAQLHLQTAYKNFFRDASVGFPKFKSKKKPVRSYTTNCVNENIALQNGRLKLPKAGWVRIRQHRKIEEGYQLKGATITQEADERYYVALLYSCEEPVNEIRKAESAIGLDFSMKELYVDSNGNRAAYPHFFSKAQKKLAREQRKLSHCELRSSRYKKQKKKVARIHTHIAHQRKDFLHKESRKIANSYDIVCMEDLNMKEMSQDMCFGKRVHDNGWGMFTDFLAYKMERAGKKLVRIDRWYPSSKTCSCCGNIKEDLQLSDRIYECACGNRMDRDQNAAINICREGIRISGMMPDIEKKIS

SEQ ID NO: 27957 - protein, 213 aa, unknown
  TnpB Polypeptide
MTCYDSGNGNTFILGRRYLALERYFHKEIARVQAQWYGQQSVKEIKHPVTSKHIRRLYQKKQNSVTDYLHKITRYFAKYCREQGITCVVAGDIRNIRKGKDLGHRTNQKFHNLPYNRLYSMMEYKLKMYGIRFVRQEESYTSQCSPLSPEVEKRYAQPCNRKQRGLYRDRNRKYNADAVGAYNILRKYLSVSGEKKELSVTGLKTPEIIKVAV

SEQ ID NO: 27958 - protein, 402 aa, Kitasatospora sp.
VKRAFKFRFYPTAVQAAELSRTFGCVRKVYNLALAARTEAWLLQGQRVTYNATSAMLTAWKKTEELAYLSEVSCVPLQQALRHLQGAFANFFAKRARHPRFKSKKKSRDSAEYTASAFRFRDGRLTLAKMAEPLDIVWSRPLPEGVLPSTVTVSRDAAGRWFVTVVCEDPGVRPLPALDAAIGIDAGITSLVVLSTGEKIANPRHERRDRERLARAQRDLSRKAKGSANREKARRKVAKIHARIADRRSDFLHKLTTRLVRENQTVVIEDLAVRNMLKNKKLARAISDASWSELRAMLEYKCAWYGRNLVTVERWFPSSKLCSGCGAIAATMPLNVREWACDCGAVHDRDVNAARNILAAGLAVAACGDGVRPQRSTPSGRPSVKQEVVPPPRTRAAAQPRG

SEQ ID NO: 27959 - protein, 439 aa, unknown
  TnpB Polypeptide
MQAMHLTHKIALRPTPEQADYFRRACGTARFVWNWALAEWNRQYKAGHKPNAMALKKQFNAIKYIKYPWIKAIHRDAHAQPFAHLAKAWNRFFADLKAGKPAHEPKFKKKGRCRDSFYVANDKFRLDGTTIHLPNVGAVTMTEALRFEGNVLGATVSRTADRWFVAIHVEVTDTQYYRWRRGHSVCGVDLGVTAAATLSNGGRVAAPKPLTAALRRLKIRGRRLSRKLEAARVAARVAPQSALPKGTRLPKSKGFKKASMALARTHARVANIRRDFTHKITTRLCRENQAVAIEDLNVKGMLANGRLARAISDVGFGMFRSQMEYKAKRYGTRLVIADRWYPSSRLCSVCGAKHDALTLEDREWTCAQCGARHDRDLNAALNLKRLATETALPVASPSSNGGTAAEMMSAAGGKVTPVRYERLCRSGQEENRAHLCARS

SEQ ID NO: 27960 - protein, 417 aa, unknown
  TnpB Polypeptide
MEVRRTVPVALDVDTDDAALLEDTVDTFLWSAQYVVDHAFKGEYVTTSKTTLDDETYADVRKKTDGFNGGLVQAARNKAAEACKSVVTRWKQGKKALRPTFTSPHVAYDHRTATFHDEYVSLATVDGRIEADYVLPDNERDTPHAEYFFSDEYETTGAELHFSNGDWVLHVHCKKEVEFDTSEQVTTENGTVLGVDLGVNNLAVTSTGTFWTGDEFDHWRREYEKRRGSLQQCGTRWAHQTIRSVGRKEEGRFKQLVHRISNELVGEARENGCSVIAFEDLTDIRERTGASWGHKWAFDRLYDYVEYKAEEHGITVEQVDPENTSRRCSECGFTHPDNREDEDFECLKCGYENHADYNAAKNIGLRYLRRNQTGGDGGAPLGVRLNSGTLNINGGYSPAEESVRTGVHAESHRFSGG

SEQ ID NO: 27961 - protein, 415 aa, unknown
  TnpB Polypeptide
MQLTEQHVIGRDDPRYSVIDEAAFKSKNLYNAANYEYRQAFFHEDKYLTYNQVQKRMQSHEAYKALPAKVSQQILMVLDNNWKSFREGLAAYNEDPSKFMERPRPPKYKHKTEGRNILIYTIQALQGGQSKKGIQGRIRPSGLPITIKTQQQAINQVRIVPRNGYYVVEVIYTKAPVQAHVDPSFCVAIDLGVTNLAAITSNRAGFIPQLVNGRPLKAINQWYNKRMKELVLCLPKEDCERVTKQMERITNKRNRRVNHYLHAASKAIIDFLVKQGIGTIIIGKNPFWKQEVCMGKRNNQNFVQIPHARFIDMLTYKAALVGIQVEIQEESYTSQASFLDLDPMPAYDPECQGKSIFSGKRIGKRNRLYRTRDGQIICADVNGSYNILRKRKPDAFNAEGIAAYVVQPLRLAIAV

SEQ ID NO: 27962 - protein, 202 aa, Catenibacterium sp.
RLVNKHGKYYLHIPVTYEIEESNISDICNVVGIDRGINFVVATYDSKHKSGFVSGKAIGQRENRWMQDINHRVSKALVENNPKHTLFVLEDLSGIRNATERIKTKERYVSVSWSFYDLEQKLIYKAKQNQSSVIKVDPRYTSRCCPCCGHVEKSNRNKKIHLFACRKCGYKSNDDRIGAMNLYRMGINYLADSQVPNTVVAE

SEQ ID NO: 27963 - protein, 319 aa, Aquificae sp.
MPKLKTKIPIKMHRDIDKSLIWATNREQGQIRSISITKTPDDRYYLNVLVRREIKPLKPTNKTAGIDVGIKEFAIIHDGESTYHIENPKYLQKAEKKLIKLQRQLSRKQKGSKNWEKARQKVAKQHQKIVNQRKDFLHKVSSVIIKQYDAIVVESLNIKGMIQNQKLSKQIADVSWYEFLRQLEYKAKWYGRQIIKADRFYPSSKTCNVCGYKNDQLTLSVRKWQCPICRTIHDRDENASKNLYQIGVAHLTNLRFEPAERQRTSGRVGTTRAKACGAGSVGGQLASSQLTTRHPAVKQETSQKLESLQSEQAPQFIEE

SEQ ID NO: 27964 - protein, 471 aa, Microcoleus sp.
MRQGRSAMKTTYQYQFYPETKQKLTLNQWLRICRYWYNRQLGDRFDWWEMNRTTVNACPLIASISSPREKPNYYSQKQQLPVLKKDLVKVFHSGELLDFKQVDSTILQDVSKRVDKAFERFIAGDSKGGRSGRPRFKTEADYRTMTFSTANNDWIKLIRKKWIYIRLPKLGVVKIRMHRSIPAGFTIRQASVTRKVDGWFIQLMLENASVPEFTPDKVSPTWDNSVGLDAVLHEDVYLATSSGEKLPSLKPLRTNQAKLDRISRKRNKRKRGSRARRKLAKKEAKQHQKIARSRQDFHYKTAHRLVRSEAKFFFHEDLNLKGLTKRNKVKQDNEGTYLPNGQSAKSRLNKSWLDAAFGQFFKTLKYIAEKAGSVVVPQKPAYSSMVLSYRNEIVFTDCSFRGYWDEQHSLMVDRDINASINLKKLGLGIFPSIKRRNGNLSVVGTMDDSTAKEILYTLHRAARSPRHTVLS

SEQ ID NO: 27965 - protein, 375 aa, Ktedonobacteraceae sp.
MMKNVQYRIYPTKNQLKKLEATLEECRWLYNHLLAKRKELYEQTGKSLSLFQQQASYPRLKEQRPSLSGVHSQVLQNVAVRVDLAFKAFFRRCKAGEKPGYPRFKGKGRYDSITYPQSGFSLTHDQRLCLSKIGSLKMVYHREIRGTIKTCTIHHSSTGKWYVTFSCEVEPQRLPENMAAVGIDVGLKTFATLSDGTEIANPRFFHQEEKALAKVQRKHARLAKGSAERRKHRKAVARVHERIKFRRENFTHQQSRKIVTAYGFIAVEDLHVNRMVHHHCLAKSIADASWSAFFAQLSAKAEEAGRQFVKVNPASTSQTCSHCGHRQKMPLDVRIFDCPCCHVHLDRDLNAAKNILGLGLQSRVVPEAPGLSRGE

SEQ ID NO: 27966 - protein, 514 aa, unknown
  TnpB Polypeptide
LSGGLGTKRGPWIMARRRKKRDKRWMWVVKPGDKIVVSRTAVIPSKKLSRREFRALEEIVNIYSRMLGDVLSHASRNIIENYYRLKSERYRVLRNIYPNIPSHYIHGLCRDAVKRVSPLRRNRARQYSREIFDELVKYLNLGKKDLRSKRLVRYLWRRSWEIARHQVDLEMKEGILVPRINSVSLWLVDDHVWKPINPTKININGVVNTFFTSVAINTHRGWVYLDLEPSKEFYKLLARGFKPTSHAKIKLDRRNRRVLFHLSLEKEIEIYRPENAVKPVDVNENSVATPYEAFTAILETDLARTTLGYSYRKKSIQKRNGSDSRETRKAMKKLKEGKKKKDYRWKTANLIVRDALRTRGIIVVERISGDDIRVMISRYKNKQLRHRIYQSALKGELNAIIDKAREYGVPVLMVDPRNTSKICPIHSASIEYGEDRIGICSKGGEKWHREVMALINIYFKALEALYEGIAQRGFGVSILDGSPVPLGSTATSEPIEIPRSLWGRWKSLDATGML

SEQ ID NO: 27967 - protein, 381 aa, unknown
  TnpB Polypeptide
MRTILVRLEVPSEQRDSLIRTTEAMNRACDAVGEVAFREKCRRRTPLHHLTYRMARDQFGLSAQMAARVIGKVGGAYIRDPSRKPTFHRRGAVPYDPRILSWKGEKRERVSLLTLDGRREFRVRWSEYGRQAVARGKLRGESDLVYRGGAFYLALVVESKDAPPYEPKGALGVDLGVVNIAVDSDGTFYKADGVDQVRRRIDRLRAHLQSAGTKSAKRHLKGLGRREGNFRRQTNHYISKEIVARAEGTARAVALEDLGGIRSRTTVRRSQRRRHLSWSFAQLRSFVEYKAAAKGVPVVLVDPRNTSRMCPSCGMIDKKNRATRDEFRCVSCGLAGPADRIAATNIAARAGVERPIVAGNEGEWVHFPDLSYKPPISIGGV

SEQ ID NO: 27968 - protein, 296 aa, Escherichia sp.
  misc_feature (72)..(110): Xaa can be any naturally occurring amino acid
LQQSLKDLERAYKNFFQKRAAFPRFKKRGQNDAFRYPQGVKLDQENSRIFLPKLGWMRYRNSRQVTGVVKNXXXXXXXXXXXXXXXXXXXXXXXXXXXXXXXXXXXXXXXQLSRKVKFSNNWQKQKCKIQRLHSRIANIRRDYLHKVTTTVSKNHAMIVIEDLKVSNMSKSAAGTVSQPGRNVRAKSGLNRTILDQGWYEMRRQLEYKQLWSGGQVLAVPPAYTSQRCACCGHTAKENRLSQSKFRCQVCGYTANADVNGARNILAAGHAVLACGEMVQSGRSLKQEPTEIIQATA

SEQ ID NO: 27969 - protein, 402 aa, Escherichia sp.
VKRLQAFKFQLRPGDQQECEMRRFAGACRFVFNRALALQNENHEAGNKYIPYGKMASWLVEWKNATETQWLKDSPSQPLQQSLKDLERAYKNFFRKRAAFPRFKKRGQNDAFRYPQGVKLAQENSRIFLPKLGWMRYRNSRQVTGVVKNVTVSQSCGKWYISIQTESEVSTPVHPSASMVGLDAGVAKLATLSDGTVFEPVNSFQKNQKTLARLQRQLSRKVKFSNNWQKQKRKIQRLHSRIANIRRDYLHKVTTTVSKNHAMIVIEDLKVSNMSKSAAGTVSQPGRNVRAKSGLNRSILDQGWYEMRRQLEYKQLWRGGQVLAVPPAYTSQRCACCGHTAKENRLSQSQFRCQVCGYTANADVNGARNILAAGHAVLACGEMVQSGRPLKQEPTEMIQATA

SEQ ID NO: 27970 - protein, 404 aa, Actinomadura sp.
MRAGRRYRLQFTPEQAVFADRIGGTCRSVWNTALEQRRSHQRRGAFISYREQAAQLAEAKREPGLEWLVEAPGHCLQQTLLDLDAACRVHGPWKVHWRGRSGSNRWTPSFRFPEGGKIRVERLNRKTGRVRLPKLGWVRFRWSRPLGGSIRSATLKRDGRHWYVSFLVDTGRPEKAVSLQRGRTGVDRGVANAIATSDGNFFDRSFLSDGEQERLRRLERRRSKCRPGSRRRQATREKIRIIRRRERDRRRDFCVKAADLVVSGNALVVLEKLNIRGMTASAKGTAEEPGTNVAAKTGQNRAILDKGWHLFELAVRNKSRVTGAVVRTINPAYTSLTCPAEGCGNVDANNRKSQAEFACTCCGHAEHADTVGAKNTLARGHSGFRAWRPPAAGRVDEAPTSGKP

SEQ ID NO: 27971 - protein, 514 aa, unknown
  TnpB Polypeptide
MRSQTPSYIISVKLHLPNQIENHLEKSFRISNSIYNEGISHGLKRFEAMKRNPYYQELLEARHLAEAGIDKLKKAKKKTKGLDQQVKLYNKALFELRKAYGLTEFELSAYLCQQRRKDGSSYKQLAACETQVIAKQAMKTLEKVLFYQIKPHKVKFRSKYNLNVSYRNNANKQATRLAPSDRKGIAYRLYIHKASTFVDIPEKAFNKYQQMSLLRSEKIKYVQIIRKTIRGKKVYYLQIVCQGFPHSKVTKGNGVIGIDPGISTVAFVSPKEVALVDLVPTTITQKEKLLKRLDQAIERSQRINNPECYKENGTIKKGSRFKHPSNRQLRLRNRRRKVYRSLSEERTKLQGQLVNHLVSQASSIKIEELNVRSLQKRSRDIRINPKTNRPFSKKRFGKTIFRAAPSAFRTALKTRASQLGIDFEIISPKNVKPSQYNHIAQTFEKKSLSTRIYDLSDEYPDVQRDLYSAFLIGHIENDHYNQKQLEQDFPDFYDRMKDFLQQPIETTRLAWYLK

SEQ ID NO: 27972 - protein, 411 aa, Lachnospiraceae sp.
MKVQRVEKHLIKPNNQYFSLLCDFTHKSKNLYNHANYIVRNEFVKNNKWIRYEELDKILKADLEFDDYKQMPTAQAAQQTLRLLDKNWKSFFKAIKEWSKNKDKFLGRPKLPKYKSKDGNAILIMTNQNVKLKDNLLVFPKSFKGFTICPQFTEKANFSSFQQVRFLPRYKHIVVELVYNVEVPDVKLEDNGKYLGVDIGLDNLATVVNNFGLKPFVINGKGLKSINKYYNKKLSHFREIAKRMNNKDYTQRMGRITDKRNNKIDDYMHKASLHLVNYALSVGANTIVIGNNKEWKQESRMGKIVNQSFVGIPQMRFIQMVQYKAENVGLNVILTEESYTSGTSFLDGEKPVKTCYDKSRRKYRGLFVSNTGIKINADVNGAYQITKKVFPNAFADGIEGVVLHPVRVNVA

SEQ ID NO: 27973 - protein, 521 aa, Acetobacter sp.
MQTISIPYQTSTEGRTVLTAWRRGYGAIVRSACQALRRDAGTALKELTTTLYDRHRVSGIDHWLAHCAVLEAAALPEKDIVFGGKGALQRRQKGLISNEQWKALRLRPMTSIGVRNFKGNRHFRLSDGGRACTVTVLKKPVVLHLPEMRGTWGEIIRALALLAPDKEISIQFRIDSHRLHLTFDEMDLRRLQPGETLTLARDRDQAASGRRARGRGRGPGYVAPRPRTSAEARPVHPQWRTPVPAAPGRALGIDLNPNFIGLTVIENRGDPIKLSDCKVLDSECIRLDIPQDASDDLTREILSRAAGHAVRLARKWNAGLITLEHGLGKLRSRTKNRALNRLINFWGRSVILASLTRRARLAGLTVSTVHAAWSSTIGNLVFDLPDPCAAAAEVARRGLARACDRNADILPLYEPSLIAPHDQWKDCAREMEILPDFGRLRGWVDCHGQIKTAQTAISRIRRGKDRVGYRRPLPAVMVGRSQVQPAGMRAGLAVRPLGRFKAPGTVFRNLAVTQTSTRYAG

SEQ ID NO: 27974 - protein, 455 aa, unknown
  TnpB Polypeptide
MIKQLVTNTEKQHRALKLRIYPNPEQEILINKTFGCCRQIYNNRLFERNQFYETVIKPVEDKSKQKELWKSAKFSTEKEMGERFPYLKEVSSQALQQARRDSETAYKNFFESLKRKRSGVKVGSPKFKSKKSNDFSYRECNPSEKALNWNERKIKVPKLGLVKFRHSGNKKGKLDFFLRGEVELKSITIRKNPANEYYAVLLFEREYCHKKKVYEGDESQAIGLDFSPADFYIDSDGSSGKDFGYVAQKQKNLKKLTKLQRRLARKQVGSNNREKARVKVARMEHYIAECRNDWIEKETKRLVSTYQVIGIEDLNLKGMMKFSRNAKNYGDASWRSFVNKLLWKSSLNENNCQVIKADRFFASSQICHCCGFKNPIMKNLKVRSWTCPECGAEHNRDVNAAMNLKMNAIKNVGQGVSEFRSVEGVEDLATLALQIGASEEAENLTGDGQNVLTLL

SEQ ID NO: 27975 - protein, 478 aa, Micromonospora sp.
VKVTRIAYSAGLNLGKYAVLLKQARRLGRVRSEVWQRYGSVVGVGSGLKDRQVRDRWMADGTYVQFGVLANAWKETVRDAMADIAASLASAKVEVRRAVFRRTSDPAERQRMLAALRADRWADDPFLARQMREHWKRGKNHTHDQIVVRADQHHTLTDGRGRLWLAVPGFKPRKMVRIPLSTMVAPTGALRLILRGGRVEVHYQIDASEMPSSRRPCGEQMIGVDKGYTEALTDSDGDPHGTCLGELLTVESDRLKERNRRRAKLRSIANTAARNGDHAKAHRIKANNLGTIKRDRQAARHRARVRTEIFTAVHEVVDKAATVVAENLTKRFTSTKKLGKNINRRLAAWTKGVTAEALKSVSERRGSALVPVNAAYTSQTCHRCGDFGRRSRDRFHCTRCGVVWQADVNAAINILHRAGDPDIALHTPHHRVKQILQDRTDRRRTRLPVQDSSPAPAERRAKHPNRSTTRRGRKQESS

SEQ ID NO: 27976 - protein, 383 aa, Deinococcus sp.
MLKAFRYRLCPTKTQEQELFNQLDLCRNLYNAALQERIGAYKKARVTRNYYDQANMLGEIKAALPEYKGVYSQVLQDVLKRVDKAHQAFFRRVKAGEKPGFPRYQGRGRYNSLTYPQSGFSLSDDGRTANFSKIGNIRIRLSRPLEGKVKTATILHDCGEWYVSYVCEIQAEPLPPTGNSVGLDVGTTWFAITSAGEFVENPRYFQRASQRLRVAQRAVSRKLNKQSKRRKKAIQRVAKIHRKISRQRLDFHHKVANKLIRENDLIAHEDLNVSGMKRGNLARSIHDVGWSQFFQILSTKAECAGRKVVRIDPRFTSQTCHRCGHACKENRVSQAKFKCVQCGHEQHADVNAARNILARAEPSVVHVAGCRKRSPSIQRLEPL

SEQ ID NO: 27977 - protein, 377 aa, unknown
  TnpB Polypeptide
MNKAIKYRLYPTTEQDILFIKTFGCCRKVYNLMLNDKLESYKATGKFASVTPAMYKKDYPFLKEVDSLALANVQLNLQAAFRNCFSKTRKKKTGFPKFKSKRHSRKAYTTNNQKGTVALMDNRYIKLPKIGKVKAVIHRQPEADWIIKSATVSQDSDGKYYASVLFEFADIVPAYTADITNAVGLDYASDSLYVDDKGNTGTNHKYYRESHKKLARAQRILSRRQGSKKGETKSSNYIKQLRKINKIHRHIANQRLDHLHKQSTEIANQYDVVCVENLNMRSMANKGFGNGKATLDNGYGMFLSMLEYKLLERGKHFIKVDKWFPSSQICHCCGTLHPEMKDLSIRTMQCNCGITIGRDQNAAINIKNEGLRILKCA

SEQ ID NO: 27978 - protein, 452 aa, Paenisporosarcina sp.
LHTTTFHSEHDQSVEGCFSKTNLQRISTTQKAIVGWSSLESFLFCGNSQRTNRRTNSTLYPKSESEVKTMIRHKAYKYRMYPNQEQEILIAKTIGCSRFVFNHFLNKWNTAFKETGKGLTYNSCSSQLTQLKKEIDWLKEVDSISLQSALKNLDDSFKRFFKKQNNSPRFKSKKNPAQSYTTKQTNGNIAIAGNQVKLPKLGLVKFAKSQEVNGRIISATISRKTSGKYFVSLLAEDDIQEYPETGSTIGVDVGLKDFAILSDGTVYKNPKYFHKMEKKLGKEQRILSRKMRIAINRKQMLYECRNYQKQKVKVARIHERITNSRMDYLHKISSVIVKNHDIIGIEDLQVSNMLKNRNLSKAISEVSWSAFRTMLEYKAEWYGKTVVVVAKNYASSQLCSTCGHQHKAVKNLALREWDCPTCNSHHDRDINAGLNLRNEAIRILTAGTAGIA

SEQ ID NO: 27979 - protein, 373 aa, unknown
  TnpB Polypeptide
MIDTLDLCRWTYNETLAIRTNAYKPEGRSVSYYETKKLLPQWKKDKPELKSVHSQVLQEVVKRVDLADQAFFRRVKNGETPGYPRFKGKGRYDSFTYTQSGFSLKSGKLWLSKIGDIKIKLHRALTGEIKRLNIKKTPTGKWFASFMVEVEPDEPLPKTGSSVGIDVGINNFATLSNGEHIDNPRFFVHEEKALAKAQRKLSKAENGTPDRAKALKAVRSIHERIANKRNDFIQKVSLKLAKSYDLIVFEDLNIEGMVKNHCLAKHIADASWNKLIITTSYKAEWAGKRVELVNHFNTSQICSGYSQIVKKDLSKRVHRCSFCGLTLDRDHNAAINILRLAFQRIAGRVPALGRNRLHSVHQNARCSRLQSGE

SEQ ID NO: 27980 - protein, 219 aa, Clostridium sp.
LGALRITKKSNKYIAQISVEKVSHIVKGDVVMGVDLGLKVPAVAVTDSGKTFFFGNGRQNKYVKRKYKAKRKKLGKAKKLKVIKKLDDKEQRWMTDQDHKVSREIINFAVNNNVSDIRLEKLTNIRNTARTSRKNEKNLHTWSFYRLAQFIEYKALLKGIKVEYVDPKYTSQICPECKKLNKARDRKYKCSCGFKTHRDRVGAINIINAPVVDGKSLLA

SEQ ID NO: 27981 - protein, 407 aa, Calothrix sp.
VFIYEFKVNPKLQQTTAIDEAIRTSQFIRNKVLRYWMDNRGVGKTEMFRYNTLLRKEFKFVEDLNSHACQTAVERVLKAVNRFYDNCKKQIPGKKGYPKFKKNTRSVEYKVSGWKLSENRKHITFTDKKRIGTLKLIGTRDLNFYQLEQIKRVRIVRRADGYYVQFSVQLDPRDTVKPITPSQKAVGIDVGIKYFLADSQGNTEPNPQFYRQGEKQLSRLNRRSSKKYKKGNLPFDSAQGRQSQNYHKARQRYARKHLRVSRQREEFVKRVALRLIKSNDLVAYEDLNVKGMVKNRHLAKSISDAGWSKFRSWLDYFGYKYGKITIAVAPHNSSQNCSNCGDKVQKSLSTRTHICHHCGFVEDRDINAAINILHKGLSTVGHTGAYKLGEFDPLASLEQSCEGKIEL

SEQ ID NO: 27982 - protein, 384 aa, unknown
  TnpB Polypeptide
LLKSFKTEINPTKKQIIKINKTIGACRYVYNFYIAYNKELYENNKEFMSGKSFSVWLNNEYIPNNPDKKWIKEVSSKSVKKSIENGNTAFLNFFKHKSNFPKFKKKNNSNIKMYFVKDNKTDCLCERHRIKVPTLGWVRLKEKGYIPISKDGFIVRSRTISYKAGRYYISVLIDMPEQNTQINNNPGIGIDLGLKEFVICSDNSIFQNINKTNNIRKVEKKLRREQRKLSRKIILIEKGEPAQNNFVKQKLKVQKLYQRLTNIRIDYLNKTINSIVKTKPSFIVIEDLNISDMMKNKHLSKAVAQQKFFEFKTKLISKCKEYNIELRIVDRFYPSSKLCHNCGHIKKDLKLSDRIYICSECGYTEDRDINASLNLRDAKTYTII

SEQ ID NO: 27983 - protein, 417 aa, unknown
  TnpB Polypeptide
MYLTIKQQVKHLTKEEYNILRELSRIAKNLTNQAIYNVRQHYFQEKQYLRYEANYHEMKYLENYKLLNANIAQQTLKDVDIMFKSFFALIKLAKQGKYDFKHIKLPSYLPKNSYSNIAISQIRIKNSILTIPYSNTFKRKKEVNKIQIKIPKVLEDKKIKQIQIIPKFNARFFEIQYTYEIEEENLKLNTNNALAIDLGVNNLCTCVTNTGKSFIIDGRKLKSINQFFNKQNANLQSIKDKQNIKRQTKQQYLISRKRKNRIDDYINKTCRYVINYCLSYDVGTLVIGYNQSFQNKTNLGKRNNQIFTQLPFGKIREKLEYLCKRYNINYILQEESYTSKASFFDNDELPIYNADNPQTYEFSGKRIKRGLYQTKDKYRFNADCNGALNILRKSKAVDLTVLCNRGELDTPKRIRIS

SEQ ID NO: 27984 - protein, 362 aa, unknown
  TnpB Polypeptide
MKLSMKLKLITTESQKQALLDTMQRFNSACDYISDIAFDKQIFGQIRLHKITYYDIRDKFGLTSQMAIRAIGKVVESYKAEKKHKHSFYKYGAIVYDPRILKFKFPDKISIATIQGREVIPFLFQNYRNLDMRRVAGQADLVYHDGIFYLVVCVDVPEPPEDDTKEFLGVDLGIVNIATDNTGTQYAGNKLNSTRNRYFRIRKKLQKKGTKSAKCLLKKRKRKENRFAKDVNHVISKQLVDKAKALGLGIALENLQGIRDRITVKKPYRRQYAGWSFFDLRTKIAYKAQLAGVKVVFVDPRNTSRMCSVCGFVSKKNRPNQSTFLCQSCGFSCNADLNASRNIARRAVVNQPDVVCDEAKAA

SEQ ID NO: 27985 - protein, 417 aa, Lentzea sp.
LCVVRTAYKCRAYPTPEQIAALNRTFGCVRVAWNKTLGERHRRYRDQGVPTSYKETDAALTRWKRTEELAFLSEVSCVPLQQALRHQHAAFQNFFAGRTRHPRFKSRAGRQSAHYTRSAFRMRDGVLTVAKMSAALRFVWSFGEVNVAALNPTMVVVSREQDGRWFVTFAVDADQDVRAESTGHAIGVDLGLKDFLVTSDGERLANPQRVARRARNLARYQRRLARCLRGGSNRRKAKAKVARAHRKVRNSRQDFLHRATTRLVRSADVIAIEDLNVAGMVRNRHLSRVISDTGWGEFRRQLEYKCERAGRTLIVIDRWYPSSKTCSTCGHLLAELKLSTRHWTCPGCRTRHDRDLNAAKNILAAGRAVARGDSGDACGADVRRQGLALPRSAVKQESSSSRTTEKSKLWATHGRLI

SEQ ID NO: 27986 - protein, 118 aa, unknown
  TnpB Polypeptide
MLHKLSTSLVRTYDLIAIEDLAPSNMVKNHKLARSISDASWGEFRRQLEYKAAWYGKQVVTVDRFFPSSQLCSTCGAQWPGTKDLSVREWACPKCGTIHDRDVNAAKNILNEGLRLLA

SEQ ID NO: 27987 - protein, 411 aa, Halorientalis sp.
VPVALDVASDDAALLEDTVDAFLWSAQYVVDYAFQGGYVTTSKTTLDDETYDDVREQTDGFNGGLVQAARNKAAEACKSVVARWKQDKSASKPQFTSPHVVYDKRTATFHDDYVSLATTDGRIEAEYVLPDEDSDTPHSEYLFSDAYETTGAELHYRNGDWILHIRCKNEVESDTSSQTTTENGTVLGVDLGVNTLAVTSTGTFWTGGEFDHWRREYENRRESLQQCGTRWAHENIQSVGQKEEGRFKVILHRISNEIVAEACENGCSVIVFEGLTNIRERTGASWGHQWAFDRLYEYVEYKAEEHGIEVEQVDPENTSRRCSHCGFTHLDNRDGEDFECLNCGYQNHADYNAAKNIGLRYLRRNQTGGDGGAPLGVRLNSGTLNVNGDYSPASPEVRTGVHAESHDLSGG

SEQ ID NO: 27988 - protein, 429 aa, Halorientalis sp.
VADDCVYRTAITRLDVSDEQRALLEETISEWKRGCQIATDLAWNRCQAKSDVQSLAYDPLREQTDLGSQHAILATHQAAEAITGCIERRSRGEKASTPRFTAPTVTYDSRTLTLFDDETVSLSTTENRIRCPLVLPEDDDGFQWRFLDSERWEVTESTLTADGDDYFLHLGFRRPKSNNQPNTAEDGTVLGVDLGVENIAVTSTARFFSGRELHHTLSEFEKTRAGLQRTGTRSAHRTLEQASGRQLRTVRDEMHRVSKGIVTEAVRYECDRIVFEDLTHIRKRTDDAWGHRWAYRKLYQFVEYKAERHGIAVEQVDPADTSKRCGECGFVTDANRPTRDRFECRACETEANADYNAAKNIGLRYVRRGQQSSRRTGDGQLALKSGTVTPNSGFTAYPDGFEAEFTDKRRCGTTPPTPSDAGCWSHRRS

SEQ ID NO: 27989 - protein, 418 aa, Halorientalis sp.
MEVRRTAPVKLVVPDEYRDDLHETAEQFLYCANEASDYCWDNTDYEDCITSNVTARDALYDRLREETDLTANLVQEAIRRAIHAVDSGVDRWKKGKRTNKPEFTSWSVVYDKRSATFYRNEISLSTVNGRIECDFELPADSPTPYEEYVLSDDYEFRTSTLQYDQATDGFYFHIKTRKVDTDGEAVEIGSSDDTGHQTVLGIDLGVNSLAVSSTGTFWSGDEYDHWIHEFEKRRAEMQQRGTQAAHNALLRLGKRERAWRKQYIHTVANEVVEEAVVHDCDVIVFADLTDIRGRLPHADWHHIWAFRRLVEYVEYKAPERSMAVEQVEPAHTSQRCSRTDCGFTHEDNRDGEQFQCLNCGCEINADYDGAKNVGLRYLRKRQHRLRSSPTPGSADAPVDVRVNGGMLNGDGYRPTAES

SEQ ID NO: 27990 - protein, 387 aa, Mollicutes sp.
LEAAVMYKSYRFRFYPNKKQLELINKTFGSSRYVYNYYLDKMKNKGYVSASTNIKDYTSILRYNTPFLQEVDSIVLTKSIFNLDDDYKKLFNKTGGYPKHKSKNNRNSYNIPSTYKKYKDKEYCNIELDLTNRQIKLPKLKWVKIRGYRNTNNINGKIKNATISREPNGKYYVSILYEMYDKVPIIKPRTIVGIDLGIKKLLTLSDGTVYDNNKYIDKYTKRIKRKQRELSRKEKGSKNYYKCKKELAILYSKLANARKFYTHKITKDITDEYDIITCEQLKTKEMIIKGKDNKLSSKINDATFSEIIRQFQYKARYKGKVFYQINTYYPSSQICSRCSAQDKRYKDLTRREYKCLKCNQEIDRDLNASINIMFEGLKLYMKNYAKI

SEQ ID NO: 27991 - protein, 433 aa, unknown
  TnpB Polypeptide
MLVEAKNQTDIKGSRKRAYVTVRYRLRGKRAVYQFLNELAGANRNLWNSTRSNISKDYKETGKTKTSYHDLCKWYKYHKHTEAQGLSKYPVVLTRTGLKDLSNAFKQFFRGTRNSPNFKSKKKAKKSFAFDVSGAGLFKENGYVRLKRGLYAKLMQYHRINEYSDPIPKSARIFEEHGNRYITVQHEVDAIERETDERGIGVDRNVGQVADTNGNIHYLTRVTRRVARITVLQRRLAKQKRCSNRWRKTKKTTSRHERKLAYIRKNDLRHIAKLITYSSTLVFLEDLKTKGMTRSAKGTVKQPGKNVKAKSGLNREILKTGWGQMERFLSERGYVHKVNPAYTSQTCSQCGYKDKQNRKTQSEFICLECGFKLNADTNAAMNIWAFGMASINGRGVYVRPVRRQQTIKRQNEHSTLGYCPWVLSYYNSHTFRS

SEQ ID NO: 27992 - protein, 366 aa, unknown
  TnpB Polypeptide
MLSKWFGTSRYAYNKAISLLNDEDTPTNFKGLVPVVLDELPDWHKETPRQIKAGAVMDACQAVGNAKVKCKQTGKFQSVKFRSRKNPRQTLYLRADSLKKNGFYVRFLGDMKMSEPLPAKPQGTGKVSERDTNAEVKDSQLIRENGRYFLCVSYIEKKKTREPSGRIVALDPGVRDFMTFFSEDCFGWLGMQCINRIQRLCQHCDNLYSRATQEKRPLRRALRKAANRIKVKIRNLIDELHKKIAHFLVTNFDIILLPTFETKQMTKRGGRKLRSRTARQMLTLSHYRFKVFLKQKAKEYGVQVKDVCEAYTSKTVSWTGELVANLGGSKVIKSSEGQSMDRDLNGARGIFIKTVARALTVRPYLA

SEQ ID NO: 27993 - protein, 458 aa, unknown
  TnpB Polypeptide
VILSYRYRLYPLRDQLTFLDHVLTEMNYLWNYALAQRRDAWIREHRHISYLDQQARLKGWRAFDIHGLGAVSYDAARDCLQRLDLSYRVAFKRIREGRRPGFPRFRRETTSFTCVPVPDPWIPGTGGAWRLKIPRGGAVPARRHRPPPTGMAKSLTVSREGVEWYVTLQYEVADPPPPPAADPVAPVGVDLGLVHLAALSTGEMIESPRFLIQSERRLKLLQRDLSRKQRGSNRWKRQRERVQRCHATIRRQRHHWAHLVTSHWAVRHDLIAFEDLNLASFSKGNRLAKGIADAGWGMLRQMAAYKERMRSGRYVEVPAQGTSQTCSRCGRVAEPPLTLKDRVFRCPYGHEGDRDVNAARNILERGLDQLRRNTTEGKRVDGTPPPTRKGRRAYQRKRELVGRGPEAVGVSRFCATPGPSGSRLLQAKQGGEPTGGSAPRPESVTESWEGELRHPPRT

SEQ ID NO: 27994 - protein, 405 aa, Aliidiomarina sp.
MAIRKYTYKLYPKSKQSDALLGQLRLHQQLYNAALQERIEAYRKCGKTISYNEQQASLTTIRAELTEYKALPCTSKRMTLRRLDKAFKAFFRRVKKGESPGLPRFKSINRFSSFELLEPKFIHNESGGHGRLFVPGVGHIKARGQCRITGKIKTSQIQYKHGQWWLSLTVDGDAIRNTSASKACAIDWGVAHLLTIVEDDGRIEHIPNPRYYRNGKEKQDRLQRSVSTKKRGSNGWKKACKQLSTFKRKQASQRKDAQHKLSNKIACRYALVAMESLQIKNMSRSSRGSAETPGKNVKQKSGLNREILDTAPASLISMIRYKAEEAGNEFVEIPTKKLKPSQRCPKCLHTTKDNRKSQADFTCVSCGYRENADVVSGINSLLWALGLGQECVPEVYTSKPLLSAA

SEQ ID NO: 27995 - protein, 432 aa, unknown
  TnpB Polypeptide
MTQPMISWMALLVCDKTYAKHSKGGCRMKLNYRVRLYPNKTMKQVLDALCDYRRYCWNEAIACWNEQYEARSIGLPEDLRNKLRNKTENLTDEEIYLLSQYPNPSHYSVRNELVAQKEDWQYAFSSRVLQLAIKDVATTWRRFFDNPNTAGRPTFKTRREPKQGFKTDSARIRNGRLLLDKPHGYQGEWQTIRLRGLNTPDGKLTLCSVTRVNGRYAATFTIEVEPVQLPKTGQKTAVDANVDHFDTTDGRTTLKPETLNPLYNRVRHYQRVLARKRHGNPRATQSKRYRATRTKLQRTYERIANIQKDLLHKFTTDLYRRFDTIVIEDLDVKKMQMSKRAKNLHRSLFGQFRQMMKYKSEKFGKRLIIADRYYPSTQRCSSCGFVKTGDDKIVLDGNHKHGTRHNQYICYQCGYEDDRDHNAVLNLLALAK

SEQ ID NO: 27996 - protein, 379 aa, Haladaptatus sp.
MGIKEVTKTARTRLCIESGERSWLKDARYTARDIANDTLRLKQNGYNKTEIQREVDRDDFLRNNKCAVVAKALQAWDSYQELLNWWYDQDDTHVGKPSPPATDKKGAYPLVMAHTEGYRLTYNDETDRVQFRVSPKPYKKVKGHLRGRPEDLALIESALTEDEWSLGQAELLYRDGVYYLHVTVKTEVEVPEPEDADTLVGVDINERNIALTALNRETRDTLGTLVLDYGTVKAERQRYHTITKRCQEHGQHSIHHQLGEKEERYTEWVLHRLSRVVVEFAQQFSNPAIVFEDLSGIRDAIKYGTYMNRRLHKLPFHKFEQQVRYKATWNQIPCETVESPYNSKSCSCCGHRGYRQGRRSGVRTGRVRFSKTMLTGTRV

SEQ ID NO: 27997 - protein, 378 aa, unknown
  TnpB Polypeptide
MKIQKAYKFRIYPTQPQIKQLTVEFGNARFVWNHALGMRKKAYDRRKENMNYVSLNKHVTKLKRTTRYDWLKQSTASILTQKLIDLDTAYTNFFKGYAKFPNFKKKSHAQTIRFQLDQRNIQNNYESGVLLKLPKLGEINLKWSQYPDGTPKMATVSKTPSGKYFVSFSCEVSITEYKKTGKSVGIDIGIKDVAVTSDGYYSGAPKFTYKYQRELKQAQRALSRKTKGSNRYAKQRVIVARIHEKIANSRRDFLHKLTTKIVREYDYMAVEDLNVKGMVKNRKLSKAVSDVGMFELKRQLTYKAGWHGKTIVQISRWFPSTKTCSGCGLKRDMKLSDRVFNCEACNFSMCRDKNAAQNIKMAGNVMLGESYQPVSAAK

SEQ ID NO: 27998 - protein, 514 aa, unknown
  TnpB Polypeptide
MSKTWNEEKQKYEYSPTFTLELRLMTTPEDDAVLDKRFGICNHIYNVMVKEARKRLSNLYRDHEYKEIMYPYYRTGKFKTGDKKKLDALRKKYGLTEYSFKNYLDAKQNRFNDNIDGRTRQKEASRAWGAVKDVLFLNGKNIHFQKLRNRSSVEGNSNTTGIRYSNQSLHWKGLDIPVVVRKRDTYAKEALRTCFVKYCRIVRKWHKHKYRYYVQLVMEGIPPVKENRQKNYDDILHDDTPVGIDIGPSTIAVVSPDKVLFQELAADVSSIEKEIRHLNRKIERETKLANPDNYNTNGTWKTNNPNRTYNKSRHQLMNEHKRKELYQKRHNKLKYSHDCMANEILENFGTDIHIEQMDWKALAKRSKKTEKNDKGKYKKKKRFGKSISNHAPSMLVKTLKRKLSYVNKPLMVVDNKSIKASQFNHITGEYMSSDIKLRWKRLDDTTLVQRDLYSAFLLMNCTDAETISMEQCFDTFDDFKKKHDDCMTHLEMQKVMQNKKFPACMGIGTYILSV

SEQ ID NO: 27999 - protein, 446 aa, unknown
  TnpB Polypeptide
MYKAQSIILNRSKHSNLCSIFDEWAKLAKETYNSALFIERQLISSSKKSPSEYTDNELEIRSYVQGKSLSTQKTIGYVKLERLIREHRTELYKSNLPNQSVQHLLKSVVQDLKSYFHAIKDYKNNPAKYTGKSKLTKYCKNDKKSFVITNQDCVIYTRDNGTQYMKFPYITKKFGIFLELPYLPEELSSNTKKLKEVHVTPYYDTYKLEIVYEASESKKTSSNKVAAIDPGLDNLVTLVTSDESLVINGKVVKSKNQWFNKRAAELNSKLDVMYKTSKHADSKQLTSLWKNRANWMNDYMHKVSRFIVDYCVIHDIGTIILGINPMWKQNCNINKVNNQNFVQISHSKLYSLIQYKAQMAGITVITQEESYTSKASYIDNDDIPVFGKENGKPAFSGKRIKRGLYKAADNTLINADVNGAANIGRKALGIRPFQISALQKVTSVTL

SEQ ID NO: 28000 - protein, 409 aa, unknown
  TnpB Polypeptide
MCDDMWLNGYRWKEEDGWHEFKPTQFKYELPKYLDYNRFNIDTWLSARMLSSLVTQLSGKLRAICSKNAARLYVFDKEAGKGNYLERLWETIETRNPSKPDLSDAAIEISSKCAEFIHTPDGEFYGFLRIKSTGLPIFHVPICRQKHLSKYMDGTWTRCNGYLIDEYGIQLRWEKEFVEKEIGNKVGADQGLLTCVSLSDGQTTPDMVVSAPRSGEPDRTITVNLDTITDKLARKKKGSKSFERTQTERRNYINYAVKRLDFSNIKEIGLEKITNINYGRNTSRKMKHWSNPEIVTRLTQVAEEFGVRINLQSNAYRSQRCSGCGHVLKKARKGKLYVCPLCGLTMDADLNAAKNHAIELPAIPHSTEFSKLAKTEGFFWLSNGLFRMDGSELRVPNTSKSQSVYLVIF

SEQ ID NO: 28001 - protein, 196 aa, unknown
  TnpB Polypeptide
MVRPAAERRHGESSRLPQTRRRTTAQYGHVQKDGFKHDPDNNRVRLSKGSNLKGYWSDFLLCEYQTRPDVDLSEVNSVQNVRAVWNGDEWELHFVCKVKLKTNDSTGNEVAGIDLGITNIATVAFPDEYVLYPGNSIKQDKHYFKRSEYDTEGKNGPSNKSTWARRKLADRETHFSTFSQTPSSQSVSNVVLERWQ

SEQ ID NO: 28002 - protein, 442 aa, unknown
  TnpB Polypeptide
MYPSPEQEAALLGHCTHARYVWNLAWNLHQFGTLETYGNASRRVDRDGNEYIHQKRRPVRPLPGYVGQSRMLTEARAEYAWLAAGLQNVQQQALRDFDQAMRNFYAGTHGYPGRRKRHLDEGFRITGLTFGRHVRRLNRHWGQVRVPKVGWVRFRWTRAVPECKSYRVTLDRAGRWHVAFAAIPESVPAPGTGEAVGVDRGVVITAALSTGEQLHCPGMSARERVRLRKAERRKSRARNGSPEQQAERARIARLRAREADRRKDWCEKVSTDLARRFDVIRFEDLRIKTMTRRPAPKPDPEHPGAYLRNGARPKSGLNRAILAQGWGLMARRTQEKAPGRVEKVRAAYTSLRCSACGWISKDSRDSQAGFCCVACGYTCNADINASINIAAGHAGGTPPGVREPQLLTSLRDGMQLESPARQAGEDVNWPVLHPGAKVASEW

SEQ ID NO: 28003 - protein, 417 aa, Micromonospora sp.
MKTTRVKRAFKYRFYPTEAQAAELSRTFGCVRKVYNLALAARTEAWTLRQERVSYNATSAMLAEWKKTGELAYLNEVSSVPLQQALRHLQTAFTNFFAKRAQYPRFKSRKRSRKSAEYTTSAFRFRDGMLTLAKMGEPLHIVWSRPLPEGAKPSTVTVSQDSAGRWFVSVLCEDQTLQPLPPTTAAIGIDAGLDRLLTLSTGEKITNPRHERRDRARLARVQRELSRKVKGSANRDKARRKVAKVHARIADRRRDHLHKITTRLVRDNQTIVIEDLTVRNLLKNHTLARAISDAAWRDFRSMLEYKTQWYGRKVIAVDRWFPSSKLCSTCGTVRDTMPLHVRTWTCDCGAIHDRDVNPARNILAAGLAVSACGAGVRPQREPSRTRRSVTKQETSRATVGIPVLQGREDVNTASPVR

SEQ ID NO: 28004 - protein, 162 aa, Leptotrichia sp.
LTNSNGNYYVSILTEFEKEIQKNSSNDKVIGLDFSMSELFVSSENQRADYPRYFKMLEEELKELQKSLSRKVKFSKNWYNQKAKISKLHEYIKNCRSDFLHKLSKKLSETYNAVVVEDLNMKGMSQALNFGKSVGDNGWGMFLRMLEYKLMFLGKQFLKIDK

SEQ ID NO: 28005 - protein, 419 aa, Leptotrichia sp.
MYLTLKQQVKHLSKKEFRNLKYLSHIAKNLTNEAIYNIRQYYFNKKKYLSYNENYKMLKNSENYKKLNSNMAQQILKEVDGSFKSFFGLLKLAKNGQYNFKDIKLPKYLTKDGFTTLVIGFVRLKDDMLIVPYSNSFKKTHQEVKIKLPPVLKNKKIKEIRIIPKQHSRYFEIQYTYEVEEVQRELNKENGLGIDLGIDLGIDNLCTCVSNNGASFIIDGRKLKSINQYYNKINAKLQSIKDKQKIEHITLRQKRIARKRNNRIEDYLSKAARIIINYCLNNDIGKVVLGHNEDFQRNSNIGSINNQNFVNIPYGKLRDKLIYLCKLYGIEFKLQEESYTSKASFFDGDEIPIYDKENPQEYKFSGKRIKRGLYQTSKGYQLNADCNGALNILRKSKVVDLSILYNRGELDTPKRIRVV

SEQ ID NO: 28006 - protein, 383 aa, Psychrobacter sp.
MSKQVLKAYKVRLYPNDEQQVFFAKSFGCTRFIWNKMLSDKIDYYEATKTTLNNTPAQYKKQFEWLKEVDSLALANVQQNLRSAYNKFFKQGSGFPRFKKKGIKDSYTTNNQKGTVSVTNNTIKLPKIGHIKAKFPNKINGLIKSATVSKTPSGKYFISLLVETVVDELLKTHSNIGIDLGLTDFIVLSDGTKVANPKFLSKLEKKLARQQNILAKRREVAKKEARNLSDSRNYQKQKIKVAKIYEKITNARKDFLHKLSFTIIKNHDVIAIEDLNVKGMVKSRSLAKAISDSSWSSFISMLTYKAEWYRKMLVRIDRWYPSSKTCSNCNHLLSKAELPLSLRQWQCPSCKQDNDRDINASINILNAGLIMATIKTVGATGLA

SEQ ID NO: 28007 - protein, 546 aa, Streptomyces sp.
MSEKKQLRTIDAPFVALGPSGVAIRDRLRHLTPGDDKVLRLISEHLGRLASLDLKARCADGLDHSSQTWAARKQGLTAESSSRWAGSITKATHDQWALSRRCQLAHIQGLEAGVRTLMHRLSLPLGEKGTRRAPGGYRSKGEWFHKSRRLAILEHRLDVARAERKAGVVHVVRGGRRLLGNRHNLGTAQLTEAGWRERWEASRWFLAADGESGKRFGNETIRVAPDGEVSIKLPTPLAHLANARHGRYVLTSKVAFQHRGEEWHDRIEANRAVAYRIHCDTARGRWYLTASWTRPVVRTLPLEAARAAGLIGVDTNADHFAAYRLDAHGNPVGDPQRFFYDLSGTADHRDAQVRHAISQLLHWATRCGVSAIGIENLDFTAEKTREKHGRKKRFRQLVSGIPTGKLKTRLVSMAADQDLAIVAVDPAYTSMWGDQHWRKPLTSNKRKMSRHDAAGIAIGRRALGHPIRRRAAPPRIHRSDGYGHRTVQAGPDARGREETRPLVTERAHDARRRTGTQRTRETRTPKTVRDVRSEQKRAQDPLLLTE

SEQ ID NO: 28008 - protein, 295 aa, Streptomyces sp.
MPVGQGVQRLPAVPVAETPVVGHAVVAHGRARQARQRQPWNRNRWRHQVHRADPRRRVERVLTAARSATTSTAASLRRGPRQRPCGERNPPEKTKLLRLERRAARRKQHRMHGEKTSRRLQRTYDQIKQLRAKATRRAVDWQHKTTTTIARRYATVVVEALTITNMVTSARDTIEQPGRNIAHKSGLNRSISQEAWGRTVTMLTYKTARHGGTLHKVPAPGTSRRCHACGHTTPGSRHSQALFVCKNPDCAWSGNADQNAAQNILHLYRTGHALVPAAGRAVIRRPRGVKPATAR

SEQ ID NO: 28009 - protein, 250 aa, Thermococcus sp.
VEEKLINGEWVELPRQPLGNLSAGIDLGVNNLMAVYVENGGESFLVNGRPLKSMAFYWMKRIADYQSRLNKSGAKSSKKLARMHQKAKLQAKHYINTAVRRTVERLYRLGVSRIVVGYPKGIARNSDKGRKQNYLLSHVWRFNTVIKRLKEVAEEYGIQVLVVDEAFTSRTCPVCGKPPHEGARFVRGLFKCPAAGLIFNADLVGAFNILKKVVKTITPPSLGGLYAQGRVTGSRPEPEGVENLAESWVQ

SEQ ID NO: 28010 - protein, 372 aa, Anoxybacillus sp.
MTHQHKAFKFRLYPHEEQKELLEKTFGCVRFVYNQMLAERKERYEKFKNDKERLKKQKWPTPAKYKEEFPFLKEVDSLALANAQINLQNAYKNFFKGRTEFPKFKSKKHKQSYTTNMVNGNIKLENGHIQLPKFKKPIKMKQHREIPAEYKIKSCTISKTKSGQYYISILTEYEKKMEPVKIQKVVGLDFAMDGLYVESERGEKANYPRYYRQALDKLAKAGRILSRRKKGSSRWEQQRLKVAQLHEKIANQRMNFLHHKSKELAITYDAVVIEDLDMKSMSQALHFGKSVHDNGWGMFTRFLEYKLKEQGKQLIKIDKWFPSTKKCSCCGKEKEMPLSERVYQCSCGLVLDRDHNSAINIKNEGLRLVAFA

SEQ ID NO: 28011 - protein, 415 aa, unknown
  TnpB Polypeptide
MYLTVKQQVKHLSKEEYKSLRELSHIAKNLANQAIYNVRQYYFTEKEYLNYEKNYVLLKNSENYKILNSNMAQQILKEVDGSFKSFFGLLKLAKKRKYSFKDCKMPKYLPKDGFVALVIAMFRINGNKFVIPFSHQYKKTHESIEITIPPILVGKKVKEIRIIPKAKARFFEIQYTYESECTQRNLNINHALAIDLGIDNLVTVVSNSGKSFIIDGRRLKSINQWYNKENARLQSIKDKQHISGTTNRQKALARNLNNRVNDYMSKVARKVVNYCVDNDIGTLIVGYNETFQRGLRIGKRNNQNFVNIPFGKLREKFEYLCELNGITFIKQEESYTSKASFWDKDEIPVYNNDNPQEYEFSGKRIKRGLYKTSSGKLLNADVNGALNIMRKSSVVDLTVLYSRGEVDTPIRIRIA

SEQ ID NO: 28012 - protein, 331 aa, unknown
  TnpB Polypeptide
MKGNKAFQFRMYPDDEQKTMFAKTFGCVRFVYNKMLGDKIDHYQKTGENRKTTPAKYKEEFPFLKEVDSLALANGQMNLETAYGNFYRGKGKTGFPKFKSKHRDKDSYTTNCVNGNITVADGWVRLPKAGRVKIKQHREIPDGYRLKSCTVTRTPDRKYYVSVLYEYEYEIQEHKAESAIGLDFSMKELYIDSLGNSPEYPKPYRKAQEKLAREQRKLSKCERKSNNYYKQRVRNMKAMSQALNFGKTVADNGWGMFVSFLGYKLEEAGKKLIKVDKWFPSSKTCSVCGRKKDDLELSERVYVCECGNILDRDVNAAINIRKEGMRILGMA

SEQ ID NO: 28013 - protein, 266 aa, unknown
  TnpB Polypeptide
MKYNLAFKYRIYPNKDQELLINKTFGCARFVYNTILYTANKIYEETGKNKIITPASLKSENQFLKEVDSLALSNAQLNVKRAFTNFFQKRAKFPKFKSKKNNVKSYTTNCVNNSIRIEENKYLILPKLKRVKLKYHREIPKNYRIKSVTLTNSNGNYYVSVLTEFEKEIQKNPSNNKVIGLDFSMSELFVSSENQRADYPRYFKMLEKKLKKLQKSLSRKVKFSKNWYKQKVKISKLSISRIVEEIFYINYRKNCLKRIMLWLLRI

SEQ ID NO: 28014 - protein, 392 aa, Streptomyces sp.
VDRVKLVIQVKLLPTPEQAAALRATLHACNKAANWLSEQAFTHTRPTRAALQALAYGELKAQGLSAQPSLHVLRKVADAYTTLRASQQTRRPCRAGSKGNAKPAAKPISFRPAAAQSFDDRCLSWQMGERTVSIWTTTGRMKNISFTGQPERLALLAMYRKGESDLFERGGMWFLAATCEIPEAEAKPAPSGFIGVDLGIVNIATTSTGIRHTGRQLTRRRAADRELRAKLQRKGTKSARRRARRHAGKETRRSRDINHKISKHIVTEAQRTGRGIALEDLTGIRERVRLRKPQRVTLHSWAFRQLGTFIAYKARRAGVAVVHVDPAYTSQECSRCHHIDRRNRPSQAMFACRSCGFVEHADLNSSHNLAARGWWTWVRGAESAAPALTLMA

SEQ ID NO: 28015 - protein, 366 aa, unknown
  TnpB Polypeptide
MNQVLTAKLKLLTTPEQFQALRQTQLAYRDALNYVSQYSFAHGKKSNQQWLQRECYDEIRVRCGLPAQMACNVPRQVGATYKGLWTKARKNAEQRKAGRTKKRFKGLDQAPHYVCPTLAYNFHRDYSLKGGQQVSILTLGGRVIVPYTGYHKHVALIERGAKIGAAKLWYDKPKKRFYVLISLEVEVADPTPQTHQRVIGVDVGQRYLAVVGRLDNGASFFAGKEVRAKADRHASQWAFAELHGFLAYKALLSDSMAVKVDADYTSQACPTCGYTCEANRPKKGLLFECQNCHYTLHADLIGARNVALRTLLLRQDWMSTGVLSVRPGASSPDTSDREAKAARLLRYAELRWSPDASPAPSGLGSN

SEQ ID NO: 28016 - protein, 410 aa, Moorea sp.
MRTAYQYRLRLSKSQEAEIERWLDLLRHQYNYLLADRFNWYEQNRCSINSCPLICHLPELRNNPDYFSQKRTLPQLKKDRHWYKTIHANVLQDCVKRVDLAFKRYLKGDCNGKKSGRPRFKGKNRYKSLTFSAFSKNPIQGNKLNLPKFGWVKMVYHRPIPDGFKIKTATVTRKADGYYVTLSLQDDTVPSVIPIEQVSNPIGIDMGLKSFLIKSDGTEVPIPQYYRKAQKRLKRIQKTVSRSKKGSNNRKKIVTKLGKAHKKVADTRKDFHFKTAKGLLDSHDLIAHEKLNIKGLARTKMAKSIFDAGWGQFLSILSSKAENAGLITKAVNPKNTSQNCSSCGTKVPKKLKDRIHSCPHCGYTEDRDVNAAINILKLAVGHPVGNKASRVSEPIGGVGKKPILNLQRSV

SEQ ID NO: 28017 - protein, 456 aa, Chroococcidiopsis sp.
LIHWYNDFMVNSIVRTDRWQLNPTPEQLSYLEATVSEYRSFCKALSYVVMGHWTEIAGSPCRCAAIEKLIHKTSSNPNPKYQYFQKRFYKFPSYLRRAAIEFVGGQVSSFVTRYYDWQSGNRKRRDALPPRFNPEAGCYPALYRGQCIKFSNGFVSAQIKVWNGSDWVWINIQITRVRERHLLAHSKGLSPSLIVRDGKAHLSVPFKLHPKKLSGEVVCAVDVGINTTATATIVSSDGTVISRAFFHRGGDIDRRDKVLGQIRHKARLTKKLHRGFCKGLYRRARGINHNMAQHISKEIVQFASQHGASVIVFENLKDWKPKAGRKRSTLKQRFHGWLHRLLVQLTENKFVEVGGRVELVYPRGTSSWAYDGSGQLKRSKDNYALATFQNGKRYNADLNGSQNIAARYWAYKLKLAYRNGRQLLSSKSSGSKSRMPITLSALWDRDATLRVRSNEA

SEQ ID NO: 28018 - protein, 365 aa, unknown
  TnpB Polypeptide
LNKSFKVRIYPTQEQYVLLEKTFGASRFVYNHFLKLKGYLYQEFKIKITYNHTSKMLTELKRQKTWLKEVDSVSLVQTLRDLDRAYQNFFSGKGKYPKFKRKDDKNSYCTNSNIKISSLYITIPKIGMLRFRDNYNFEDKNILKIYNVTISKTSSGKYYASISAEVYVPCFERTNQNVGIDLGLKDFAILNNGEKIDNLRILEHLENKYRKLAKSLSRKVKGSANYQKAKLKLARFHEKIVNIRKDFLHKLSTKLVRDCDIICIETLRVNNMMKNHKLAKSFQDVSLSEFVRQLEYKAMWYGKTVSKVDRFYPSSQLCSECGHKNEDVKNLSIREWVCPKCGTIHDRDINSAINILNEGLRLLEI

SEQ ID NO: 28019 - protein, 184 aa, unknown
  TnpB Polypeptide
LGLKDFAIFSNGKKIHNPRILKSLEEKYRRLAKSLSRKVKGSANYRKAKINLARFHEKIVNIRKDFLHKLSTSLVKTYDVICIENLNISGLMKNHKLAKSFQDVSISEFIRQLEYKARWYGKTISKVDRFYSSSQLCSKCGYKNSEVKNLSIREWICPECGTYHDRDVNSAINILNEGLRLLEI

SEQ ID NO: 28020 - protein, 150 aa, unknown
  TnpB Polypeptide
LNKSFKVRVYPTEEQQVLLEKTFGANRFVYNYFLNLKIKLYEFYKINLSYNHSSKVMTELKKHKSWLKDVDSVSLQQTLRNLDRAYQRFFSGRGKYPKFKKKQDKNSYRTNHHIKINNRYITVPKVGMLRFRDNYKLEECNILKIYNITI

SEQ ID NO: 28021 - protein, 398 aa, Microcystis sp.
  misc_feature (135)..(168): Xaa can be any naturally occurring amino acid
MLVVEAKLKNGTPEQYHRLDEAIKTSQFVRNSCVRYWLDNQGTTRNDLQKLCAVLANNKETPWVNKLNSQARQSAADRAWQSINRFYQNCHAKILGKKGFPRFRKHNRSVEYKLTGYKLSDDRRKIKFTDGFKAXXXXXXXXXXXXXXXXXXXXXXXXXXXXXXXXXXNAQGNTVENPRYLRKSEKRLQKAQRRLSKKFRQGNKQSNNYHKQRIKVARLHLKVSRQRKDKAIKDALALVQSNDLVVYEALKVRNLVKNPKLAKSISDASWYQFTQWLNYFAKIYRIVCVAVPPHFTSQDCSVCGTRVQKTLSTRTHQCPNCKTVLDRDHNAAINILKKGLQYLGNYLNGTVGQTETDPNALGESGLWILNGDIENLSCLVEQGISNSNVERIPRHSVA

SEQ ID NO: 28022 - protein, 403 aa, Cyanobacteria sp.
MLDVLKVRIYPNKWQEISLAKSFGCSRFVWNFYLNKTNTQYQETRKGMTYCQMAKDLTQLKKLSDYEWLQEPTAAVLQQSLKNLESAFKNFFAKRTGFPKFKSKHSKQSIRFPESCSIKGGSLKLPKLGLVKAHLSKSVNGKLKSVTVSKTSTDKYFAAILFETDELTTTQQSKISGIDLGLNSLVTVFDGENCYKVDPIRPTRKYAKRLRIRQKALSRKTKGSNNRRKAVKVVAKVHEKISNTRQDFLHKLSRKLVEDNQVIVAENICVKGLARTRLAKSIHDAGLGMLLNFTSYKLERVGGKFIQVDRFFPSTKLCSCCGHKNDFLNLSIRDWVCPSCQTTHDRDENASRNLRTEGIRILSTNTAGHAEIQACGETVRLVGTITKKRVSEKQESTANCFAM

SEQ ID NO: 28023 - protein, 419 aa, unknown
  TnpB Polypeptide
MIVRRVEKHKIKRKSEYYELFEHFSINCNNLYNHANYVVKNKFKEEGVWTRYGELDKILKNDLEYNDYRTVGSTAVAQQCLRLLDKNWTSYFKALKDYKKHPDKYSGCPKMPSFRPKKDRNILIFTNVAARLTKDGYIRFPKAYEHFTIKPNFLEDKNFVSYQQTRVIPRYNSFVVELVYTINIPDETKPDNDKYMAIDVGLNNLATIVTNVGLKPVAINGKGIKSVNTRFNKEVGRIRSELKTVDKANYSLAAENLILRRNNKIDDVFHKASRYIVNYALEHDINTIIVGDAKGWKNTHEQSEHEQEQSIGTQIPFENFIHMIEYKAQTEGINVAVVDETYTSGTSFLDNEEPIAENYDNSRRVTRGLFVSNNGTEINADVNAAYQIMKKLVTSIDSSIVTEEMLHPTKINMVEYKVK

SEQ ID NO: 28024 - protein, 418 aa, unknown
  TnpB Polypeptide
MRKKKKVTENPIPTITRAHKIRIYPNKHNQEVFQQYYDYQRSVWNRAIDERNAQYKIYKEMKATGLYTQKELNKNYYPHTKNLRKMEKFDWENNFHCRVREVQFDNLCQAWDNFFNPNMPNHKKPKYKKKKDVETHKKIALRDVRTKGKWLLLPKSRYSKPEYRFTKIKMSEELRFNGKIIGDSSVSVENNKWYVTLTVETPLEEKAAIFKQSTGIDVNVGSIDYLKKNELEEEYGKFYLLPKSLLRQYDKIKYYSRVISKKMNKNPYYKYSKSYKEAITKLNDAYTKAYNIQEANLNNIVKYFFDNYNRIVIEDLDVNSMKMNKRLCKSLHRNAFGRFKKKMIDKAEEYNVEFIIADRYFPSTQTCSECGYVKTGDEKLFLWGDKYGNDHNTYVCYNCGTIQDRTENAILNLNHYGK

SEQ ID NO: 28025 - protein, 438 aa, unknown
  TnpB Polypeptide
MKSKTLIRTAQHTTKFSNPGKLEVLRTFLSEYQLAVQHYVDYFWTTKVEWIASDQSIKCLDVVDEKFDLPNFISTTDNEPTNTPSLSSRIIKSAAGQALGIVGSVIAKRNKLAFKLNVATAKGDVKRATTLQEELEKFKLTKPDAKITTANLDSNTLDFISVDGSGEKFKEFDGFLKIKSMSKSLGFIEIPVKFHRQVKNLKNRGYTQKTTWFVSIDKVCSTWEKPLPTKKTSGRKVGADQGIKTCLTLSDGQTTSNCNHGHSLESIMQKLSRCKKGSNGFKRAQDHRKNYINWSIKQLNLDDINEIGYENVTNIRYGKNQSNFMKCWTFTTIRTTVERICEETGVQLTQQSSIYRSQRCSSCGFVHKKSRNKKQFTCTQCSHTLDADLNGALNHEVELPDISYVLLSRKLNIAGFYWLESGLYSIDGEEITVPRQEN

SEQ ID NO: 28026 - protein, 360 aa, unknown
  TnpB Polypeptide
MEQVIALKLKLYRPTQAKREMYQLMADRTTEFANNYLKLDKKDRPRTSKEAKEYSDPLPSAVLTQVIRDIKSKPKARRFKRLWPAFNNQNFRVEKEYTAGGGAVYKVSFPTLEKRVGVPVVVTPYQEKYLDLLLAGKVKQGVARLVKCGKDWYIHLSLTVPVERTQKPEKVMGVDLGLIDLLVASVGGQTLFFSGKELAYVRRRYAGLRRRFQEAGAYRALKGLGDKEHRWVTDVNHKISHAVIEFARFHGVTKIRMEDLTGARWANPQRKGQRRDHGRSLQYWPYYQLRQFIEYKAALAGIKVELVSPHLTTLTCSRCGEVRRSRPKGRWFRCPRCRRVKHIDVNAADNIAQAVSGLAS

SEQ ID NO: 28027 - protein, 394 aa, unknown
  TnpB Polypeptide
MSRYRLVASLAQERVLREHCAHARYVWNLAVEQQSWWRPGRKSAPGLIAQAAQLTEARAAFGWLRDGSQTVQQQALRDFAQAVASYFAGTHGKPTWRKAGRNEGFRIVGVRPRHVRRLSRKTGEVWVPKAGWVRFRWSRAVPVARSYRITCDRAGRWHIAFAAIPDPIPRPGTGVVVGIDRGVTVSAALSTGELLHCPGLHPAERARLARLQRRLARAQRGSNQRQRVRAAIARLKAREGDRRKDWAEKLSTDLARQFDVIRVEELKIRNMTRSARGTLGQPGRNVRQKTGLNREIMASGWGRLVRRLEDKAAGRVEKIKPHFTSQRCSACGHVDPKSRESQARFRCTACSFACNADVNAAINIAAGHAVTARGGDGTARPANREPRHDGRTAA

SEQ ID NO: 28028 - protein, 350 aa, unknown
  TnpB Polypeptide
LAIRTLKVRIRDKHAVRLCRMARSVNTVWNYANAYARHEWKAKRRFVSYAGPRGLAEQTRGVAKDLGLHSGTVQKVCAQFDTSKHQQRKAWLRFRGRKSLGWIPFKGAHLELEDGGFRFMRQRFQVWDSYGLGRFTARDGNLVQDPRGRWYLCVPVEMDGLELLESGQAVALDLGLKDAAVASDGQKLKAKWYHGIQAKLGVAQRARRSQRVKALHAKAKHQRQDALNKFSTALVRQYGAIFVGDVCTAFLLKFSPKSTLDAGHGILKHQLRYKSLQAGRKFAEVSEQWTTQTCSACGCTAGPKGRAGLNERAWVCPGCGTSHDRDVNAARNILALGLGHGPPVGGIRPL

SEQ ID NO: 28029 - protein, 395 aa, unknown
  TnpB Polypeptide
MSRYRLVPTAVQEAVLRDHCAHARFVWNLAVEQHSWWRPGRNRAPGYLEQARQLTEARAGFEWLRTGSQMIQQQALRDFAQAVRNLFAGTHRKPTWRKAGRDEGFRIVAVKAGHVRRLSRKTGEAWIPKAGWVRFRWSRKVPDGVKSYRVTLDRARRWHIAFAAIPESVPGPGTGEVAGLDRGVNVSAALSTGEMLCVPRLSPRRRHRLSHLQRRLARAKLGSNRRAQVKLAIARLRAREADTCKDWCEKTSTDLARRFDVIRVEDLRIKNMTRSARGSVASPGKNVRQKAGLNREIMRSGWGRLVRRLEDKAPGRIEKINPAYTSQRCSACGHIAVESRKSQALFACVACNFACNADVNAARNIAAGHAVTARGGDGVARPANREPQHDGLLVA

SEQ ID NO: 28030 - protein, 386 aa, unknown
  TnpB Polypeptide
MKYIKHMKRTLKIKINPPKTEFLELMLICNSIFNRYTKWSRKSKTYSKSKAHTELYTFLRNKFPQINSALIQTVRDTALEAVKATKFKRKIKKKKYSSLRYDRRTFTIRGQQITLTGLNRRHKEILQIPDYYKEIFSSWICKSATLSYINGQFYINLTFETDSPKEVKGEVVGIDRGLYNLATLSDGTNVSSSPIRNVQRKYLYNRKKLQAKGTPSAKRLLKKMSGKEKRFNRDVNHVITKKISHLPYSTFVLEDLSSIRNQRRGKKINKWISSWPFFQFETFLTYKAEGLGKDVEYVDAYYTSRECSRCGNRNRHNRRKSHFQCSVCGYTNHADINAAINIRDNYILSTTEKSVEQGSVNNPYESLVIAIRNDSVIVDSNHSLRM

SEQ ID NO: 28031 - protein, 558 aa, unknown
  TnpB Polypeptide
LSDLGPVLFPDAFAAIGLKAHYERAELRFRWIGDEQVGVVIVGLELLQFAFETFADLSERVLQEFCDPWGHHFAPVFRDEHDMRMQFVDHMSAGTPIMSVFSHNHNYRPCDIVGCMRRSTRTQDDETWRVAVIPVRLSGADHRRAHEACHKAALLWNFLLAETRAYWGEHGSDPSDKELRHRLYEKRPDLRDGLHAHTIQGVLDGMNDAVATYRENRRQGNMDAHAPHRAKNYRPLDFTAGYGWRPANDGKHIALSFGRNHKRILVRMPNISDPRTNAPVPVERWGAMRLCWDRNKRQWSLHVSVPTGRPPQGDPNNVAAIDEGIINPMAVAVETDDAYEILVVNGRHARAVKHYRNTRIASLQEKLSRCVKGSKRWRKLDAKRRRIEAKTADALRNADHQTTCKVSDFLQEHDAGRIVAGDVRGIEQNTRKNETRRVRNRKDQRRRLSQWSRGRQESLLAHKTGMTIEHIDESWSSKTCPACQTRNHPNGRGYHCRNCGFTCNRDAVGAINILIRAKNGSYQPMDTNKTVHVKYLRATPIFQPEERREHGVIPGTGA

SEQ ID NO: 28032 - protein, 389 aa, unknown
  TnpB Polypeptide
VTAKKTGTQGRNAAQYTVIKVRLHPTAEQAVLMEKTFGCCRYLWNRMLSDVQEFYAATDLQYIPTPARYKKEAPFLKEVDSQALCAVHQNLRKAFLDFFRAPNSFGYPQFKTKKARKDSFTVYCREYRTGPSISLTGSGIQMPKLGLVRATVHRKPLHWWPLVSVTISKARSGKYFCAVVFKCGTQRPEQVLPTGDTTLGLNYSLSRFYVDSGGHSPDLPATAKAREKLARIQRKLSRMEPGSRNYEEQLQKLRLQHEHIANQRKGFVHKESRRIANAWDAVCVRETDLVELSQTLRQGGVMDLGFGMFRDCLRYKLERQGKRYIVVDHRAPTAKTCHECGCVNEQLSSREKRWTCPHCGKSVIRDVNAAKNLRDMGLGQLLNQETSAA

SEQ ID NO: 28033 - protein, 366 aa, unknown
  TnpB Polypeptide
VRTIQAYRFALDLTPGQERAVLAHAGAARVAHNWALARVKAVMDQRAAERSYGVPDDQLTPSLSWSLPALRKAWNAAKAQVAPWWAQCSKEAFNTGLDALARGLKGWADSRAGQRAGRRVGFPRFKARRRSTPSVRFTTGAIRVEPDRKHVVLPRLGRLKLHESARKLARRVEAGTARIMSATVRRDGRRWHVAFTVEVERAEQDPARPDSVVGVDVGIKHLAVLSTGALVDNPRHLTSAQTRLRALGRALARKTGPDRRTAQRPSRRWQRTAARLGRAHARVSNLRRDGLHKLTTRLARAYGTVVVEDLNVTGMLANRRLARHIADAGFAEIRRHLAYKTTWNGGRLLVADRWYPSSKPARAAAR

SEQ ID NO: 28034 - protein, 416 aa, Cyanobacteria sp.
MYGCQPVLIHAKKDIQAILEYLCSESNKVYNCALYYARQIYFKTNRLVGRAEICAEMARSKNRHFGAIYVSAAQQTCNSVAEALRSYRELTKLWQRRELIEKPKLPNYRHSGLFTVSYPKRWLNLTEQGVRIPLGTQVKAWFGIEEIFLPMPSNLDWASIKEVRILPRNGCFYAEFVYPVEAIEVQLDPDKVLGIDHGIDNWLTCVSNAGTSFIIDGLHLKSLNQWYNKRVATLKENQPQGFWSKQLSTITEKRNRQMRDAINKAARLVIDHGLEHGIGRIVFGWNPGQKDGATMGRKTNQKFVQIPTARLKTRIAQLCEQYKIKFIEHEEANTSAASFLDGDSLPAHGEKPEGWKESGRRVKRGLYRTAQNWYINADCNGAANIIRKVAATLGLDLSGVSRGALTSPLRVQLWAV

SEQ ID NO: 28035 - protein, 269 aa, unknown
  TnpB Polypeptide
MKHRAYKFRFYPTDEQAKLLAQTFGCVRFVYNTILRWRTDEYYQSKTKISYIQANARLTWLKKQPQFAFLNDVSCVPTQQVLRHQQTAFKNFFEGRTKYPTFKKKTHKQSAEFTKSAFKYTDGQLFIAKSKQPLNVRWSRHLPSKLSTITITKDCAGRYFVSCLCEFDNQILPKSDTAVGIDVGIKHMFVTDSGLKIDNPRLTAKYATKLAKAQKALSRKKLGSANRTKARMKVARIHAKILDCRLDNLHKLSRKLINDNQVICVETLL

SEQ ID NO: 28036 - protein, 408 aa, unknown
  TnpB Polypeptide
MEYSHRYPAYPTQEVAAELERHIDIHRQAYNYTLYEYENVDADDIGSAYKHHYRLPDWKDQFPVFSEVNSKALQRTVTRFYDNLSNLNDQKANGNKVGMLKWKSPREFQSLTFSQSGFELKNTSGRRATLWLSKIGDVNIRYHRDIPDGADIKEVTVKTETTGEWFISFGLETDDADLPEKPPVDSLDTPNSVGIDLGIRNYIHTSDGKTVDWLNLEDEYERLRREQRKLSRKETGSNNYEKQRREVAKVKRRIRRKVLDYQHKITTWLVKEYDAVFVEDLDVKGMLEQSHNAGNKQDAAWRQFITLLEYKSDLYGTHVVQVEARGTTKECASCGVETAKPIWVRDHSCPSCGFEADRDANAAMNVFQSGFSELGLGWPEDTPVETALSTDTTSVSAKRVVETGSLGA

SEQ ID NO: 28037 - protein, 409 aa, unknown
  TnpB Polypeptide
MRTAYQYRLRLTTTQQATIDHWLELARRQYNYRLAERFTWYEQNRCDINACPLICYLPELKDRPDFYSQKRDLVNSKKRFPEYKELPSHTLQDVIARVEKAFDRTLSGDSNGNRSGKPRFKGQRRFRSIAFPDPIKPEHISGKFIQLPKIGKLKMILHRPLPDGFKVKTATITKKVDGYYITLSLQDASVPVLTPDTPSMENTIGIDMGLKSFLVDDSGQEVEIPQYYRKSEKQLKRLQRSLSRKKKGSNRRKKAIKRVAKAHLKVSNTRKDFHYKAANKLLQQGKHIAHEKLNIKGIAKTRLAKSIHDVGWGQFLQILSIKAERAGLLAIAMNPNGTSQNCSGCGTKVPKQLKDRIHICPECGLTLDRDHNAAINIKYLAVGHSVSKAQVTSDAIAGVTEKPALYASA

SEQ ID NO: 28038 - protein, 422 aa, unknown
  TnpB Polypeptide
MQVAKSLMFKVSKKINMHKFLAIRDFVNMYQSIARIYSSYILENKLHEKLVDGITAKDLKNILHEKFYRQIKESFDVSSQTVQEIRDVVVEAYSSWAKLYKQFLDGRLDREPSLPKVERFTVRMNYPRVVSIFEHGKEFPFFFKVKLNGTDKRYAIPVECGEYQRKMLRDALNGKYKIGAVQLVKRDGWYYFIVPIKKEVVIEDKENVVGVDIGLRYQAVITVLYRDGKISDVEFIKYRRLLDKIRYLWKRIDWLKSQLPEGQRSSKQIRRLWRKIKRINDWIAHNVSKRIVKVAKENNAIIGIEDLRLLRPRKEKMRKDMNRELANWVHGKIRKYIIYKANWDGIPVRLIDARDTSKRCHICGAVGYRKGAIFSCREHSYTSNVDFNASVNIGIRAMFPNVWGIVNMPAPSRCKAPCVSEG

SEQ ID NO: 28039 - protein, 418 aa, Chloroflexi sp.
MNLTERLLVKPNNENYQQIKQACLFSKSLYNEATYLFRKSFFDEELLTWRQVDKILKYRSKNYNALPAAAAQALLRQMGDNWKSFWEANKDWKINPQKYKSRPKIASYSKNLKTFLHPFQSMKCKNGEVIFPKKMNMKNVKIRNGENQIIQEKEARLKQIRFVPHGHCFWIEVIYDNDINMKHEPIKKKDIKLDSDNVLGIDLGINNLLTMVTNIDALPPLLYKGKVIKSINQRFNKSKSYYQSKGNAAMIERLSIKRFCQINDYFHKASSFVINYCLENDIGRIIIGKNNGWKQDINIGRVNNQKFVFIPFEKLISQIEYKAKLVNIQVDINEESYTSKSDALALDILPVYRKNSTEKYEFLGRRVKRGLYKSSIDKIINADVNGAINILRKVIGDDFVKNLINKGFVFNPETISPK

SEQ ID NO: 28040 - protein, 396 aa, Robinsoniella sp.
MFTRGGRILLKSYKTEINPTPEQMQMILKTIGVCRFVYNFYLTCNRDAYEKEEKFISGMDFSKWLNNVWLKENPEYIWIKEVSSKSVKQSIMHADRSYKRFFRGQAGFPHFKKKGKSELKMYFVKTDAKVVIPCERHRIKIPTLGWVRLKEKNYLPTNPNTHLIKSGTVSYKAGRYYVSVLVDEKESVKPALGDFGLGIDLGVKNFAIVSNGKIYQNINKSVKLKGLERKLKREQRCLSRKYEDYKKRLGKGVTTKQNIQKQQLKVQKLYHRILCIRSDYINKCVSELVKTKPSYITIEDLNVSGMMKNRHLSKAIASQKFYEFRTKLEAKCRGNGIELRIVDRWYPSSRMCHACGCIRKDLKLSDRIYTCECGYHADRDCNASLNLRDAKTYKTA

SEQ ID NO: 28041 - protein, 375 aa, unknown
  TnpB Polypeptide
MQLSETIKLYMTKEQKALVAEAMDEYISTVNRLVSIAVNGTSISNYTTAHVHANLPSALINQCIRDAKSIVNKYKKKCRKAHIKNKNLKKQGSSITVKEPTVSVLKRPCCYINNQNFKIKEDCIEFPVFVNGKSKRVSIRISLTDRQKELFRTGKLGIMRIVYKGRKIVAQIVYSVAEGEYLDTGNVMGVDLGIKCPAVSYISDGNVTFYGNGRRNKYIRRHYQYLRKKLQKAKHIHAVKRISDKEQRIMKDIDHKISHDIIKTAVAHDVSVIKLERLANIRATTRTSRKNNHSLHNWSFYRLAKYIEYKAKLVGIKVEYINAAYTSQKCPCCGDIHHAKDRNYVCNCGFHTHRDLLGAINICNSTEICGNSIFA

SEQ ID NO: 28042 - protein, 376 aa, unknown
  TnpB Polypeptide
METLRQSTACFNAVAAYGWEHQQRNGVALHKATYYPLRATHPELPSQLVVSARTRANEALKSALTRVRQGRRAGCPTGVLVPIRYDARSYRLAEGAVSLASVAGRQLVPFATNPHAAGLLAQAIGSDSADLILRNGKLWLHVVLTLPDVPFSSTGAAVGVDLGLTRPAVTSEARFLGQKRWREIDRRSFRLKRSLQAKGTKSARRHLRKLGRRIARFRRDCDHVLSARIVRSVIPGTTVVVENLSDIRTRVKQRGRASRRRLHSWSFAQLRSFLEYKAEAAGCRVVGVDPRHTSQRCNACGHVARGNRDGARFSCRQCSAQANADLNAARNIRDRHLVGWGSAPAGGLSVKQPIAGDAVAAQHVSARKPPALAGGT

SEQ ID NO: 28043 - protein, 413 aa, Haloarcula sp.
LGHDSRPRDRRRQPREKHDSACRRQSTRRDGKLLRVRRLRQTQSHQGRHVSASCELRGGVQSVARRRRRRTFRISAKPYKNVKGVLKESDAHLSILKTVLESDEWKIGTAEALYHNDNAELHVNVTNTEQTVRDKQGSQTVIGVDVNEDNVALTALSEDGVEDSLVIDFPEIKFERHRYFTMRKCVQNAGKDSIHDTLEGREERFVRDRLHKVSRHIVEWSQQFEMPCIVFEDLKEMRDSIDYGTRMNRRLHYLPFSALQSSTSYKPLFGGFRPRGLTPSTPASGGRCAETQSVRIGTRSGSSADTVSIKITATVVQGQYRRERHREASELEYARYQQPSPGSEGATAGIGGRGRSNRDPADRSRLSGRWSSGSVRLNHGKPRATRGGSPCLQNSREIRGCTLFRIRCLLALG

SEQ ID NO: 28044 - protein, 384 aa, Acinetobacter sp.
MSRFIRGHVIQLLPNDKQATHFAQASGVARLSYNWALKEWQRQYKADKEYRDQCEYYGVEVDKKLLNKPSEGKIRKHLNSFKRSKYPFMLKVTKCAPQLAIKQLGNSFDRFFSGQSKYPRPRKKGVDDRFSLSNDQFRIKDRKISIPNLGWVKMTEDLRYQGKILSAKIFKQGGKWFASISVELNQAENLHPKTGVAIGVDLGVSNLATLSNGEVIPSSAPLKRQLAKLRRLTKSFSRKQKGSQNREKAKTKLSRLHYKISCLRKNHLHQVTSNLIKRFDVIAIEDLNVKGMVKNRKLSRAISDMGFHEFKRQLIYKAAQHGKSILSVGRFFPSSKMCSHCGELNQNLTLSMRKWRCSCKTLHDRDINAAINILKHADKELVAT

SEQ ID NO: 28045 - protein, 386 aa, unknown
  TnpB Polypeptide
VPRKSKIPCGDGQVVQYNTIKARLYPTEVQAELFENTFGCCRYIWNHMLADQQRFYLETDKHFIPTPAKYKKEAPFLKEVDNQALIQEHNKLSQAFRVFFKDPSHFGYPNFKKKKTDRDSFTACNHVFQSGPTIYTTRDGVRMTKAGIVKAKFSRRPQAWWKLKRITVEKTRSGKYYCYILYEYAARQPEPVTPTPETTIGLKYSLSHFYVADDGSMADPPRWLRQAQEKLAKIQRRLCRMQSGSKNYQEAVQQYRLLHEHIANQRRDFIHKESRRIANAWDAVCVRADAFEDLTKAMTHGTMMDSGYGMFRECLRYKLERQGKTLIVVDRYQPTTRTCAACGLVMDCEVSYKKARWTCPKCGAIHNREINAAKNIKTAGLAQICA

SEQ ID NO: 28046 - protein, 405 aa, unknown
  TnpB Polypeptide
MKRLQAFKYELMPNGEAVRNMRRYAGARRFVYNKALALQIERREQGLKKLSYVDLCKLLTQWRNGTETPWLADSPVHTLQQGLKDLERAYKNFFEKRAAFARFKKKGLGDSFRYPDAKQIKLDQANSRIFLPKLGWLRYRNSRTVLGAVRNVTLSLAAGKWFVSIQTEREVEQPVPETTSAVGIDVGIARFATLSDGAYLAPLNSFRKHEQRLARYQRRMSRKVKFSKNWRKAKARIQRLHARIGNVRRDYLHKASHAISQNHALVCIEDLQIRNMARSASGTPDRPGQNVRAKSGLNKSILDQGWGEFRRQLEYKMAWNDGYLIAVPPQYTSRTCPCCRHEAEANRKTQSKFLCLNCGYEHHADVVGAINVLERGQRLFACGGKAQPGHPMKQEPTEATAHVTA

SEQ ID NO: 28047 - protein, 560 aa, unknown
  TnpB Polypeptide
MKFRDIKECKGTYGLSRMALVNYEKKGTIKPLTGKKSESDFVTVECLLAFDKDEDKERVLSTVRKFSSMIRFAYKRLLERDERKELKKLLSRKYGINTRYSDDAILLAKQNLDSCVERGQNPKKLVFGSRTLFEQLNKKHLTGKRREELRQKWEERRYGILYSRGDKSLQGNVNLRLVNLNNQWHLRINLGNGEYVWAKVIRTARRKTDKWTSFVSSLEHAEKTGDWFPYTVRLKLRNGKVYAQFSKEEKFPEVTITKDNGVIGIDINAYPFHLALVHTTKDGNLEKYERLSLDNLLEGNSEKREYLSWQTAHHVIGIAKREGKAIVVENLEKLPKGKRGDGLPKLRQKLQKWVYKGLLQKIEIVAKRNGIQVIKVNPAYTSIIGKLKYAPLYNIDKDTAGAYVIARRGLGFKERLPKNYRKLLKDTEFLFYSVARVEDRIAKLRKEIEAEKNEYKRNKLRSDLRRLKGELKLLIKFLSGSGESESATQQTVNRKMERVRGLTHVRQKSWQVLSVALAFSCLESFRDFSPLKRVILTRDWVGAAKRNGLVPPYLVKGRLY

SEQ ID NO: 28048 - protein, 221 aa, Klebsiella sp.
VPLQQVLRHQQAGFSNFFAGRAKYPTFKSKRHKQAATLTGAAFKYGDGKLCKAPLEVRWSRSLQPVPSTVTVSRDAAGRYFVSCLCKFEPVSLPITASTVGIDVGLKDLFVTDTGFKSGNPRHTAKYAARLAQLQRRLSKKPRGSKNRTKARLKVARLHAIIADCRMDALHKATRKLINENQVVCIESLRVKNMIRNPSLSRAIADAGWGEFTRQLQYKGE

SEQ ID NO: 28049 - protein, 358 aa, unknown
  TnpB Polypeptide
MYPNKSQKELLSNTFGCVRVMWNICVNSFNSYNKETNPNPKYPTKSDLINDRPWLNEVSAATLQQKQRDFIEFSKQYFNKDRKKKFGKPNFKNKHGDQSFRLPYPKFKLSDSKIRLEKIGWIRIVIDRPIPDNARFISCTVSKNRSDQYFVSVLVETEQVYKRNTGKTVGVDMGVKTLATLSDGKIVNNPHFLRENQAKLKGMQRHLSRKKLGSNRRRKCKLKVARLHRDIANKRSWYIHNITTMLVDNYDVVCIEDLNTSGMLKNHKLAGSISDASFSMFRSQLKYKCLWYGKKLIVIDRFYPSSKTCSHCGWKNNELKLSDRVFKCENCGLEIDRDLNAAINIQAVGVEAAQRTQS

SEQ ID NO: 28050 - protein, 392 aa, Marinomonas sp.
LLKATKVRIYPTAEQADFLNQQFGAVRFVWNKALGLKNHFYKVKHQNLSPLKDLKPLLASGKKSRKYAWLKQYDSIALQQAVIHLDKAFKNFFDPKLASRFPRFKSKHGKQSSYHCTSISVGSDWIKIPKCTLIKAKVHRLLEGKVKSITLTRTATGKYFASVLTEDQQDNAVLPKEIESNQITGIDIGLTYFAILDSGEKIANPRHLKKSEANLRRKQKALSRAKKGSKGREKARLLVAKAHERVANARNDFQHKLSKQIIDENQAIVIETLKVKNMLKNHKLAKHISDASWSSFFVKLDYKAKRSGCHLVKIDQWYASSKTCHCCGHKVEEMPLSVRKWDCPNCQAKDIDRDINAAMNVRAQGILKLKAEGLSVSAKGGKRKSSVLLAAA

SEQ ID NO: 28051 - protein, 422 aa, Nodularia sp.
MSNYGCQQHLIHPNKDLSAVLEFLCGESAKLSNCGTYYARQLYFKAGKIPGKYDLHKLFKSNVHFQAMYSHVAQQCLTTVAESFKSFIGLLKGIKEGTVEQCPRLPGYRKGGLALVTYPKADVKLKEGLLRFPLGSKVKTWFGLDAFYLPMPSNLEFKSIKELRILPRNKCFYIEYIYKQPDIIVELDKSRALGIDHGINNWLTCVSNVGTSFIIDGKHLKSMNQWYNKQIATIKENKTQGFWNDKLAHITEKRHRQARDAINKAARLVINHCLNNNIGTIVFGWNKKQKDNADMGKINNQKFVQIPSAKLKNRIEQLCTQYKIQFVETEESYTSKASFLDSDMLPTFRAKPEGWQSSGKRVNRGLFRTAKNILLNADANGAANILVKVAIKLGLNLSGISRVSLIAPLKVRLWTIQESPGF

SEQ ID NO: 28052 - protein, 547 aa, Coleofasciculus sp.
LESYCAKQGWEFEIIQDLGSGMNYKKKGLYGSRSHKHKKNSDRTEGGSQKAMTTITYCKGLPTPADELNPIGFTDLEMFLTSLSDIFYQATVETVNHLLNKEIKFNQSSWNSLMQEKYGISKRYANGVISLAKGKTASATYCRKRQIKQLKSRVQSGKDWVARATKKINLARKFYGKKNWQSSKNGCNFPLSSNLKTRKTNWHHLRQGLHQKKRYIHRLQNQIKHLLRAKIRVKVSRGSVFIVGSKDESYGNQTCQWSGDTLKLRVPNCLEAKFGKYVTSKIGSFSRKINRLPNSGAKTWHFYRKDNRWVVAVQFTPAAVEKVSREIQYGALGIDLNPSSIGWAYVDGQGNLRAGGTIPFQTGLPKGKQDAQLVDVCLKLAALARNFACPVLCESLDFSTKKAQLRERGKKYARMLSAWAYSRFYQILSSILSNRGITIKLCNPAYTSLIGCVKYSRMYGLSSDVAAALAIARRGMNLSERLPRSVSAYLGVNPRKHVWSALYQFNNFIGRCPVVNRRHDYYSVSNWEPLVKADIEQQCRVSAKRKR

SEQ ID NO: 28053 - protein, 420 aa, Coleofasciculus sp.
MILTYCYRIKPSAAQVATMLYTLELLRRHWNYCLGQRLDWLRRTRCQIDRCSIVSEPIGEIPATVNYYTQQSDLKQTKVLFPDYKNIWAESQQVNLQRLNKAWERWLFPDKSGKRGGRPKFKKVGELRSFVYPRVNCPKAGAHLNHGMLKLSKIGKMPVIMHRPIPGGFTLKTCTIVHKADGWYCSISIQDETVPEPMLLEEVKTAVGIDVGLKEFLTTSEGEAVPIQQAYRKTQPHLARQQRKLARKEKGSNRANKQKNKIARIHQRIGRIRENFHYNTAHNLVKKYDLIAVEDLNIKGLARTRLSKSILDAAWGRFITILDAVAVKCGVRVIKVSPHGTSQNCSNCGVKVPKTLSIRLHECHKCGCSMDRDENAARNILDRALNEVGLILSAHRGLGKAQPVKCEALSGRKSVQLSLF

SEQ ID NO: 28054 - protein, 452 aa, Enterococcus sp.
MGDNKNNRIKMVSEKIVSHTTLLDKTYEIYNQALTYILKVMFQEFPLTYDESIKTTTNVVEKLIHHTAKNPQPKYEDFNMLFPKYPSYFRRATIASAYGKWSSWRSNYLNWEKERLEAIDNNKKFTKKAPTPQFEHTDFPVFYKGNMYKQIAEGYEIKIYKNNDWVWEKVVVSAKTDLIRRGITDWKQCNPKLIKRGSKYFLSFAYEKEIKLHKLKESDTRILAIDLGLTNSAVCCVMESDGTVLDRLFIKQSKEKDHLFHLTNQLKKAQRQTRGAKCPRYWNRIKGLQRQMTNDTAHQIIEFATKYNVNTIVFEYLGQMRIPKGFYGARRLRFKLHYWRKTGIQNKVTEMAHYLGMRISRVLARGTSMYAYDGTGKVSRSNRKDLCEFPEGKKYHADLNASYNIGARFFIRATIKPLSEKRRLALGAKVPEVLVRTEQTLSTLYKLQTCKA

SEQ ID NO: 28055 - protein, 535 aa, Nocardiopsis sp.
LVSAIRKQNSTNPLTCGRHHGRPLRQQTPRSPPPLLPLLSVSAPVFRPEVNRAWLPRLFVPGGAFLVLARRSAAHRSGGTFSRGLRGFEPHALPGRGQELTLARAGGAGRDGLPPSGPGFFLVFLRPRRPWSYGCSYAASVPVSPLPGRAPVHGAGPFVRVCAGGLQRRAGTDQAGEGFQQAARFCQAPDRRGSLCAGAQECRVVQGAADRGEEDPRAGLAGRGVGGPAPAGAAGCGPGLESARGFQDRSTQGAQGRCAPVQVAPRPLPVGPVHQQRRLEDHRPGKTVPARPRGGEGGVVAQPSLGPVVGDRPQGRRRPVLRLLRGRNRGRAVAGDHARGRYRPRVEALRGALHRGEGHQPRFLRRAEKKLKKAQRALSRKTKGSANKEKARRSLARAHVRVADARKDFHHQLSTRITRENQAVSVEDLAVKALGRTRLAKSVHDAGWSQFVNMLQYKAARCGRTFTKVDRFLASSQTCSKCWVVDGPKPLHVRTWACPVCHTLHDRDVNAARIVLAAGRADRQNACGGTVRPAA

SEQ ID NO: 28056 - protein, 508 aa, unknown
  TnpB Polypeptide
VVPMGRASTASYVLTCELLSNAHERKILDKKLNIGRQIYNSCLGEALKRLRKVQADKEYREVLGALMEFKNAKSKEDKAEKKRLSIRLSDIERSYGYSEYALHNFVKEGQKHFLDTKTVTKAGKPKQGLHIGSLEAQVLATRAFRAVKKLHYHEAEKVYFKRYGESISIENKNNVTGLRYVDGHVLWGELKLSLKVKRNDLYMQYALMDKTKYIRILKREIRGKERFFVQLIQEGIPPVKERKKGTGGVGLDIGPSTIAMVSDEAVELRELAPGIVADSKKLRRAERAMDRSKRATNPDNFDQNGVVKKGSRNWIYSNRYQKLRARRKELHRKIAAGRKQSHEILANEILAQGDDIRVETMRFQGLQKRAKETTRNQKNGKINKKKRFGKSIGNHAPAMFLSILERKLAYEGLELKKVDTFELKASQFNHVTGEYQKKLLSERWNDIGGRKIQRDLYSAFLIGNTNKDLCSVNVEECNRRWEVFVRLHDREVERVRKSGSKALGWYVA

SEQ ID NO: 28057 - protein, 377 aa, Paraburkholderia sp.
MGIKRAYKFRFYPTPDQQAVLARTFGCARFAYNYMLRLRTDAWYQRQERVGYHETSAALTALKRTPEHAWLNEVSSVPVQQALRHLQSAFANFFAKRARYPNFRRKEGIQSAEYTTSAFKWDGASLTLAKMAAPLAIRWSRTIPKGAKVTTATVSKDPSGRYHVSLLCDDAVSVKPEVSGKVGIDLGLTHFAILSTGEKITAPKMLRKNEGKLAKLERRLAKKQKGSANRRKAKLKVARMHARIADSRKDFLHKLSTRLINENQVIAVESLAVSNMQKNRCLAKAISDASWSEFIRQLQYKAQWYGRELVGIDKWYPSSKRCSDCGHTVVKLPLNVRAWTCPECGNNHDRDINAARNVLAAGLAALAHGESVSPMSL

SEQ ID NO: 28058 - protein, 402 aa, Escherichia sp.
VKRLQAFKFQLRPGGQQECEMRRFAGACRFVFNRALARQNENHEAGNKYIPYGKMASWLVEWKNATETQWLKDSPSQPLQQSLKDLERAYKNFFRKRAAFPRFKKRGQNDAFRYPQGVKLDQENSRIFLPKLGWMRYRNSRQVTGVVKNVTVSQSCGKWYISIQTESEVSTPVHPSASMVGLDAGVAKLATLSDGTVFEPVNSFQKNQKTLARLQRQLSRRVKFSNNWQKQKRKIQRLHSRIAYIRRDYLHKVTTTVSKNHAMIVIEDLKVSNMSKSAAGTVSQPGRNVRAKSGLNRSILDQGWYEMRRQLEYKQLWSGGQVLAVPPAYTSQRCACCGHTAKENRLSQSQFRCQVCGYTANADVNGARNILAAGHAVLACGEMVQSGRSLKQEPTEMIQATA

SEQ ID NO: 28059 - protein, 511 aa, Sulfobacillus sp.
MSKKSKSKTPSFVCEVPLHITRRQERTLEARFEAGRQMYNALLGEARKRLSLVRQSLWYTKAKKSTDKKERQAHFSAARHAHGFSVYALEAVADEMRRTTWLGDHLDSHVVQKLAKRAFEAVQKVAWGQAKTVRFKGQRGLHSLEGKTNAACIRWRTDRVVWKGLELPMIKGAEKDPVIQHGLSSRIKYVRLIRRNIRGKTRYAAQLVCEGVPSIKVNEQGEPMHPIGKETVGLDIGPSTIAIVGDTKATLMQFADEVVRDHKTIRRLQRKQDRQRRANNPDCYDETGRAIKGKPPIKKSRHQQKTDVQLQELYRREAAHRNTLHGQLANQVIAMGVQVKTEKLSYKALQKRYGRSISVRAPKLFLSILTRKAERAGGKVEEFSTYRTALSQVCLCGQKHKKKLSERVHVCDCGVVMQRDLFSAYLAKHVENERLQVTDAHEHWPGAEPLLRTAWQQAYNQPASGRPGPSSFGTFRSQSRSSEKESLPEHETRDGVAMAQATVRACESAKV

SEQ ID NO: 28060 - protein, 433 aa, unknown
  TnpB Polypeptide
VPRETGQLDQRAARAARLPHSYDHLFDTVGVRTAYRCRAYPGEQQQQVLNRTFGCVRVVWNRTLAARHARWQAERTSTSYAQTDAALTLMKKDPDLAFLNEVSSVPLQQALRHQHQAFTAFFARRARCPRFKSRRGRQAAHYTRSAFTMRGGQLRLAKTTAPLRFTWSWPDVDLAALDPTMVIISREPDGRWYVTFTIDTHTPEPLEPAGHAAGVDLGVTDFAVTSDGQKIPNPRHLARKARNLARYQRRLARCRKGSANRAKATAKVARAHRKVRDARRDFLHRASTGLVRSADVIVIEDLNVSGMIRNRHLARAISDCGWGEFRRQLEYKCERYGRDLVVISRWYPSSKTCSACGHLLAELSLGTRQWTCPSCGARHDRDINAAKNILAAGQAVTACGAGVRHPGTSRVRPAVKQEPRPVTARIPVRQGGE

SEQ ID NO: 28061 - protein, 311 aa, Okeania sp.
MNGEYIIMIRCHNYIQILIVYPVYILGKINYNNQCSQGVNKARVLVIEAKLKGSQNQYKVLDEMILTGQFIRNSCLRYWMDNKDVKRNDLQKLCSQLAKDTNFPWAKKLNSQARQASADRAWQSIQRFYKNCRLKLPGKKGYPKFPSECCANKKFTRSIEYKTTGYKLSPDRKKIEFKDGFKAGVFELWTSRDLAWYSKQQISRVRVVRRADGYYCQFLINVERKETHNFEGNVVGIDLGLNAFYTDSNGDAVENPKYLRKLEKRLKKLQGRVSRRHEKGKKPQSNNYHKARIQLARVNLKISRQSYCTMQ

SEQ ID NO: 28062 - protein, 421 aa, unknown
  TnpB Polypeptide
MDKEKAMQLVEQHVIRRSDPRFAVIDEAAFKAKNLYNAANYEYRQAFIHQGKYLAYGEVQKRMQSHEAYKALPAKVSQQILMILGRNWKAFREALAAYYEDPSKFLGRPKPPKYKHKTKGRNLLVYTLQALSGGQSKRGIQRIVQPSGLPIEVKTQQKNINQVRIIPRNGYYVVEVIYSKEPVQAQVDSSFCVAIDLGVTNLAAITSNRAGFIPRLVNGRPLKAINQWYNKRMKELVLCLPKEDRERVTKQMQPITTRRYRRVNHYLHTASKAIIDLLVKEGVGTIIIGKNPLWKQEVCMGRRNNQNFVQIPHARFIDMLTYKAVLAGIQVEIQEESYTSQASFLDLDPLPTYNPDETTEYSFSGKRIGKRDRLYRAKDGRIICADVNGSYNILRKCKPDAFNAEGIAAYVVQPLRLKIAV

SEQ ID NO: 28063 - protein, 425 aa, Halorientalis sp.
MIDAQALVKTLDFQLDIQSDNEGLLYDATREARWAYNETIRLAKEGVDWDAIPDRVADDADLVKNTTQRVVAKALGAMENYYEYDDFGQPSHTKGGTYPLRANYEEGYNLSLTDNGDVSFRISAKPYKHVKGVLEGDNAHLDVLKTALESDEWKIGTAEALFHNDNPELHVNVTNTKQTVRDKQDSRTVVGVDVNEDNVALTALSEDGIEDSLVIDFPEIKFERHRYFTMRKRVQNAGKQSMHDTLEGREERFVRDRLHKVSRHIVEWSRQFKTPCIVFEDLKEMRDSIDYGTRMNRRLHHLPFRALQFYTSYKASFKGIPTGWIDPYKTSQRCSLCGHAERANRNKKRFKCRSCGHQDHSDRGASVNIAVKGIEKHQDWNVPALNSLPQVRKVRRRASGAVDAPTVTHDAVRGYQTDGIVGVSD

SEQ ID NO: 28064 - protein, 500 aa, Halorientalis sp.
LAASTVSLYAEQAQYHGLQAVDTRRHSVTHSTDFNRDGYSTVLKPTLYKRIEYKRLYRRFTMLEVHRTHRAKILNYSQVEDSLDRHGWSASKLWNVANYHSRDVWEETGEIPDHEELKDELKTHPKYKGLHSQSSQRVLEELAEAFNSWYSSDDERDNPPGYRKENYYDQQGRRVHEEHPRSTVTWKQNGIRHDTKNNRVRLSKGADHKEHPRAWEYILVEYETRPGVEVDNLQQVRSIYDQQNERWELHLVCKDELETPNAPGNETAGIDLGISNFAAVAYSTEDADLYPGNRLKQDGYYFPKEIAKCDDSSGERATRLHAKWSERRTHFFHSLAKHIVERCVERCVGRINLGKLNGVREDENGGSKNWGRHGNLDLHGWAFDRFTSILEYKAKVEGIEVVEVSERDTSKTCCVCGREDDSQRVERGLYVCESCDAAFNADVNGAENIRLEINNTESNSESSGQLSGDKSTGWLAQPAVHLYDLSCGFQPQTEVVDCKP

SEQ ID NO: 28065 - protein, 656 aa, unknown
  TnpB Polypeptide
MESSGKRTRGPNRQTPWSRNPDDGVSVLRLALDTSNPQQRRRIEGMFDAAFSLRRALQHDARGRSRAYWAAPHERARGAAAARERLGLSRKAFEKAAYAHLDAAPHLRRFATKALAMHLADSVWEATERHLFVDASGRRQGRIRIGRRGDFTRLPGRARSHRTANKWETFRLHGTLAGHRAAHTDRDGRFVQPRRMRPVNSDGWWTYDGPLAIVFTGLADGTLVLPVRLPTSPSNQPMLDHHLADPSRWHKVDIVRRRDRRGTWRYEAHLMVLAQPYVSPATAARRADAAIAAMDRTAGIDVNVSNVTVASHQAGSDVRLTRIERDEPQKQRDRGRTRRERCRQRDLDRSRRAMNSAQYKLSKRQAKRVRRLAEAGLPPVETIPMGPRNARSDGVPLQAYRRDQLSNRFRRTRAAQAADAAAAARVQRDRARETAGEVVATHGYRFVVEDCNLATWSRAWGGALAAFAPGILLAAIDREASAVAALAGGRGGVERAATRTTALSQHCPCGARVDKRLADRVHRCPACRLSGDRDAMAAVLASFVVFDRLGDSSSARVDYDAAANALPAIRRALDRSFWGWQDTLSESTDLSARDGSFIAWQTSSPDFVVVARRNVGNAPGPTLNETSSRWTTSERTRVQTNLSGRYDLRSYLRGTS

SEQ ID NO: 28066 - protein, 385 aa, Streptomyces sp.
MKIVTQVKLMPDAAQASALERTLGTVNDAANWVSEVAFEHGVPREYELRNHTYAELKARGLGAQAAQHVIKKVRDSYTTLKANIRAGNLGKDGSKRRRRAESKPVTFRPEAAQPYDDRCLSWQYDQRTVSIWTVDGRVKNIRFVCSADALTMLQAHRQGESDLIERDGVFYLVATCDVPEAQQYEPDGFIGVDLGIENIATTSLGYLAAGRGLNRYRKRQLALRAKLQKKHTNSAKRRLKARARKEARHAANQNHIISKTIVTEAERTGRGLSLEELKGIRNRVRLRKPQRVALHSWAFAQLGDFIVYKAKRAGVPLVFVDPAYTSQTCAECGHIDKRNRVDQELFICRGCGVVAHADRNASHNIATRGGSVWNAGRESRVPATP

SEQ ID NO: 28067 - protein, 407 aa, Streptomyces sp.
MQLRYSFRLYPDIDQRTALAQAFGCARVVFNDAVRAREDARKAGAAFPTAGDLSRELITEGKRTVERSWLGEVSAAVLQQALRDAEAAYRNFFASLRGTRKGARTGAPRFKSRKDKRQSIRFTANARWSITGSGRLNLPKIGAVKVKWSRALPTAPSSVTVIKDAAGRYFASFVIDTNPADDAHRMPDSDQTVGIDLGLTHFAVLSDGTKVDSPRFLRRAEKKLKRAQRELSRKQKGSKNREKAGLKAARAHAQVADLRREFHHQLSTQLIRENQAVGVEDLAVKALARTRLAKSVQDAGWARFVAMLEYKAVRYGRTLVKIGRFEPTSQTCSACGVKDGPKPLHIREWTCPACGTVHDRDHNAAKNVKTAAGLSVAACGAQVRPGLVPAQRDEAGSHGFSPEPRAV

SEQ ID NO: 28068 - protein, 347 aa, Streptomyces sp.
LCPTILVGRLSGVRADLVPDDLWERVTPLLPPAPERRHCHPGRLRVPDRAALAGIIYVLRTGVAWRDVPAQAMGCSGVTAWRRLRDWTEAGVWPRLHAALLTELRRAAQDAAGRWFVSLLCDDPSVQPLPATGQAIGVDVGLDHLLTLSTGEKIANPRHERRDRAALARQQRRLAKKEKGSANRARARLKVARIHARIADRRRDTLHKLTTRLVRENQTIVIEDLTVRNMVKNHRLARAISDAAWSEFRSLLEYKAQWYGREVIAVDRWFPSSRLCSACGTLRDTMPLNVRTWTCDCGVTHDRDVNAAHNLLAAGLAVTVCGAGVRPQRSTPDRRSATKQKPSRREP

SEQ ID NO: 28069 - protein, 241 aa, Streptomyces sp.
LDTHVKRAFKYRFCPTDAQAVELSRTFGCVRKVYNMALAARTEAWTRQERVSYHQTSAMLTAWKKTEELAYLNEVSSVPLQQARRHLQPAFTHFFGRRARYPRFKSRKTSRKSAEYTTSAFRFRDGALTLAKVAEPLAVVWSRPLPEGAKPSTVTVSQDSAGRWFVSLLCEDPGVKPLPARGNAVGVDVGLDHLLTLSAGEKIANPRHERRDRAALAWEQRRLARKEKGPAEGREDPCADR

SEQ ID NO: 28070 - protein, 397 aa, Streptomyces sp.
VTTHVKRAFKFRFYPTDAQAAELSRTFGCVRKVYNMALAARTEAWARQERINYNQTSAMLTEWKKTEELAYLGEVSSVPLQQTLRHLQGALTNFFAKRARYPRFKSKRTSRASAEYTSSAFRLREGKLTLAKMAEPLDIRWSRPLPEGSMPTTVTVSRDGAGRWFVSLLCEDPAVRPLPANSDAVGIDVGLSHLLTLSTGEKIANPRHERRDRVRLAKAQRELSRKAKGSANRAKARVKVARVHARITDRRRDMLHKLTTRLVRENQTLVFEDLTVRNMVKNRTLARAISDAAWSQLRSMLEYKAVWYGREVIAVDRFFPSSRLCSHCGALAERMPLSVRTWTCVCGTTHDRDVNAANNLLAAGLAVSVWGAGVRPQRESSRTGQSAMKQKFLQREP

SEQ ID NO: 28071 - protein, 416 aa, Colwellia sp.
MKKTLRYNYRLKPTAEQEAKLIEFGSYARGLWNLLLSENMRRYRYDKTFLFYHEMAGLIRDLKKFEEFIWLKAFDSAASQQVARDLETALKNSFSKGRLQKFPTFKVTFKQKKLHDDSFRCVNNSNCIRIEKGNVSLPKIGKVPIVLHRKLVSKIKTATVQLKHGKWYISLTQEVECKSAKQVVSSLVGYDINSQHTVVGSDGRYEKNPKFLKKSAIQLKQIQVQLSRRNKGSKRWQKSKTRLNKLHGKISRQRLAFAHLLSFSIAKTSDIIVFEDLNVKGMQQFNGQMVNDNVMGLITNLTKYKAELNGAVYHEIGRFVKSSGICHECQHQHKFDLSVREFTCEACGVLQCRDLAAAKSVADTGEKDLMASGIVARALPKFQQKSPSKTKVFERSKFGVGSEKKEAAQFRFAEAP

SEQ ID NO: 28072 - protein, 477 aa, unknown
  TnpB Polypeptide
MTTKRLAWYNYSMKTTSTYKTKILYYNEIFSQTLSVYNEAVSYLIDVVYQNRADIFALNGKKQNNYLERLCIKTKKNPDPPYDFSKRFYKFPSYYRRAAMQFALGHVQSYLTKLYAWAKSGNHKNKPGLQAKHRAFPVLYNAQSFKRVDDYTVQIKILHQNDWVWLNVNLKPRDVSYIKRHCTQKASKAPTLVKKGKCWYLHTPYTEQVVLSGNKSIPTKIAAVDLGVNSSAVCSIMHADGTVSGRKFINQPEEKDRLSHLLGQIKKSQTKGAVRNKRLWALANNKNREIAVRTASAIVEFAVKNKAEVIVLEHLDMHGKKKGSNKQRLQLWRNKEVVSRVTHKAHQTGIRVSTINARNSSKLAFDGSGKVKRDSANASICVFSSGKQYNCDLSASYNIGARYFVRETIKSLPETVELAVLAKVPELAKRTTCTLSSLISLNAELNALLLPDSEFCALRTTANSLPKAGEAPSKLLA

SEQ ID NO: 28073 - protein, 366 aa, unknown
  TnpB Polypeptide
MEKAYKFRIYPNKKQKEILAKTFGCCRFVYNHYLANKIALYKTSNTTLTYNQCCSDLTQLKKKLIWLKEVDKFSLQNSLKDLDNAYQKFFKEHTGFPKFKSKKTHRYSYRTSFTNNNIEFCNKHIKLPKLKMVKIRDKRIPQGRILNATISQEPSGKYYVSLCCTDVEMKALEKTGSMIGLDLGIKEFCATSDGEKVENPRYLKKSLSKLVKLQRELSRKTKGGSNRNKARIKVARQFEKISNQRKDFLQKLSTELIRNNDIICIEDLQVKNMIKNHKLAQAISDVSWSEFVRQLKYKASWYNKRVIKVDKFYASSQICSVCGYVNKEIKNLSVREWNCPSCNTHHDRDVNAAINILNEGMKILAI

SEQ ID NO: 28074 - protein, 422 aa, Polaromonas sp.
MLRAYRFQLRCKPEQEKALRRSAGCARWIWNAAIAEQRRRYAAGEKYAGYAEMCKWLTTWRNAPETIWLSEAPIPPQQQALKRLHEAYQRFFAKAGGYPSFKRRGEEPGLRFPAAAHFQIDQPNQRIKVMKLGWLRIRQSQVIDGTPKNLSLSKEGARWYVSIQVELPDVLPAAGLDPSLAIDVGLTVFAATSAGVKIKPLLALRRQARYVRRAQKSVSRKVKGSANRKKAVYKLGDLHRRIARQREDWLHKLTTELADRHPIIALEDLRIKNMSASAKGTKDAPGKNIRQKAGLNRSILDAAWGEFGRQLQYKLQWRGGQLVLVEPAYSSQTCAACGHVAAENRKSQALFKCVACGHAANADLNAAQVLLQRAKEQWAAGRAAQAGESSPATACGEVVRHRPARKRSDAASVKQEPSDVLT

SEQ ID NO: 28075 - protein, 446 aa, Kitasatospora sp.
MFPSISTGWLRIVARVQLRYGFRLYPSAGQRASLARAFGCARVVYNDALRARETARNESMPFPRISDLSKRLITEAKKTPERAWLGEVSAVVLQQSLRDLDTAYRNFFEGLRGKRPRTGAPRCKSRKGTRQAVRFTANACWSITAGGKLRLPKIGDVKVKWSRTLPSTPSTVTVVKDSAGRYFASFVVETGPQEVLPKTDAVVGIDLGLGHFAVLSDGRKIDNPRFLRRAEKKLKKAQRALSRKEKGSRNRGKARLKVARAYVRVADVRRDFHHRLSTELIRENQAVAVEDLAVKGLARTRLAKSVHDAGWSAFVDMLEYKAARYGRQFIRIGRFEPTSQVCSHCGVKDGPKLLQVREWTCRACGNVLDRDVNAAVNVAKAAGLAVSACGAQVRRAPVPAQRGEAGTHPKRSSVRWEQAGTSGRQTGEDVKPGTWPAIAPATPPTA

SEQ ID NO: 28076 - protein, 325 aa, Methanogenium sp.
MIVSYKYRAYPGPVAETQLNVALDTCRWLYNKLLEECNEARACGVPLKKKETQARIVTLKDENPALKEVYSKVLQMVNYTVWSNIAALSQTKQRGRKVGKLRFRSAFRYRTLNYNQSGFRIDREHNSITFSKIGTVRVRMHRPYIGTVKGILITRSGDGWYVIIQAEQEVSETKQCGRSVGIDVGLNAYCVDSDGRVVENPRFYEHSLGRIKKLQQSVARKNRFSKNWKKAKSRLDKVYEHISNQRNDFLHKLSRQYVDTYATICVENLDVRGLKEKDNNTGMHRSIHSVAWGRFFSYLSYKAESAGTKLIKVNPKNTTQMCSNC

SEQ ID NO: 28077 - protein, 405 aa, Moorea sp.
MLIYEMKLEGTKQQYGRLDEAIRTGRFIRNSIIRAWINREVNSRNEAYKYCKVLADNPEFPWAKQLNSQARQAHAERAWAAIERFFLNCKAKIKGKKGYPKFKKYQVRASVEYKTSGWKLSNDRKYLTFSDKFQAGTFRLWGSRDLHYYQLKQIKRVRVVRRHDGYYVQFLINHSRKETKKLCNKQIGIDVGLNHFYTDSFGNKVDNPRFLRKGERRIKKLQRRLSRTEKGSSNRTKARNRLGRAHLKVSRRRNDWVCKLAQRVIQSNDLVAIENLKVRNMVKNHCLAKSINDAAWYKFREWLEYFGSIYGVKVIAVDPKYTSQNCSSCGEKVVKTLSTRTHNCPHCSYIGDRDENAAINILSAALEQLKTTLGHRESHASGENPLCLAVETPLSKGTRRKRKPS

SEQ ID NO: 28078 - protein, 421 aa, Streptomyces sp.
VTLHVKRAFKYRFYPTDEQEAELARTFGCVRLVYNKALEERTRAWRGEQRRMTYVQSSASLTEWKRAGELAFLRDVSSVPLQQALRHLQTAFTNFFAQRAKYPRYKSRKKSRASAEYTRSAFTWRGGRLTLAKMTAPLDIRWSRPLPDDTEPTTVTVSRDSAGRWFVSMLCSDRVAPAAVTADAVGIDAGITSLVALSTGEKVSNPRYERRDRGRLAKAQRQLSRRAKGSANREKARRRVARVHARISDRRKDFLHKLSTRLVRENQTVVIEDLAVRSLIKNHSLARAISDASWAQLRSMLEYKCAWYGRELVVIDRCFPSSKLCGACGIVRESLLLSTREWTCRCGTVHDRDVNAARNILAAGLAASACGGDVRPQRESSRTGRSSMKQESRRATVGLPRLRAGEDAKPCVVPLSGTSQV

SEQ ID NO: 28079 - protein, 442 aa, unknown
  TnpB Polypeptide
MRTVSSYGVEIRKQNIPVRQTMEIYRQAVSYLTEIYAQVWEELRKIPETKKRFNTAEHMVHMTKKNTARFDFDLRFPKMPSYLRRSAIQHALGSVSSYETRLEQWTKTGKLTGKPRLSCENHAMPVFYRDVMYREGTEGKDEAYLKLYDGHDWKWFPVRLLHTDMEYLRKNWYGEKASAPTLEKKHRKYFLRFSYTKEVTLTKTPVKNQVVCSVDLGINTDAVCTIMRQDGTVLGRKFIDFPSEKDRMYRTLGRIRKFQREHGPAQAGGRWAYTKRLNIELGRKIAGAIVKNAEENHADVIVFEYLEMQGKISGKKKQKLHLWRKRDIQKRCEHQAHRKGMRVSRVCAWNTSSLAYDGSGSVSRDPKNHSLCVFQTGKRYNCDLSASYNIGARYFIRELLKPLPVTERSLLEAKVPSVKRRISCVYADLRELFSEMELLRAA

SEQ ID NO: 28080 - protein, 239 aa, Bacillus sp.
PIRALLIDKENRNFNLLKHKLGTLRITKKSNKWIAQISVTTPTPQKTGFKVMGVDLGLKVPAVAVTDDGKVRFFGNGRQNKYKKRKFRSVRKALGKKKKLNAIRSSKNKEQRWMKDQDHKVSRAIVNFAKENEISVIRLEQLANIRQTTRTSRKNEKNLHTWSFYHLSQFIEYKAKLEGIKVEYVNPVYTSQTCPNCSEKNKAQDRKYKCKCGFEKHRDLVGAMNIRCAPVIDGNSQSA

SEQ ID NO: 28081 - protein, 379 aa, unknown
  TnpB Polypeptide
MQKVQLTYKFRLYPKHEQEERLLETLELCRQTYNYFLAQWNGKDKIPSRLELQAQLPKLKKEKPELNKVYSKVLQMVLYQLYSNLKALSQLKRNGKKVGRLRFKGKGWYKTFVYNQSGFKLIKTGKRLDILHLSKIGDIPIRAHRVVEGEIKQVIIKRHNSGRWFACICVEKEACVTQKEPKRAIGLDVGIKYFLTDSDGRQIENPKFYQKTLERIRVIQHWLSRRKKDSKNREKQRIKLAKLYERLTNQRDDFLHKLSRFYVNHYDVICVEDLKIANMVRNHNFAQKILDASWGKFLQLLECKADRAGVRVVKVNPRGTSEGLSYENPLRDWISACRIKMRGWGSPDSPAEMKPLQELSHVPASLIIEAGSPHPLGVG

SEQ ID NO: 28082 - protein, 342 aa, Moorea sp.
SSIVRFYDNCKKKVPGKKGFPKFQRRARSVEYKKSGWKLSPDNKSITFTDKKGIGKLKLKGTWDLWRFDKKQINRVRIVKRADGYYVQFCVAVNVKEEIEHTGEMIGLDVGLKEFYTDSNGHSEPNPRFYRKGEKRLKFYQRRVSRKKKGKAVGHASRTSNRRKAVNRLGRQHLKISRQREEHAKRLARCVIRFNDLVAYENLRVKNLVKNHCLAKSINDAGWYQFRKWLEHFGTKFGRITVAVNPAYTSQNCSECGEVVKKSLSTRTHVCECGCELDRDHNAAINIRNRAISTTGHVGTWIINPNASGDLASTVLDSVREASPTANQVQQAESLREESPRL

SEQ ID NO: 28083 - protein, 459 aa, Planosporangium sp.
MPSATGDDDTPLVSHTGALLTRPVTFVFTLVPTAEQDQLCFQHAGAFRLVFNHHVARVFANLDQREAEKSYGLEGEQLTPALSWSKVSLINHMNAWKNGHAPDSPVTELAHGTTVRGLPWRDAVSADVFETASVNAAQALKNWRDSFRGERKGKKVGRPRFKAKHRTTPTFRLRAKYTEGKTPPVRPAGPRAMRFPKLGEIRVAEHTGRLGKMLRTGRFHPYAAAFTYRNGRWQVAVTGMAAEHHHLRRSTRHRHDRPAGVDLGVHKLAVVADTDGLVLHEWTGVKPLQHAQARLKLANQALARTKQGSNGRKKAVRRLGTIHARVRQLRRHLLHDITSTLVTRCSTVVIEDLNVAGMVRNRSLARHLSDAALGELRRQLEYKTGWYGTRRVVADRWFPSSKMCSRCGHIHDGLTLADRVYQCPECGLELDRDVNAAINLATRAFEPVPDVAPPQPVAA

SEQ ID NO: 28084 - protein, 425 aa, unknown
  TnpB Polypeptide
MYSDNMLVRKAFRFRVYPTQEQLARLATWEGALRCLWNLGNEQRLVGLARSTAERHYYTAFDQINQLTELRAEVPWLADVPRNVCAQLLVELDKAWQRCFKKLALQPRWKKKGRDQVNISEPHPKTWHITGDVLHFPKLGEMKIVVHRPLEGTPKTCTLVREVDQWFAAIVCEIELPAPVAKVEPVVALDRGVANLLADSDGKLHENPRCLQASLQRLAHAQRVVARGKKGSNNQKTARIRVGKLHRKVRRQRNHVIHNLTAAYSKSHGTVVVEKLNIKNMAASATGSIEEPGTNVAAKSGLNRAILDSGWGMLVNCLRYKLAWSGGTLVEVPAAYSSQTCSACGATDATSRLSQAQFRCTSCGHNEHADINAAKVLKLRAVETTVNGCGGVSVGRPKKQQLRVARRGTRSQGLGSSKAPAFRPG

SEQ ID NO: 28085 - protein, 425 aa, unknown; identical to SEQ ID NO: 28084
  TnpB Polypeptide

SEQ ID NO: 28086 - protein, 795 aa, Microbacterium sp.
MRSGPSSHRSGMTSTCAATRRSPPPSVATPPSPTACTPKPSQSPRAENASTPDPCSQGWTDRELELGGPHELAVRMGDAVGAGAGRLADPARRRRRPDHHRLHRCLAVQEAQGQRGTRRVPDRPRRPRRADGRPGADRPGDPAGRHSAAHGALRDRHLGCWLPRRITGDADVCAARLRPHPPHRTTQERRATLGGHDVRSAQAYRCRHRHVAGPLGVPHPTAPAVPRPVRTDHTGHRRHRRPRALGGAPAKGHEAAELAGDPRQAQRQQRHPLRRRRGHGGPRARHASTDGHPARGADRHQRSRRRSTPIPHGSGNPFAWNSGAAGCGAARMGPVMKRRYVFRAYPTTRQQRGLRRLFGCCRYIYNSVIADRQMTFETRLHAVEESRPTQGNPDRTVRSFDANRQAALITYERTRKPWLNDVSSVALIQSMRDAEQAFSNFFASVSGNRKRPRVGFPRFKSRFTGKQSARFTSNGFRVDGDRVFIAKIGWVRFVRSRALPSTPSSVTIIHKPDQTFEVSFVVEVAPVDLAPAIERHAGIDAGLDTFAAVVYSDGTREKVDNPRFFRRQHRRLRKAQRDLSRKQGPDRRTGKKPSKGWRTQQARIARLHSGVVHTRTDFARKLARRLASENTTIAIESLNIRGLARSGGHDAQGRGLRRSIHDAAWGAFFANLANVAGSRLLAVDPAHTSQTCGVCGVVDGPKPLSVRKWECQACGAVLDRDWNAALNVMIAAGQAEISNAGGGDFRLQLAEAVAKEAGTRWSAGEVAASTPATLSGKPKNPAASAARRKSTGGPA

SEQ ID NO: 28087 - protein, 163 aa, Cyanobacteria sp.
ILKRLSGRERRYQTWLNHTISRAIIQDAMRSGSLVAIEDLTGIRDRTNQQPRTRAERRRSNSWAFYQLRQFLEYKGIQSGVEVIAVSPRYTSQTCHQCLYIGLRSGKRFGCTNNCCNWHGDADVNGSEMIRLVGLSVTQAEGSKLLSCELSWDSSGLLKAPCL

SEQ ID NO: 28088 - protein, 491 aa, unknown
  TnpB Polypeptide
MSEIYGTYEFKHFANKGKVEKLKAVLKEYRKTAQDIAKFLWKELFKNGKLLHKKKISIKHVQSKLSERYQYVCLWQVYGVLESYISNLQNEFVRIVLNSSLSREDRLILLALNRQKAWFKCDKEEIQIYDNKETKKVKVKDYHKQLAKKIFKRLLKTNKKPSFKNISLHLDSKVVTLSPKQEGKAKSFDYWLKISTLEKRKPIYVPLKKNSYAESLEGKFLNFCQVVERSGNLEFRIVKELKKKEYIPATDTIAIDLGLNPLFATDRGDLIGRYFLSFLTKLDEKITKRMAFLQKKGIKPSSDRKYVELVNRLRSFLKNEINRTINRIVDVYKPAKIVVEKLDFRSFELSKRMNRLVQNFGKRYVKEKLQRLKELYGIEVVEVNPAYTSQECSSCGYVDERNRRNTRKFECKACGRKINAQVNASRNFLQRSSLKEFLNANLPKKKVLKMLVKRYLERLKGWKSAPLELLKSNLYFRDYLEEFLNPRQGSP

SEQ ID NO: 28089 - protein, 405 aa, unknown
  TnpB Polypeptide
VKIDESKMSSRQREQLKMMFVEAKWIKNDRIAWAHDNRKSIFDCTRPRKHDIVNVKTKDGTFEQRELKHIGSQMAQGVVDEMKANVKTIISLQKSGLQHGGDLKFVSNVKSLTLIQYGSTYKFRSDKKMKIQGVSGLVRISGAQQFIDNPDIELASAKLINDPSGYYVAVSTFTFFDKLPIKKFNGKTVALDLGCETTVTYSDGRKQSVIVEEPERIKRLQRKLSRQEKGSNNWNRTRRLIGIEHDKMTNKKSDAANKVLSELKYYNNVVIQDEQLSKWQKSGHGKKIQHSCLGRLKAKLKTFDNVIILAANIPTTKICMDCGRIYDMKQSQRTFRCDCGVNADRDVHAAQNMIEIAKMILDSNLKVPVGRRELKREEFLTSYEKKFSVAYGTRIHEADKASVCR

SEQ ID NO: 28090 - protein, 396 aa, Synechococcales sp.
MLVLEFKTYGKPIQFSAIDDGIRVTQFIRNKSIRIWMDGGAKSWVELSRHCAVLAKEFDFANKLNSMARQAAAERAWASICRFYDNCKKKVAGKKGFPTFQKDCRSIEYKTSGWKLSDDRKAITFTDKLGIGRLKMKGTRDLGFYPLDQIKRVRLVRRADGCYVQFCISAERTEVMEPTGKAVGLDVGLKEFYTDSNGVMVENPRFLRKAEKMLKRSQRGVSKKVKGSSNRRKARQVLGKRHLKISRQRKDHAIKLARCAVTSNDVVAYEDLRIKNMVKNHCLAKSMNDASWYQFRAWVEYFGKVFGKITIAVPPAYTSQECSNCGVIVKKSLSQRTHSCQCGCEMDRDHNAARNILRRGLATVGHTGGLMLDMGNAWGDGASTVVGESLPQQALS

SEQ ID NO: 28091 - protein, 418 aa, unknown
  TnpB Polypeptide
MLLSHRTSLKICPEYSNIIGHMCYAASKLWNVCNYERHHYKELGLEKYPDWYYQKKAHKENLWYKQLPSQTAQETCKQLDKAWKSFYVLKKTGGIKAPNPPRFKQDNIPVTYMQMGIRHEKGSDQLRLSLPKDLKSYMEETYGIHEKFLYLENKIFRDMDHIKQLRIYPPENGTCDLIVIYEIEEPEQLSQNGHYLSVDLGLHNLMTCYDSGNGRTFILGRKYLSLERYFHKEIARVQSVWYAQQSERGIKYPRSSKHIQRLYRKKQNAVKDYLHKVTRWIAEYCRKEDICCVVVGDIRNIRKEKDMGHMTNQKFHGLPYNRLYIMLEYKLKLYGIQLIKQEESYTSQCSPSSPDVSKRHAEASNRKERGIYITDGVRFNADAVGAFNILRKYLSVSGKQKKLSVTGLKNPEIIKVAA

SEQ ID NO: 28092 - protein, 446 aa, unknown
  TnpB Polypeptide
VSLSGLTDYVSSLCVDRCTTTMKEWDMPQPDGQFDRISVLKMQVNRGHRARLYPSPEQARTLTRWAGCARLLWNIALDQRRWGRGWRLSKITQCRELTELRAEFDWLAELPAQTAQQVFSELDLAFQRWWKGLAGYPRRKKKGRSAPLLRFPQDVEVRRLNRNWGEVKVRKLGWVRFRWSRSLDGTLKHVTLFERYGEWHVAFCLEKVVDVAPANNSPAVGVDRGVAVAFMTSDGSTFDQTMWKPTEKTRLLALEHRKAHQQKGSNRYKQTCRSINRLYRRATNRRHDFAHKTSTTLAKNHGMVAVEALVLKNMTASAKGTVHQPGRSVRQKAGLNRAILDKGWGRTIEHLRYKCPQYGSLLVEVPARNTSLECAVCHHTSRENRPLRAIFKCVACEHADDADRNAAVNILERGIQLAPTGGQPGLGRKTSKRLRTWRQPTPEAVA

SEQ ID NO: 28093 - protein, 338 aa, unknown
  TnpB Polypeptide
MGHCQEYITTVNVLVAAFDSGVLQGKVSTKDFTARLPSAVKNQALRDAQSVLKRSLELGCLPILKKPMCQWNNQNWRIVDGMLILPLCTDGKTQQARISCASVALEGKVGILRITKKRGKWIADIALTGEDAPLTEGQAVLGVDLGIKVPAVAHVRGKGTRFFGNGRYQRHMRRRFYSRRKRLQKAKKTRAVKKSQGKEARWMKNINHQLSRHIVNHAHEQGVCTIKVESLAGIRKGTTRTSRGASARKNNRMKNTWSFYQLTMFITYKAERLGITVEQVDPAYTSQECPACSARNKAQDRTYVCAECGWMGHRDKVGAMNISRRAGLSDKRVGATGA

SEQ ID NO: 28094 - protein, 367 aa, unknown
  TnpB Polypeptide
MECSYKFRIEPNAKQKQQIQKTFGCCRFVFNHFLAERMEQYNQTGKAPTRFQQDKSLKALKKELIWLREADSTALQSSLGNLDTAYQNFFRRVKQGKNSGYPRFKSKKNHRKSYKAKGKIEVLDHAVQLPKLGLVKCRVSKQVKGRILSATISQAPSGKYFVSLCCTDVDFAQLPKTGEVVGIDMGVNSFAVTSDGIAYLNHKYLAKSQEKLAKLQRQLSRKPKDSKRREKARIKVARLHEHIANQRQDMLHKLSIMFVREYDIICLEDLATANMMKNHKMAKSIADVSWSEFRRQLEYKAAWYGKQVSVIDLFYPSSQLCFNCGYQWPGTKDLLVRDWDCPRCGAHHDRDLNAAQNILKEGLRLLA

SEQ ID NO: 28095 - protein, 411 aa, unknown
  TnpB Polypeptide
MYLTAKAKIPELTELKEVGNICTKIWNKANYFCRQQWEQRGKIPSYYELQRVFKDDFWCRQVHSHTAQAVLHKLSESYRSWFQLRKVDATANPPSFRKKSSVSTVTFTKFAITIRDAQMELTLKKGMHVCLSYQLQPKVKITEKNVVRVEVKNGFANIVYRVEEPPLQQSGQVMGIDLGVINTATTVKENGEARIYTGKSLLSTQRYFNKEICRVQSIVMAQSKGKKKWSRRLSELSRKRTRQIRHVLHAQTKAIVDDCIKSNVNVVVAGDLHNIRKLRSDTRKPEKLMKARSWGRVNNQKNHAWSFSWFTATLTYKLRREGILSVQVNERGTSKTCYRCGEVRKRNRKTRGLYICNNCGLVMNADVNGAVNILETYLRPLGRSSANVNLAKVIKWDKTHLSLEALHFKVG

SEQ ID NO: 28096 - protein, 308 aa, Nostoc sp.
LPLPLQFKKFGQFKSLLFPQFKQNPVQGVHIALPKLGMIPINLHRPIPSGFVVKQVRIINKADRWYADINIQCDVNVPNPMPHGHPIGVDIGLEKFLATSDGVLVKSPKFLKVMQSKLKLLQRRLSRKKKRSFNYEKQRIKVARLHHTIDNTRKDFHFKQAHALCGAGDMVFMEDLDYRTLAKGMLGKQMLDAGFGQFRTITKYVCWKRGKFFGEVNALGTSQECPECGATVKKDLSVRVHHCQECGFIADRDVTSGLVIRNRGIELISTAGHAGIQNAYADGLPGAEVSQSRSKSKTRKGATRKAKK

SEQ ID NO: 28097 - protein, 371 aa, unknown
  TnpB Polypeptide
MKLTAKVKLQPTPDQYVALLATLETTNAACNEISQVAWQHQAFNQFGLHKLTYNSIRQSTGLTAQVVVRAISKVADAYKLDRKTKRTFKPQGGIAYDARILRWFLASQEVSIWSVDGRLRIPFLAGQRQLELLQGQRGESDLCLVNGEFYLFATCEVETPDPSDVDSFLGVDLGVTNIAVDSTGEVHSSRAVNNVRFRHRKLRTKLQRKGTKSTRRRLKKLSGKEQRFATWTNHNVSKRIVEKAKCTGQGIAVEELTGIRGRVKARKPQRATLHSWSFFQLRQFLEYKSRLAGVPLVAVDPRNTSRTCPVCGCVDKANRRTQDSFLCVDCGHSGLADHIAAINIGRRALVSVPNVSDAQTIVQRQGQSPCL

SEQ ID NO: 28098 - protein, 405 aa, unknown
  TnpB Polypeptide
LLGFNAYWETVVRGFQYRFYPSPEQKVMLAKTFGCARFVYNWALNLRSIAWKERQESINYGATSAALTELKRQPEVEWLNEVSCVPIQQSLRHLQTAFVNFWQSGAGYPGFKKRSGHQSAEFTRSGFQWKNGKLSLARIGKLKIRWSRHFQCEPTTVHVSRTPAGRYYISFRVDEALPAMPEAAGEIGIDLGLKTFAAFNDGTGHHAPRPLRRKMAQLKKAQKALSRKRKGSSNRNKARIKVAKIHEKISDIRRDGLQKLTTDLVRKNHTIVIEDLNVRGMMANHCLAGAVADSAWGEFARELEYKCGWYGRVFIRINRWYPSSRTCSTPDCGFVNHTLTLDDREWTCPRCRTTHDRDTNASRNILAVGLAERQNARGDAVRPRRDRRGRQGNHLRSENRSVRCA

SEQ ID NO: 28099 - protein, 405 aa, unknown; identical to SEQ ID NO: 28098
  TnpB Polypeptide

SEQ ID NO: 28100 - protein, 389 aa, unknown
  TnpB Polypeptide
VPEVPQPALESTEGEEVIRTFRYPLEPNRTQAAILSNWIEHCRQLYNASLQQRRDAYRLQRKSLSYMTQTRDLTELRADDPEWREVPVEAERSALRRLGKAFDAFFRRVKAGQKPGFPRFRGRDRFDSFDLLALAVDGNHVRLPKLGLVKFHLYREMKGKILSVTVRRSASRWWISFACDIGAAPEKVPVKTAVGIDLGITTYAVLSNGDEVANPRFFRKGEEVLARRQRSLATKTRGSRSRQRAKILVGKAHEHVRNQRLDFARKLACETFARFDLVAHEDLNIRGMVHGNLAKSIHDASWGMFIEAIRCKAECAGKWAVPVDPRGTSQRCSACGTVVPKTLSEREHACPCGARMSRDLNAAINILNLGAAGRAAVGSGGPPGRSPSR

SEQ ID NO: 28101 - protein, 623 aa, unknown
  TnpB Polypeptide
MPKKKPKDENTKPIIMKKPYKTIKTSLKSILLPINALATKTFINNLCIKCNDIVIETYQFIRLFCLKNYHNNLPIPELSEKFISYCMKTLGIRDNRGKKSKEPILSKLQTFYDEEFKQLQAHPEKFDIKCMTHLFSYLSTQIHTGIHNNIKIHFCTRLSRFINKTVTIYESDLTKEQAKKERIVLKKAIYENTPPPERYKVWYDSYRTKILPETWTNCIAYDVKVSPEKYLPYSFFMNNVLEEKGCKLFQPLSLRNSIIPHYITLDTASIVNVFSMKGKGVLLSNITENQKEIWENFFNLNHKIFKQKDYNFNYTIQTDGIGVSLLFVHKNHIKFGESSCSNKDALTYKYIEECTKDKLESLKTKKIVGADPGKFSLIYMTDGKNKLRYNAFQRHTETYAMRNSQIMLSEKTKNRIIEKETSLSEKNCKTVNYEKFKEYLKIKNKLNAELKSFYIRELFRKMKWRRFVYTQKSESRFLNNIQKIFGKPEDVVIAYGDWSRSSQMNNFMSTPGKGIRKLITQKYETISINEFRTSKLCCKCYKELDHYKKEANQVYRCLICKECGSSPSKLSRFVTRDLNAAQNILNLCELWIKEQKRPEAFQRKVEGQAPTPSKDGGTECLSH

SEQ ID NO: 28102 - protein, 511 aa, unknown
  TnpB Polypeptide
MAKFGIFSTYKVRILNHGRSIAPETRCRINGKLQTLPSTPVNAGESFRQATKIYRKLVDFYIAVFLDRWDRDFASCKTNNDYYNRLREITSVTDAHPNPPFDVTRVAGDVISEFRGAAGAEALGDVKSYLSRLENWKKSPTGQAPGLPRAGRTYPTIYATAFKFQPEITIKVGGKDVTISNKAFIRSIVNGQWRWIELNLRKSDMVYIARHCGMSEQKCPTLRRRHRRWFLDFGFAEKVDIPKKEAALQTILAVQLGYVNAAVVCAMTSDGKVIGRRFLRLRKLEACLNLSFGRQNNARRNSATFGKRGFRMPRLCARTEGINARISVLTAEFIMKCAAEFHADTIVFGKVDKTGKKLHPKQRLHFWRACYVQEMVEHKAHKSLRRISRVNLANARQLAFDGSGKVDQILTNPPEIVKVKVRNKKTGRAELVKRHLFNPNICKFQTGKEYSTDLNAAYNIGARYFVREIYKTLKPRQQRNICALVPECEKRSTVTLNSLRRMSQMLKSEGV

SEQ ID NO: 28103 - protein, 338 aa, Scytonema sp.
MLLTQANRLDLTKEQAKTLKELCRLSKNLFNVGLYTVRQYFLNERKHLRYESVYYHCKTNENYKLLATDIRINEIRVYPRFDARLFDVADIYESADEQIQDAHKVMEINLGVNNLAACISSAGTGFVIDGKRLKAVNQWYNKRAAKLQFHKDKQGIKGITHQQARITDKRNHFVQDYLNKAARYIINHCLSHGIGKVVVVGFNPGMKQEINLKSRNNQNFVQVPIAVLRLKIQSLCERKGIVLVEQEQSYTSKSSFVDSDPLPVWNTDNPVEFQVSGKRVKRGLYRTKDGHLINADMNGAANILRKYFSSTLNELILKENKSCLSQPVRVYLLTNSRL

SEQ ID NO: 28104 - protein, 419 aa, Beggiatoa sp.
MKALKTKIRGLDKSQFKRLRELAHHAKNLYNQALWTLREAFEATGLYFYYPKMDKAMKQVENLEGKVNYKLLKAKVSQQTLRRLDKNFRSFFKCHQDFQTNPLKYKGQPKPPRFKHKPYDNLIYDYQAFSVKDGMVVLEKGLSFSLPKKLIGKTVKQIEIVPKYRHFEAIFVFEDDDIKTKISPNTKVMAIDLGLNNLATCVTNGVEKPFVVDGRRLKSINHHYNKRLAKLQSHLKKTRNRKWSNRLQRLTDRRNARISDYLHKATRQITDICVIKDISKVVVGDVTKSLNQINLGKKTNQNFVNLSLGQFIDKLRYKLELHCITLEVADESYTSKASFVDSDALPKKYEPSMPHSFSGKRVKRGLYRSKDGTAINADANGAYNILRKSNPKFSFGELVSKVGKGILDWLHPYTRLKIC

SEQ ID NO: 28105 - protein, 419 aa, Beggiatoa sp.
MKALKTKIRGLDKSQFKRLKELTAHAKTLYNQTLWTLRQAFEATGLYFPYSKMDKVMKQVENLEGEINYKLLKAKVSQQTLRRLDKNFKSFFKCHQDYQKNSGKYKGQPKPPRFKRKQYDNLIYDYQAFQVKDGLVVLEKGLSFPLPKKLIGKTIKQVEIVPKYRYFEAIFVYEDDEIKETVSPSDKVMAIDLGLNNLATCVTNGVAKPFIVDGRRLKSINHHYNKRFAKLQSHLKKTRLRSWSNRLQRLTDRRNARIGDYLHKATRQVTDVCVENGISKVVVGDVSKSLDQINLGKKTNQNFVNLSLGQFIDKLRYKLELHGITLEVTNESYTSKASFIDADSLPKKYEPSMPHSFSGKRVKRGLYRSQNGTALNADANGAYNILINCYPKFSFLELTKKVGKGISDWLHPYTRLKIC

SEQ ID NO: 28106 - protein, 402 aa, Micromonospora sp.
MRTAYRCRAYPTPEQAAVLNRTFGCVRFVWNRTLAARTARWRTDHVSTSYAETDRALTELKKQPDLKFLGEVSSVPLQQTLRHQHTAMTAFFQERARYPRFKSRHGRQSASFTRSAFRLRDGTLSLGKTPGTLAFVWSWPDIDPAGLDPTMVTMSRDPDGRWFVTFAVDVETPTAPEPTGRVVGVDLGLTDFAVLSTGERVPHPRHMERRERRLKRYQRMMARRRKGSANRAKARRKVARAHSRVRDARRDFLHRTSTALVRRFDAIAVEDLAVGNMVRNRFMAKAISRTGWAEFRTLLAYKAQRAGRHLAVVDRWYPSSKTCSACGHLLATLSLGTRHWRCPSCGTRHDRDVNAAQNIAVAAGLVETRNACGADVRHEDPPSVRSAVNQEPLPVRVGIPRL

SEQ ID NO: 28107 - protein, 362 aa, unknown
  TnpB Polypeptide
MFRAYKMRIFPTEEQKALIVKTFGCCRWYWNQALHDNIEYYEANGSGKITTPAKYKMENEWLKGVDSMALCYTQMDLQSAFSKFFKEPDAGFPRYKSKRRSKNSYRTTNCAVSNEFIKLPKLKEVKLINHRHKTGVCKSATISLTSSGRYYVSCLFEEDVEFLPRTDKEVGIDLGLADLAICSDGTKFPILKPLRKNLTKLKREQRRLSKMTFGSNCYLRQKQRVAELHEHIANQRKDYLHKVSRKLTNENQVVCLEDLNVKGLLKNHYLALSISDAGWSEFVSMLQYKADWYGRTIQKIDRFYPSSQICSCCGYKSGKKPLHIREWTCPECGVHHDRDVNAAKNILQEGKRILAAGTCRDR

SEQ ID NO: 28108 - protein, 636 aa, Acidimicrobiaceae sp.
  misc_feature (633)..(633): Xaa can be any naturally occurring amino acid
MRGRNKQPAWRTPEGQPLATVVLNLDTSDAHARKRLETLYFTMFNLRRAMQRDAQRLCRAYWSRKEDRDTLGWKAVADDLGLNRRCFEQLAKEHALDSGWATSHVSMALVCHMANAVFEDVVRHLWSDASGSRHGPLRITPLHQFSTIRGRARSHTTENKWETFRLHGTLEGHLDAYGQGTLGELPTLGRVAALPPGTPVLRQHKMTTPSAAKWSKYVGPLVMVFAGGPESNEPALRLPVRLPQGRGQWDRVVHFLGNPNLWHKINLVRRADSSQPGGWRYEMHMLVLAEVYVSARNSALLDGASTDRTACVDVNVSNLSVVSVDSVHHDPRSTVVRADVSERDLLAIAAAKKRRGSRRVERSRRAANTSQYVKSVAQVRRDERRATRGLRMVTDSTPGGGRLSRSDGKPLRPYRRDRLSATYRDTRRRQGERARATSLTKKARAHDVAVQLIATHGIHWLIEDCNLTAWAKHWGKSLHAFAPGMVTAELFTLTTRLGGNFVKVATGPTALSSHCLCGHRAKKDLAERRHVCPACGFSGDRDLVSGALGTCVAHGDVTSPASVRVDYTKAGTLLAILSSSLYQGHQDALTSQTHPLVSPCRSDALHQGARSTGYSRRAARLNARSTAQSTNGXLSS

SEQ ID NO: 28109 - protein, 277 aa, Archaeon sp.
MVRSFTLTPTSLSLCISKEVPEVECTEAIAVDRNLRNLTVGNDNRVIQYDLSDTVRIVQTTVDVVGSFRRNDARIRTKIASKYGLRRRNRIQHVLHNVTKRIVALAFEGKQGIVLENIEGIRRLYRKGNGQNKKYRGRMNGWSFWEAQRQIEYKARWVGLPVVRLSRRETRGSSLSCPRCGERLQSDKKLRRKLWCGECRMVMDRDVVAAINLARRGRVRFARSRPPIVREAQGGAAEAVKGNPTPTVILRADALKSSQDARSRATEDLTEPSDTFF

SEQ ID NO: 28110 - protein, 449 aa, unknown
  TnpB Polypeptide
MSSNKAYRFQLRTRPRDEALLRRFAGAGRWVWNQALAEQRARHSRSEKYASYVDMAKWLTTWRNDPATSWLSDSPIHPQQQVLRRLDEAYKRFFAAAKAGLAGGQGRIGPPSFKRRGDEPGIRYPDHKQFALDTANERMKLPKLGWLRLRMSQPVDGVLRNVCVSREGSAWFVSIQVQVAETVSALGVAPTLGIDLGLAKFASLSDGSSIEPLKALTRQQRRLRRYQRSVSRKVKGSANRRKAVGRLGNLHRRIAHQRSDWLHKLTTDLADAHPVIALEDLRITNMSASARGTIEAPGKNVAAKAGLNRGILDAAWGEFARQITYKVQWRGGQVILVNPAYTSRTCRVCGYEAAESRKTQAVFACVACGHTENADVHAAKNILDRGIALFEAQRSAAGHAVWLNEEARKAAACGGDVSREAPERQARVRRAAPMKQEPTDATSNEASHA

SEQ ID NO: 28111 - protein, 312 aa, Streptomyces sp.
VTGRPEVSGGVPQRRRTAAFKSRKKSRKSAESTTSAFRFRDGKLTLAKTREPLDIVWSRALPEGVSPSSVTVSQDAAGRWFVSMLCGDPSIEPLPATDAAVGIDAGLDHLLTLSTGEKIANPRHERRDRAALAKAQRRMAKKDKGSANRSKARRGVATIHARIADRRRDHLHKITTRLVRENQTLVIEDLTVRNMVRNRKLARAIRDAAWSEFRSMLEYKAQWCGREVIAVDRWFPSSRLCSACGTLQGKMPLNVRTWTCGCGTTHDRDVKAAINLLAAGRAVTACGAGVRPQRNSPGGQSAMKQEVLRREP

SEQ ID NO: 28112 - protein, 398 aa, Microbispora sp.
VRLRYNFRLYPTPGQRQALARAFGCARVVFNDALRARQDARERGLPYISDGELSKRVITEAKKTPERSWLGEVSAVVLQQALADLNTAYRNFFHSITGRRTGPNVAPPRFRSRKDNRQAIRFTRNARFAITAGGRLRLPKIGDVAVRWSRDLPAEPSSVTVVKDAADRYFASFVVDVAEQPLPPVERETGIDLGLGHFAVLSNGRKIDAPRFLRRAEWKLHTLQRALSRKQKGSSNRAKARQKVARQHAKVADARREFHHRESTKIIRENQTVIVEDLAVKGLARTRLAKSVHDAGWSAFVGMLEYKAALYGRTFHRINRWFPSSKLCSACGTVTATMPLSVREWTCPCGAVHDRDINAARNILAAGRADRLNACRGPVRPPSAVAQPAEAGSHRGAA

SEQ ID NO: 28113 - protein, 399 aa, unknown
  TnpB Polypeptide
VKIILIYKTIIVPVNCNKSDYNYLMQCNKYSAIIWNNCVKADQKSREENNKSLTRSELQFMMKKTVPHILANSINMVIFKYITARDAMFRSIKAKHENSSKVKLPYKEKKFYNTGWTYQNIRIYKDKGYLTLAKPLLPGHTKQKPMKCHLKNIPDNIVEIELIYHNKLYLYIKTKQENDNILIQSNNEASIDLGEIHSITSIDNNQNAIIITGRKIRETKQLRNKHMGKLKSRRSKCIKGSRQYKKYSRAIKKLMYKTNNKIKNYVHKITKYYLDYCIKNNISKVYYGDLDSCTRNTKKEHRGSKKIHQKLNEWNYGQIMRELTNKLTRCGIQLVKVKEYYTSKKCPVCNKLNSPKGRNYKCDCGYVMHRDVNGAINILNDNSQYNINKYKSLKYLQIT

SEQ ID NO: 28114 - protein, 426 aa, Mycobacterium sp.
VVAVVLRRLGWLCFGIDGAPLYRAPVQRGGVVRRSYVFRLRPTARQHTALAACLEAHRELYNAALQERRDAWAHSKTRVCYGDQSAQLTEIREARPDQAVWSFSSQQATLRRLNKAFAGFFRRVKTAKPGVKAGYPRFKGKARFDSVEWPKDGDGARWLPEHKRVYLQGVGQVKVHVHRQVVGRVKTIQVKRCGRRWMLVLSCEDVATNPLPGTGRQGGIDVGIASFATTSDGEHVDNPRWGRRGGDRLAAAQQRLARAKRRSNNRECKRETVAARHRKIANQRKDFHHKQARALVARYDVLVVEDLKIANMVRRAKPVPDPDKPGQYLANGAAAKRGLSRSISDAGWGRFISVLRAKAEEAGRIWIEVDPRHTSDGCEKCGYAAAENRVTQADFVCRRCSHRAQADEMAARNILRAGLALHPQAA

SEQ ID NO: 28115 - protein, 550 aa, Mycobacterium sp.
MIIGLRTRAHAAKVAAATAGVHLAGKSKPDGTPALSRFVDVGADFEAHRLAVESVSVLFDLFDGDADSYAATGSRGAKLPTGWTVTGAKFEVDWPAEAARAALVRSHFGARRKAFNWGLARVKADLDAKAVDPGHESVGWDLGSLRKAWNRAKHEVAPWWAANSKEAYSSGLADLARALDNWSASKNGTRRGRRMGFPRFKSARRDAGRVRFTTGTMRLEDDRRTITVPVIGPLRSKENTRRVQRHLSAGRARILNMTLSQRWGRLFVSISYALRTPATAPAVARPTVIAGVDLGMRTLATVATVDTITGEQTITEYPNPAPLKATLAARRRAGRQLSRRIPGSRGHRSAKAKLTRLDRRCVHLRREAAHQLTTELAGSYGRIVIEELDVAAMKRSMGRRAYRRAVSDAAMGLVGPMLAYKTARHGAVLTVADRWFPSSQIHHGCTTPDGTECLLVGKGRIDKLLVCPLTGEVVDRDRNAALNLRDWPDDASCGPVGTTAPSVPGPTKQVGTGHGADTGTSGAGGASIRPRPRGAGSGAAKTQTPRGDAA

SEQ ID NO: 28116 - protein, 348 aa, unknown
  TnpB Polypeptide
VTVAGSTSRRYVGWRCRLYPSPSQDAALHRCRNGLRELSNELLVASQLRYGESGRRLSLTEMRAFARDWKRQPEHRGFPASATYRVADDLDRAFRIWFSKPGRRGRSGFPQLKAIGGEPGIYFSNQGIRIEGSRVWLPKYGSVRWKGGRLPPGRLAGPSGRKTLGLLSGRVWLDAGNRWMLSCLFECEPLTPSRARTDKAAVRQHGREITVSVDGESVHVIRESRALRNARRRLARLERRLERCEFKSEGRKRTLALMRNQARKVRNHQADLQHKATTGVVHEAREIEVEGASSELLRQLEYKAEWHGRRLKVRRGPPEPGTGNPRRARRPGSRSLKRESRTRRSKAL

SEQ ID NO: 28117 - protein, 369 aa, unknown
  TnpB Polypeptide
MMQTLMVKVETTPEQADALHKTMHQFNAACNDIAKTAFELRLANKIELQKTVYYRIREQYNLSAQMAVRAISKTVEAYKRDKSIQVEFDLDGAMPYDQRIMSWKGIDRVSLLTLEGRIVMPIRIGEYYSDRMNRPSGQVDLIFRNKTFYLAVVVDAPEASPIDATAVLGIDLGVKNIAVDSTGEVFSGDAIEKTRRKIDTIKADLQHCGTPSAKRHLKKIGKRESRFRRDTNHCISKKMVAKAIDTSSIIALEDLEGIRKRTTVKMSERRKHLSWGFAQLRQFIGYKASKAGVPVIYIDPAYTSQECHVCHHISKSNRPTRDDFVCTCCGSSAPADYNAALNIRARVEANLPIVARLFAQLQAPPFRTG

SEQ ID NO: 28118 - protein, 390 aa, unknown
  TnpB Polypeptide
MKKVIKSIKVMLLPNNKQKSKLFQYAGAKRFAYNWALAKEQENYKNGGRFISDNDLRKDFTQLKKIEEYKWLNNISNNVTKQAIKDACIAFGGFFKHQAKYPKFKSKKHDKPSFYQDNIKIKFTETHMKFEGFTNSKKQNKQKLNWVRLTEHNRIPVNSRYINPRISFDGINWWISVGIEYEQSLDLPKNKGIGIDLGIKDLAICSDGNTYKNINKTQKVKIIEKKRRRLQRQVSRKYENNRKGVCYKKTSNIKKLENKLLKINHRLTNICHNYLHQTTTEITNRKPMFIVLESLNVKGMMKNKHLAKTIQQQCFYEFYRQIQYKCNWNNIKFIEADKWYPSSKTCSECGAIKKDLKLSDRIYVCPECGCIIDRDYNASINLMKYGQSIA

SEQ ID NO: 28119 - protein, 534 aa, Moorea sp.
MQTMALSNANEPQGELDSLTQQIFSVLEKLQSLTDPVVTQSVTAESVALNSETISLAKSPICIPSSPKQKLSKTSVPASTTKGKDLKPYWSELSAEISSRLLLPVETDLPDSGLNSLSTWSASTVEKSWFSTSLRAVPNPSLPQIFYPSFTSSPAGFTDSGNTVKKSKKIRLFLNPEQRTLIRKWFGVSRYVFNKTVKILQNGEVKANWKAIKTGILNDLPEWCKEVPYQIKSIAIKDACTAVREAKKKYKKTSQINRVRFRSRKNPIQSCYIPKSAVSEAGIYHTKLGEITYSEDLPPEVCDCRLTSNNGDYYLVVPQKVAVSHAENQGRVVALDPGVRTFITFFSETSVGKIGHGDFSRIQRLCQHLDNLLSKISKANGGQKRRMKKTARRMVIKVQNLINELHHKTARFLVDNFDVILIPTFETSQMSKKGNRKIRSKTVRNMLTFAHYRFKEFLNHKAQETGKVVLDVCEAYTSKTVSWTGELINIGGSKTIRSKLDGLVMDRDINGARGIFLRALVDTPWLREQLALVG

SEQ ID NO: 28120 - protein, 414 aa, Streptomyces sp.
MTTYVKRAYRYRFSPTNAQAAELSRTFGCVRKVYNMALAARTEAWARQERVNYNQTSALLTQWKKTKELAYLNEVSSVPLQQALRHLQVAFTNLFGKRAKYPRFTSRENSRKSGEYTTSAFRFRDGKLTLAKMTEPLDIVWSRPLPESAKPSTVTVSQDPAGRWFVSLLVEDPLVQPLPANENAVGIDVGLSHLLALSTGEKVANPRHERRDHRRLALAQRRLAKKARGDGANRAKARRKVARIHARITDRRRDHLHKLTTRLVRENQTIAVDRFFPSSKLCSHCGTGTLAGKLPLNGRTWTCDCGMVHDRDVNAAKNLLAAGLAVSVCGADVRPQRESSRMAQSAMKQKPHSASRRNPPPSGGRGSQPSEVCGSAVPSARDISSSTPRPSMSTSVSAPSRIRSSPACSQATSA

SEQ ID NO: 28121 - protein, 209 aa, unknown
  TnpB Polypeptide
LSILVDIPEAECAKFKKTNKQVGIDLGVKDFVITSDGVMFENKHFFKSEEKKITKLQRQLSRKVKGSNNRGKQRVRLAKAFEQLSNKNENYIHYVVNEILKSYDVVFMEDLNVKGLMKNHQIAKAIQEVGFSRFKYVLQNKALVNDKQVVLIDRFYPSSKICSCCGYKKKDLKLRDRFWTCPECGEHHDRDINASKNILAEGQRKLRDS

SEQ ID NO: 28122 - protein, 353 aa, unknown
  TnpB Polypeptide
MIELQNKKRQEDGGWINGFEMCKIITHMKKEEEYAWLKNISVHSLQQTCINLNRAYKEYFDRGYGHPKFKKKGKCKISYPADPAKDSTYFYDEKYVQIPKVGRVRYKTQYAFPVGKHNENVINKPQIMYKKTSKKWTLVFSAECENQNISEPILSDDVMGIDLGVRNLAIAVCGNTKIVIPNINKTKRMKALIKKKKTIQRNICRKYNAHGNYEKTNNIIKLEAKISMIDAKIANIRHNYIHQVTTYLANMFPKKVVMEDLAIKNMMKNRRLSRAIGEQSWYKFIITMKYKCEERGIEFIQVDRFYPSSKTCSICNYKNDDVGHGIEYWTCPNCGSFHNRDINAARNLIKSVG

SEQ ID NO: 28123 - protein, 401 aa, unknown
  TnpB Polypeptide
MAYRVTQRIISSDDLLYPYFDDLCRKSKLLYNAALFRVRNIFTGYDKEHRTENEVEVFQEVALLQRSYPNMHVRRVISYTHLEKMMRVTENADFFSGLPRQTAQQMVKQSVTDFKNWLASLREYKKHPEKYLGKPKMPRYKKSDLTTVIITNQDAVLYRDDIGMSLKLPLQKQRLYFSNLSSDPVLKEVKIKPYYGRFLLCLTLEEPDVAFDPSGSHVCAIDLGTDNFAAIVCDDYSSAIYKGGAVLSKIQWFHKQRAKYVSIITKGHEKKHAVSKRLRDLSFHYANFVKDQCHKISRSIIDFCMEHQCGTLILGVNLLWKQRFNMNKINNQNFVSMPITLLRTMITYKALNAGIRIIEQEESYTSKADLIANDRIPTYGVDDKDASFFWKEDQTWFIPLL

SEQ ID NO: 28124 - protein, 439 aa, unknown
  TnpB Polypeptide
VTPSQRERCFAVLRAGGDLWAAVLELNALRQRRGDAPVASYQALCRELSLAGPGCAGELSVTGARSILRRYSDAWFSANAARRSGDTSARYPRRRKSLMPSRYYAGTFILGGRHLSLPTARGCPPLAVRLSRPVPYAEATVRSVTLLNVGPKLFVDVTAEVPVATYEEGIGPDPARVAGVDLGIIHPYALASEGAALVVSGRAIRAEHRLHLAEKKVRSRALASRAPKRGQAGSRRWRKYRAKTRRLEERHRRRVAQATHEAARAVVDFAVEKRIGTLVVGDPRGLLANDAGRRQNLAVNNWKPGQMIAALADKAALAGIDVELVDERGTSSTCPRCGARVPKPKGRTFHCRICTLVAHRDLVGATNIAPRGSRGGDTFDLTGLEIMHRRAGRHLPGRTRRDPRRISMDKHRRERVDSWPAVARPETIGESLGVVAPAA

SEQ ID NO: 28125 - protein, 439 aa, unknown; identical to SEQ ID NO: 28124
  TnpB Polypeptide

SEQ ID NO: 28126 - protein, 461 aa, unknown
  TnpB Polypeptide
MNGGHLFLLSVSVFRKNHRTVGNSPEFCHRYPLVKKPTGQPAAEHINRNVLFLFMKSVAILVQRMHKFRIYPSRKQAARLLCQFDACKTIYNELLALSRDAYKFGRVSLGKFDYNIFLKGKCFDVHSQILQNVSDRVSKAFANFFRRVKEKKLGKKVRVGFPRYKKFAKSITFPQSGFRIISGKRLRLSKVGAVPIVLHRIPKGKIKTLTIKRNQAGQWFAIFSCEISISGISERKDVAPAIGIDIGLENFATLSNGGTIANPRFFVASQEKIAMLQRRLSRKARGSKNRMKARFKAARMHNKIANQRSDFLHKLSRSLSLRFGTIVVEKLSICNMIKNHHLAKSISDASWEKFIQMLSYKAESAGGKVICVNPRGTTVKCSGCGSAVPKSLGIRRHLCPFCGLSLHRDHNSAINILSTAGLAGTDACRDFASTSCASKRQAESLKQELYAVSPEEKISGQ

SEQ ID NO: 28127 - protein, 365 aa, unknown
  TnpB Polypeptide
VFILSQEHYVTIHHLKLYKPTKNKEKKLNKLFKNWNKAIRSALKIVKHWGFTTYTKSHKHTYRVSRNNFNLPSQVAIEANRKAIETYKSAKNAEFNRAVEVSLVNKKGFELIKKDNDRYIAKIPIEGRKSIYCPLAFGEYQLKKIENSKFNLKTAKLYKYNNEWYIDLIMEYEEAKIKTNTILGIDLGIVKLATFSIIDKQENVLHQESASGKELRFKRMRYKTKRKAKARSSASNATSSVVENRLCKELNFKIANRIIELADKYNSLIVFEDLKNIRKNITNDNRLNNYEKNSWAFYQLKQLIKHKANLKGIPYQEVNPKDTSQICSDCSEKGSRLSQNKFLCNNLHLQNADYNASINIAKKAI

SEQ ID NO: 28128 - protein, 423 aa, unknown
  TnpB Polypeptide
MDIQRTVTIKLPDDADLRATLAAFRDVQNAVSEDAFNGGTPLAAVPLQRVVYERVKGTLNSQMTITALRLVVGAYTSAVKGRNRRIKAEARRKKRHEAKGWRYTPRQIKPLSVCRFERMAAMFLVGVRGRDADFRKDGSLSIWTVGGRKRLSYEVIPAHRPLFDAAKEIDSVTVIERGGHLYGRVALTLNAPDPKGVVPVGIDLNETNALVAVDADGEELFVSGLATKVKNKRTMQTTRRVQRKLATRKAEHKDTRSVRRVIQRLSGRRSRRTRDFARVTAKRLVEWAPAAAVLVFEDLQISRPEKGLTKGVALRRRLSLWQHNAIRQAVTSKAEMAGMAVTFVDPAYTSKNCSRCGLRGVRRRHSFTCPHCGHTAHADLNAAVNIRQRFVQSRLDAAPSVAAEALSPSSEGDEGKPNSFSIG

SEQ ID NO: 28129 - protein, 507 aa, Nitrosococcus sp.
MHQGSNIFAASCSCAIMPELISRARTASSGPLEKAARVCPCALNLASPGTTSKEYRDVRRPPPASVRNEVAHRSRGPHKVMSAAGKIGGRISAARQYYQYPLATCHRPNRTSIEAMTQCDSTTLQRSYTFRFYPTSVQRQQLAMEFGHARWVWNTCLTWRGRQYRLHDKHVSGVDFSGHLTKLKKTAAYGWLKEASATTLNQKLRDQDTAFKNFFAGRAKYPRFKKRAHAQSIRYQLDQRQVAGRYRAGKLLKLPKLGALSLKWSRKPQGIPKMVSVTQDCAGCYCVSFMCEETLQPLPRKPNGIGIDVGISDVVVTSEGWKSGNPRHLRTYRRLLTKTQRRLSRKRKGSVRWHRQRVRVAKAHARVSNTRQDWLHKLTTALIRQAGFIAMETLNVRGMMANRRIAKALGDVGMHELKRQLEYKAPWYGRAFRQVDRWAPTSKACSECAAVQEEMPLNVREWTCPDCQTVHDRDINAAKNILRLATVGRTGSDARGGVHKPEVAYGY

SEQ ID NO: 28130 - protein, 402 aa, Escherichia sp.
MKRLQAFKFQLRPNGQQEREMRRFAGACRFVFNRALALQNENHEAGNKYIPYTRMASWLVEWKNATETQWLKDAPSQPLQQSLKDLERAYKNFFQKRAAFPRFKKRGQNDAFRYPQGVKLDQENSRIFLPKLGWMRYRNSRQVTGIVKNVTVSQSCGKWYVSIQTESEVSTPVHPSASMVGLDAGVAKFATLSDGTVFESVNSFQKNQKKLARLQRQLSRKVKFSNNWQKQKRKIQRLHSRIANIRRDYLHKVTTTISKNHAMIVIEDLKVKHMSKSAAGTISQPGRNVRAKSGLNRSILDQGWYEMRRQLEYKQLWRGGQVLAVPPAYTSQRCACCGHTAKENRLSQSKFRCQVCGYTANADVNGARNILAAGHAVLACGGMVQSDRPLKQEPTEMIQATT

SEQ ID NO: 28131 - protein, 372 aa, unknown
  TnpB Polypeptide
MKLTAKVKLQPTPKQAELLKITLETANAACSKISQVAWETQTFGQFSLHKLTYHPIRQQFNLAAQIVVRCISKVADAYKLDKKTQRTFRPLGGIAYDDRVLNWRLPSHTVSIWTMAGRQVIPFVCGEHQWQLLQTQQGETDLACIDGEFYLFAVCNVDQPTPLDVDGFLGVDVGVANIAVDSDGAIYQGKTVKNVRYRNRQLRRKLQAKGTKSTRRLLKQRSKKEQRFATWTNHNISKTIVATAQGTGRGIALEDLTGIRDRITARKPQRAALSSWSFFQLRSFIEYKAQLAGVLVVVVDPRNTSRQCPSCGYIAKANRKTQSKFFCIDCGFSGLADYIAAINIGRRAAVRLPNVSGVPDHRDSARDKAHVL

SEQ ID NO: 28132 - protein, 489 aa, unknown
  TnpB Polypeptide
MQTGRSFAAHFEDDASREAYLMWSAAQMLVYNAKVDESNYFWRFHCKFWSPEPLPKPDQKYAHLVNPDTVPWVKEVPSAVRGIGAYRFFQAMTRFMRGLSKRPHRKPIRNADRQLTLTRDCFSVKQVSQKWWELTFGSKKKTAGRIRFRAHRRFEMPAMVMITCTNQCLQLGFSYEDELTEFPETEEEILDRLRKLTPEELAERTIGGDVGVKIRLQLSNGESFNLSEIEKTRIARKDFGRRRHQRRLARMKPGSSNYRKQTRKIAKTYVYEKNVNNNFCHQTSHKIAVMEGIEVVALEDLNVAGMVRRPKPKYDDKGRAQPNGAAAKSGLNKAVTKSHFARLRTSILYKCRRNGKVAVFVNAKNSSRECSKCGYTAKENRPSQAVFCCRREGCGHEENADLNASRVIRKRGVKMILEGSAKKKGSKKLLRVPRAKKRNIGVDRPESMPAEPSVCSCVLHDVGIVAALNQEADAERVCESRSSGLQAGE

SEQ ID NO: 28133 - protein, 370 aa, Brevibacillus sp.
MILAKKVRLKPIAEQEKQLWKSAGTARWTYNWALARQEQNYQNGGKFLSDSVLRKELTQLKQTHEYDWLYDVSNNVTKQAVKDACEAFKKYFKKLAGKPRFKSRKHIKPSFYNDNVKLKVKNDRVLIEKIGWVTTAEKLPTNVKYTNPRVFFDGKYWYLSVGIEQEVEKPILTHEVIGIDVGIKHLAICSNGMLFKNINYFHAVKKAERRLSRLQRNVSLKYEMNKEGNRFVKTSNIVKVENAIRLLHRRLANIRNNHIHQATNAIVKTKPGIVVMETLNIKGMMKNRHLSRAISQQKLYEFKRQIQYKCEKYGIRFMEADKWYPSSKTCSECGQINRDLRLSDRIFKCQCGLEVDRDLNAAINLAKLAS

SEQ ID NO: 28134 - protein, 334 aa, unknown
  TnpB Polypeptide
MTKVHVYEQLKKLTDLKREKEWLREIDSCALQASVYNLDNAFQGFFHGKGYPKFRAKGVHESFRTNNTLSTYKNKKYETIRIDFNKRIITLPKLKEVKFRGYRTTKEMVGKIKSATISKDANKYFVSVLVEVPFIKPIINPTSVIGLDLGIKDFIVTSNGEKLKNEVRVNEKRLKGLQKGLARCKPGSKNRYKMKLKIQRLYLKIKNARKHMIFKLANKILKESDIVAVETLDVKSMYQVHSIAKHLNKVPIGDFLSVLKYKADWLGKKVININKYFPSSQCCNRCDYKNEEVKDLSVRKWICPKCGFEHDRDINASVNIMFEGLKIYMKESII

SEQ ID NO: 28135 - protein, 455 aa, unknown
  TnpB Polypeptide
VCDIVCYKFTDACDVRGKEVSAMFEAVRVALDPTPAQERRLASHAGGARFAYNAMLAHVKGSIDRGEKPEWSFWSLRKRWNAEKDTLAVDAEGSPWWSENSKEAYYSGIEALAKGLSNWSKSRKGDRKGRRVGFPKFKVKGRVTPKFTYGTGCFRLVKDDPKAIRLPKVGRVHCMEDVSERVGDGRVLRVTVSQRAGRWYVSLTVEREEPAVREAPKGGAVGVDLGVKTLATLSDGTVIENPRYLRKSERKLKRAQRALSRKTKGSNRRAKAKAKVSRLHARVANRRIDAMHKLTTWLTEKYSDISIEDLNVSGMVKNRHLAKSVSDAAFGEFRRQLEYKTARSGARLHVVDRWYRSSKTCSRCGSVKAKLSLSERTYKCDSCGLTMDRDLNAAINICVAGSAPETLNAHGETVSRNRPSGHVALDSVKCEPSVRESAVRLGAGGRKTVLRDIVR

SEQ ID NO: 28136 - protein, 479 aa, Vulcanisaeta sp.
VPSLGEFFQDGERGPTTPAIPGEGVYPVEYKNRRTNVVRLLPNGAQERKLQRIADATAKLWNELNFERRRQFFSSKGVDFRGTWSKYYEKYRGVLGVNAQAVMQKNNEDWNSFFTLLNMKKEGKLPPHMNHVSPPGYWKDRETGKRRMIIVVRQDRYVVDEQRHVIILKDFNMEIKFVGRLRWFGKQGRLEIIYDDTRNAWYAHIPVEVGVEETRTGKRSKHIVKGERRVIQIESPKGNKVAAIDLGINNLASVVVSDGTWLLYKGVRAKEDYFYMQRLISRIQSLRDSLKDKLLDDAIDELNHEMRRLFGKLMRRLLHLYRNLAKHLIEQLHELGVSTIYLGYPFNIAQQKGNKFTVNMWCYRKLMEAIELKAQEYGIRVFIVIEYNTSRYCAYHGVKVKRQPRGVIHCPFGHKLHSDLNGALNIMKKATGKIPITIKKPLSFTVDHNKVAPTKRGNTQDPNKPRLIGRERGQAENPG

SEQ ID NO: 28137 - protein, 287 aa, unknown
  TnpB Polypeptide
VLGELKEKLPLREDEKIKTFRLCKQQGNRFYAIFCIERPDAQRKDVKNWIAIDPNHKNLLMAVDNKGITYEFEKLSQIRYWDKIIDEIKSKRDLCLKKAKKVDIENGSTYYIPSRRWQRLNKALDNAYNCRREQIKSACFSIANWLSKNYDYAAFGDYTPSKKTAVEDTMHRSMLNQDVTGTLRKIVNWVMQRSGKTFSLVDEKDTTAKCCICGNKEKKAPNVREFTCIKCNSTLNRDINSGINIAKKDKLLSGSDYAGWNLFKPTYTAKWDFAKGKLHLQAAQARN

SEQ ID NO: 28138 - protein, 464 aa, unknown
  TnpB Polypeptide
MSTTVTITRIVYATATSKEDFDALARHAKAVGWLRKDLWHRFGGKAIMQFPFKDIRCKTTRLYENLSEMGFGKIDGTVRNESIKDILNDIKACKAAAIEMMKGRISARLVSEGIPEKKRKTELSKRMRLIRTGSYEKDPFLHRTVRNCFKHGQGHADNQFVVRSDKHIEEIRMINGRNVLVIKFRLCGKYLELHCNSNGTNVNLANTNLRIILDHDRVCVHYAATKTCSRPCGTKEAGIDKGYTEAVVDSNKKHYGTNFGKILTEYFDRNDRIMRNRNKLFALAQKHEANGNHEKAQRIRANNLGKIKIEGMRARFRNRIKDMAFKTAHALADEYGHIVSEDLTWGMSPNKWRSKGKTYNRRMSGWAKGSLTGALKTVFLQRGVYHDEVNAAYTSQIDSRTKRLEGTRKGDRFTGVDGVVLQADENAALNILDRFYDTQISRYATKEEVKRILLGRLSGATEHQ

SEQ ID NO: 28139 - protein, 416 aa, unknown
  TnpB Polypeptide
MNYFAYPSNLSVFHGFYRLHELYVSTVLRGFKYRMYPTLEQEVLLRKTIGCARLVYNRALADRSNAWIAGKKSIGYAQQSKALTTWKKDPELIFLNEVSSVPLQQALRHLQDAYSNFFLHRSKYPRFKSKRSGGSVTFTRNVFCLRAGKLTLAKMAEPLNVRWSRSLPDGAVPSSVSISLDSAQRWHVSIMCEDNTVKPLPKIKTAIGIDLGITSIVTLSTGEKIPNPKHDGRELARRKLLVHRLSRKKKGSKNQYKARIKLARCYAKITDRRKDYLHKLSTRLVHENQVIVVEDLNVSGMVKNHKLARVISDAGWRMLLTFLEYKCSWYGRELIKVDRFYPSSKTCSACGHIVEHLPLEVRSWVCPACKAEHDRDENAAHNILAAGLAVSACGPDVSHGVLRNAVQSGMNQEARL

SEQ ID NO: 28140 - protein, 416 aa, unknown; identical to SEQ ID NO: 28139
  TnpB Polypeptide

SEQ ID NO: 28141 - protein, 385 aa, unknown
  TnpB Polypeptide
MNKEEKNKKIAQRRQATYKRHSSMICKTYEIKAVSSKLNSEQKQSLNQYFKEAKWLRNFHIAHGFDRNLRDIKEIEVKVGKTLENRSLSILGSQVKQDIFDNLISELRSLSSNKKQGNKVGKLKYKSVCNMLPLRQYGTTYKIDFYHNRIKVQNIKKPFYVKGLKQIPEEADITNAKLVRKASGLYFYITCYEKPKIKVITNRQIGIDFGIKDNLTLSDGLTFNIKVKENETIKRLSKKLNRAFIKYGKKYSRNHRKLKVKLKVAYEKLTNQKKDQTNKVVHFLLNNYDYIAMQDEMIANWHSGLFGKQVQHSSMGFIKAKLKNSLKVHVVETSFPSTQICPICGSLTKHPLNKRDYDCKACGYHHDSRDIKSAQSILDYVLMMS

SEQ ID NO: 28142 - protein, 429 aa, unknown
  TnpB Polypeptide
MIRTHIFPCALPKPEGDALNQESGRIYTRVMVNHYRAFRQSGATWLSMYGAQKLDDYYGATGSPLLHSHSIDAAQEAFYKACKIARVNRGEGAHFPHKRKPWRSTIWKNTGIRGREGYLLLARAKGREPIRVDLPSHLVALPSNVLVEMRLVWDNAARHYTWHLVVDDGHPDAEPPGHAVMAGDLGEIHPITLTDGHTATVISARALRAVRQRTNKRLAEIQAVQSRRTKASCQWRKLQRRKNRFLAQQARRVRDIEHKVSRAAVDIAIAQQVGTLALGDVREVADGKRLNSKSQQKVANWSHGRLRQYITYKAKSVGILVELVDEHYTSQTCPSCGARHKPKGRRYRCPACGFVAHRDVVGAANILSRHTTGELSRVFPPEREKYRHPFCNRKTGKRSPVGTGQVAWQANHRATQEAAPLQGQRSATG

SEQ ID NO: 28143 - protein, 316 aa, unknown
  TnpB Polypeptide
MSIRQGFSFKLKPNGAQDKKMSRFAGCTRWVYNQGLAWNEERRTADPAFHLSYAKLCTELLVWKEQNPWLRETHSQVLQQSLKDLMDGFQKFFKGLTAFPKKHKKFVTTDSFRFPQGFKIDEGRRQIYLPSIGWVKYKRSRFIQGKAKNVTVSRQTDGWYVSIQTEYEMEPPKHAGDSIGIDMGCVRFCTLSDGTFFEPCGALKKALKKLARMQRRLARMQKFEKNWRKQKAAIARLHQHIANVRRDFIEKVSLNICKNHAEIFREDLKIKNMTASAKGTVEEPGSRVAQKSGLNRSILDQGWGIFFNKLESITPA

SEQ ID NO: 28144 - protein, 381 aa, unknown
  TnpB Polypeptide
MFRAIKVRLYPNKKQEQAINKLLGCYRFVYNYMLALRQNEYNGNNINLSLNDLSKYFFETLRKDENYHWLQEQNTQVLQQSIRQMCTAYDKFFKLHTGYPTFKSKKDKQSALFPIGAISKKNIFKERKITLTKSFKDIKFKCSDLYFKRLRIYKDKIKSATLSKTKSGKYFLSILVDIDEIVFTKFKKTGKSVGIDLGVKDFVITSDGKKFKNKHFFKKEEKKLKKLQKQLSRKVKGSNNRNKARIKLAKVFEHITNKKINYIHSVVNELLTKYDTIYMEDLNVNGMLKNHKLAKAIQEVAFYQFKVILQSKALSNDKKTVLIDKFYPSSKKCSCCGFKNKDLKLSNRFWICPQCNTKHDRDINAAKNILSEGQRAFEINV

SEQ ID NO: 28145 - protein, 412 aa, unknown
  TnpB Polypeptide
MLRAIRVRLYPTAYQATQINQLFGCYRVVYNQALDRKINQYKQYNISENRATLVHWFHNELLHNPDFEYLKEQNTKVLKQAIMDMLSAYKNFFTLHRGYPKFKSKHNNKQSCRFEIGAISKRNDYISYKLSLANIKNIKFRCNKKYAEYLQKNKANIRQATLTKLPCGEYNLSILVDGDLTHKGVKDTNNCIGIDLGIKDFVITSESKVFNNLHFKKNEANKLKRLQKQLSRKVKGSNNRNKTRIKLAKVYKKINDKKQYYLHQVSNTLINENQVICMENLNVKGMLKNHKLAESITEMNFGEFRRMLEYKARWYNRKIVFVDRYYPSSKTCCHCGYKNQDLKLSDRFWTCPECNTYHDRDINAAVNILHEGMRLIGSCTTEFTLVDYPTMDDRSEMDLKSSDRVKQEVNKE

SEQ ID NO: 28146 - protein, 592 aa, unknown
  TnpB Polypeptide
LSSKNMSKREKKQKEKRKRPTATPSFQVTLPVEVDEQQAKALAAHFEMARHLYNAILSEGLKRLKRMRADSDWQATRTIPHSQKAERNQAYKALREKHGFSDYALQQAVSSLRVGDQADHVEAVVAQVLATRAYRALNRVAIGQAKRVRFRSQGRGLGSVENKRNDTGLRFGFLDLPASPGAIPVPTSASPVSKSAAKRARRARNQKAREDKRRGGARSAGFIFWQGLSLRVRIDWDDPVVAHALSCRVKYIRLLQNWTSSPRACGADAHSLSYSVQLVVEGTPLRKPKHQKGQGQVGVDLGPSCYAAVPEAGAAHLEEFCADLSPKAEHGKKVYRLQRKMDRQRRAANPDNYDERGRVKKNSRSSPLHWKNSQGYRRTRRQSATAQRKRAAHRKSLHGKLAHEIAAMGETIVIEKLSYRAWQKQFGRSVSERAPGMFVAQVKRTVASTGGTLVEVSTRTTRLSQFCHGCGAFVKKPLSQRVHVCACGIGPVQRDLYSAFLAAFLDVSDPDDPQPPSCARYSVPWESGEARLRVAHDVVQQRAKEGQHLPRSLGVPRAGVRRLESQSDLSLEPANALPLLWRRNRLEAGRMS

SEQ ID NO: 28147 - protein, 517 aa, Blautia sp.
MHTLRLKLEMDKNTAHIMEKRFRILAHISNQIRKHAKKLLSRLENDKQYQQALDGYIRLKKLESDDKQVMADMKRLSKFMNETRKSIGLTKNELEKYASVMQRRYKKNISSHQVQAEVAHIMKGVDAVLFGNGKDVHYKKESDFHTIPGKSLSGVAIRFDQNNEKRQIDCYTKWNGLKIPVKYDISKPDMPDEKNYINESLSIGVIKYCEIERLWFKSGWHYYVKLYMTENAPKKITPGKSTMGIDEGPSTMAAVSESSVFLEELSPKCKDYNKQIASLQRKIDKSTRVTNTDRFNEDGTAKKNTKSLPPWKFSKTCQRSKARVRELYRRKAEYTKCQHETLLNNMIKDSSIFINEPMDFKALAKKAHETKRRDKASVIKNTDGTEKTVYKYKQKKRFGKSITDRSPSFLIARLKQKCEQYGMIYLETDKWKYKASQYNHVLDDYIKTALSERFKNIGAITVQRDLYSAFLQSCMDTVEKPDRKKCIQLFDNFVKMQNDLITEMKASGKSYPACFGF

SEQ ID NO: 28148 - protein, 260 aa, Blautia sp.
VIKQIKLYPPENGVCEVIVVYEIPDEDILPDNGRYLSIDLGVHNLMTCYDSTSERANTFIVGRKYLSICRYYDKEIARIQSQWARTQAEHGVKYPKLSKHAQRLYQSKRNHIHDYLHKVTRCMTMYCKLHNIHTVIIGDWTNIRKDKDFGDKTNQKLHSLPFKQLTNMLAYKLALEGIRLEIISEAYSSQTSPLAPDVSRRYAKKSNRVERGLYIDNDFAWNADCVGAFNILRLYLKQKEIDLTFDAKSISHPYVLKVAA

SEQ ID NO: 28149 - protein, 388 aa, unknown
  TnpB Polypeptide
MIKSIKVMLLPNNFQKTRLHQHAGAARFLYNWALAKEEENYEAGGKFISYYELAKELTEIKKTDEYAWLNDISACTCQAAIKDACEAYNNFFKKRARHPKFKSKNRSAPSFAQTDQAIEFTSTHVRLSSLSKSLKRNRKKLNWVRLAEHGKIPIDVKHSNPRITFDGINWWISVGIDYPENDVKLSEEGLGVDLGIKNLAVCSDDSIYPNINKTKAIKDLEKRKRRLQRSISRKYEMNKKGDEFVKTKNIIKDEKKLLKMHHRLSNIRKNYLHHTSKEIVEKNPKYICIDDLNIQSMMKNKYLSKAFQEQSLYEFSRQLEYKSNFKGITFIRADKGYPSSKKCSLCGRIKKNLKPYQKTYKCECGNVIDVHKQAALNLKSYGENIIAE

SEQ ID NO: 28150 - protein, 354 aa, Escherichia sp.
  misc_feature (15)..(48): Xaa can be any naturally occurring amino acid
  misc_feature (159)..(227): Xaa can be any naturally occurring amino acid
LDALPEQPSGHGCCXXXXXXXXXXXXXXXXXXXXXXXXXXXXXXXXXXRAAFPRFKKRGQNDAFRYPQGVKLDQENSRIFLPKLGWMRYRNSRQVTGVVKNVTVSQSCGKWYISIQTESEVSTPVHPSASMVGLDAGVAKLATLSDGTVFEPVNSFQKXXXXXXXXXXXXXXXXXXXXXXXXXXXXXXXXXXXXXXXXXXXXXXXXXXXXXXXXXXXXXXXXXXXXXKSAAGTVSQPGRNVRAKSGLNRSILDQGWYEMRRQLAYKQLWRGGQVLAVPPAYTSQRCAYCGHTAKENRLSQSKFRCQVCGYTANADVNGARNILAAGHAVLACGEMVQSGRPLKQEPTEMIQATA

SEQ ID NO: 28151 - protein, 402 aa, Escherichia sp.
VKRLQAFKFQLRPGGQQECEMRRFAGACRFVFNRALARQNENHEAGNKYIPYGKMASWLVEWKNATETQWLKDSPSQPLQQSLKDLERAYKNFFRKRAAFPRFKKRGQNDAFRYPQGVKLDQENSRIFLPKLGWMRYRNSRQVTGVVKNVTVSQSCGKWYISIQTESEVSTPVHPSASMIGLDAGVAKLATLSDGTVFGPVNSFQKNQKTLARLQRQLSCKVKFSNNWQKQKRKIQRLHSRIANIRRDYLHKVTTTVSKNHAMIVIEDLKVSNMSKSAAGTVSQPGRNVRAKSGLNRSILDQGWYEMRRQLEYKQLWSGGQVLAVPPAYTSQRCACCGHTAKENRLSQSQFRCQVCGYTANADVNGARNILAAGHAVLACGEMVQSGRSLKQEPTEMIQATA

SEQ ID NO: 28152 - protein, 423 aa, Cylindrospermopsis sp.
MYGCQQVLIKSDKSITAILEYLCTEAKKLTNCGVYYSRQMYFKTGYIPSRPDLHKQLGTYQKNVHYQALYSDTSQQILTSVAESFKSYIELVKAAKKGEVSQKPKLPNYCKSVMTVATFTGRSLKLIDGMIRFPLGTKVKAWFGIDSFCLPMPSNLDFKSIREVRILPRNRQFYAEFVYQVDEIKSDVDRNNVLGIDHGLNNWLTCVSNLGTSFIVDGLHLKSLNQWYNKSVAKLKSDKPQGFWSNRLAAITEKRNRQMRDAVNKAARIVVNHCIENKIGAIVFGWNKGQKDSIDLGSKNNQKFVQIPTARLKDRIAQLCKQYGIDFIETEESYTSQSSFFDCDNIPKFGEKPEGWKASGKRVSRGVYETSDGFKINADCNGAANILKKVAVMLGIDLSGISRGCLSQPQKVRLWTLQKSPCL

SEQ ID NO: 28153 - protein, 497 aa, unknown
  TnpB Polypeptide
MSQLASEIRGISSYATYVTRNDTQLEAGLAKAGSVQPAVAGRRAGVTMPEFLASGRTGKSRKEWLVRYNVVASFRSWQERIKATEGTSSKYVSQGWKRTMNTNPPSYGEGDFINLGVVDKQYAVIENDDPFGDGEIVLKMVIQGKWYRLIFPFDNKRFTVGKVTLPLIKVEDNQPVFIFSVVTDNPVVQFSGDYTIGVDVGINDYATVVVRNTVTGKVTYQATLSQRVHSLWNSVRASEKQVKQLREKAARLLNDRPRERQAIMAALDEADLHRAAASRKKRELAIVAAQEITYLSHFFDNAVVAVEDLSWVTNTMRNGRWNRGELVKWLTHYVSQNGGWVVAVSAFNTSQVCHVCNGEVAHPEHKVSRCPEHGDMDRDVNAAANIAARAVPKVEKARKKRAKNRKLQEQEPLKTPVARVSLKYPGQDRTKHVPTPKRKNHPRNVKEVTLPISPARVQASRVDTSVLAGCGTSGVAGTSYAAIKQGTITKYRLCSPI

SEQ ID NO: 28154 - protein, 416 aa, unknown
  TnpB Polypeptide
MKKMTDFSYKFGLRLRAYPSRNQKQVIFLNARASNYVYNRCVAIDQELYELNQVKIYSKPVQDRMNYLKSIRNNFRQIANMAPFLSAKEIDSMAGANAIANYNKAWKQYHAIPNSSIPVFKKRADHHSYQTNPHYSNEKVTGSYFVDESHIILPAVGRIRVKGERGYVHRLLTNTERLGTFTVALEPDGSCYISVQLGSDTPFVHLYPLVDNQIGIDVNLKNLLATSDGTVIDNPKYLYRSAEKLKKAQIKLSRKKESAKKRCPEGMKLQEYLSSCSGYQEQRKKAAHINQHVAQQRMNYLHEVSSSLVKNHDVIVREDLRVKNMGRNHKLAKAIHDVSWGELFQQLDYKCDMHGRMMIKVRPHMTTQTCNVCGYELPEDNRLTLKDRKWICPHCHTLLDRDINSAKNILMRGFTE

SEQ ID NO: 28155 - protein, 392 aa, unknown
  TnpB Polypeptide
METQTAYRTLVLGYDLYRPEVAERISALLKIHEEFCRWATEWVRSGGREPPPKQNPLKYFAEKYIHAGRALDWLRGIKKSNIKTEKARPPLIFNAQLRVENERDVGNGVLVDLPKKEVRIRRWSGQQGNTIVLQLSKSAVRWILERVKEGGKLVLAAVWVGRSRRNHVAKLHVALVFRREVAPMQPKRLLVVDLNALHNGLVWAIIDGEKIAARGAMRPDVSKILRLHKAVAKLDSLCAKEERACDEAAAAKSRIWRLMRSWEDEAAKKLVQLAIQYKAMIVVDVPYDESVKALKEGKYSPQRKIFLNFGRLRKRLKSLAEWYGVPYKEERLYSTICPRCGGKMKVLPNRRVRCACGFEAHRDEVPIFWAVKRFRELIPSFSGSTLSSPSPS

SEQ ID NO: 28156 - protein, 402 aa, Escherichia sp.
VKRLQAFKFQLRPGGQQECEMRRFAGACRFVFNRALARQNENHEAGNKYIPYGKMASWLVEWKNATETQWLKDSPSQPLQQSLKDLERAYKNFFRKRAAFPRFKKRGQNDAFRNPQGVKLDQENSRIFLPKLGWMRYRNSRQVTGVVKNVTVSQSCGTWYISIQTESEVSTPAHPSASMVGLDAGVAKLATLSDGTVFEPVNSFQKNQKTLARLQRQLSRKVKFSNNWQKQKRKIQRLHSCIANIRRDYLHKVTTAVSKNHAMIVIEDLKVSNMSKSAAGTVSQPGRNVRAKSGLNRSILDQGWYEMHRQLEYKQLWRGGQVLAVPPAYTSQRCAYCGHTAKENRLSQSKFRCQVCGYTANADVNGARNILAAGHAVLACGEMVQSGRPLKQEPTEMIQATA

SEQ ID NO: 28157 - protein, 325 aa, Okeania sp.
MKARFKYRIYPTPGQKYRLAKLFGCVRVVWNDSLAYCQQRYKSGEKKSTNSELQKLFITQSKKTEEREWLSEVSNIPLQQSLNDLNQAYQNFFKSTKGERKGRPIKPPKFKSRKSKQTARFTKGGFKVGQHKVYLAKIGKLKIVWSRELPAPPSSVTVIKDSAHRYFLSFVVEIQPEILPKTDNSVGIDLGIKTFATFSDCTKVDAPKPLKKRIKKLRKLSKSLSHKTKGSKRYEKTRIRVAKFHAKLKDTRTDFLHKLSTEIIRENQTIVLEDLNVSGMVKNRNPPPSPPGRGARGVGIRFRLENIQDFFRRKSRKIWSRFQSN

SEQ ID NO: 28158 - protein, 402 aa, Escherichia sp.
VKRLQAFKFQLRPGGQQEREMRRFAGACRFVFNRALARQNENHEAGNKYIPYGKMASWLVEWKNATETQWLKDAPSQPLQQSLKDLERAYKNFFQNRAAFPRFKKRGQNDAFRYPQGVKLDQENSRIFLPKLGWMRYRNSRQVTGVVKNVTVSQSCGKWYISIQTESEVSTPVHPSASMVGLDAGVAKLATLSDGTVFEPVNSFQKNQKTLARLQRQLSRKVKFSNNWQKQKRKIQRLHSCIANIRRDYLHKVTTTVSKNHAMIVIEDLKVSNMSKSAAGTVSQPGRNVRAKSGLNRSILDQGWYEMRRQLEYKQLWRGGQVLAVPPAYTSQRCTCCGHTAKENRLSQSQFRCQVCGYTANADVNGARNILAAGHAVLACGGMVQSGRSLKQEPTEMIQATA

SEQ ID NO: 28159 - protein, 454 aa, Candidate divison MSBL1 archaeon
MFEEKRCVEKMQTTVCGKLFPTKNQAWELDDLMRVQSSCMRYSYNRLCEGKTKSRIETDIKQKFGEINSRYRRGGYFRAKINYKSVLELVEAGNLESPEKVVFGGRENLKKRERGKISNEEWKRLRNNQLYSRGDKSKGGNLNLRFVKRNDRLYLRVNTGGREWIYTPAYLPPKARKRVLEGEEAYGVRILRENGSYGLRVNFEENHEPEVGFEKGSVGVDFNHRTIDLAVTNEQGQFKDSKMIECPGITASRKNKREWLIGSYAKEVVEYAKYWNRGLVLEKLEDVARGRRNQHEFTYNKFLEAVKRRAEREGVEVREVNPAYTSVIGRRKYAPYYHITIHQAAALVVARRGQGFSEHLRGLKTPLFEALEAGEEGENVPDRRVHSWSLWRLTRNLPFHKGAKRKHLSQSLETIGVESSGTIASTERSPGEGDLPGGETVSPGSGPSTRKVVA

SEQ ID NO: 28160 - protein, 310 aa, unknown
  TnpB Polypeptide
MNLTEIHQIKPNHELYSICDELCFKSKNLYNAALFEFRQSYFDKELDALNWQNINRIFNQTNQYDYRELPAKVSNTVIKKLGNNLSSFWSLIKKSDYKKKVRVPKYLHKTEGRFIVEFNKQTFSNKRDEDNNLIICKSSLNLKIPTKVENPQQVRIVPKKWYYVIEVIYEVKENSIKQNQRVASIDLGLNNLATVVTNDGDNPILISGRKIKSINQYYNKRTSREKSLLPKNIYTSKSLGRLWLKRNNKITYEIHKITKFLANYFDERDISKVIIGNNTGWKNGINIGKRNNQNFVNIPYTTFINQLTYN

SEQ ID NO: 28161 - protein, 405 aa, unknown
  TnpB Polypeptide
MNLTEKEIIYSTDERFDLIKELCHLSKNLYNASLYDVRQYYFKTKSYRTWQSQWPIFTKTKNPDYYALQSHVAGEVLIQVGKQFIGFFNNKSNKKKRIPKYKDKNGYNIITFPKATISKKIEFNECKGTYTYTLCKKSYNLKIQSTKPNIKMVKFVYDETSDLIKCFKIYEIEQPKLKKDNSRYFSIDPGLNNIVSIYNNIGIRPLLYNGRPIKSINQYYNKITAKLRSELPSSTKNSKRLKQLSFKRNNKIDYEMHKISTHIINEAVKNNISKIFIGNNIGWKNEINIGKKNNQNFVNIPHTKLFNQLLYKGILKGIEVIFTEESYTSKASFFDKDELPKYGESDNHKFSGKRIQRGLYRDSKGNIWNADLNGAANIMRKCSDKAYKGIRKTKELMKQPILVTL

SEQ ID NO: 28162 - protein, 430 aa, Halorubrum sp.
MAWDVTRTVQIRLDVPDDRKSDLHATNQQFQYCANRTAEWAWRYPHGDCVTSKSEAEQAIYDELREATDYLHANLVQKAIKRATKDIGNCVDRLSDGEKTSQPHYDTFSIVYDKRAATFYRDKVSLATVNGRVECEYDLPEHPEQTPHGEYLLNDDYSFSTSTVHYDNETDEFYLHAAMERTIDADSPEKAEDSKVLGVDCNVDDHIAVTSTGRFVGNADLLNHERREFEKRRGDLLQTGTRSAHLTFQRIGDRFGRWSEDYIHRCSKAIVAEAQRHDCTHIAFEDLGQIRERISDGKKFQQWAFGELQEQVENKAEMTGIVVSKVEPAYTSQQCSQCGCTLEENRNGQNFACLDCSYAVNADYNAAKNVARKLALQLQRGQKSPAGGAFCQYALKSGTLIVNATGVASDHYWSAERESTDKPIASAMGS

SEQ ID NO: 28163 - protein, 343 aa, Moorea sp.
VFNKTVKILENGEIKANWKAIKTGILNDLPEWCLAVPYQIKSIAIKDACTAVREAKKKYQKLGQINRVRFRSRKNPVQSCYIPKSAVSAKGIYHTKLGELTFVETLPDQICDCRLTSTNGDYYLTVPHKTTRSKTENQGRIVALDPGVRTFLTFFSENSVGKIGHGDFSRIQRLCSYFDNLISKISKANGKQKRRMKKAARRMVIKIQNLVNELHHKAARFLVDNFDVILLPTFETSQMSKKANRKIRSKTVRNMLSFAHYRFKEFLKHKALETGKLVVDVCEAYTSKTVSWTGELINIGGSKTIKSKIDGQVMDRDINGARGIFLRALVDTPWMRKHLALAG

SEQ ID NO: 28164 - protein, 394 aa, unknown
  TnpB Polypeptide
MYQVERHVIKDNRYEEICHKSGLLYNYCLYAFRQGVFTGNYIKEYELSTKLGKENQYDFRNLPCHVSRNVIKQVSENIKSWIRAKKEYEKHPDKFQRRPKLPDYKNGKKLNIVVFDELSCRIKEDGCVHFVKNIIKPIRTKVKPDELIQIRIIPEATCFIVEIVYERKETDLGLDKDNFLSIDLGLNNLCACVSNVVESFIINGKIAKSVNQWYNKKKAKLMSFVGNKGTSNKIKRITLLRNCWIEDKLHKISRYIVNFCRSNNIGTIIIGLNKGWKNKINIGKRNNQHFVSIPHSKLINKIVYKTKLLGINVIIHEESYTSKIDHLAFEPLKKQESYLGKRKKRGLFQSSIGKLINSDINGAIGIARKVIGDSFIGKIIDSGFVFNPIRLNVL

SEQ ID NO: 28165 - protein, 292 aa, Xylella sp.
VHDRFTLTNDQFDLDASRIRIPRLGWVRMRETLRFAGRIMSATVSRVAARWFVSITVDLPDPSHLPQAEKQGAVGVDLGVLALATLSTGETICGPRPHRALLGRVRRLSRSVSRKVKGSTNRHKAKATLAHLHARIAAIRLDALHKLTSDLTRRFHTIGIENLTVKGMKGMVKNRHLARSIADMGFFEFRRQLEYKAAMCCAQVVVADRFFASSKMCSTCGHTLKELPLSVRQWACLGCGTRHDRDVNASVNLKNMAVSSTVSACGEEGAGPRRKTAVQPPSVKQEVSFESV

SEQ ID NO: 28166 - protein, 453 aa, unknown
  TnpB Polypeptide
VQEKIMITLKIRYTVQESFKDTISNYQRQYNNLLHLFYNRLKEGISETACKHLEFNNLELMNSWFRQSCVKDASYLIKDSKDEVILFGGKKLFEQRFRKNISKEDFKEKKLVPFTSTGEGRCKGNRLFRLVESLDRVIFQPKSGTKISLNLIGVGKNRVSILRKLYRHQLSCDLPITYKLDKQYVYISFDEIILQEELVKPIENRVMSIDMNPNYMGYSILDWKDSEKFEIVKTGIISLKSLNDYDKSLKDRKLPSNSNDRVYTHNKRVYETLESSKYLIKLAKHYQCECFAIEDLNMKSKDLGYGRANNKLILNNWNRNKLSSNLEKRCKILGIKFLKVIPNYSSIIGNLVYRNLQLPDPILASIEISRRCYEFNLQYIMKIKNKTKNIVLPILESLKDKVKHSLEEVKCFIDFENWQELFSLLKKSKLKYRFPFDEKVFESKTLKLVNQFY

SEQ ID NO: 28167 - protein, 428 aa, unknown
  TnpB Polypeptide
MSKEFITLEERQRIRDTRNATRERRKTQVIKVFELKVNCHHTSKETFETLNSYFKQAKWIYNDMLAYSETQDIFDYKYTEHREVSRFDKDKNKIIEKLDIPSVYHRRLIVQLKTNITNLSKAKKKGKKIGKLKYVSEIKSIPIITGYTKIKNKRHITIPGFKNLTVYGLEQLNKYQKYELAEGRLIKRPDGYFVKIAVCIDKDALESKKTYKEVGLDFGVKISVTTSDGKKFDCNVRESEQLKYLQKHLHRKQKGSKRYYKLLKQIRCEYQHLTNKRNDACNKIISYLKSNYDIIYFQDEMVKAWHKGKHSKKTGRKCGYSMGKKIQHSILGRLKTQLQMLQSEGKAFMISKNLPTTKFCPNCGNLNQLTLADRVYTCSCGYSEDRDIHAAKNIKMFGSTKRAECLEQASAETSSSTSQSLNRDLLCK

SEQ ID NO: 28168 - protein, 433 aa, unknown
  TnpB Polypeptide
LKTISLPYNCSIEDRNFIKDEISKSSNMVRYSFNRFKENLSEKEIRELSKSLNRIPSDSWLIQCAIKKAGYLFKTNKDSKVIFGGKFNFFQRLKKKINRGEFKNNRLLSIYSQGEILRNGNRKFKLDLDSNSVIFKFSSKKHIKLQLPNLRKNYLYELTKLEELCSNKKASFSVELKLDTISITFDEALVYPSDYQGFSNRVAAIDMNPASIGFSISEFDGDTQKVLYSELIDFSYYMKNLHKSSDSKDFKYQNNKQKHELREVAKRIINICKNFKVSQFGIEDLNFKSNNNLNVRELNRRTKNKWKRICLVQAIRKQCILNNIEFKEVNPCYSSFIGNLSYNYPDAIAASLELARRANFKYIKGKFYPSLITKESLFNHWKESVDWMYKSWKELFDIIKMSELKYRHSLEEYSSRVFSKFYSKSKITLYGFK

SEQ ID NO: 28169 - protein, 427 aa, unknown
  TnpB Polypeptide
MIEEKRILKNKQISETKKTTIDRHKSMDVKTFCVKIQENRLTKEQRYALETVFLEQKWYKNYILNWLEANSENKLKEFNTKLTNITKKDKNLNDIDIKIKFLSAQSRQCLVSRMIANLKTMKTLRNKGLQKYGKLRFSKEEFAIDLKQYGVSHRILTNKRIKIAGLPKTFIVNGVKQFKDIQGIEIANARLLHKGGGYYVQFVCYIPKTELKSKIDGIIGIDFGCSTTLTLSNGDKFSVKIPESERLKKCQKNQARKQKGSKNWHREVEKVRKAHQKILNKKNDLANKIVAKICQFETVVIQDEQLSNWHKNSHSKAIQYSILGRVKSKLKQKPNVRILNKFLPTTKLCTNCGKYHDKITQYDRVFKCDCGVNEDRDIHAAKNMIWFYKNVGVERANFKRAEMKALVASIISANNQLLSEKHEADTF

SEQ ID NO: 28170 - protein, 448 aa, unknown
  TnpB Polypeptide
MLTLKIKYSVQDCFKDTISDYQRQYNNLLHLFYNRLKEGISETACKHLSFNNLELMNSWLRQSCVKDTSYLIKDFKDDAILFGGKKLFEKRFRKNISKEEFKEKRLVPFMSAGDSKRKGNRLFRLVESLDRVIFQPKANLKISLTLIGVGKNRIKILKKLYQHQLACDLPITYKLDKQYIYITFDEVILQEKLVKPTENRIMSIDMNPNYIGYSILDWKDSEKFEVVKTGIISLKNLNDYDKSLKDKKLPATDSERIYTYNKRVYETLESSKYLIKLAEHYKCECFAIEDLNMKSKDLGYGRVNNKLILNNWNRNKLASNLEKRCNILGIKFLKVIPNYSSIIGNLVYRDLQLPDPILASIEISRRCYEFNLQYVKKIKTKTKNIVLPILESLKDKVKHSLEEVKCFIDFENWQQLFSLLKKSKLKYRFPFKEKVFQTKTLRFVNQFY

SEQ ID NO: 28171 - protein, 548 aa, unknown
  TnpB Polypeptide
MALINYEKEGAIMPLTEKKSEGNFVTVECLLAFDKDEDKERVLSTMRKFSSMVRFAYKRLLEGASSKELKKLLAQKYGINTRYSSDAILLAQQTLESCVEREQNPKKLVFGSRELFEQLKKKHLTGKRRETLRQKWEERRYGTLYSRGDKSLQGNLNLRLVNLSNQWHLRINLGNGEYVWAKVTRSVKRKTDKWIDFISSIEHAEKTGDWFPYTVRLKLRNGKTYAQFSREEKLPEVAITKDNGVIGIDINAYPFHLALVHTTRDGNLEKYERINLDKLLEGSSEKREYLSWQIAYQVLESAKRERKAIVVENLEKLPKGKRGDGLPKLRQRLQKWIYKALLQKIEIVAKRNGIQVIKVNPAYTSIIGKLKYAPLHNIDKDTAGAYVIARRGIGFKERLPKNYRKLLEDKEFLSYSVARVEDRIAKLRKEIETEKNEYKRNKLRSDLIRLKGELKLLLKSLMDSGESEPAAQQTVNRKMERVRGLTHVRQKSWQVLSVALAFSCLESLRDLSPLKRVILTRDWVGVAKRASPSLPGQGTSVLNMYSFV

SEQ ID NO: 28172 - protein, 312 aa, unknown
  TnpB Polypeptide
MEYGPRFRLLPTTPQRESLTWVKNTVRQVRNHALYRLDDIPEDEGTVRQRVWKVRDELPALKTWWTDLTTVYSTVLQHAVEQIYHDITNLGKAKAKGFTVGDLNWKKPREYKSFTYRQRGFELNKKSGPKGRGLLILKKVRGETLEIPIRLHRDINPDAIKHVTVKQEASGAWYASFNVERDEPEKPAPEDIDPANAVGIDLGVLNFTHDSDGVSVGRLDLSSDRERLEREQRNLSRKQYESNNWEKQRRRVAKVHERMSNKKRDYKHKLASYYTAEYDAVFVEDLNVKSMLEDSGNARNKAEVGGVTSLLF

SEQ ID NO: 28173 - protein, 400 aa, unknown
  TnpB Polypeptide
MKKEVFAAFRFRVKVRKEEARKTYEVMKRYRENIKKIKVLVKLLTKQGHSEEEALRIAVQRYKMKNLIIRNREKLVEAYIKSKCYRADSLILFNRYGYKYTCYIGLKENKVFLRIGGEINTWLPIKRSIFKAVKKREEWGWKPVFVILKFLCFTRKNGLFEVTLIFKVSSKKISLSGVKSALNENKLSVISVDLNAVHGTYFGVFRVKDNELKEVKVMKVNVDWCLLERHVERRAELQGKLREKGLSSREFRELRQLERRISNLVQYPKRRGLSILRELIRGEQSLGRVVVVVLENISEKDVQKMCNHGSEINRTIKWFMSGWQKRVKFLARIEGVFFMIVNKEYSSKKCPVCGKVMKYIDNRWLYCSQCGKSYHRDLVALRNLAIRALEKIKKHNTSLP

SEQ ID NO: 28174 - protein, 450 aa, Lachnospiraceae sp.
MKQIGNAGIIRVELNHINKGTSRILKDTIAVFRDVVSYLTHAACDHLEEVLPLSSFDETTFMDGLVHRTKNNPSPAYPEFDVLFRRLPSYIRRAANHAACGQVRSHESNCDHYYAWRDDLVKRRHHVRKMEPGFSYTPNVFPTVYRDQSYSLEDNTISIKVWKNNSWQWIKVSAPARDLKRLAAAAAHGKVMNPKLVYAYRKYYLEFPVQYKTSGFSKTPLYEQRVLGTDLGLNNGAVCSSVDAYGSIHGRHFSPFKEEMARIDHIIGLIRKKSHTSGKGQSLSSLYTKLQGLKEDYCRRLARWIVDTAVSERVYGIVLEHLDKMKGHGRLSARIHNWCRAKIRDYISGMAFREGIRVFIINPKGTSMYAFDGSGLIVRDKKNFSKCTFVSGKQYNCDLSASYNIGARYFLRTIKKSIPATEWSQAVAKVPGLAKRTTWTLDTLKQAASA

SEQ ID NO: 28175 - protein, 251 aa, Kribbella sp.
MVGMSRFRMYPTPTQQAALLKHCGHARYVWNLALEQWSMRTRDRRVTPGYIDQARQLTEARAAFDWLRAGSQTVQQQALRDFDQAVKNYYTGTHRRPTGRSAGRHEGFRIVGRQATRVRELNRRWAAVNVPKVGWIRFRSSRAVPDAKSYRITRDRAGCWHLAFTAIPAPFPGPGTGEVVGVDRGVTVSAALSTGELLSCPSLSQAEEFRLRQLQRRLARCRRGSNRRQRVQATIAKLRARGRSRRKDWVE

SEQ ID NO: 28176 - protein, 369 aa, unknown
  TnpB Polypeptide
MLKAYKYRLYPNKQQIKQIQKTFGCCRFVYNQTLAYRKDLYENKKESMNKIACNNYVNQVLKKEYEWLKEVDKFALTNSVYNMDSAYQKFFKEHSGYPKFKSKRDNKKSYTTNITGNNIEVSFERSKIKLPKLKWIKAKVHREFVGKIKSATISQNSSGKYFVSILVETKHILMKSTGCIVGLDLGIKDLLITSNGEKFDNIRTTKKYEEKLAKEQRKLSHKEKGSKNWNKQRIKVARIHEKIHNTRIDNLHKISHKLISENQVIVSEDLAVSNMVKNHNLAKAIVDCGWYELTRQLSYKAEWNNCQYIKVDRFTKTSQTCHVCGYINPDTKDLSVREWTCPECGAVHDRDINAAINILYAGLRMLEVA

SEQ ID NO: 28177 - protein, 408 aa, unknown
  TnpB Polypeptide
MVLVERHTIKSKHKFYNELDNLCWLSKNLYNSTLYSVRQYYFENKKFLKYQVVNKMYVDNNNPDYRALPAKVAKYTQMLVDYNFKSFFGLLKLKGKGKYDKPVKIPKYLDKKKGRQIVHYEKGAISFKEQGYIKLSKTNIKIKTKLTKDKVQFVRLIPRNNHIIIEIGYNVIEKEIIQNNNILAIDIGVNNIASCVTTNGDKFLINGKQLKYINHNYNKKIANIQSKLKLTHNKNKSRYTSNITNKRNNRINDYLHKITTYIVNQAVSNDITTIVVGYNKEWKQDTNIGKINNQNFVNIPFYKFISMLDYKCKLKGIIFKTITEEYTSKCSFADDEEITTHTSYMGKRINRELFKTKKGIIINADINGAYNILKKYMIKNATWNEKISQTLVKVCSIPSVRKINIALA

SEQ ID NO: 28178 - protein, 368 aa, unknown
  TnpB Polypeptide
VILSRKIRCLPTPEQLIKFKKSAGTARFVYNLMLSENRKAYNKYLKSNIKSKSPFISGYDFGKYITELKKLTEYSWLSEVSSKVSKQACLDCDNAFKRFFKKLSNFPKFKKKGIKDSFYVRYDSIKATQRGFKCEKLGEIKTSESIPKSNKYYNPRIIYDGKYWYITFGIDVPEKVNENNSSETLGVDLGIKTFATVSDGTVIPNINKSKKPKSIYRKIKHFQRKLARCRKGSHNRIKVVKKLQLLHRKLRCIRQNHIHQATTMLVKTKPAKIVIECLNVLGMLKNRKLSRAISEAGFYEFARQLEYKCKLYGIEFIKADRFFPSSKLCCECGCKKDKLKLSERIYHCEHCGNVMDRDLNAAINLSCL

SEQ ID NO: 28179 - protein, 344 aa, unknown
  TnpB Polypeptide
LLNKEPHALVYADPRATYGLMAQHAIRAIGVVVDAYKRDHETKRTFRPEGAVVLDTPRLYRVDGNHAAITALDGRLTVRLNIGGIQRAQLKASTKLREADLVCDRKGRWRSMVAARYPDPAPRATEGMLGVDLGRRDIAHTSDDESFSGEQVTAVRDRYSRTRQLIQRTVSKGTRSSRRRGRSTLARLSGRERRFQRNVNHTASKRIVQAAYTGRAIALENLTGIRDRTNGQPRCKTERRRSNSWAFHQLRGFLAYKAHDAGLPLVLVNPAYTSQTCHCCLHMGDRQGKRFRCINPSCLWSGDADFNGACMIALMGAAVTSPRGPYPSCLVGHGGRRAPESRRL

SEQ ID NO: 28180 - protein, 390 aa, Deinococcus sp.
MENNTTIRTFRYRLYPTKPQEAAMFETLRLTRTLYNAGLEQRREAYRKHGKTLSAYDQQRELTALKAECPEFAGVYSHVLQDVFDRLDKAYKAFFSRIKKGAKRAGFPRFKPAQRWDSFKFKQCWDNKKGDWTACGRPVDDGRRISIPKIGNVKVKLHRPLEGKPKSLQIVHDCGQWFAVYACEVPKNPLPATGSSVGLDLGTTWFAVTSDGEFIENPRHLGNSLKKLRVQQRTVARRKKGGNRRRKAVQQVAKTHRKVRRQRLDFQHKTARRLIYEHDVIAHENLQVGNMAQSNLARSILDAGWAGFLFQLAAKAESAGRQVIAVDPRYTSQRCHACGHTGKENRVNQATFRCVQCGHTANADHNAAKNILARALPSGVNGSGVSHAVA

SEQ ID NO: 28181 - protein, 427 aa, unknown
  TnpB Polypeptide
VITIRYKYRLYPTDKQKQDLAKLFGCVRVAWNDALGFCNEVYQETGKKPSFNEVSRRLTEVKQTEERAWLQEVPRVPLQHSIRDLEVAYKNFFSSVTGKRKGKKVRPPKFKSRKSRQSARFHGNAFSIRKNGKLYLQRLGDFKVRWEKDRPLPPASSVTVIKDPSERYFVSFVVEVDRPRLPDNEQSVGIDLGITDFATLSTGEKIKAPKPLKTRLNKLRKAQRKLSRKQKGSKRRERQRLRVAKIHAKIKDTRDDFLHKLSTRIIRENQTIVLEDLNVSGMLKNRKLSRAISDLGWYTFRTMLEAKSAIYGRDFSVISRWEPTSQRCSSCKQIGGKKELSVREWTCLFCGETHDRDVNAAINIKVAGGYSETLNGHGGRRNSSLLVASDEVSIALAGEGSSDRKSKKGKRKGNLKQAVNLIQLTLF

SEQ ID NO: 28182 - protein, 473 aa, unknown
  TnpB Polypeptide
MAKVTRILHSQGLNRSKFDLLDHMAHLCSRVRADAWRRCSGVATAHRSPYDIRDGWMAEKYDWHGLPARLGKSTLADALGDIKASREAAKVSVKSAIRKRTQDEQERKRLHVLLKTNAWTGDPFLHRQMRKSWKGGRSRVTNQIVADTNSYTAKIWHGRAWISLQTLTRGRRVAIPLKGTHLPVGTIRIILQDDGQVEVHYADDEQQVCTTLPCGEATVGVDKGYTEAYTDNDGERYGAGLGDLLAAESDYSKDKGEKRNRLRAVEEKHRAKDNDRKADAIRKNNLGRNKWNRRRRLHKKRARDRIFHATHGVVDKACAIAVEDLTAPMASSRRLHRDTKRRLGGWTKGLMAEAFTSISRRRCSTLALVNPAYTSQIDSRTGLLQGTREWDRFHCVDGVVLDADTNAACNILERAYDDEITLYTPYRKVKALLLERTRTAVGTAPPGLELQGHATTSLSTESELPRSVPKGAD

SEQ ID NO: 28183 - protein, 387 aa, unknown
  TnpB Polypeptide
MGEVIKTCRVKLNILRERRQDVLETFKQYNFAASFCVDKAWEPKKKITDRLELHKLTYYPLREKTDLVAGLIISARNKACDAVRLCVVNWSRKRKASKPVFGSFSAIRFDKNTVTVKNRECTFSALGGRVKAKYVLGDYQKKILDDPDYEFRTGTLTFNGKDFFLNISVVKSVPIKETGTIMGVDLGINNIAVTSTGRFFKAGILNDKRRQYAERRSKIQRKGTRSAHLLLKRMSKRENSFSRWVLHNVSRRIIEEAKRVGASVIAMENLKGIRERTKKRGKSHRHRISLWAFFRLQRFIQYKALEEGINVQFVDPKYTSQRCSKCGSVCQSNRNGSVYHCRACGYQVHADYNASKNITYLVREGKSSFLDWAVCKPALNQELVMVH

SEQ ID NO: 28184 - protein, 419 aa, unknown
  TnpB Polypeptide
MQLTQKICIFPTPEQKEVLWKLSERCRLLYNFALAERIDAWKQGKRVGYRKQQNDLPEIKRMYPEYGWVYSKVLQMVLQQLDADYKSFFALWKNGHKDARPPRFKSRGHFVAMLYNQSGFSVERGKVRLSHFYNGVPLEFEIQEKFEFGHVYQVTVYKDGEDFYLSIVYEREEKPYTDNGLYQAIDLGVDKIVTAVNSHGKFLEVKNQRPDKYWQPIIERLQSRRDHCRRGSRRWKKLNLNLKRCQRKCANQLRDFQHKLSRKMVDNTLANTIIIGALEVKRMAQSEKVPKRMRNGLNRATQNTGTLSRFARFLTYKARLVGKKVIEIDEEGTTRTCYVCGREHEMEIWDRVMRCECGNELDRDRNSAVNLMLRFLSQNAKWTGYSRFAGNLRQTGLPAPSELVVHPQEATLFRAGLFT

SEQ ID NO: 28185 - protein, 441 aa, Moorea sp.
MAKKKLKVGVQQILLHPDKETEAILNYLCEQSGKLYNMGVYFSRQVFFKTGKLLTGKFDLIYEKSVGKTIVAKSLPSTPAQQTLMSVAEALKSYKKLRESWFKGGLKSRPKPPGYLKGKKMFKVSYPNSGGQKPKRHEDLITFSLGLNVKRWFGIKNFSLSFPSNLEDIKIKEWTILPKNGAFYLEVSYEIPESVQVKDKSKEALSIDLGTSSNLAACVDTLGNSFLIDCRAMKSFNQYWNKQVSTRKKGRAKDYWDNWLDRVTRKRNHRMRDGINKAAKIIINHCLEYSIGTIVLGWNEGFKQCSNMGRINNQQFVQIPLGKLKDRLSQLCSLHGIHLELTEEAYTSKASYLDGDSLPAYGEKPSGWKASGKRVKRGLYKTSNKSIVNADLNGSANILRKVARKLGIDLSRLSRRCLTTVAKIRLWTLPKFILSAESPRL

SEQ ID NO: 28186 - protein, 420 aa, Verrucosispora sp.
MAAHFLSAMIISFGKICRVRTAYRCRAYPTPEQAAVLNRTFGCVRVVWNRTLAARHRRWHTERKSTSYAETDRALTEAKKLPELAFLNDVSSVPLQQTLRHQHTAMTAFFQKRARYPRYKSRHGRQSASYTRSAFRLRGGNLSLGKTPGTLRFVWSWPDIDVTTLDPTMVTVSRDPDGRWFVTFAVDIDAPTAPEPTGRVVGVDLGLTDFMVLSTGERIAHPRHMQRRERRLKRYQRMMARRKKGSANRAKAKRKVARAHSRVRDARRDFLHKTSTDLVRRFDAIAVEDLAVANMVRNRSLAKAISRCGWAEFREILTYKAHRDGRHLAVADRWYPSSKTCSACGHLLATLSLDTRRWSCPSCGTRHDRDINAAKNIAVAAGLVETINACGADVRHEGSPSVLSAMNQELSPARVRTPRL

SEQ ID NO: 28187 - protein, 317 aa, unknown
  TnpB Polypeptide
LLTQLKKETEWLRESDKDSLQKSLKDLDNAFQKFFKEHTGFPKFKSKKDRHKSYRTSCVKTTGGGNIQFLDKHIKLPKLGLARTRDKQIPQGRILNATISQEPNGHYYCSLCCTDAEMPQYQKTNKNIGIDLRIADFAIFSNGTKIENPRFYEKSEKKLAKLQRELSRKTIDGSNWDKARIKAANLHKHISNQRNDFLHKLTTDIVQNYDVICIKDLDVKSMRETDNKTRNKRVGDVSFYEFCRQITYKSQWYSKQLSVVGRYYPSSQICHICENRDGKKSEDVRVWICPNCGSELDRAINASINILHEGIRLLSCK

SEQ ID NO: 28188 - protein, 456 aa, Nonomuraea sp.
MARGRRVRRRARAGAGALGRSAGGRKRSASSPGRSAASSSAASAMSRCSALNRRYGQGVQLRYNVRLYPTAGQRRALARAFGCARVVFNDGLRIRRDAHAAGLPHISGGDLSKQVITRAKKTPGRSWLGEVSAVVLQQALADLNTAYRNFFASLTGKRKGPKVAPPRFRSKRDNRQAIRFTKNARFSVTMGGKLRLPKIGDVPVRWSRDLPAEPSSVTVVKDAADRYFASFVVETADVPLPESAGEVGIDLGLSHFAVTSDGRKVDNPRFLRRAERRLRKAQRDLSRKAKGGANRAKARARVAKAHARVTDARRDWAHKLSTQIIRDSQAVYVESLAVSGLLRTRLAKSVQDAGWSRFVAVLEYKAARYGRHFARIDRWFPSSKLCSACGTVAASMPLNVREWTCPCGVVHDRDVNAAKNILAAGRADRLNACGARVRPGPAPAQREEAGSRRGAA

SEQ ID NO: 28189 - protein, 387 aa, Cyanobacteria sp.
MKTLKFKLYSHKRNRYLKQTINAAGVIYNHCIALHRRYYRMWGKHLGCAKLQKHIAKLRKRNSFWQLVGSQAVQDICQRIDKAYQLFFKHNKKGVRPPGFKKVKKYKSFTLKQAGYKFLGGNRVKIGNRVYQYWNSREIEGTVKTLTIKRTALGELFMVVVVDGYSTPEVTFETGKIAGFDFGLKSFLTCSDSVAVATFIESGFSIESPLFLKASLNIVRKASKLHSRKQKGSNNREQARKHLVCCHEAIVNRRRNWFWKLAHKLTDQFDVLCFETLNLKGMQRLWGRKVNDLALGDFLQILEWVAKKKGKRVIYIDPWYPSSKTCSCCGHVLGELDLSVRRWRCPSCHSVNDRDENAAINIKRVGSSTLGVGDVRQELLLQSLSDA

SEQ ID NO: 28190 - protein, 153 aa, unknown
  TnpB Polypeptide
LQKNGKNLYECKNFQKQKLVIAKLFFKLNCIRNDYINKVVNMLTKTKLKCITIEDLKVSNMIKNRHLSKAISQQKFYEFRTKLLNKCKEKNIELRIVSTFYPSSKLCSNCGNKKQDFKLKDRIYKCSCCGIEINRDYNASLNLRNSTQYTILT

SEQ ID NO: 28191 - protein, 386 aa, Microcystis sp.
  misc_feature (306)..(380): Xaa can be any naturally occurring amino acid
MEKAYSFRFYPTPKQESLLRRTLGCVRLVYNKALHERTQAWYEKQERVGYAQTSSMLTDWKKQEELEFLNEVSCVPLQQGLRHLQTAFTNFFAGRTNYPNFKKKHQGGSAEFTKSAFKFKDRQIYLAKCTEPLPIRWSRQIPESCEPSTVTVRLHPSGRWHISIRFDDPTIKPLPVTDKAIGIDLGISSLVITSNGDKVSNPKHFKKHYRRLRRAQKNLSRKQKGSKNREKARIKVARIHAQITDSRKDHLHKLTTQLVRENQTIVVENLAVKNMVKNPKLSQAISDVSWGEITRQLAYKCCWYGXXXXXXXXXXXXXXXXXXXXXXXXXXXXXXXXXXXXXXXXXXXXXXXXXXXXXXXXXXXXXXXXXXXXXXXXXXXGEDVKR

SEQ ID NO: 28192 - protein, 305 aa, Microcystis sp.
MEKAYSFRFYPTPKQESLLRRTLGCVRLVYNKALHERTQAWYEKQERVGYAQTSSMLTDWKKQEELEFLNEVSCVPLQQGLRHLQTAFTNFFAGRTNYPNFKKKHQGGSAEFTKSAFKFKDRQIYLAKCTEPLPIRWSRQIPESCEPSTVTVRLHPSGRWHISIRFDDPTIKPLPVTDKAIGIDLGISSLVITSNGDKVSNPKHFKKHYRRLRRAQKNLSRKQKGSKNREKARIKVARIHAQITDSRKDHLHKLTTQLVRENQTIVVENLAVKNMVKNPKLSQAISDVSWGEITRQLAYKCCWYG

SEQ ID NO: 28193 - protein, 460 aa, unknown
  TnpB Polypeptide
MNDFVDRVYCLETRIPNSEAEYFSKFTPEFATLCRRIWQDLKHGVNTDSKYVTTLCHKYGFMKRTVNSALRQMKGRANALKELNKVQIQEKIAKINALNDKIAKIKDEINALKTKVVKNPNDKQLLTRYKNKKKKLYSWQQRKLRFQNNIRDYEADESRKYNLCFGSKSFFSKQYNLAENNYKTHEKWLNDFRKLRDRQLYYVGSSEETAGNQMCQLQYTPETDRFMLKIRKEYKYCKSNKKNEKDNYVWLDIDFKYKKEMLISALENNLPLSYTITRKGRKWYIDVAIKQSCEVYTDTSNGCVGLDYNNGFIALTETDRYGNIVNVDNIPLWNHGTGNKAKSELSEKISKIIRYARSKDKALSIENLKFRKTKSQQIRKGKRSYNKMLHLLDYGRYKQLCQDYCATYGVMLKMVNPAYTSKIGKQKYSRTRKLTVHNSAAYVIARRGQGFEDMYIKKAS

SEQ ID NO: 28194 - protein, 377 aa, unknown
  TnpB Polypeptide
MQLSETVKLYMSKTEYALVKVTMDSYISTVNSIVSDAVNGASIAKLTTKNVDADLPSALTNQCIRDAKSIVKKYNKACRDADRKNAKLAKQGKNIKVIATRPVLKKPCCYINNQNFKVNGNNIEFPVMINGKSKRLSICTKMTDRQKSIFSTSKLGTMRIVVKNNSVVAQIVYDADEPVCPDDGNVMGVDLGIKCPAVSKCSDGSVKFYGNGRRNKAMRRHFAAKRKTLQKAKHQDAARHINNKEQRIMKDIDHKLSHDIVATAIAHNAKTIKLEQLQNIRSTTRTSRKNNHSLHNWSFYRLAQYIEYKAKLAGIEVLYVNPAYTSQRCPVCSDVHHANDRDYVCKCGYHIHRDVLGAINICNSTEYVGDSNIRRTA

SEQ ID NO: 28195 - protein, 660 aa, Bifidobacterium sp.
MAQSAQEHGAGRRSARQSRRRRRRARVVRVLQDPERRARRRREGRGAGGPGLSQEHPGPPALLHFLIRSRPRSVFVVLHAPSSSPAQDTPPFRVGRMSRVWLPDCHPIFPLVISPEGRCALSQLVRITDVEVVGAPVFLGYEGVVGEDGGRAPVWSSNGLVVLRWMRDSWRCRWNQSHTRRMKYAPAPVDADPADVVETSFGRAVLVPVTSDSHVDDWSDSQARGECPWLRSLPAMVMQSAVENENRAWWAAVGRNRTLVAAGRPRQPMPGFKDKKRSDSFVCFSNKGRNAVLTRFNRRHGVVTIKGQNRAMDKAPGATCARWELRIHVRLSGKIRDYTSVIVNVKRMTLSFVNAPEPVKREPTGAVIGLDGGVAHTETGSDGSFHDLPVETLEEIDRAIRRFNRDLARKRRANPTNYRASKRYQAKLRELDEAYEKARNIIVDWQQKLSTFLVRNYDVIGMEDLPIRNMTKRPKARFDESTGKWERNGRAAKAGLAHSLLRAALGRLRSMIDYKAKATGTSTLVPVAPQYTSQRCNECGYTDPGNRESQAVFECRSCHYTCNADVNAARNIEELALAQLEAGVPLRYTRNGDIEKVPPKKKHDDQPGNPGNGENRPGVDDAGRGAGARRGKGDTRPALPAMKREPDGTGCVTAGPATHR

SEQ ID NO: 28196 - protein, 445 aa, Bifidobacterium sp.
MGIKNALDADAIAARNKKIGDSGAATRMRREGQDALTVILKVDGSKLTTRQLEELEGQFRDARHLYNDAVLSGLPMGYVIPRRVWVRLPDGSMQRRKLSYISAQQAQGVVNLVRFALRSQHVLKTHGEATGWLRPKDDVSSIPLPQYGVTYWFRDSTGGRTVHISRITGDLHLTGYGQLNGWDEIGPAMLIRRRRGDYRIAVHVFIDRGRREQARQEVIGGVRDGLAAHYAVGGIDAGMLDTIIESDGTKSGLIVVPESNKLKHWQRVMSKHAVKGKPHDATWWRAKGCLDDEYERLGKERDRLAREWFHYLLAKYDVLYVQDEQFASWFRRDGFIRGGRTLQCGILGRLWSLLREESKRHPDRVIIIDKWQPTTSWCEECGRRTKHSPRRRTFVCKYCGHKADRDVHAARNMVILGQCPITREELAQPRDIPIGPYVPPLSKTR

SEQ ID NO: 28197 - protein, 569 aa, Desulfotomaculum sp.
VKKRKNNKKKPTKTGGGISYTVCGEFFPEVYPAFRSQKWSRGMEDPLDTEMRLFCSCTRWAFNRLQEDNSRQELKKQGQGTFGINSRYCDDAILKAKAVIESQKELLELEIEETEAKLVRAKKKLSWAEKDLDRAVKANNPAKIEDFKHTVHGRKARVKKLADKLDELKVHRDNGTIPKVIFGGRSLWKRVCRGRVSREEWRQARQDRLYARGDETKGGNPNLKISWHNGEFTLSVTISHLSEQKGTDKKGRPIMTRAPRVTGKLWLPEKHRQKVLELLLSGVPYTVELIKGRDSRYRVHITFAVTAPVLVTNPNQGYLGVDTNPDGAALANVGYTGQPAPWPEGFTVPYPKALHKFAGEFQITMHPNGFLYIKVPELSYSRGFRRTYLIGVLAKVVVDTAKTLGKPIALESLDFGKDRFDTNRKFNRMAANFPFNKMVEAVIRKAFKEGVGVKQVWPAHTSTNGYYKYMERYGIIIHHAAALVIARRAIGFKEYITKELKQKVQAVKEKLSQKVNFLPGEGRGMTRKVKQLFKRLDGKISVHNGLTRYKQESFHSVWHDLKHLALSSR

SEQ ID NO: 28198 - protein, 385 aa, Halomonas sp.
MATVLRAYRYRFTPTPEQAEQLARTFGCVRYVYNYFLRERTDAWYERQERMGYNATAKALTTLKKQPDTDFLSEVSNVCLQQSLRHLDRAFANFFKGQARYPTFKKKRGKQSATYMANGFRWRDGRLWLAKQKDPLAIRWSRRFSGDPSSITVSLDTAGRYHISFLVEEEQEALPVTPRMVGLDLGLTHRVITSDGDKIPNPRFIRQTERKLARAQRALSRKQRGSNNRAKARQKVARLHAKRADQRRDATHQLTTQLIHENQVIAAESLQVKNLLRNRSLAKAISDVGWHQLTCQLAYKAEWYGRDFVQIDKGYPSSKRCFHCGYIADTMPLDIRRWDCSACGTRGIDRDINAARNILQAGKAILAGADKLRHHEKTTVGHTGS

SEQ ID NO: 28199 - protein, 469 aa, Clostridium sp.
MAKKKDDTLSRVEKHIIKPNHELYNYLEKYCFLSKNLYNYANYQIRQIFIITSKLAKNEEATQEQLDYLKDINAKVDKFNELRKANFEKARVKTLKDNKEFKKKLKTIKYFDKDNKYPCYDFIEFLVKDDIDYKSLMAQVSQQILKLLEKNWLSFFEGVKKWSKDKTGFSGRPKLPKYLNKNGKNIVIFTNQNCKQENNKIIFPTCFNQYELNTSIGDNKLQQVRVLPRNKYFVLEVVYSMSKPQLKEDNNKYISIDIGLDNLSTITNNCNITPIIISGRKLKSINKYYNKQLSHYREIAKRMNNLDWTNRMNRLTIKRNNMVMDLIHKASKSVIDYALSCGVNTIIIGNNKDWKRESSMSKKVNQSFVGIPHQLFIEKIQYKAENIGIKVIVIEESYTSGTSFLDNEEPIKENYNKSRRVYRGLFISNTGRKINSDINGSLQIMKKVFPNVIDHGIEDFGLNPIRVGL

SEQ ID NO: 28200 - protein, 243 aa, unknown
  TnpB Polypeptide
MLRATKVRIYPTPEQAEFLNAQFGAVRFAYNKALHIKKQAYQRHGVSLSPRKDLKPLLAVAKKSRKYTWLKEYDSIALQQAVINLDVAFSNFFNPKLRACFPSFKSKHGKQSSYHCVGVKVLEGAIKIPKIAPIEASLHREITGTLKSITLSRSATGKYYASILCDDGAETPAKPTLISVVTGLDMGLLHYAIKSNGVKIPNPRYLINASRNLRRKQKSLSRKKKGSANRRKASYSLRVYMSG

SEQ ID NO: 28201 - protein, 398 aa, unknown
  TnpB Polypeptide
VIGKVFKPNPNKVLALNMALKEYFRLVKWYLSFNSTSKTLLHENGYEKAKRLFNLNTALIQTARDKTIEILKSFQKNRKDDSALRLKRVSIRFDKRCYSFSKTTNVLTPYWLTLSLFRRKRISLPIVFGEKHRQRIEEAFRGEWSFTTVEMVKRNGEWYAHFVLKKTVNFIGEPETVIAIDRGEANLAVAVAISKNNPTKPIKGQFWRGEEIKRIRGLYSHIRRKLQEKNRVGKVKELGRRERRKVNQQLHILANRIIEYARQFPKPVIVMENLNGIRRSFKKSKKLNKRFHSLPFRKLQTYIEYKANLEGIEVKYLSKKETGNTSKICHRCGYVAQVKGRIFKCPSCGIEYNRDLNAAINIAHALTRRMGWGSCEPPEPADVTGGVKPQPNAGSPRL

SEQ ID NO: 28202 - protein, 366 aa, unknown
  TnpB Polypeptide
MFMLAYKFRLYPTKKQETTLVSWLEECRMLYNHFISERKQGWAKNKKSFTLYTQLNGLVKIKKTYPKLRTVYSQVLQNVGMRVDRAYQGFFRRLKRHEKPGYPRFKSYGRYDSFCYPTAANIKMDEDKIRLPMLGEVAWVKHREIEGKPKTLTVKRQHGKWFAYLVTDTERKIECPKSNENVGVDVGILTFAALSDGNNVENPRFFETKQKELAKKNRAFQKARDAKKGVVRAKKALIRVHEKIGNNRHNFVHQVTNSLVQKYNVICVEDINANEMLKKRWCNKQILDAAWGNFLDTLTFKAECAGRKLVRVNPAYTSQTCSKCGTRVLHELKDRVFNCGCGHSENRDLNAAKNILRLGLQSLAQA

SEQ ID NO: 28203 - protein, 427 aa, Escherichia sp.
MHQENTMLPRRISVSLFIDQSIIWPVKRLQAFKFQLRPGGQQEREMRRFAGACRFVFNRALALQNENHEAGNKYIPYGKMASWLVEWKNATETQWLKDSPSQPLQQSLKGLERAYKNFFQKRAAFPRFKKRGQNDAFRYPQGVKLDQENSRIFLPKLGWMRYRNSRQVTGVVKNVTVSQSCGKWYISIQTESEVSTPVHPSASMVGLDAGVAKLATLSDGTVFEPVNSFQKNQKTLARLQRQLSRKVKFSNNWQKQKRKIQRLHSRIANIRRDYLHKVTTTVSKNHAMIVIEDLKVSNMSKSAAGTVSQPGRNVRAKSGLNRSILDQGWYEMRRQLEYKQLWRGGQVLAVPPAYTSQRCACCGHTAKENRLSQSQFRCQVCGYTANADVNGARNILAAGHAVLACGEMVQSGRSLKQEPTEMIQATA

SEQ ID NO: 28204 - protein, 722 aa, Streptomyces sp.
MSRFRMYPTPVQAERMLSHCTHARYIWNLAVEQHAHWKPGRRSAPGFAEQCRQLTEARRDNAWLAAGNADVQQQALKDFAQAKSARFASGFGEPTWRRKHVHEGFRVIGTDRVPEYESDGSPKLNQKSGKQVMGRSVVVRKLNRRWAQVKVPGCGWVRFRLSARGKGARLPAAKTFRVTYRNGQWHIAFAVVPEPTPAPGTGEVIGIDRGVTITAALSDGRKLNCPQLTVKERAQIRKHERRATRAPKGSALKTAAYAKVARLKVREVNRRKDWCEKTSTMLARSYGVIRFEKLNIKNMTRTAKGTAAQPGKKVRQKAGLNRGILAQGWGLLRRRTEHKAPGRVEDVPSPYTSLRCSACGWIEKKSRKSQADFVCVSCGFTCNADENASINVAAGQGGIPRPRRTAGAGGATAAINRSSAREPQPTWVGIPLVPEREDVNGSGARFASRSAFSRPPRWRTPPAAAPFQHGVPFSVMARVEGRALPEVMPPTYEGDWLHAATDAEREHLEAASVGLLARLHDQVPLSETEFLALPGDGDALQRHVESQRHYYDWVVAGLARSPLIEAAFDRLADLWPREPGTPVLGWGDARIGNVVYDGFDPVAVLDWEMAAPAPREVDLGWTVYLHRFFQDLTAAAGQRGLPGFLRRDRVEARYARLTGHTPQDMDFYTLYAALRHAIVMLRVAYRQVYFGEAAVPADPDTLILHHGSLRAMVQGGYWDAVR

SEQ ID NO: 28205 - protein, 402 aa, unknown
  TnpB Polypeptide
MVCKTYELKVDKSHLSKETLDTLRRLFLEAKWFYNNMIAKGEVFHFDYKSKIVEVRNKDGKLETRVILCLSSQMRQEIVERAKNAIRGLAHLKKKGYKVGPLKFKSRIGSIPLRQYGRTHRISDDRVVIQNVKQRMRIRGLNQIPDGAELANATLQQRYDNYFIHITTFQTPIERPSPGKAIGVDAGIRHQLTLSNGLQLDESIPMTKKLKHLHKELSKRTLHGKNWFKTSAKLNKEYGRQTNQRTDIRHKVVSELVSRYDSVAVQDDNIAGWQRMWGRRVATSAIGGIMRDLKTKSHTPVVIGRFEPTSRKCSNCGATKEVSLEERSFLCDSCGLHIDRDLNAAINVWRAIPAERREFTPVDMKAATEILGYFNGIPSVSASLVEEAGSRSLATRPGFGSW

SEQ ID NO: 28206 - protein, 356 aa, Actinoplanes sp.
MVTELLKLAPTGEQIALLDATMRACNAAVNRVAEVAFEQRTANKIALQPIIYADLRAEFGLSAQMAVRAIAKACEAYKRDKSIRPTFRPDGAVQYDQRMLTWKGRDAVSILTLTGRIVVPVVYQGRWTNLAGTVARGQSDLIVRDGKWYLAVVIEVPEPPGSGEPDGWLGVDLGLVNLATDSDGTAHSGKAVRAVRRRNLELRRRLQAKDTKSAKRLLKRRRRKEARYARDVNHCISKMLVGTAKGTGRGIKLEDLSGIRHRMTVKKAQRSDLHSWAFYQLRQFVGYKAAIAGVPVALVDPRNTSRECYECGYVDKRNRLTRDDFRCLRCGHAGPADHNAARNIARRAAVMQPNAA

SEQ ID NO: 28207 - protein, 318 aa, Micromonospora sp.
MVLGLVMPRRRDPAAPRVVYRTARVALRVTPVGAGPDPGRVAGVDLGIIHPYAVTGPEGAGLLVSGRAIRAEHRMHLADTKARRRAVARRAPKPGQRGSRRWRKYRRRARMVEGRHRRRVRQAQHEAARSVVSWAVEQRIGELRVGDPRGVLDIEAGRRHNLRLRQWQVGRLLQVLTDKATLSGITLCLVNERGTSSTCPACQRRVPKPRGRTLSCPHCRFSGHRDLVAAATIATRSPGGGPTTPTAVVLSEVLTHRRAGRHLPGAGQSRRDPRRPRAARGSVGPRWPAPPLDGESLAHKARIHDDHRTPGERSWTPH

SEQ ID NO: 28208 - protein, 244 aa, unknown
  TnpB Polypeptide
LGIYVQVWEGLAEIPDAKRRFNAAEHLVHTTKKNHACFDFDIRFPKMPSYLRRSAIQHALGTVSSYKTRLDLWEKTDGKSGKPKLVYENHAMPVFYRDVMYREGAEGKDEAYLKLYDGHDWKWSCVRLDHTDMEYLRKCWSGKKTSAPTLEKRHQKYFLRFSYKEEVTLTKTPVKEQIICSVDLGINTDAVCTIMRADGTVLGRRFIDHPSEKDRMYRTLGRIRDPEGTQLCAVDGEDGHIRNA

SEQ ID NO: 28209 - protein, 425 aa, unknown
  TnpB Polypeptide
MNKTEITLVTSCILYNDLNKDLYKYFDEVTPLFAFLVRRTIHHLRYNLCGETDTNYRTSLKNEYNVTNRFAKSVMNTAKNLLKFSKALGDYLYSTYDKKISNVTAKIIKTKAALNNQKTEKGRIKNLKTKLFWLEMRKNKLIQLKNNGSKPMLTLGTKKLLKSDKLKFLEKRDNQIVYIGDKYDFHGNQQFQISYDKKYNKFTYKLRLENEYIKDSKYINGKFIIKDNIAKREILKTLHNPKSRPLSFRVIKRDDVLYLQIMYRTGSDFKTRSSQGVLGVDFNKGFITISEIDKMGKLLNHDRVNYIHKGRAGVTKNSMYHLVKDLVDLAIKSGKDIVIEDLKSLNKNKKEKTERKQYNRMISTLKFGKFRDFLQTRCDKLGVGLSVINPYNTSKIASNKYCYAMKLNIHSAASYVIARRFYNLD

SEQ ID NO: 28210 - protein, 424 aa, Chamaesiphon sp.
MRTAHQYRLRLTKQQQFTIDMWIELCRRQYNYRLGERFNWWEQNRCDINSCPLICHLPELKDRPDLYSQKRDLVNTKQLLSEYKEIPSHTLQDVIARVEKTFDRWLKGDSNGKRSGKPRFKGQGRYRSIAFPDPVKPEHIKGNLIQLPKIGNLKVILHRPIPDGFKVKTAAIVKKADGYYITLSLQDSSIPELTPEVPTLDNTIGIDLGLKSFLVYDSGEEVVIPQHYRKLERRLKKIQRSLSRKKKGSKRRKKAIKRVAKAHLKVSNQRKDFHYKTAKKLLSIGKNIGHENLNIKSIARTRMAKSTHDAGWGQFLQILSVKAANAGLMTIAVNPNGTTQECSSCGQKVPKTIQDRWHECQCGCSLDRDHNAAKVIKHRAVGHLVRKAQEAARALEVSSSKKRDKTMPDGIPGVTEKPALYASA

SEQ ID NO: 28211 - protein, 380 aa, unknown
  TnpB Polypeptide
MKLSIYAKNMKKRYKQNNHGSMRRTSRIYLNDLNKSKSDTMRVFLNLYQNIINYCICLFWSASDFTENLADKGITKSIEERFGVTARLSQCTSKQAKEIVRSQMKKSKRSQRMPRFKSHMANLDSRFVEIEKFNGHFEICIKTGSGVPKMVIPFNWTKHTNKFRDNGWTLSNSVRLGYDKKGIFIDLIFEKEKTPLRQEGNVMGVDRGFNCMIACSNGQMIGKGLKEIIKKGGKRRKSYHHFIETETNRCLKQLDTDNIKLIALEELKNVKANKRGKFSRKVNRLLSFWHYARVGKRLEQLCEEKGICIAHKSPWKTSQRCSVCGNIDRRNRKGERFLCLKCESEMNADYNASKNLELLGLAGVYSLRSLTNNFVGNKSL

SEQ ID NO: 28212 - protein, 414 aa, unknown
  TnpB Polypeptide
MKLTQVITINPNKKTEEALVNLSKIANGLYNSALYENNKRYKAEKKFSFYEDMCKNLKDNTLYGLLASQSAQAVLQKAEGSIKSFLALHKKGANAEFPHYHKKDTEWILPYKSQQIKLKKNKITLPMSLAYRKERGISYISFRIPKLRYEGRLAYLEIFRSEGKWKVSLVFDVQDAESLTPRENLYIDIGVKNLAAIYDGKNTTLYKGGIVLAENQYKDKKVAEVQKILATQNKRTSKEKRRLSRQARRRIKQRIHAMTSKIVNTAKSEGKGIVIGDLNGIRNSMHFRKKTNQANHQWIFGQITSQLEYKSKLNGVLFGKVSEKDTSKICALCGNKEHGRIHRGMYRCKLYNVVFNADADGALNIMKKYLRIPLSKGSGIGVVAALAQPAVLQWNEHEWRNEAMVPNATTAMIS

SEQ ID NO: 28213 - protein, 390 aa, unknown
  TnpB Polypeptide
MEYVERHFNAGTPEIVRLCQTSKDLYNKCNWHMRQAWTAATPLPSVSELVHLVQDEVSYKNLHNTKTAKQTIRQCLTDWSNFFKALRAYKANPKSFRKEPKPPNAKEEMAQVIFYEETIKHKPARQGWLVPTNDCFKIRSDRKFNQVVICPKRFGFVIEVRYQVSPVAKPVTDRNRVCCIDLGVNNLCSITSDQTSPLLVNGRMLKSVNQWFNKHPNKKNSRKRYWRLENCFHHVSAIIVRLCVKHEIGTIIVGQNKGWKSRVEMGKVNNQNFQYISFLNLVQKIQYKALALGIEVILTEESYTSKASFLDRDPLDGSLITGKRVKRGLYETSTGRLLNADVNGSANIGRKVIQNSEILGRLDRSLAARPVRVNPLRWFDSPNAQTYKIV

SEQ ID NO: 28214 - protein, 1073 aa, Streptomyces sp.
VSIRDRLKGLTAQDEKVLRAVGAHMGRLACADLARRCRDGLRHCTDAWAERKRELTAASSSRWAGSVTSHTHAQWGLSRRAQHRHLVSLDAGIRTLRHRLSLPVGAKGIRGKPGGYRSRFEWFTKTRRLAILEERYEQVRAEREAGRVCVVRGGRRLLHQRHNLAAAHKTAEQWRAEWEAARWFLTADGESGKRHGNETIRVTPDGEIGIKLPAPLAGYANARHGRYVLTARVTFPHRGAEWRDRITGNRAVAYRIHYDVARRRWYLDASWTRKDLPVIPLDALRTEGVIGVDTNTDHLAARLLDEHGNPMGAPRRFGYDLAGTADQRDAQLRHALTRLLHWATACGVQAVAIEDLDFTDSKTREKHGHKKRFRQLVSGIPTSKLRARLLSMCAEAGVSVIAVDPAYTSMWGAEHWQKPLTTKRRPATRHDAAAVAIGRRSLGHRIRRRTAPPPHHQSDGAGHRTAQARPGTRGSEGNRPRVPGPRTRSAGAGHGRNAVDQNTQDRSGCSAEHVQLMLSLQERSVPLADVVEQIGGGPLDPFVDIAGPVEGRGPGEGAGGEDEGAGRGAVQRRLLVAPDARAVPVGRVGEQDARRVVRQLGARKVAVRLARDQAGQLLALARARRVPQPVVGVAHDQRGGLGDLADVLDAQQPLLRLALLAPERRPAGPAPFSAGEQPVGGAGGQRVQLDLPVHGVGGEEDQGGAAVPGLLGGPAHGPGPVLVVAREDQAPVAGRVDAARVQIAGVGVADVVAVALGPADEVVCVPDVQREARARVRAVERDGGRGVLLAEQHAVLVPRVVQAGAGPAVLGKEVVRLPRHIRQDQQQVGPVAVAHGEGDVRAVAVGGGQHGDIRARGPVVRDLQPPGEPPVVAGDGAVRGERFGLLDAGEPGAGGDLPGALAAVVPDPVDVHAERLRGIDRDPEIDGLARRGAARDRGEALDLAAHIVRRARPAAGGATGARALAPEEPAARQVADERRGAGGLAGGGVETVDVPRHEAAVLEVVLADPQPGERPLAERIRDGVCQRAGLPATDLPGLARMPGPHLFHLSPPWPPRCSLLCAGPPGGSCAMTS

SEQ ID NO: 28215 - protein, 356 aa, unknown
  TnpB Polypeptide
LAYEIIPEWCKELGIAHGLDNALFEAYTAWKKTDKQPTQIGRGQKAKLNPLAGLRLARFRSIRDQKQTIEFDPGDYKNGHLMINASSGLEKPLWAGQDFCLINYGKAVEVTYNKGRWFVSMPVEIDIPKPRNGGAAIALDPGLRCFLTGFDGNSFTEFGKYDFGRIARLCQHLDKMQSKCTRLKGSRFSRLRYRLKQAMERMRTKIKNLRSEIHKQIGSYLARNYDVIYLPRFETSQMVARGSRKLNSKSAMAMMTWAFYQFSQTLEHLCNRYGSRLVRVTEEYTSKTCTKCGNVHKKLGGAKKFKCPNCGHEIPRDFNCALGIFLKALWDTTMLSEVSGECAIFGFFPIVGDCLD

SEQ ID NO: 28216 - protein, 426 aa, unknown
  TnpB Polypeptide
MKTIIKSSQHNIKFANIGKQLILKEFITEYDRVLWWFVDYLWNNKIIWGNNRTLDIKNNKLDVPSFISTTDIDLITDLSARAIKLASGEALAIIKSRTEKRRKQLFVLAKQMRAGDKSISKLQSKIDSNPLSKPTRNSNNLVANLDSNCCKYIPDTTGIFDGWLKLSSLGKRYGHIYIPIKTTRHSNQLAKKGYKMITSWQISTNTLYSRWETTREKSTGSKIIGADQGYVTCLSLSDGQTTSADMHGHDLHSIINKLSYKKKGSNGFKRVQEHRTNYINWSINQLDLSNIKELRLEKLFQMRKGSNMGRNLSHWTYTQINAQIMKRCEELGVPVIEQSASYRSQRCSDCGWTQKSNRKGKEFICNQCGVCHDADINGALNHEADLYRLPVGFWQNKFNIKGFYWTSRMVLDLSGAELIVPHVQNV

SEQ ID NO: 28217 - protein, 398 aa, unknown
  TnpB Polypeptide
MKRTHKITLNPNNKQRKWFAQQVGYARWSYNQALADFKKHYDATGEYLSVGKLDKRFNAYKKEHAWTADMDQVVCSQSIYKHLGAAITNWIEKRARFPVFKKKGRKDSFSSKNGSAEVRGKWLRLPKMGWVRMFERLRFDGKISSWTISRTAHRWFVSITVETENTLAVDKTSTHPVIGIDVGINTLATCSDGSKYANPRPLKRHEKKLAKFMRVLSRRVKGSKNWHKQKDKVARLHYRIACIREDAHHKATTNIVNRCSGIGIETLKVTNLLKNRKIAKALSDSALGGFLSMLKTKAEMIGIKPKEADQFFASSKTCSRCGHKKDDLKLSERIYHCDACGISIDRDVNAAINLRNVAVGHTETQNACGVQVRPQPEARETEAGKVIWKQKLLPQYKN

SEQ ID NO: 28218 - protein, 400 aa, Synechococcales sp.
MKQVLTIVVKLQPTPEQVSKLEATLQSFADACNYVNDNTNPKLTNKIALQSLTYQTIKEQFSLVANMAVRACARVAANRKAAKLKGKPVKKFAPTSMDCDKDLFTFREKDWQVSLATVQGREKVKLNAGNYQRGKLKGCKPTSAQLCKHRDGNFYLHIQLKDEVPEPTQSSNVIGVDFGRRDIAVTSGGQKWDGQDIQQVRDQFSKVRASLQQKASKGTRSTRRRARQILQRLSGRERRYQTWLNHRISKSIVRQARTLNAAIAVEDLTGIRERTNELPRNKTERRRSNNWAFYQLRLFLSYKAVQAGVEMLVVNPAYTSQTCHQCLHLHPLRGKSYRSGKGFRCGHCGWQGDADLNGALMIQLLGRSVNTPRGSEMLFCSLSEHVLRATESSRLQRLSA

SEQ ID NO: 28219 - protein, 159 aa, Bacillus sp.
MLGKLTQEQRKLSRKKKGSSNWNKQRIRVAKIQEKVANQRKNFLHHKSKELVMTYDAVVIEDLDMKGMSQALKFGKSVSDNGWGMFTSFLKYKLNAQGKRLVKIDKWFPSTKTCSSCGNTQPMPMNLRSYICMCGLHLDRDVNAAINIKKEGVRLLAIA

SEQ ID NO: 28220 - protein, 502 aa, Mycolicibacterium sp.
MAARFEVPQGSVVQAYQFALDPSPAQRRALASHAGAARFAHNHMLALVKAVMNQRAAERSYGIAEPELTPVLGWSLPALRKVWNQRKTTCAPWWADNSKEAYNTGLDGLARGLDAWSASRRGLRAGQSVGFPRFKTARSRRAVRFTTGTIRCDLDRHHVTLPRVGTLRTHESTRKLARRIEVGTARILSATVTQDSAGRWQCSFQTLVAAKTRPAHAPSSQHPIVGVDVGVKADSLMVVATPDGTEIDRVPAPKSLTKAQARLRMLARRAARQHGSFDPVTRTRQPPSKRWRATQDRIGKTHAHAAGVRRDALHKATTTLAQQHQVVVVETLNAAGMCAKGGARKRGLNRALADAALAQIRQMLNYKTRWYGSELVAADRFYPSSKTCSACGRRKPNLTLADRLFECDSCGVSIDRDLNAAINLARLGEPQTRGEQGPAGSGPVAGRGATHKTEPASAGAAAGCEASTPHHRVGGSDGDCLTARRGCLLDEHTHVRSPKGNG

SEQ ID NO: 28221 - protein, 375 aa, unknown
  TnpB Polypeptide
MADIKRFTTIKARLYPNEVQVELFEKTFGCCRYIWNRMLSDQQRFYVETDAHFIPTPAKYKKEAPFLTEVDNQALIQEHNKLSQAFRVFFKHPECFGYPNFKRKKSDRDSFTACNHEFTSGPTIYITKDGLRMTKAGIVKAKFPRRPRNGWKLKRVTVDRTKSGKYYAYILYEYAVKEPEPVTPAQETTLGLKYSMRHFYVADNGELADPPQWLRQSQEKLASIQQRLSRMQPGSKNYQEMVQKYRLLHEHIANQRRDFIHKESRRIANAWDAVCVRADDLTELSRGMTQGDLRDAGYGMFRECLRYKLERQGKPLILVDRYYPSTRTCSACGHVEAAVSYKRRTWTCPACGTVHQREINAAKNIKAEGLARFRA

SEQ ID NO: 28222 - protein, 376 aa, unknown
  TnpB Polypeptide
MQEVRKVEYSYKFRLHPNAEQKIQIQKTFGCCRFVFNHFLAERMERYKSTRKAPTRFQQDKSLTALKQELLWLKEVDSTALQASLQDLDTAYQNFFRWVKQGQKPSYPRFKSKHDYRRSYKSKCVGTNIKALDKAVQLPKLGLVKCRISKEVKGRILSATVSQNPSGKYFVALCCTDVEIEPMPSTGAVAGIDMGLKAFAITSDGVEYPNHKHLTKNQKKLARLQRQLSRKSKGSHRREKARVKVARLHEHIANQRSDMLHKLSTELVSNYDLIAIEDLAPSNMVKNHKLARSISDASWPEFRRQLEYKSAWYGKQMVTVDRFFPSSQLCSTCGAQWPGTKDLSVREWICPSCGAIHDRDINAAKNILQEGLHLLA

SEQ ID NO: 28223 - protein, 541 aa, unknown
  TnpB Polypeptide
LARNQTYRAFVARPAHILSLDGELLDSAPVLIELAAEVRGISAYATYVTRNDTQLGNELACITTTVPADAGRLAGVKIPDFLVPDKKDENGEPLKDKKTGEPIKIKTGRSRKEKLVQYNVVTSYRSWQERIKATEGTSSKYVSQGWKRTMNATPPTYGEDYINLGTTDKQYAVIENKPFIDGEIILKMVIQGKWYRLIFNFDNKRFTEGKVTLPLVKVENNNPVFIFSVVTDNPIVQFSSDHVIGVDVGINNYTTVAVINSTTGQIVYETTLSQRVHSLWNSVRASEKQVKQLRKKADSLSPYNRQAIMAALDEAQLHRKATSRKKRELAIVAAQEIAYLSHFYDNAVVAVEDLSWIRNTMSHGRWNRGELIKWLTHYVSQNGGWVVSVSAAHTSQVCHVCGAEVEHPEHRVSTCPKHGDMDRDVNAAANIAARAVLKVEKARKTRAKSRKLQEQAPLKTPVARVSLKYPGQDRTKNKPTPKRKKHRISKGVNLPISPARVQASRVDTSVLADCGTYGVAGTSQAAIKQGTMTKYRLCSPI

SEQ ID NO: 28224 - protein, 426 aa, Halostagnicola sp.
MAKQVVTRTYTASIQNQQQVSDDLDSLGFAASKLWNVGRWTISRVWDEIDYIPEGDELTAYLKSHERYDDLHSQSSQRVLQELAEAFTGWYGKRRNGDTNTNPPGYRKHADKHPRSTVTFKQKGFKLDTQYNRVRLSKGSNLKEYWSDFILCEYQTRPDVDLSTVESVQQVRAVWTGGEWELHFVCKVEVEVSEAPGEKTVGVDLGINNFAALAYEDGHAELYPLNCLKQDDYYFSKQIARCDDSDSEQATRLHQKKSARRTHYFHTLSKHIVQRCVDEGVGTIVVGDLSGIREDEVNGESTNWGKHGNLNLHSWAFDRFTDLLTYKAEMNGITVEQVSERDTSKSCSCCGRERKANRVERGLYVCDECETVANADVNGAENIRQKVSPSLSCDGGDRSNGWLAQPSTFLFDTETGAFAPQEHITP

SEQ ID NO: 28225 - protein, 187 aa, Microcoleus sp.
KGSKPWKMIKSKISRLHQFVSRARLDFQFKTVHELFGKCNVLVVEDLTVKNLTRRAKPKTNIEDGNLVDSPNGQAAKSGLNKSMLDAAHGQFANILKYVAWKLGKSVLFVDPKGTSQHCWNCLNKVPKELSERWHSCQCGASLDRDENSAKLIKKIGLTYESGGGTPSLKKAFAKKEKEACGLTVPS

SEQ ID NO: 28226 - protein, 242 aa, Saccharothrix sp.
WTLSGRLGIGHARVLGATVHEQAGRWWVSFQIEVDRDDINKRRRVDERAPKCGIDLGLKTFVVIRGTDGGIEEIHAPRPLKAAQRALKGANRKLARSREGSANRAKARQRVARLHLRVADRRRDFLHLTTTRLARTKSAIAVETLNVKGMARNRGFARAVSDSGFGEFVRQLDYKSSWYGSRVWKADRWFPSSRTCGDCGRINRGLILADRTWTCPGCGVVHDRDANAAGNLLTAMLADLTP

SEQ ID NO: 28227 - protein, 239 aa, Bacillus sp.
VVKSGTVSQKAGRYYVSVLCEFEERVSQINTSDGIGADLGIKEFAVCSHHVTFKNINKTFSVKKVEKKLKREQRSLSHKYENLKKGGEKPATDKRANINKNILRIQKLHARLAHIREEYIRYVVSTLVKAKPMFITIEDLHVTGMMKNKHLSDSVRKQKFYRFKEWLTMKCEQYGIELRVVNRFYPSSKICSSCGTKKVDLKLSDRLFKCDHYDLELDRDFNASLNLKYAKEYTIITSR

SEQ ID NO: 28228 - protein, 367 aa, unknown
  TnpB Polypeptide
MGFCAEIFNQHVDWALANKTYNKSRAHKDLYARLRLEYPTIPSALLQTVRDMALEAVKATKFKRLPRKKPTSALRYDDRTITLRGRALTLSCIGKRVKVVLHIPEYFKEVYETWEFSGATVTYSKHSKQFWLRLVFEKNDPPKEEKGDVLGIDRGLYHLAVTSEKQFFSSSKIRATQRRYLHNRKKLQQKGTRSSKRHLRKMSGREKRFMKDINHCVSKKLANLPGISKYALEDLTSIRNQRRNKKMNKWMASWTFYQLEQFLAYKSEARGKTVGYVDSRYTSQRCSRCGHQTSTNRKKSRFNCKSCGYREHADINAAYNIRDRYILSSTPVDGGAGHSQLSNRNGYAHLVCVDNQLQAASACRRGS

SEQ ID NO: 28229 - protein, 354 aa, Sphingopyxis sp.
MAEAGRITIKVRLRDKHSALLNRQAAAVNLVWNYCNEISRKAWSRDRRWLSKFDIAKLTAGSSAELGLHSHTIMRTSHEFAKSRDKAKRAGLRWRSRKSLGWVPFNTGHAQVISAGQIKFKGVIFEAMHWRDELQPGVKIGAGSFNCDARGRWYFNAPIEVGCDEPTARPAVGIDLGLKDLATLSDGGKIEAPRLYRASEAALATSQRARKAPKRIRNIHAKIANRRKDHLHKASAAIAKKYGTIVVGDVSAKRLAQTKMAKSVNDAGWSMLRDMLSYKALRHGGRYIVANERMSTQTCSECGSIPPSRPKGIAGLGIRGWECSDCGTVHDRDVNAARNILRVGLDALAEGAGA

SEQ ID NO: 28230 - protein, 394 aa, Microcoleus sp.
MKARYQYRFYPTNQQRQSLAQLFGCVRVVWNDALALCKSSDKLPNYNQLSALLTGAKKTEERAWLNDVSCVPLQQVLRHLATAYKNFFNSLQKKRKGVKVGVPKFKKKTNKQSAEFTKSAFSIKNHQVYLAKVGNVSPIWSRKLPSEPSSVTVIKDCANRYFFSFVVDTKPVNLTPINLSIGIDLGLKTFAVFSEGAQVKSPDYSTAERKISQLQRQLARQQKDSKRRNKTRLKIAKLQNKIADTRSDFLHKLSTKVVNENQVIVLEDLNVSGMVKNRRLARAISRQGWYQFRVFCSAKSDKFSREFRIISRWEPTSQVCSECGYKWGKLDLSIRSVVCLNCSTQHDRDENAAKNIKKVGIGHCHDSKRTQRESKTMKIASPNEASRITALKGR

SEQ ID NO: 28231 - protein, 542 aa, unknown
  TnpB Polypeptide
MVHPVQVGKRTRMSFGKVKDVTEMPNLIEVQLDSYQWFLDEGLHEVFEDINPITNFTGNLVLEFVDYKLDMENIKYSVEECKERDATYAAPLKVSVRLQNNETGEIKEQEVFMGDFPLMTEQGTFVINGAERVIVSQLVRSPGVYYNYSIDKSGKKLYSATVIPNRGAWLEYETDSNDIIYVRIDKTRKLPITILARAMGFGSDQELLDFFGEEERLRASIEKDNTKTKEEALLEIYKRLRPGEPPTVDSAISLIDTLFFDAKRYDLSRVGRYKFNRKLALNLRIANQVSAGDIVNPQTGEIMVEKNQKISRLMAEEIQNAGVKSVDLLIEDKVVRVISNHFVDINKQVSFDISDLGIKEFCISSCGEFIENPKYLKKSLNKLAKLQRELSRKTIGSLNRNKARLKVARLQEHIANQRNDFLQKLSTKLIKENDIICIEDLQVKNMIRNRKLSRLISDVSWSEFIRQLEYKANWYGRQIVKVGKFFASSQICNKCGYKNEEVKDLNIREWICPSCNETHDRDINASINILKEGLRLITIQNK

SEQ ID NO: 28232 - protein, 273 aa, unknown
  TnpB Polypeptide
VFVNEPLPLAGRAGGGEVIGLDRGVVHTAADDRGGFYDAPDTAALERQRKFHQRRMAKSKLIAARQGRPFWESKRYQAHKAAAADLSAQQARVREDFAHKLSTRLVRGHDFIGIEKLSLDRMTRRGKGAGAAQKRGLNRALRLAAVGKLAKFIEYKANLAEVPFIEVPAAYTSQRCHQCGHTCKGNRESQAVFRCLSCAWTGNADTNAAVNIREEALTRWTARTEQLAGTSGEKPGGVTPVSQAGSKSKTDPLTGPAPGPAASAMNRKPPNAA

SEQ ID NO: 28233 - protein, 291 aa, unknown
  TnpB Polypeptide
LALKAFFRRVKAGEKPGYPRFRGRGWYDSFTYPQKGFKLESGKLYLSKIGDVKIKLHRPIEGKIKRLTVRRSATGKWFACFSVEIEDTPLPPWKDGSVVGIDVGLESFATLSNGEMISNPRFFREEEKELARVQRKLSKAPKGTLERRSALKVVQRVHERIANKRYEFAHQVSHNLVDRFGLIAFEDLNIKGMVHNHCLAKSISDVAWRMLVTVTSYKAASAGSMVVLVDPRNTSKMCSRCGTLVEKSLSDRVHNCPQCGLSMDRDWNAAINILRLGLQSVGVGSRGSSAL

SEQ ID NO: 28234 - protein, 411 aa, unknown
  TnpB Polypeptide
INVRLTETIHTNPTDQLSKLCHLAKNLYNLSNWYVRQDFFKLNNILNYYDLDYILKNKQAYRKLPSQTSQQILKLVTRNWKSYFRAVKSYKVNYKKFKNKPRIPQYKKKNGESIVIFTNQQCRIKEGYLNFPKRVNLKPMKTRIKKNLKEVRVIPLGIEYKIEMVYEKEEQDLWLNKGHILSIDLGLTNLITAVNNNGCKPFIIKGGIVKSINQYYNKQLAYFRRIEHKKGNFQDTKKIQKLHLTRNNKIKTIFHRISKNVIEYCIHNDIGTIVIGYNNGWKQKINIGKKNNQNFVQLPLLKLVKQIEYKAQLNGISVLTIDEAYTSKCSFLDKESIEKHKKYKGRRIKRGLFKTSKGLKINADVNAAYNIMKKAFSNAISVDGIEVFGLVPQIIQQNIADNIICNKMSIN

SEQ ID NO: 28235 - protein, 389 aa, Mycobacterium sp.
LLPSPEQATALAENCRHARFVWNMAVEQQQHWQPGRRAPGYNEQCAQLTAARAEYNWLAAGSQTVQQQALRDFAQAMRNYFNGSHRRPTWRKAGIHEGFRQVGVKPRHLKRLNRRHGQIWIPKIGWVRFRWTRAIPASVKSYRVTLDRSGRWHIAFAVIPEPISGPSDGTVVGVDRGVAVSVALSSGELLRAPGLGVGEAKRLRRLQRRLSRAQRGSNRRARTKRAIARLRARDADRRRDWVEKTTTDLASRFDTIRVEDLNVRTMTRSARGTRDRPGTNVAQKRGLNREISRQGWGLLVARLKHKASGRLDFVPAAYTSQRCSHCGHVAPENRKSQAVFQCVACDAGPCNADVNAARNIAAGRAVTARGDLGTSRSANREPQLCSPAA

SEQ ID NO: 28236 - protein, 416 aa, Haloprofundus sp.
MAIEVTRTYIGSIQNHRQVCDGLDSLGDSASKIWNVARWTADRIWDEIGKIPDEGPLKSYMKNQSCWKDLNAQSSQKVIEELSDAFQSWFDLRQKDDKANPPGYRKHGDTRPRSTVTFKADGFKHDPQNNRVRLSKGSNLKEHFSDFILCEYQTRPDVDLSEVNKVQNVRAVWNDDEWELHFVCKVSLETNDSAGDEVAGIDLGIKNLATVAFPNEYVLYPGNSLKQDKHYFTRAEYDTEGENGPSEKSMWAREKLSERESHFYHVLSDTIITECVERGVGTLAVSWPEDVRESDWGKTGNKKLHTWAFDRIYQYLNYKGEIRGVEVLKENEWDTSKTCSKCGDDTKANRVERGLYVCSSCELVANADCNGAENMRQKITPSPHGEDRSNGCVAQPSTYLFDRESGMFHTRERVVS

SEQ ID NO: 28237 - protein, 382 aa, unknown
  TnpB Polypeptide
VIKGFVIRIYPTTEQKKKFFAHIGCSRYIWNYMLELQNNRYSKGLKHLSAYDMMNLLTPLKNDGEHDWLYDVSATSIKNVCQDLAEAYKKFFSEKCGYPKFKAKKKAKPAYAVRSDHFYFTDEQYVNIEKVGKVKYKTDFSFPAGRNAVKYSNVRVTYNPLKDRWYISFGIDCENQATVLTDKPLGIDLGIKNLAIAAYDDKCLVFVNINKSAQIRRLKKNIKHIQRSISRKYEANKVGKKFVKTNNIAQEEEKLRALWNRLTNIRMNYIHQTTHKLVSLLPSKVIMEDLNIKGMMKNRHLSQSIGEQCWGEFIRQMKYKCEWLNIPFFQADRFYASSKICSCCGHKKNNLKLKDRIYHCEHCGTTIDRDFNAALNLSRYVI

SEQ ID NO: 28238 - protein, 382 aa, unknown
  TnpB Polypeptide
MRKTFKYRVYPTSKQTTVLNRTLEECRWLYNALLEERKTLWETKKQSTTVFQQQKSTKTLLKTHKGFNGVHSQVIQNVAIRIDLAFKAFFRRCKSGEKPGYPRFKGEGQCHSFTYPQNNGAFKLVKNNHIKLSKVGNVKIKYHREFEGTPKTCTVSKTPTGKWFVCISCDDVKPQTLKPNKLEIGIDMGLKTFATLSDNNKISSPNFFKHEEHALAKAQRKLKKQKKATSERQRAKKVVARVHERVANKRSDFCHKKSLKIVRKYGIICVEDLNIKNMIVKGKFPRLAKSILDSSWGLFLDLLCFKAESAGRTAVKVNPAYTSRDCSACGTRKALKLSERTYSCKACGMSIDRDLNAAKNILTVGLHSLRKSISGSSGSPRL

SEQ ID NO: 28239 - protein, 386 aa, unknown
  TnpB Polypeptide
VVLNIKSNLSWISETEVICLSKIQITYKYRIYPNNEQKILLLKTFGCCRFVYNHYLALRKEVYKNTGETLNYCKCAKDLTELKAEHTWLSDVDATALQSSLKDLDTAYQNFFKQKNGYPKFKSKHTNRYAFKSRQVASIKYENRRIKLPKLGWLKTKNRFVPKGRILNATVTMEPNGHFFVCLCCETDKPEPLTETGSVIGIDLGIKEFCIDSDGNKYANPKYLEQSLVKLAKLQKSLSRKSKDSKNRNKARLKVAKLQAHIANQRKDYLQKLSTKLIRENDIICIESLSVNNMMKNHKLARQIMDVSWSEFNRILHYKADWYGRRIVKIDTYYPSSQICNKCGYQNKAVKDLSVRQWICPECDTYHDRDVNAARNIRDEGLRNIS

SEQ ID NO: 28240 - protein, 407 aa, unknown
  TnpB Polypeptide
VDVVGLTVHFDQLVFVVRADAREQSNQIFETGRRQHLTPKLSHEDDVVDEFVDTVATCAKVRVPDSFVPILDVLLGRIRKYILPRMLHLREASSSKYYTEIPCVVAKSLITKYQRNLKCVTVSHPVIPICGDKGKQIKLEKGGIRIPALFKKELLPITFPKPIHGWVRSIEFFKRKGIWLASICYNTPVHELVDVEGVVGVDRNSVGNVAVMADPQNGTVQHLGFNPAATKYNWRRRRANLKSAGKRRTLRQLSRKQSRRTTHENHIVSKQIVSYAVKHHRAIAVENLETVRKPNSKIRKYVEKSQWSFYQLLSFLKYKAALHGVIIAEVNPAYTSQNCSRCGQRNTPNGKKYVCEHCGHTDHRDANAAFNIAKRGIEFLSMGGTHDSERVSGAVLVTPYSGGPAYA

SEQ ID NO: 28241 - protein, 407 aa, unknown; identical to SEQ ID NO: 28240
  TnpB Polypeptide

SEQ ID NO: 28242 - protein, 470 aa, Kitasatospora sp.
LFSQEATAFRPGRWKPLRSVDGGRSVDRTRDVTARSSGALAEAAVRGLRWLAAVHLRYSCRLYPTKGQQSLLARTFGCARVVYNDALAVRREARKAGLPYPTATELQKRVITGAKRTPERSWLASVGVDPLIQSLRDLDAAYRNFFDSVSRKRRGRLVGLPRFKSRKDSRQSLRFSRNGFRVRPNGKLYLAKIGDVRVRWSRALPAEPSSVTVVLDAAGRYHASFVVDVEPEPLPETGREVGIDLGLGSFAVLSDGSVVDNPRFLRKAEKKLKAAQRELARKAKGSRNRAKARAKVARAHAGVADTRRDWLHKLTTGIIRENQAVYLEDLNVHGLGRGRLAKSVHDAGWGAFRRMLEQKAARHGRTVGVVHRSFPSSRLCAQCGHRDGPKPLHVRQWACPACGARHDRDLNAARNILAAGQADRRNAPGGPVRPGAATPHRARPVERGTRLGDPPRTGIRAAGAGGIPVR

SEQ ID NO: 28243 - protein, 391 aa, Bifidobacterium sp.
MLVTITAKIRIRPTSEQQALLDATLDAYRQACNHVAQYVQKSHDTVQKNVHQANYAMLRSDYRLPSQMACSVTKTVLAKYKALKTTGVNKPTGKWTRPDFRKPQLDLCYNRDYTLRKNVFSVNTLQGRIKVAYFDTTMEQYLNGTHKLGTAKLVSKHGKYFLHIPVTIDVAELKDTNVTHVVGIDRGINFLTATYDSHGKSGFVSGKKIKSKRAHYKNLRKRLQKKGTASARRRLKKIGNRENRWMQDINHCIAKALVTNNPQGTMFVLEDLTGIRNATEKVRVRDRYVMVSWAHYDLEQKLTYKAQLHGQKVVKVDPAYTSQQCPKCGHTERANRNKRLHLFTCKNCHYRSNDDRVAAMNLYRKGINMLVPSDTVETEHDSVSQGAVNRP

SEQ ID NO: 28244 - protein, 682 aa, Micromonospora sp.
MLPCTGMVLRMRVEVTGTLTAEPTGARRTRGKSKGTNWRRDKDAPTAVIRLEVDLTEPGRRRRVFGMFAAEFQLRRALQRQAQARVDAYWAAHRLRAEGGPAEARRRFRLSRAAFEQAAYQHLEESVWLRHHLTKALAMHLADEVWETVDRHLFADATGHRHGRPRVGTWWDSTRIPGRARSHTKPRTWETFRLVGSLDGHRTAFPPRDPESALSQPAVLPAPQRPAGSAGWWAYDGPLAVVFTGCGQDLVLPVRLPQGAGQQGRLEHFLGRPDQWHKIDLVRVEDPKAPDGWRVYAHMMILDQGWTSPAVATRRAAAPRDRVGGVDGNVSNLSVVSMPADPGAPGGLTAGQVAVTPSQRAAAEKAAVTARRRQRTLDRSRRNSNPHQYQPSVRQQKRAARRAGAGLPARNVDLPGGARVSDAAGRPKQAYRCDTLSTTYRRTRGRHAADSRSASQARHARARDTARSIIAVHGPHLVVEHTDIRAWARLWGRGIGLFSPGMLTTALKAECAAAGGRLLRAGTRQTALSQQCPCGRREKKPLGQRTHTCQACGLTGDRDLVAAAMAACVRLTDPDQPATAYIDENFRAALAARVQGQQEALARSTVATLPRPHGRGTVGAAATTLVASAGRKTRPRDTPDENEHPVHRVPRPRRTTQPKQPHSPSGAAGPGREPQQPLRLNS

SEQ ID NO: 28245 - protein, 262 aa, Microcoleus sp.
LIGSRDLHFYAPDEIKRLRVVRRADGYYAQFCINVERKEEPVPTGKAIGIDVGLNHFYTDSDGETVANPRYLRKSEKALKRLQKRVSRKKKGSGNRKKAINKLGRKHLKVSRQRKDFAIKTALCAVKSSDFVAYEELQVRNMVKNHKLAKSISDAAWAQFAQWLEYFGKIYGKTVVAVAPQYTSQDCSSCGNLVKKTLSTRTHICGCGVILDRDRNASLNILAKGLKQVGINSNTAGHAEINAWEQTDLYSLVATSTSKSTG

SEQ ID NO: 28246 - protein, 234 aa, unknown
  TnpB Polypeptide
MTCTIKRDVDHWYACFAVALPDPTLDSQQRGIKKAIGVDVGLKSLLTLNNGDTIDNPRWLRHSEQKLAKEQRRKDRKVKGSRNRHKQNRKVALVHRRIRNQRKDFHHKLSRKLVDAYDLIVYEQLTITNMVKNHRLAKSISDAGWGQLMCFTEYKAEEAGTLVEYVSAYNTTQLCSRCGKLVPKTLATRIHCCPYCRLVLARDHNSAITVLQRSTHYIASRSSSPGQELPVEPV

SEQ ID NO: 28247 - protein, 196 aa, unknown
  TnpB Polypeptide
VDVGLKSLLTLNNGESIENPRWFRNSEKKLAKEQRRKARKCKGSNNRHKQNKKVAQIHRKIRYQRKDFHHKLSRILVDNYDLIVYENLRITNMVKNHHLAKSISDAGWGQLMCFTEYKAAEAGTLVEYVSAYHTTQLCSRCGKLVPKTLATRIHRCPYCGLDKARDHNSAITILSRSIYNVTSKSSSGQELPVEPV

SEQ ID NO: 28248 - protein, 390 aa, Nostoc sp.
MRISYQYKIKPTKEQSEKIDKTLEMLRYQYNYLLAQRFDWYEMNRCPIDRCPLICHLPELKEQPNYYNQKTSLTQLKKDRPWYKNIHSQVLQEVPKKVELAFDRWLKGDANGKKSGRPRFKGKGQYKTFTYSQFKGHHFVNNRITLSKIGDIKVIVHRPIADGFDIKTVSVTKKSDGYYVTLSLDDKTVPTIKPDFSPDNIVGIDVGLIDFYVASDGSRVKAPKYLRKSERKLKSAQRKVSRRKKGSNRRKKAIQRLGKQHKKVADTRKDFHFKSAKSLLDKYDVVAVEKLNIKGLAKTWLAKSINDSGWGQFISILSNKAENAGLKVIAVNPNSTSQECSSCGHKVKKPLSQRMHNCPVCHANLCRDLNASLNIKARGTHALKAQLMSS

SEQ ID NO: 28249 - protein, 351 aa, Nostoc sp.
MWGKHLNCAKLQSHIAKLRKKNQFWQSVGSQAVQDICQRIEKAYQLFFKHYNKGVRPPAFKKVKKYKSFTLKQAGYKFLAGNRVKIGNRVYQFWKSRQIEGTIKTLTIKRTPLGELFIVVFVDEDSKPEAKFTTSKIAGFDFGLKTFLTCSDGTCLEKSLLLGEPQDRVFRKIESPQFFKQSLNAIKKANRHHSRKVKGSSNRERARKNLVRKHEDISNRRRDWFWKLAHELTSKFDVLCFETLNLKGMHRLLGRKVSDLAFGEFLQILEWVAKKKNKLVVFIDQWYPSSKTCSHCGYVLEKLDLNTREWRCPSCQSVNGRDENASRNICAVGASTVGLGDVRQSMTAIAV

SEQ ID NO: 28250 - protein, 481 aa, Lachnospiraceae sp.
MFDLFYHIWYNKSGTIRRYDMHRTVRICIRKGSRLYEYCRQAAMASARLYNRANYIVRQYVTAADRLAENKPLHQNQSEICELVSALSDGTDYAPQSKWLKYKTLDYVLKASKDAAYYGVYSQANQQTLKLLMRDYRSYFGAVKKYKAHPEEFKGHPKLPGYCKQGKYKTTILTNQICTVKDGHYLKLPGTKTRINLGKELNGSLQEVRIVPTNGVFYLEIVVSCADQGIMLPEDIKEYNASLLKEAAGYEDISGLRIVSIDPGTDNLCAMTNNFGMQPILIKGTILKSVNRYYNKQLANMKSKAELCNKAKDTNRIRRLTHKRNCIITDGMHKISRYITGYCVTNNVDIIVLGHNAGQKQGINIGDANNQNFVQLPFLKLVHMLRYKLAQAGIRMIVTEESYTSKADYLAGDDIPVYKKDDDRQFVFSGRRIARGLYRHRDGTISNADINGAANIMRKVFPKVTQWDRGVVDTPCAVYVA

SEQ ID NO: 28251 - protein, 442 aa, unknown
  TnpB Polypeptide
MQIISSYGVELRKQNIPIRQTLEIYRSAVSYLIGIYVQVWEELAEIPDAKRRFNAAEHLVHTTKKNHACFDFDIRFPKMPSYLRRSAIQHALGTVSSYKTRLDLWEKTDGKSGKPKLVYENHAMPVFYRDVMYREGAEGKDEAYLKLYDGHDWKWFCVRLEHTDMEYLRKYWAGKRAAAPVLEKRHRKYFLRFSYIEEVPLTKAPVKEQIICSVDLGINTDAVCTIMRSDGTVLGRKFIDFPSEKDRMYRVLGRISRFRREHGSVQVKSRWAYAKRLNTELGRKIAGAVTGYAEENHADVIVFEYLETKGKISGRKKQKLHLWRKRDIQIRCEHQAHRRGMRISRICAWNTSRLACDGSGTVVRDPGNHSLCTFQNGKRYNCDLSASYNIGARYFIRELLKPLPATERSLLEAKVPSVKRRISCVYADLRELFSEMELLRAA

SEQ ID NO: 28252 - protein, 425 aa, Microcystis sp.
  misc_feature (306)..(389): Xaa can be any naturally occurring amino acid
MEKAYSYRFYPTPTQESLLRRTLGCVRLVYNKALHERTQAWYEKQERVGYAQTSSMLTEWKKQEELEFLNEVSCVPLQQGLRHLQTAFTNFLAGRTKYPNFKKKHQGGSAEFTKSAFKFKDKQIYLAKCTEPLPIRWSRQIPESCEPSTVTVRLHPSGRWHISIRFDDPTIKPLPVTDKAIGIDLGISSLVITSDGDKVSNPKHFKKHYRRLRKAQKSLSRKQKGSKNREKARIKVARIHAQITDSRKDHLHKLTTQLVRENQTIVVENLAVKNMVKNPKLSQAISDVSWGEITRQLAYKCRWYGXXXXXXXXXXXXXXXXXXXXXXXXXXXXXXXXXXXXXXXXXXXXXXXXXXXXXXXXXXXXXXXXXXXXXXXXXXXXXXXXXXXXRGCQVPSLQGGRFCLCSRYNWHGGGIGFICDYYQHS

SEQ ID NO: 28253 - protein, 305 aa, Microcystis sp.
MEKAYSYRFYPTPTQESLLRRTLGCVRLVYNKALHERTQAWYEKQERVGYAQTSSMLTEWKKQEELEFLNEVSCVPLQQGLRHLQTAFTNFLAGRTKYPNFKKKHQGGSAEFTKSAFKFKDKQIYLAKCTEPLPIRWSRQIPESCEPSTVTVRLHPSGRWHISIRFDDPTIKPLPVTDKAIGIDLGISSLVITSDGDKVSNPKHFKKHYRRLRKAQKSLSRKQKGSKNREKARIKVARIHAQITDSRKDHLHKLTTQLVRENQTIVVENLAVKNMVKNPKLSQAISDVSWGEITRQLAYKCRWYG

SEQ ID NO: 28254 - protein, 401 aa, Hydrocoleum sp.
MRLEVIGLYAKKLELKLNNQERSKMAQCAGYARFVDNYGLSMVNGTSGMTKVNKRGQEVSLSYALRILEAKKVFTDYVKKQPEYVWTSNYSSRIYQSAFQHLGEAFKRYKEGISKYPKLKRKKDRQSFTVYDGHGKVTINPGKKIKIPTLGTFRLWESIPYTTASQTFTISRTGEKWFVSFSIEASQLPVHPLLDERQYETFGIDVGVKQFASITNQELGNSEVFSIPDSIKIEQLKLAKFQWRNRNKQLEGKGKPPSKNAIKYYKKQALYHGRVVNIHRDFIEKTTTNLASKVKHVCLENLNVKGMMQNGKLAASIARQGFYEFRQRLTTKIVSSGGTVVLAPLWFPSSKTCHNCGYINQELKLKDRTFDCPDCGMRIDRDLNAAMVLSQYGEVNQNARG

SEQ ID NO: 28255 - protein, 432 aa, Fischerella sp.
MYGCQQVLLSPNKELKAILEFICSESNKLTNCAIYYGRQIWFKCHSKLGKFDLINEYKTNPHYQVLHSQVAQQTLLSVRESFKSFYELDKKYRKGELENKPKPPKYRKKGGLSVVSYPKQALKLIDNQIQIPLGLTVNRWFGIKNFSITMPSNIRFEDIKELRILPRNGCFYAEFAYKIKTVTTKLDPKLALGIDPGVSNWLTCVSNLGTSFIIDGRKLKSLNQWYNKAVSKLKEGKPQGFWSQRLAHITEKRNRQMRDAVNKAARIVINYCISHGIGNIVFGWNKGNKNGINIGSQNNQTFVQIPTAKLKERISQLCQIYGINFVETEESYTSQASFLDGDIVPVFGNKPEGWKSSGKRVFRGLFVTAKGIKINADLNGCANILNKVKEQLNLDLAKTCRGLLTVPQRIFLWKNNCKKRRGMALACLVATV

SEQ ID NO: 28256 - protein, 359 aa, unknown
  TnpB Polypeptide
MIRSSQHTLKFSNDCKIEYLDKLFQDYQLDLQDYINLIWMGKLPLKQLMSSKDLPKIKCNLSRYKSAIYKQASEIIRSNRKNKIKTKPEVNNVSIMLTENLVRYSTDAKAFDEFIQITLPYKKEQYKCRYEKIRVPIKYHKQSLKFKDWIRKKSVQLKRINGNYYLTFFYEKETPEKKEVGESLGIDMGYKKLIATSREEYLGKEMEQIYTNISKKKQGSKNFKQALIQRDQTINQICNHLDLSTVSTLYVEALKNVKHKSKLSKKFNNKLQRWSYPKVVNKLSMLCEEQGINLVKVSPNYTSQTCSKCGFVDSNSRKGEIFECTNCRIVLDADYNASKNILHRGESELPLLTKSTITG

SEQ ID NO: 28257 - protein, 410 aa, unknown
  TnpB Polypeptide
MERRQTLKYALRPNAEQQRDLCRFAGCCRFVFNQARALQKAHYEAGREYIGYVAMAKLLTQWRRGTETPWLKQAPVPPLQHALKDLERSYQNIFAGRAGFPRFKRKGHRQSFRYPDAQQFEIDESHSRIFLPELGWIRYRNSRDILGKARNITVGCSAGRWYASIQTERQVEPALPRATTAIGIDLGVARFATLSDGTHIAPLNSFRKHEIRLRRYQRSISRKVKFSKKWRKARRRVQTLHARIANARRDLLHKATTTISKNHAMVCIEDLQVRRLSKSDRGNIQAPGQFVRAKSGMNKSILDQGWFESRRQLAYKLGWNGAMLIAVPPHNTSRTCPVCGHVAAENRRSQARFECVHCGYVQNADVVGAMNVLARGHRVAACGEAGSGPARKSRTKSSLCEAGTHRGDYV

SEQ ID NO: 28258 - protein, 381 aa, unknown
  TnpB Polypeptide
MFRTIRIRLERTADLVQTVRVFNQACQRVLDWGQENHEYNKTWLHRATYRGVRIDHPSLPSALVQTARDQASEMMRRDKFKHRIFKKPLSSIRYDKRTLSVFLESGHCSISTVFGRMKYTFKLPEFYRQYMAWKVKSAQLIVGLNACFLNVQVEGEAPPFNNGDRRLGIDLGINNIAVCSDNTFFNSKYWKNVKGRYQHLKAELQSKGTRSAKRKLKEISGRERRFVMDLNHRVAKEIVSKPFDVLVFENLTAIRGPKRSKAFNRKLGNWSFAQLLRFTEYKAEALGKKVMVINPYHTSQTCSKCGHVSRYNRKGRQFKCVECGFSLDADLNASRNIATFSRRVGGRSNVSRPNVAGVEAEGRKAVEAEPSYKLTDSIVGC

SEQ ID NO: 28259 - protein, 378 aa, Salmonella sp.
MPIINTCTIIVYIYSVNIQTKTLSVRVKDRHAAVLRQMAFEVNQVFNLANEITSVAYSIAGEFGAQKPQWLSAFDVQKLLLKERNERGYTIPSHTVQEIVASHGKARKQFKRSRLRWRISGGARRSLGWIPFKVGSAVWKNGAVRFAGKLFNVWDSYGLSGFKFRAGSFSEDSRGRWYFNVCVEVDTAPTAGTTAVGVDLGLKDYATPSEGEKLEAGRFYRDLESALGKAQRANKKARVRAIHAKIKNRRKDALHKFSTALVNSHAAIFVGDVSSSKLAKTKMAKSVLDAGWFMLKTQLEYKAIARSVVFEVVNERYSTQACSCCGAISANSPKGRADLRIREWTCCECGTTHDRDVNAAKNILAAGHCRLAVGIPVL

SEQ ID NO: 28260 - protein, 391 aa, unknown
  TnpB Polypeptide
MYTLSMNKGFKYRIYPNKTQMELFSKIFGCCRFVFNRCLEIRKSTYEKEKRDIGKYELMKLVTVMRNSAETPWLRECDSIALQEAVKDLDNAYKRFFDKMAQFPVFRLRNDIKQTYRTRNQNNQVRIEMGGYIALPKVGKVKIKLSRPIEGRILNATVTRTNTGKYFVSLCCEIDSVPEGKRAGMVGLDVGLKEFLTDSNGCTVDNPKVLAFYEKRLKREQKKLSRMIESNILKRSQNGKPIFKNPVQECKNIQKQRRKLSLLHERIRNIRLDYLHKISTDIIRENSLIAVEDLNIRGLMKNHHMAKAIGDASWGEFINMLEYKASWHGCRIIKVSPFYPSSQICSCCGYRNTDVKNLSVREWKCPECGTFHNRDKNAAVNILGEALKIVS

SEQ ID NO: 28261 - protein, 499 aa, unknown
  TnpB Polypeptide
LSSNLTAGKEAGVRELLRAWRKGAVLLGREQWRLFHETGRFDKNHDVDKTTFASVIGAANRVQMCRWQVVSQLQGWLSNRANEFRDTVTRSSLPPDVKRMLHTVNLMGAWFSRKELRMWGTGETIPPEVRKLARTIMRHVMSRHRRPDLSRISMRLDYRAASLAAPTKATQGGKVGWWGNLSTMQPGRKIAVLLLTYDHHARRPGRATNSVQVNLNREGKLTFGIVTDMGEVYAKSLADDDGHGVLALDFGLSTLFATSEGQLLGQAWLKRLKQYDALISMIAASQQRAGRKPRNSKRYRALVENVRGFLRTEVGRVPNRLVEQGKPRELVLERLDFRHPDLSQRLNAILRNCGRSILQDKLRDLDERFGVTSTEVNATYTSQTCSSCGYVDQRNRRNQKTFLCLWCGHKLHADLQAAANIDARRARPNGWLFQGKATVLAELVRAFGERRVRALRLGRTGSRSAPADPRLTNPSFGGVPLAVVRSSERRKAFVKSPET

SEQ ID NO: 28262 - protein, 408 aa, unknown
  TnpB Polypeptide
VSLLADCLNLTYNGVHYAEEHGIEDRRGMKGFYQTLKRVELPSCYKVASMNRACAVVKSRKKSARRGIKVCHPRPLRPVVCIISGFFITMKGRLFIPLRRDRYLDVQLDKYTVGELAYKKVRSLTMTPDSLSFCYSDDIEPMPVERVYGVDRNEKNITFGDEEKVTRVEMTKVVKIKQTTREIIGSFKRNDERIRRKLARKYSRRATRRTDRILHAATNYIVDSAAKEGAALAIEDLTGIRRMFHKGSRQGAHYRFRLNSWPHWKAKRMLEYKAAWNGVTMIQLTKSATYGSSSTCSACGEKLHGPPKEDVAHRRMLRCQACEVWMDRDVNAALNLSARGRSRFDRSLSSRPKTRGEEESRSQQPTSSSSPIEKEKGLASEAKTGNGATTLILRVDASKLTRRREPMS

SEQ ID NO: 28263 - protein, 393 aa, unknown
  TnpB Polypeptide
MLRAIKYEIRPTKVQAQAIHKACGCSRFVYNKALALKIERYQQDKVNLSQYDLDKLLTTWKKEFTFLSDCPSQALQQKVHDMCGAFCKMKNGAKFPKFKKKGRCKESFRVPTSLNIDFEDWTCKIAKVGKVKVLKGHNKQVSNIHSYTVEYKPSLDRYSVSILYEDNSLTNKRIPNNDTHCGIDVGIKTFATLSDGKVFENQKHLKSNLKRLRVLQRSASRKYKKGVKTEEQSRNWKKIQKRIAKLHFHIANQRQDYNHKVSKYIADNYYLVSVEDLAIKNMVKNHRLAQAVSDVAWSSFLSMLKYKCQAYQEVDRFFASSQTCGCCGYKNPKVKDLAVRSWVCPQCGAKHDRDLNASKNIDREGLSLWRRKVSNRLCLSQEPHPFRDGSSQF

SEQ ID NO: 28264 - protein, 172 aa, Pseudonocardia sp.
VGWVRLRRTRAAIARLRAREADRRRDWIEQTSTALARRYDLIRVEDLRITVMTHSARGTAETPGRSVRAKAGLNRSILAAGWGGLVRRLADKAPDRVEKINLAFTSQRCSVCGHVAAESRQRQALFACGHASHADRNAARNIAAGRAVTARGGTRLRAPANREPQSVTSPVA

SEQ ID NO: 28265 - protein, 407 aa, Oscillatoriales sp.
MKARYRFRCYPRPSQKLALAKLFGCVRVVWNDALAFCVSEYKGGKKKPKNAELQKQFITQAKKLEEREWLSEVSAVPLQQSLNDLEQAYSNFFASCKGNRKGQRVKPPKFKKRKSKQSARFVKTGFSIKGEKVYLAKIGKIKVVWSRELPSEPSSVTVIKDSADRYFLSFVVEIQPEILPQSENSVGIDLGIKTFATLSNGQKIEAPKPLKKQIQKLRKFSQQLSRKTKVSKRREKARKRLARLHAKLSDIRTDFLHKLSTQIIRENQTIVLEDLNVSGMVKNRKLSRAISDLGWRTFRTFLEAKSEKYGRDFRVINRWEPTSKKCSCCGFKVAKLDLSIREWICLNCGESRDRDINAAINIKVAGGLSETVNGRGGKRQTTAICSSSQRSVNPPAFQQLSIFDLLK

SEQ ID NO: 28266 - protein, 390 aa, unknown
  TnpB Polypeptide
MQVMRAFKYKIYPDSTRKEKIDARLSLLCALYNKTLEKLHFEYRKNNDLALDIPTIRRYVDESAAASPELSSISSSDRAEIARKLFRSYKTFLARKAAKASGRKIKARFLPFKSPLDYKSMFFYKNSSDFYITLDKDYATLTIPEIGRVRIKLYRDIEGLVRMLVIKRYAGSYYAIFVSSLELDPDPVDVFKNPVGVDLGLNNFVMLSNGVSLDKPKFVKQRASKVAKLRKRVNKRKKGSKRRAEAVMRLQRELAYTANQSLDFSYKAARQLLDQGFTVIFLEKLNIEGMVHNHSLAGSILNASWGKFTQILRYKAESEGVKVIKVPSKDTTRKCSRCGYINKVKLGQSIYRCDSCGLVINRDLNAATNILKIGLALLKKEMGTAGPVGG

SEQ ID NO: 28267 - protein, 386 aa, unknown
  TnpB Polypeptide
MKRSLKCRIYPNKEQEDFFIKTFGCRRFVYNFYLSEINNNYNSYVSGENKNKMSVNEMDIIKKLPVLKEKFIFLKDVSSVVLQQTAIDLSKAFIGFFNGKKYPNFKNKFEKQSFRLVGDAFSIRNNKIKISKVPGLLKIKYKINFNVSSLTLTKDVDGKYHINLTYDAESKTTSGKEYLGIDLGLKYFASFSNGDKIENPNFLKKTEKKLKKLHRNLSKKQKGSNNRNKARIRLAKAYSKINNQKNDFLHKLSRKLVNENQVIAIENLNIKGMLKNHNLAKSISSVSWNRFITFLRYKTIESQHCILVEMDRWFPSTQTCSFCDYKNSGKDKLKLKDRLWVCPSCNTTHDRDTNAAQNILNEAMKLVDKNIEYFKGKIVKMEMETF

SEQ ID NO: 28268 - protein, 444 aa, unknown
  TnpB Polypeptide
LSINPITNNNELSKNTQIKATLKATKERRSLKRCRTINLKIQKNKLNKQQQEHLSMLFVEAKWIYNHILNDIKNRANDSYVKSLKEIEVPYQDKLIIKPLKFISSQMKQAVATQVKSNLSVLSLLKKKGHKVGKLKFKSFINSINLKQYKITHRIDFSTNKISIQGIKKDIKVNGLNQIKEFASKFSDLEIANAKLLKINDDYYLNLTIYHSDIEKKNEILGIDMGIKEQITLSNGVGFSYNIKESKQLKKLQKRLSKKKGSKKNEKKSSNFYKTLTKLKKEYKKVSNKRTNINNHIFSLIENYKFISMQDEMIKSWHQNKLFGKKIQYSGLGAIKSKVKNLESHRINILSKSLPTTKACSNCGSIKTMTLNDRTYTCDECNLKIPRDLNSTFNMIKLSKFSAEHRKTMPLEDKSTALINLRNVDGLSVRLYPLNEEARRFIYE

SEQ ID NO: 28269 - protein, 397 aa, Geobacter sp.
MQIRKAFKYRLNINSGDESLFSRHAGCCRFVWNKALALQKERLADGEYCLRYESLANLLPQWKQEHPFLSEAPSQALQQVLKNLDKALKEAFDKKNPKQFPKFKKKFKSVDSFRYPQGFKVKGNRIFLPKVGWRRFINSRPVTGIPKNATVSRREKHWFVSIQTEFEIAEPRHPSNSIIGGDRGVKRFITLSDGSSYEPLGGFRKMERKLAKEQRKLARKVKRSNNWQDQKERITRLHIRIADARSDYLHKISNEVSKNHAVVVLEDLQVKNMTASAKGTAESPGRNVRQKSGLNKSILDQGWGEFGRQLEYKQAWRGGWVLYINPAYTSQACSQCGHVSPDNRKSQELFVCENCGHTANADINAAINIERAGHARLACQANGAVMPSATGTSRVAT

SEQ ID NO: 28270 - protein, 304 aa, Okeania sp.
MMPWVGLNIVIYSYENRCKEGISKYPKLKRKKDRQSFTVYDGNGKVTISPGKKIKIPTLGTFRLWESIPYTTASQTFTISRTGEKWFVSFSIEAEQLPVHPLLDKRQYETFGIDVGVKQFASIANLELGNNEFVSLPDSIKLEQLKIAKFQWRNRNKQLGDKGKPPSKNAIKYYKKLANYHTRIANVRKDFIEKTTTKLVSKIQHICLESLNVKGMMQNSKLAASIARQGFYQFRERLTTKIVSSGGTVVLADQWFPSSKTCHNCGYIHKELKLKDRTGELSSLWNKNRPGLKCCTGTISVWGN

SEQ ID NO: 28271 - protein, 416 aa, Coleofasciculus sp.
MLRALLVRLYPTESQKQHLAQAFGCVRWVWNQSLVTMSQTYKETGKGVSALTMKKQLPVWKKEHEWLKVCYSQCLQQSVLNLSQAFINFFDGRARYPTFKKRHGRQSIQYPQNVKVLSDSEMKFPGNLGVVKAKVHRDITGTLKTVTLSKTPDGRYYASLLIDDDSPQPVASSDGKAIGIDLGLIDFVVTSDGSKYQNPKHLHKREYNLKRKQRQFYRKKDKATNNRHKAQIAVAKVHSKISRIREDFLHKLSRKIVNENQVIVVENLAVKNMVKNHNLAKSISDSEALASLRASAGWGMFCTMLKYKAEAEGKVYLEIDRFFPSTHLCSETLLQIPKMDLSVRMFDCPFCGSRHDRDINAAINIRNEGLRILALGTSASALGGSVRPKRYGRKSTAVEATPCELGSRLRSPARGA

SEQ ID NO: 28272 - protein, 419 aa, Okeania sp.
MIITHCYKIKPTLGQSAKMDYWLELLRRHWNYSLGQRLDWLNRTRCHIDRCSIVSCPIGEIPGKPDYYFQQSALKQTKQLFPDYKEIYSEVQQINLQRLDKAWKRWLIPNQTGKRGGRPRFKKSGKLRSFCFSRVNHPKAVIKFDGKQIIISRFGAIPVIVHRPIPDGCVIKTATIIKKADGYYISFSLEDKSVPSLIPTNNIKNAVGIDVGLKEFLTTNTGETISVPNFYRKAQSNLARKQRKTDRKEIGSNNWKKAQNRIARLHQHIARQREDFHYKNAHKLVKEYDLIAVENLNIKGLARNSKLSKSIYDVAWGAFIDKLNAVAVKRGVHVVKVNPHNTSQNCSNCGQKVPKTLSVRTHSCPNCGTVLDRDENAAINILNKALNEVGIILSACGGLGISQPVRQETSETWVQLSLF

SEQ ID NO: 28273 - protein, 428 aa, Halorubrum sp.
MHYNYKYRLEPPEALSETLLHHVDTCRQLYNHVLYKLNETDEIPARYKVQGTLPDLKSWWDDLNDVHSKVLQMVVKRVYDNLSTLKAQKENGRAVGMLKWKPPREYRSLTYNQSGFELENTSGRPVLWLSKIGEIPIHLHRDIPENATIKQVTVKQEPTGEWFATFGIDVDESIPEKSENPERVVGIDVGILKYAHDTDGTAVESPNFSDERERLERAQRELSRKEHGSNNWEEQRKTVAQRYADLKRKRRDFLHKLSNYYAREYDLVAVEDLNAKGLVELPGNSRNRGGASWGTFLRMLEYKCEREGTHFIAVDPRGTTKECTSCGTETDKPLWVREHSCPSCGFKADRDANAAWNILSRGLDEVGVGHSESPPVETALPADTPVSAKRVVETGSPITRSRRLLVSSQNSPSSDDTLKERTASAVSE

SEQ ID NO: 28274 - protein, 478 aa, Nocardia sp.
MSRHTAFRYCLDPTVEQQQALVRHVGAARFAFNKSLHLVQTALDQRKTDPDRPVPWTGFSLINAFNEWKKTEAAGRVITVDPDGVAEIKVTGLAWRNEVCQQVFEEAAVDCGRALTAFSDSRTGKRRGKKVGFPRFKKKNTTTPSFRIRNKTARSGRTAIRVGDNGIARSVTLPGLGTIRVREDTRRLRRLLANGRAKILYTTITCKAGRWQISVTIQAADLHPTRHHAPRPADDDSGWVGIDLGLSAFLVAATADGSELARVDNPPKPLNSRLRKQRRLAKALSRKQKGSINRKAAAAALGRHHHHIANIRRHFLHQVINRLVNTHDRLVIEDLNVAGMLGNHHLARAISDAGWAEFARMLRYKQQWRSGTISTADRWYPSSKRCSACTAVNTGLALADRMFACGCGFRADRDHNAAVNLAAWPSIPPEDSPRSPDPQAGGRVTNARRREGTDRHPHGAGETGPNDARTDVHATQVA

SEQ ID NO: 28275 - protein, 421 aa, Streptomyces sp.
MRGGLSVAGVSVRVVWLRYAFRLDPTSGQRLALARAFGCARVVYNDAIAARERARAAGEAFVTSAVLSKTLVTEAKKTRERHWLGEVSAVVLQQSLRDVETAYRNFFASLKGERTGPKVGAPRFKSRKDARQSIRFTANARWKITEVGRLLLPKIGEVRVRWSRVLPSVPSSVTVIRDAAGRYFASFVIDTDPAVDLERMPHAGQSIGIDLGLAHFAVLSDGTKIDSPRFLRRAEKKLKKAQRELSRKQNGSNNRNKARLKVARAHAQVADARREFHHQLSTKLIRENQAVAVEDLAVKGLARTQLAKSIHDAGWSQFVNMLAYKATRYGRTFIKIGRFEPTSQVCSACGHHDGPKPLDVREWTCTACGTVHDRDHNAAKNVKQAAGLAVAACGAPVRPEPVLAQRDEAGSHGSPPDARAA

SEQ ID NO: 28276 - protein, 407 aa, unknown
  TnpB Polypeptide
VKLSVSDSDADLLHETIDEFRWAANYVVDAAFDDEYAVTSKRKLHDRTYEQVREETRLHSNLVQAARSRAAEALKSVVAKWKRGKYASRPYFSSLFLEYDKRSATFNADHATLSTVEGRITAEYVLPDEDRDTPHAEYLFGDDYETTGATLHYRPIEGAFYLHVRTKADMGDLEPAENGMVLGVDIGVENIAVTSTGVFWSGDELNHWHSEYEKRRASMQQRGTRYAHEAMQRVGRKETGRFEQMLHQIANGIVSEARENGCSVIAFEDLTDIRDRMPGAKRFHTLAFHRLFDYVTYKAEPFGIETEQVNPAYTSQRCSRIGCGFTVRANRPSQERFECQKCGHTSHADYNAAKNIGLKYLRRSHKSSDGDGPVGVRLNTGMLNTSGFTSAPCDSVRVGVHGEGHAL

SEQ ID NO: 28277 - protein, 372 aa, unknown
  TnpB Polypeptide
LRHAGAEAAQPNEGPAVGVDRGVAATVALSTGELLHCSDLRAGPAERLRRLRRKAGHQETARRHRANGQRRRSARHQRTLDQIARLRGRETRIRNDFLLKLSTELATSHSLIVIEDLRIKNMTGAAKGTLAKPGVSVAQKRGLNGSILAQGWGELHRQLAYKTGWYGSQLAVVPASYTSQTCSACGVLDPRSRESQARFRCVACGHAENADVNAARVILARAANGHEDGGRIRPLQRGEPSRRKPGLGTANHPAESGMTPSPAAGNPRASARGGDQGIGYATTGSPIGPFAKSPANSILAQTPAVVGPGGGDELVTGPHGGWWLLFAARGPIANAPRTLRLDPFSWQPAPTAGAPDLPVISGPSSTLQPTQP

SEQ ID NO: 28278 - protein, 286 aa, Moorea sp.
VIILEFKAYGKTSQYSAIDEAIRTVKFIRNSCIRLWMDNKGINNFDMSKYSKVLAHQFPFANELNSTARQAASERAWSSVVRFFDNCKKKVPGKKGFPKFQKHCRSVEYKQSGWKLSPDKKSITFSDKKGIGRLKLKGTWDLWRFDKKQIKRVRIVKRADGYYVQFCVSIEVNEQLEPSKLTIGLDVGLKEFYTDSNGNSEPNPRFYRKGEKRLKFHQRRVSRKKKGSANRKKAIDRLGRHHLKISRQREEHVKRLVRSYRKKSAAFIVGRLCIKGDRFCCKAALF

SEQ ID NO: 28279 - protein, 444 aa, Succinivibrio sp.
MKLISTYSVKIKNYSHIFKESVALYRRAVDFYVHLILSEWNDFSGLSQIKVVNMAESFSVTSKCRPSVKYDFSKEFYKFPSYLRRGAIAEAYGKASSYMSNLTNWESSDKRTRGEKPSFPKAGYVYPAMYRGNMFVRTSDYSAQIKVFRNNTWDWINTELKKSDVNYIKNHCKSLKECVPTLQKRGKQWYLDFAFKQETDLADTPVKKQVILAVDLGINSSCACSVMRSDGTILGRKFLHLPKEYDSLSHKIGHIKRAQRHGSHRVINLWSYAKGVNDNIAVKTAAFIMELAVFYGVDCIVFEHLDLGKKKRGSKKQKLALWKARYVQQMVTHKAHAAGIHVSTINAWGTSYLAFDGSGRVLRGRESDKCKSYSVCEFKTGKVYNCDLNATYNIGSRYFVRELLKSLPARERQCIEAKVPGCAKRSTCTLATLISLNGELQTAV

SEQ ID NO: 28280 - protein, 272 aa, unknown
  TnpB Polypeptide
LSTRIVRSVINGRDTYRMRLVCDGYPTRRHPVGDGRVSLDLGPSEIAVAVQRTNGTCAGWSEPLADRIRLNTLRLRRQQRHLDRQHRAGSPGFFNPDGTHQSGRCDWRRSHAAKQSIARVAERHRRLAEHRKTLPGALANRLFTHGADVACEKLDYRPAGPGGSQPRLAGSTVRTLMGRRGPVAQQYPSGEAADIRRRGGQGRAAKPGVKPKPRCDRAGRRELPLPPGPRRCPHEQRDSRLARGIPAIHCGEDVNRSHSRGMSLLQLTHSGR

SEQ ID NO: 28281 - protein, 328 aa, Nocardia sp.
MGKVVKRAYKFRCYPSHEQAAELSRTFGCVRVVWNKALDARQRRYATESKSTTYVQASAELTGWKRSEDLAFLNEVSSVPLRHQQAAFAAFFAKRAHYPRFKSRKRSRASAEYTRSGFRWREGQLTLAKMTEPLDIRWSRVLPEGAAPSTVTVSRDSAGRWFVSLLVEEKITALPVSANTVGVDLGLNSLAALSTGETITNPRHERSDRRIDFLRKLSTRLIRDNQAVAIEDLTVRNMVANHTLARAISDASWRQFRTMLEYKADWYGREVLVVDRWYPSTRVCSHCGALGEKLLLSVREWTCRRCGVVHDRDVNAARNILAAGLAER

SEQ ID NO: 28282 - protein, 442 aa, Thioploca sp.
MKATRIIESKNINQGKYKQLQKQAERLGKIRSKVWNSYSSIKGVLLTSDRTIRDQWTKEKRQFQVLANAWKETLRDSFGDIKAYYEASKKQVRKNLYQQIRNEEQRTSFYKKLKSDDWVTNNYLRRLMRKHWKHGRNHTHNQIVVRSDDYTTFQLGGRAWIKIPSLIKGRRIAIPLNTTVEPSGTLRLILHEGIGEVHYTIDVEETKNCGHATIGIDKGYTEVFVDSEGEHHGEGLGKILSKHSDKLNKKHQARNKLRAIANKKPHKKKHIIKNNLGRKKLNRQKQKVQFQIKDTIYQAVHKLIGKAKVIAAEDLTSPITGSKLGKNINRRLSAWTKGVIATALDSISRRRGSSVILVNSAYTSQMDSRYGILLGKRHGDSFYCFDGVVLQADENAARNVLARLYDSEIDRWTPFEKVKSILLERTERQRLGLLNLDSSCHS

SEQ ID NO: 28283 - protein, 402 aa, Erwinia sp.
MKRLQAFKFQLRPNGQQERDMRRFAGACRFVFNRALELQNKNHEASNKYLTYVKMAAWLVGWKKTPETQWLKEAPSQPLQQALKDLERAYKNFFQKRASFPRFKKRGKSDAFRYPQGVKLDQVNNRISLPKLGWISYRNSREVVGEVKNVTVSQSCGKWYISIQTEYNVTEPAHGSTSMVGVDAGVAKFATLSDGTVFEPVDSFKSNQKKLAKLQREMNRKVKFSNNWKKAKRKVQNLHSRIGNIRRDYLHKVSTTISKNHAMIVIEDLKVANMSKSASGSTGQHGRSVRAKSGLNRSILDQGWYELRRQLEYKQLWRGGQVLAINPAYTSQKCGCCGHTAKENRQSQSQFECLECGYNENADINGARNILAAGHAVLACGGMVQSGHPLKQEPTEASQILF

SEQ ID NO: 28284 - protein, 365 aa, unknown
  TnpB Polypeptide
MANKAYKFRIYPNTEQQILFAKTFGCVRFVYNRMLADKIKYYEETGKKLNNTPAQYKKEFEWLKEVDSLALANAQMNLQTAYNNFFRSPKIGFPKFKSKKSNRKSYTTNCVNGNISVENGYIKLPKVGFVKLKQHRQVLSDYKLKSVTVSQTPSGKYYASVLFEYENQVQEKEPHNFLGLDFSMHELYKDSKGNEPAYPRYYRQAEKRLKREQRKLSLMQKGSKNREKQRIRVAKLHQRVANQRKDFLHKQSRQIANAYDCVCIEDLDMKAMSQALHFGKSVSDNGWGMFTAFLKYKLEEQGKRLIKIDKFFASSQICSCCGYKNTETKNLSIRAWDCPECGTHHDRDVNAAINIRNEGMRIVFA

SEQ ID NO: 28285 - protein, 291 aa, unknown
  TnpB Polypeptide
MKVDYNTKTIRITLKPWEYLTVSWKGAWSERRVRGWTVGEVIIKDDRIIIPSKNSKVVKVKRIIGWDSNELSLDGYEPGTGFIHIDLRPLQSIKIVYEKKKAVAQAKNKKELYEKYKARERNRVRDFINKLSAGLVRLLPNSIHVFEALDKENLTSKEKVYRVRRKRNARTPWRKIHKRVSKVALTGSVSSKYTSRECPKCGFKVKTQVGHIFECPRCGLKMSRQNVAAMNIRRRYLKSKHKMWGFPRSKDPEETMRVELRAGVTLNGWSPLIWAPMKWGSEGNEAKGCGA

SEQ ID NO: 28286 - protein, 417 aa, unknown
  TnpB Polypeptide
MLAYKFPLYPNKEQQVLLWEHSCLLNSLYNRMLHMEQEEYEKNKKFLNFYMLNYMLPKLKQETPALKNIFSQALQQVMKRVNDGYYLFFKKVTIRPPKFRSCKRFYNICYPQPKVGYKIEDNKFITKQYGTIEFNPYREMKGTVKTVSITHDVVRNKFYLCIVTDGKTEFTPYANAHIGIDLGTMNLVTTSDGEVYQGPVHQKYFDKQIDKVKSIRDTKYPLMKGEDGKTRSSRNRQHLNQVIAKLYGVKRNKTRDVLHKISRDLSRRYDTVMVEDLQVKRMGESNISGRNRELRNQGIGQFLTYLGYKCKKVVRVDPVNTSKTCCKCHHKIEELPLRIRQWTCPHCGTKLDRDRNAALNILHLGRAMMSRVYRNDKPNIADIDPYIWMDQNLYTAKELALVARPCSGSHQEAPSFR

SEQ ID NO: 28287 - protein, 417 aa, unknown
  TnpB Polypeptide
MCAAHPQRLVHQDQALTTKDWSNYMRTYKFRIRPSNQQVKKLWNHSCKLNWIYNQFIQAEQTEYTNNKSYLDQYQLNAKLLELKQQDPTLYEIHSQVLQQISVRVHNSYQSFFKGVVIHPPSFRSCSNFFNITYPQAGYSIRGRKLFTKVYGEIPIVLHRPIQGNIKTLSICYTDHWYVCVTTDYDPVKVRQPTDVGIDLGTANLVTTSDQQVIRGPNHQKWYDKQIDKLKARRDTNHKCRSNRYRYLTKVIKQLYRVKGRKTNDQLHKISKDLSSRYDTVYVEDLKVKKMSESKATGRNREIRNQQLGKFISMLEYKVNHLVPVNPMFTSQTCAYCGHTHEKKLPLKVRTFTCDHCGLVLDRDLNAAWNILHLGRATLSGMYKNSVSIVDIHTYMWWDSNTRRCLEQAIDISRCIR

SEQ ID NO: 28288 - protein, 392 aa, Aneurinibacillus sp.
MIRAKKVYVRTSKADEDRLFACNRESARVWNECLQLAKNCYLKYQKWISKSELQKQTKGKFHLHSQSIQAVCHKYLFARDSAHQTIKKGHTTTRYPYKKKNHYNTKWAKDGFKIDPTGKIELSMGNHNGKREKPIVVYASNLPQGTIKEIELCYDNGLYLAVSFEDGQKNKEYQSGQAVGVDLGEIHTLAAFCEKGQALIVTGRKIRSLHRLRNKKLAEIQRLQSKCKKGSRQWKKYGRAKQYVLSKSGKQLQDALHKATHNFVEWCIKQSVSDVYIGNPEGVQRNTRKKKKTNRKQAQKLSNWSFGQVKEYLKYKVAQEGINMHEVNEAYTSQTCPVCKKKKKVSSRNYACACGYQEHRDVHGARNILSKAVHGDIRHFDVPTKQKYLRIA

SEQ ID NO: 28289 - protein, 190 aa, unknown
  TnpB Polypeptide
MGTYWALTWDSTPSPWIREEVRPPIPACRESDAVTRTTGRHCEEKGTRSARRRLKAMRHREERFIRDVNHRASKRLANTPNVSVIAFEDLAYIRRQARKGTKTGRRRRNMLNQWPFAQLQEFTAYKAARNGVRILMVDPAYTSQKCNRCGYVDARNRNHARFDCLRCGHSDNADHNAALNIRDRAIQNLG

SEQ ID NO: 28290 - protein, 359 aa, unknown
  TnpB Polypeptide
MAVVSRDSSPANAAPSISYAAQPEQDRQRHLPSGVTQARRGRHHRNREKGIPQAGRNGMPLDALHHVRVSQPIRDYTSVAVNWTERTLAFTNEPSPIRRNTTGKQTGIDRGCVHTLALSNGTMLDMPQPSERERKEYLRLQRKLSRQDRTNEKRGGKTAKFQSKRRMLTLKRMNSLRRRINNRKDDWVAKTTTQLVEDYDLIALEALKTRQMTRRPKPKQDPNHQGCYLHNSATSKAGLNRSILNNRWTDIQNKLEYKTRLAGTQLILVDPAYTSQTCNRCGHVALENRESQAVFQCVNCGNKDNADVNAAKNILNRAIHTTGMDDAEGVEEHASYGTHVPQESSGETPTPATRMGRLL

SEQ ID NO: 28291 - protein, 463 aa, Cyanobacteria sp.
MRLTYKYRLKPTKPQIATFQTWLELARRQYNFRLGQRFDWYEATRTPVNACPLVVSIAPVEEIYKNIPLTRTVTKGKRKGETVSNIVEQGYVDWFSVQRADLKPTKTLFPEYKELDSQVLQDVIDRVEYAFSRFTKPDASGNRSGKPKFKGKHYYKSFTYTQLQHCDLTKDERGRDCINLKKIGLVPIVLHRPIPDGFEVKTGTVIREADGWHISLVLEDKDVPVTVAEIQPTEENSLGIDLGVENYVTLSTGETIQHPRFFRKSANKLAKLQKRLASKVKHSKPWRILKAKIAKLHQHIARQRLDWQFKLAYWLLGKCDVLFVEDLKLKNMIRRAKPKISNEGEWLPNNQAAKSGLNKSMLDAAHGQFVQVLKFVAWKFGKVVKEVDPRGTSQHCWNCFAGVAKQLSDRWHECQCGESLHRDDNSAKLIKKIGLICSIVGMVPASLKTALNLRIERSPRCTA

SEQ ID NO: 28292 - protein, 388 aa, unknown
  TnpB Polypeptide
VIRAHVIRLYPNNVQSTALLRASGVARFSYNWALAWWAEEYEKYTNGERDKAPSALEARKALNAVKRDEFPWMSEVTKCAPQESINDLGKAMKNFFAKRSRYPKFKSRRATAPRFRLTNDQFAVQENRIRIPYIGWVKMAEGLRFEGKIMSVTVSQRAGRWQVSVSVEIPDSGRLWTSKPVGVDVGVHEFVTSENVRYAVPRILRRNQAGLRRAQQTLSRTQKGSKNRDKAHARVARKHMRISNVRQNWLHQTTTDLAKHETVVLEDLHVKGMLRNRRLSKSISDASFAEFRRQLEYKRNVVVIDQWFPSSKTCSGCGAKTKLLTLSMRTWTCEECGITHDRDLNAAINIRNAGGYPVSACGEFLTAALPVSAMQVASVNQEEYITSV

SEQ ID NO: 28293 - protein, 376 aa, unknown
  TnpB Polypeptide
MKLTLQTQLLPTPQQALALEATMRAFNAAADWLAGEAFGRKTANKIALQKHYYATLRERFGLSAQMAVRCIAQVCEAYKRDKGKRPHFRPFASIPYDQRLMSFKGPDRVSLLTLSGRIIMPVIMGKYQQERFTNAKGQSDLVRRKDGKWFLLVTVDLPNGTKTPTTDFLGVDLGVANLATDSDGQRYSGDTVEAVRTRQHALRRGLQKAAAGKKRRGLRPKNIRRQLKRLSGKERRFRSNENHRIAKSLVAKAKGTERGIALEDLKGIRARTRFRKAQRAKMGGWAFHQLRTFIEYKAKLSGVDVVLVSPAYTSQTCAACGHTAKANRRSQAEFRCVACGHTDHADVNAAKNIRSIARAGVNRPKVSEQHQGLLVA

SEQ ID NO: 28294 - protein, 515 aa, Deinococcus sp.
MAKSGVNLPPGTTIAVRQLQIRLTPEQHRMLDFLFDRSRALYNQALFVTRRSFIQTGFIPKTGTLFFRDEVKARGFRGQAPRKKPGKDELLKVSPKPHPWTVPLKDRFVGGTLDSLDGSVHRKALPASVADQVLWSVHEAWDSYRELRALHAKGQLHFRPKAPGYLKAGTAFKLAFPNSGGGKPKVLEVLDEATGEMVMFIRFPLGDTLKTWFGLSELKIPVPKGIDPSLVREWTFRKQNGVILLEISLLKERPALVPLDPSRILGIDPGTSANLAACVGTDGSNLLIDARGMKAMNQWYNRCIALRKKGKAEDYWDARCDQLTRKRNNQMRDGVNKAAKLIVQHCVNRGIGTIVFGWNAGIKQEARLGKDTQNFVQMPLARLKERVRQLCELHGVQFHQQEESYTSKSSHLDGDTPPVYGSKLDGWTASGTRTRRGLYRSARGMRINADLNGAANIIQKHVTGTTVEGAEMPLQRFRLGRRCLTTARRTRLWERRLNTVCSSQSRCVSASLSSR

SEQ ID NO: 28295 - protein, 395 aa, unknown
  TnpB Polypeptide
MLRTFKYRIYPNKKQQELLEKHFGCVRFIYNFALDKKIKAYETSKTTLTRFDLQVIVKDMKQDSKYYWLNEVNSQSLQAVLKHLDGAFTKFFREKKCFPKFKSKKNNFHSFECPQHVKIENNKLIIPKFLEGLRIRLSRMFTGKIKTTTISKTPTGKYYASVLVETDDVLPLKPEIKEETTVGIDLGIKSFVTISDGTKIESLKPLKNSLDKLKVLQKRLSRKVKESNNRKKARLKVAKIHEKITEQRNDYINKLTCRMVHDSQVDTICVENLNVQGMVCNHHLAQAISDASWNEFNQQLEYKCNWYGKNYVKIGRFDASSKICSVCGNINKELTLADREWTCTNCKTHHDRDTNAAINMKKFGLQKQNLINYSGQGMPVGLGELLSVDRAMNQE

SEQ ID NO: 28296 - protein, 382 aa, unknown
  TnpB Polypeptide
MISYKFRLYPNKEQLEKLELSLEVCRQTYNHLLSGLDEGFTKNELSNYLLDLKVCNPNMLSVYSKSLQVENDNLFRNLTGLSASKKNGNKVGRLRFKGKGWKKTFTYSQSGFKLIDNKLHLSKIGEIKIKLHREMMGNIKQVIIKREIDKWYAIIQTDANIINKCGDKEIGLDFGLINFYTDNEGNKISIPNNIQQIQTKIKKSHRNLSRKKKGSKRRLKAIKRLQTSYQRQTNMKHDFFHQLSHNLVTNCKVIAIEDLDLKELMQKSYNAKNYQVSGWKTFITKYLTYKAESASCKILVCNRFEPTTKKCSNCGSIKEIKLSERIYKCEVCGLNIDRDINSARNIIKYFGLGISPLRGDSSLLEIVKESPMKREANQFIDW

SEQ ID NO: 28297 - protein, 459 aa, Micromonosporaceae sp.
VRTVQAYRFALDLTASQERDVLAHAGAARVAHNWALARVKAVMDQRAAERTYGVPEDLLTPSLSWSLAGLRKAWNVAKPEVAPWWAEVSKEAFNTGLDALARGLKNWSDSRSGKRAGRRVGFPRFTSRRRTTPSVRFTTGAIRVEPDRKHVVLPRLGRLKLHESARKLARRLDNGTARIMSASVRRDGGRWHVAFTVELERAERQPARPDSVVGVDIGIIHLAVLSTGELVDNPRHLVAAQTRLRQLGRALSRTTGPDRRTGRRPSKRWQRAVARLGRAHARVAHLRRDGLHKLTSELAREHGTVVVEDLHVTGMLANRRLAKHIADAGFAEIRRQLAYKTSWNGGRLLVADRWYPSSRTCSACGAVKTKLALSEREYVCEACGLVIDRDLNAALNLAALAAKFDTAGSGPVAARGADQKTRIRGQVAMKREPGTATAGKTGTVPPQGGTTKRVLTRAH

SEQ ID NO: 28298 - protein, 439 aa, Acidimicrobiaceae sp.
MGTILSATGQILTRAVTFQFTLDPTLDQTALFLKCAGARRFTFNHHLGLMKDNLDVRALEREATLEAADMTPSLSWSAFSFINEFNAWKSGRLSTSPENGDGSRGLAWRHEIPESVFECASRDAAQALKNWSDARAGIRAGNGVGFPRFSSKVRCTPSFRLRNRAKMTATQSIRFSDASHVRLPKIGDVRVHGPTRQIRRMLSLGRFHIYSATLTLRGEKWTASLTGVAAQFHPARRSTKHRHQAPVGIDRGITSLAVGADADGQLVARFEGVRELRNAEQRLIMAQKALARTTPGSKGRMKAKARLNKQHRKVALTRKHLVHQASSHLVAHCAALVLEDLNVAGMARNRRLAKSVHDAAMGELRCQVEYKAAWYGTEVVIADRFFASSKTCSGCGALKSDLPLSTRTYACEYCCLEIDRDVNAAINLARWAPVATTGT

SEQ ID NO: 28299 - protein, 466 aa, unknown
  TnpB Polypeptide
MICFVKTPRRYLVTKTKCTRIKKTQCLPCLNAGICTTWASYFSLLRSFEDKAKVIVCGMELLQAFKFELMPTGEQARKMRQFAGACRFVYNKALAYQKENHAAGQKFVGKFAMKKLFTDWRTSADTPWLADAPRHPCDEAVLDLDRAFQNFFAGRASFPRFKRKGLGDSFRYPDHKQIKLDRENGRVSLPKLGYVRYRTSRMVLGEVRSATVSLRAGKWYVSILTKREVEQPVAQGPAVGIDVGVARFATMSDGSYIAPLASFRQHEQRLAKYQRRMARKVKGSSNWKKAKARIQKIHARIANARSDFLHKASNTISKNHAMIAVEDLKISNMSKSAKGTADAPGRNVRAKSGLNKSILDQGWGEFRRQLEYKTGWNGGFFVAVDPKNTSRTCPCCGHVSKDNRKTQALFKCVQCGHEANADHVGALNILAAGHAALACGGMAQSGHPTKQEPAEGACAPVGIPVL

SEQ ID NO: 28300 - protein, 389 aa, unknown
  TnpB Polypeptide
VTRNLKFRLYPNHSQWKRLQNTLGACKWTYNKMVEKINNEGFQTRNDLNYFLTELKEQESWLYSYHSKMLQMISTQIDGAQKSLIALNKKGHKVGKLKFAKYIEYRTFAYNQSGFEIKDGFLHLSKIGKIKIMQHRKIPENIEIKQIAVTRSKTGKWYCSITCDVDAVLTKFSITKSVGIDVGIKNFAYDSDGFVTPNPLNLQKMLKPLARAQRKIARRQKGSNNRKKAVRWYQIVHERVKNRRKDFLHQISTQYARKYDVIFLERLQKLNMVKNHKWARNILDSGWGTFTNMLDYKCMLVEVPAKNTTIDCSRCGNAVPKSLVVRTHRCDVCGLVLDRDHNAAINILKKGLDIFNINLPQELREVTPVEIIPWSVKQEEATGRLVVVH

SEQ ID NO: 28301 - protein, 395 aa, unknown
  TnpB Polypeptide
MYMTQSLSVSCKLEVPEKMRHNFERTFNGFADACNQILAVAKSEDCWNTTKLHHLTYYPVRATTGLKANHVCQAIRRVIDNSKATRKLKKFRPTSVSLDARTFVFYEDEWKVGITLISGRANLKLLIGNYQRALLKGQTPTSAVLVLRQDGSYYINIVVELPTEPTGKTPLVLGVDLGRRDIATTSTGIAWDGKELQAARDRYSRVRSNVQRKRTRSSRRLLRRLKGRERRFQSWVNHNISPTLVNDAKSLGAAIAFEDLTGIRDSLNEKPRTKIERRRTNNWAFYQLRLFTGYKAAITGIRVVLVPPAYTSKTCSRCHHIGERNGKFFKCGNCHLEIDADINAAKNIAALGICVNNPEIPGITCLLEGQLSLLCVGEIWDKAPSSDDRKGVRAG

SEQ ID NO: 28302 - protein, 377 aa, Burkholderia sp.
MDIKRAYRFRFYPTPKQVEILARTFGCARFAYNHMLRMRTDAWLQRQARVGYHETSAALTALKKTPEHAWLNEVSSVPLQQALRHLQTAFANFFAKRAKYPKFRRKDGIQSAEYTASAFKWDGTSLKLAKMDAPLAIRWSRTIPKGAKVTTVTVSKDTAGRYHISMLCDDVISAKTEAIGAVGIDFGLTDFVVLSTGEKVPAPNAFRKNEAKLAKLQRRLEKKQKGSANRRRAKLKVARMHAKVADFRRDFLHKLSTRLIDENQVIAIESLGISRMQRNRRLAKSIGDAGWSEFVRQLTYKAAWYGRTLIGIDRWYPSSKRCSDCGHTVASMPLKVRAWACPACGANHDRDTNAARNVLAAGLAVSAHGESVNPMSL

SEQ ID NO: 28303 - protein, 394 aa, unknown
  TnpB Polypeptide
VLKSLKVRLYPSQEQEFLMHKTAGCCRLVYNHFLALAKKNKDFNYNEYSKKLTMLKKDANYFFLKEVPSQPLQQSLRHLDDSFKRFFKKQTNFPVFKKKFVNDRFTYPEGVKLNPSFTKIFLPKIGNMKFKTSKKYLKLLKTHEFRTCTVTLAAGKWYISILIDDNTVPQPAVKINKTVGIDLGIKKYLVMSTGRTISAPNIINKLKEIDRLKSYLCKKVKGSNASKKLQLKIQRKQKYLNDLKTDFLNKLVDYLIKNHDCVILEDLNIRKMIKHKGDWKTTFNRLMTMIPMYAFRMKLEYKAKLAGKYCVAVNPAYTSRTCSSCEHVDKMNRKSQSEFECTRCGFSANADLNAAFNIHNLGLNALIAAGHAVKSAYEKANLSAVLPSSFGFSA

SEQ ID NO: 28304 - protein, 530 aa, unknown
  TnpB Polypeptide
MIRTYRYRLYPNQTHQAALGNVLFAACALYNHALAYRRKRWNENRRSVWYNEQAGMWRDWRNEDPTDNPLRLLNMSAGQQVLRRLDSAYREFVKGKRGRPRFRRIDHFNSVAFKPGDGAALKGGRLYLQNVGNVRVNWHRELPEGELKHIVVVRKPSDWYVCLQAEIQANTPAHSLNPPVGVDVGIAHALVLSDGTVHDSPRPLQGSLATLRCLHRSVARKKRGGTNRKRAVRKVARLQEHIANQRRDFWHKVTRGLVTTYGTIVLEDLSLGFMLQNRALSQASHDTGLGMFRELLDDKAVEAGVEVVAVNPRNTSRVCSACGSIVPKAFSVRVHSCPDCGLVLDRDINAARNVLRLGRSRWGVTWPVAEGPAPAGGERAPRCSLALAWRVSHSIILALEVLHADLRHLGGHFAATAGLAGGPAGGAGAGTGDRFGRQCQCLPPGLRRAHRDARRCSAALHRRRGGGRNAPAQAAHRPGICSLPACRQGHRRGYAGEGGTATAHSAGTVPNAQFRDLGAREGLPEGLRGR

SEQ ID NO: 28305 - protein, 322 aa, unknown
  TnpB Polypeptide
  misc_feature (194)..(194): Xaa can be any naturally occurring amino acid
  misc_feature (221)..(221): Xaa can be any naturally occurring amino acid
MTQSIFRQVLGEYKTIKSQRNDRKIPVFISGRCDEVYGRDYYFLQNGKVSIGLCKGRLKPSFSKKGFEKYFSKEYRFGTAQILRDRKNNYYLSTSVSKEVSDAKLLPSNSIFVGIDRGIRYVMVAHSSDGNTLFYQGGSIEKRREQFEKIRKDLKKRNTPSSRRRLKAIGSRENRYIRNENHVVSKALLNSFPXGTTFILEGLSGLSKNINKFSFQPLKRXLVSWSYYDLEQKLVYKARDKQDPIVYVPPKNTSITCPKCGFVDYHNRNRPNHVFICKRCGFSANDDEVAATNILNLGIAKAKNDRVQSVNSVPTTPRCNAV

SEQ ID NO: 28306 - protein, 322 aa, unknown; identical to SEQ ID NO: 28305
  TnpB Polypeptide
  misc_feature (194)..(194): Xaa can be any naturally occurring amino acid
  misc_feature (221)..(221): Xaa can be any naturally occurring amino acid

SEQ ID NO: 28307 - protein, 403 aa, unknown
  TnpB Polypeptide
MLRLQAFKFELMPNGQQTRNLRRFAGSCRFVYNKALALNTERYEKKDQRLGYAKLCALLPNWKTEHEFLSDVPAQALQQALKNLERAYTNFFQKRADFPKFKKKGQHESFRIPQGFEVDNQNGRIKLPKLGWMRYRKSQEVLGEAKNVTVSESCGKWFVSIQTEREVETPQHPSISAVGMDWGVVNFATLSDGEVIDPCQPLKKLLPKLAKLHRRLARKRKFSKNWRKAKARITRLHTRVANIRKDLVHKVSNNISKSHAVVCVEDLQVQNMSKSARGTKEKPGKQVAQKSGLNRSILDASPFELRRQLEYKTQWNGGLLVPVPARNTSRRCPESVGGCGHVSAENRQAQAKFVCVQCGFSANADWVAAVNVKEDGLASLACLQSSPTGRRVRNPPKVSPPSG

SEQ ID NO: 28308 - protein, 144 aa, Neisseria sp.
LHHKISNIRKNYLHQISSQISQSHAIVYVEDLQVTNMSKSAKGDVEQHGKNVKQKSGLNRMILDQSWFEFRQQLDYKLLWNGGHLVAVPPQNTSRTCPCCGYTAKENRQTQADFECVECGYTENADVAGAINILRRGHEILAAQ

SEQ ID NO: 28309 - protein, 372 aa, unknown
  TnpB Polypeptide
MKLTLQIQLLPDREQDAKLQATVKRFNEAACWLAKKAFELRLANKVALQKLFYAELRVLFGLSAQMAVRCIAQVVEAYKRDKSKCPTFRPFAAMPYDQRIMSFKGLDRVSLLTLEGRVIVPFVMGKYQRERFTPAVGQSDLVRRKDGKWFLLVVVDVPDGTPIPTTDFIGVDLGIKSIATLSTGKDFGGAALSAYRLKRHRVRKSLQSKAHRGKPSARKNARRVLRRTGSKERRFQKWINHNISKQIVETAKGTGRGIALEDLKGIRTRTTVRKSQRGLHNSWAFSQLRLFVEYKALRAGVPVVAVDPRYTSQTCSSCRHLGQRRGKVFSCSNCGAVLDADLNGALNIAAVGAVVSSPENSIPYAATVAAAD

SEQ ID NO: 28310 - protein, 365 aa, Leptotrichia sp.
MKYNLAFKYRIYPNKEQELLINKTFGCVRFVYNTILYTANKIYEETGKNKIITPASLKKENQFLKEVDSLALANAQLNVKRSFTNFFQKRAKFPRFKSKKNSVKSYTTNCVNNSIRIEENKYLVLPKLKKVKLKYHREIPKDYKIKSVTLTNSNGNYYVSILTEFEKEIKKNPSNDKVIGLDFSMSELFVSSENQRADYPKYFKMLEKKLKKLQKSLSRKVKFSKNWYRQKEKISKLHEYIKNCRRDFLHKLSKKLSEIYNAVVVEDLNMKGMSQALNFGKSVGDNGWGMFLRMLEYKLIFLGKQFLKIDKWFPSSKTCSKCGNVKEELKLSERSYKCECCGIEIDRDYNAALNIRDIGKEMLKY

SEQ ID NO: 28311 - protein, 426 aa, Cyanobacteria sp.
VLSLTYKYKAIPTPQQVHIIEHTLTVCRQVWNFALRERKDWINSRKCQVNACSISGEYIIPADTKCPNYYDQANALTRAKTESPELKTVNAQVLQQVLRKLETAFLDRGRKGMGFPRFKNKYRMRSYVYPQLGKSQFLQGNKIKLPQLGWLEYVKSREIPDGFTVKQARIVRQASGYFVMLTLLSDVNVPDAVPDGHPVGIDLGLDKFVATSDGDVVDRPRFLNLLHRKLKLLQRRLRHKKKGSNNRHKLNRKIARLHQRIGDTRKDWHFKLAHQLCDGAGMIFVEDIDFRVWAKGLFGKHTLDAGLGQFLSILKFVCWKRGVYFGEVNKDYTSQVCPQCDAHTGKKELKDRVHSCPECGYTTHRDVAAAQIVRNRGLSGVGRILDIKENACGDGLTGTGNRLVKSPRSKKKGGEASRQECLVTTF

SEQ ID NO: 28312 - protein, 244 aa, Streptomyces sp.
VSIWTTSGRVKNVAFTASPEQLATLALYRKGESDLLQRDGMWFLNATCEVPEAPLNPNPVDFLGIDLGIVNIATTSDGEIMAGRELNRTRLRERGLRAKLQKKNTSSAKRRLKKRRRKEARRARDVNHKIAKHVVAEAERTGRGIALEDLTGIRERVRLRKPQRATHSSWAFHQLGAFVAYKARRAGEVIPVVWTHLTMDFVDPGRCRSLWHGPRSTVRSSGPTRSRCGGLRPAGGRSRTSQPI

SEQ ID NO: 28313 - protein, 433 aa, Streptomyces sp.
MARFRMYPTGGQERQMLLHCAHARYVWNLAVEQHTHWQPGRRPAPSFAEQCRQLTEARRDNVWLAAGNADVQQQALKDFATAKNARFTSGFGEPTWRRKYRYEGFRVIGTDRVPEYHADGSVKLNAKTGRQVMGRSVVVRKLNRRWAQVKVPGCGWVRFRLSAQGKGAKLPDAKTFRVTFRNGQWHAAFAVVPGPVPTPGTDTVIGIDRGVTVTAALSDGRRLNCPQLTARERAQIRKHQRRAARAPKGSEQKTAAYAAVARLKAREANRRKDWCEKTSTLLAKSYDLIRFEKLNIRNMTRSAKGTVEQPGRNVAQKAGLNRGILAQGWGLLRQRTGHKAPGRVEDVPAPYTSLRCSVCGWIGKNSRKSQAEFVCSSCNFTCNADTNAAANVAAGQGGIPRPRRTAGAGGTAPPTRSKNVREPQPKPVGIPLF

SEQ ID NO: 28314 - protein, 258 aa, Streptomyces sp.
VAIRQARRDVDFLAVLPAQAAQAVLKTYFQAWKSCWAGRADAPNFKARFRSTLTVDVPQGRDLNIVRVHRRWGMASLPKISRVRFRWTKELPVGKQAGEENRITGARLVKDALGWHIAFRVQTLERVPEAHQGPQVGIDVGITVPLALSDGETYEHGPWLTSREQARLLGLEQRAAQRMKRRKPGERTSRRLLHTYDQIAGLRAKAKRRVWTGSTRPPPTSPARTASRWWRYCRSRAWSSPPKGPLRSRGRTSPRNPG

SEQ ID NO: 28315 - protein, 460 aa, unknown
  TnpB Polypeptide
MKQRKSKEQITRALTHIQLKETNGGKLAVLDEVASVYLPLCQQYVTLFCIDEQPDMFRVPCFDTPLSERWQRVAIQQAAGIAQSWRTNREHAYQSYLQEHRAYHERQAAGTLHRATKEPQWQEWSVPVLRQMCIQANANVALLEVAEDSTFDYWLKMSTLQKRQPIRVPVKLAAYHTEQLTDPKTGKRKALNSSVTLNKREGAWWLTLSYDEVVAVQTPPDAPVIGIDVGIANFLTTDDGKHYGTFHGKLRARHKRDRAKRRRKAKLRACLKKKGVKKLPSTSSRTGQRLRRHVKQSINRAVNECFTDKEHAGVQFAYEQLSIATMKFKARAQNAYLRASNLAHIPQQIAWNAAKRGRRATRVPSAYSSQQCSVCGYTDKKNRPSQQTFCCQVCGYETHADVNAAKNLAARVGDSELYACQDKHAIKALLMERHEAWTQHQGKQDIGPTKCQGIASVSST

SEQ ID NO: 28316 - protein, 287 aa, Rhodoferax sp.
  misc_feature (238)..(250): Xaa can be any naturally occurring amino acid
MQSLTKTLKVRIKDKHAKVLCEWARAVNFTWNYINELSSRCIRERGKFLSYDLQKYTDGAGKELGLHSHSIQCIGKEYVTRRKQFKKSRLNWRKSGGAKRSLGWVPVNTGMATWKNGQLYHNGQYFGVWDSFGLGEYKFRSASFNEDARGRWYFNVVVEVPELVGPMMPAPSAAVGIDLGLKTCATASNGQKIEGRFYRALECKLGVTQRAGKKQRTKAIHAKIGNQRKDMLHKFSTXXXXXXXXXXXXXAGQNEDGQVHAGCGLVITEDDVGIQEPSGRCRLCRGP

SEQ ID NO: 28317 - protein, 438 aa, unknown
  TnpB Polypeptide
VVFGGKRLFEKLCKNHLTGKAREGLKKQWKEQRQGTLISIGSKVDKGNRLTRFEDLNGQLYLRITTGNREFIYAKVLRESSNSRDKWITFMAMLIESWQTKNYFAYTVELKLRDGEIYGSVFFEIPTPEVKYTKDNGVIAIDTNASPIHLAIAEVSKTGELLSYQTISLHYFLGLSQNSKDNQEWILAHKIADLAIEKGKAIAIENLKKLKKGMRGDGKAKLRKILHNWNAKKLLQKIKRVARLKGVEVVEVNPAYTSVIGMLKYAPQLSIDKDVAGAYVIGRMALGFKEDMPENYEKLLKDRTYLEFALKRYEEREKELVELIEKESNEYKRNVLKSELKIVENAKKLLVNLIQSLQSEPSSCEGAYGRNPEQGRGKLASFVAWQVLKVALLFPILGKVLPRDLSPLKPVLVEGVWDRVRSRLVPLEAGGTVLMKDF

SEQ ID NO: 28318 - protein, 793 aa, Mycobacterium sp.
  misc_feature (391)..(474): Xaa can be any naturally occurring amino acid
MPKFEVPDGWTVQAFRFTLDPTEDQAKALARHFGARRKAYNWTVATLKADIQAWHASGTVTAKPSLRVLRKRWNTVKDDVCVNTETGVAWWPECSKEAYADGIAGAVEAYWNWQTSRAGKRAGKRVGFPRFKRKGRDQDRVSFTTGAMRVEPDRRHLTLPVIGTVRTHENTRRIERLIKAGRARVLAISVRRNGTRLDASVRVLVQRPQQPKVVHPGSRVGVDVGVRRLATVATADGTAIEQVENPRPLGAALRELRHVCRARSRCTKGSRRYRERTTQISRLHRRVNDVRTHHLHVLTTRLAQTHGRIVVEGLDATEMLRQKGLPGARARRRGLSDAALGTPRRHLSYKTVWYGSALVVADRWFPSSKTCHACRHVQDIGWGEQWQCDRXXXXXXXXXXXXXXXXXXXXXXXXXXXXXXXXXXXXXXXXXXXXXXXXXXXXXXXXXXXXXXXXXXXXXXXXXXXXXXXXXXXXLQQLGEFAVIDRLVRGRRQPATVLLGPGDDAALVSAGDGRTVVSTDMLVQDSHFRLDWSTPQDVGRKAIAQNAADIEAMGARATAFVVGFGAPAETPAAQASALVDGMWEEAGRIGAGIVGGDLVSCRQWVVSVTAIGDLDGRAPVLRSGAKAGSVLAVVGELGRSAAGYALWCNGIEDFAELRRRHLVPQPPYGHGAAAAAVGAQAMIDVSDGLLADLRHIAEASGVRIDLSAAALAADRDALTAAATALGTDPWPWVLSGGEDHALVACFVGPVPAGWRTIGRVLDGPARVLVDGEEWTGYAGWQSFGEPDNQGSLG

SEQ ID NO: 28319 - protein, 609 aa, unknown
  TnpB Polypeptide
MKYKQSIFEEIYKQVKLRSIENMYGKLEIETKIYELYELRYKSYIENVKLAQNNNYIIYIFIKNIMNTVCLVNDNYEIIREIVIYNILNNKNVRYTDENKKEMVIDIVDGILVSIYNKNYYQTKTQLMNRIPITIQNAGFINQVKNEEYIIKTKKKINWKNKINNIISQKLVSDNNIIGRIVYRHIDNDIYKLPSDIIINIIQKAYQGYISYYALKQKGIKCNMPKYLNKNDHYNIPFFQRSMKIETKNGKPMIRLTVGKYVSSNYCNIIKNQSLICVNHEENTEYKKYVSYSKLLELIKKIPKTNNYIFDDLCKYISKKNKNLIDSYYVYIDLPYKIIKNNIKYIEIKPLYENFKHKICIIYEDIQNDIQMDTEIPIDKTISVDLGIKSLMTIYDPTGKQIIIDGNYLNWLNKSYNHKIDKLKQLAKSLNNVNITNQIRNLLIDRENKINNHFNCIVKWLTINYSNKKLIIIGYNKNWKTKVNLDNKTNRKFYQIPYCKLLNKLTNKMLQIGIIVKLNEESYTSKCDALAFEKVGFHEKYLGKRIRRGLFSSNTDKLINADLNGAINIMRKFFEKQNHTIETLTGINLYNPVRANILCEVINQQSKAK

SEQ ID NO: 28320 - protein, 298 aa, Streptomyces sp.
VKLVVQVKLLPTPEQAAALEATLHACNEAASWVSEVAFARGEFKNFALRRHTYDTVKSRWGLGAQAAQHVIKKTCDAYATLKGNLRAGNLGRPGSKRYRRAAEKPVVFRPQGAQPYDDRMLSWQIPGRTVSIWTTGGRVKSVAFTVSAEQLATLALYRRGESDLLERDGMWFLNATCEVPEAPLNTEPVDFLGIDLGIVNIATTSDGEIMAGRELNRIRARERGLRKKLQRKNTPSAKRRLRKRRRKEARRAKDINHKIAKHVVAEAERTGRGIALEDLTGIRERVRLRKPGGTSHAL

SEQ ID NO: 28321 - protein, 365 aa, Exiguobacterium sp.
MSTITAKIQIYIQDSQAATLRATMDAYRSAYDWLSGHVFETRDLNQASLNDSHYAEIRQRFGLKSQMAQSVMKTVIARYKSARSNGHAWSRVEFKRPEYDLVWNRDYSLTRDRFSVNTLDGRIKLDYARKGMRRYFNGTWRFGTAKLVHKHEKWFLHIPVTKTFPELDDASVTNVVGVDLGINFLAVTYDSQSETAFYNGHVVKHKRGIFKATRKQLQRRQTPSARKRLRHLGSRENRYVTDVNHQVTKALVDRHPRGTLFVLEDLTGIRAATEKVRAKPPRLRVVGVPPVPMQELPVPVERRPGRRDEPAPERHRTHRCRCHGSMTPVAGARSTVPMFRHAKVGCARAPSALPGRNERNRTLRG

SEQ ID NO: 28322 - protein, 293 aa, Hydrogenivirga sp.
LDLSQLNILNIQITPYKAYGNITYRLNIVYEKEIEETKPQTDRALAIDYGISNFATIVIENQPTSYIVDGKGIQSILRKYLKKLAKWQKKRDNLQNKRLSTSRVDKILHRIQKRINNLIRDFSHKVSNLIVELAKRYNVSTIVIGKLQESKNKESKLSSIIDQMLSLLPHGRVSKQIEYKAREYGIKVVLVDESYTSGVDSLKYVAVNKENYTPEARKHRGLFKSVLGFVNADVNGARKILKKFKKSFHDYITGLRQTVRIRVFGNLASSPKSVQVYGQIGVARCGDHLSGIR

SEQ ID NO: 28323 - protein, 403 aa, unknown
  TnpB Polypeptide
VITKKTYNFSLYDPRFFELAKEAGDVYSRSLEEFWKVYDETGVWLSKFDLQKHMRNKLERKLLHSDSFIGAMQQVHANLASWKQAKKVVKDACPPRKPKFLQAILFKKSQIKYKNGFLKLTLGIGNEYLNLKWNQEIPLPIYGSVTYSKTRGWKINLCLETDVEQKNLDNNKFLSIDLGVKRIATIFDGENTITLSGKKFMGLMHYRNKLNGKTQSRLSHKKKGSNNYKKIQRAKRRTTDKILNIQKDMLHKYSSFVVNYAIKNNIGNIIIGDNSSTHDSPNMRGKTNQKISQNPEQKLKNYIKYKFEGISGQVNIVPEPYTSRKCPCCKNIKKSSPRGRTYKCKKCDFVFDRDGVGAINIYNENVSFGTCLNLDSGRIRFLTEPIGMKFHNEVYFKSYVAVA

SEQ ID NO: 28324 - protein, 392 aa, unknown
  TnpB Polypeptide
VRRAYKFRVYPTAGQATRAAQCLRDHQRMYNAALEERREAWKRRKVSIRYGQQSAQLKDIRAYDPDQSRWSFSCQQATLRRLDKAMAAFYRRCKAGQAPGYPRFKALDRWDSVEWPKDGDGCRWKPDLGRVYLQGIGHVKVHAHRNTEGWVKTISLKREGRRWYVVLSCDEVLKRPLSPTGRAIGLDVGVARFATTSDGEIIPNPTFLRTSAAELTAAQQALVQKKRGSANRRRARAKVAEAHRRTRARRADFHHKTAWALVQACDVIALEKLNTAGMTKRPAPKPDPDQPGTYLPNGAAAKAGLNKSILDAGWGQFMNILAGKAEEADRRIELVNPQYTSINCHLCGARCARPRQDTVICPEHGSIDADVNGARNICTRAGLGSGQAAEVA

SEQ ID NO: 28325 - protein, 374 aa, unknown
  TnpB Polypeptide
MLLSYKYRIEPNRAQRDTLVDMLSDFCGLYNAGLQQRIEAYRRRGISITYSMQSAELKALRADLPDLARWSFSAEQQVLRRLDKTFKAFFRRGHGFPRYRAKARFHAAEMRVGDGLTLRKNGKLSIVGIPAEIRVRWHRKLPNKPASAILTRQNGKWHVIFHVEVALSDYEQKTTSVGIDLGLSKLIALAPGDPVARPNWTKRALREMRRRQRAIARCKRGSKRRAKRVHQLAKLHERVANKRRDHLHKVTQDIVQRFDRIGIEDLQIKPMLADRPDLARDIHDAAWATLTAMLEYKAERAGVELIKVEPAGTSSTCPGCEAVIAKPLSQRIHRCDCGFVDDRHEVAAMVVHHRAFGCWPGTGQGSLSPHSGAA

SEQ ID NO: 28326 - protein, 179 aa, unknown
  TnpB Polypeptide
LESFATLADGVRICTPNYYRKAEAYLRRCQRRVSRRQKGSHRRRKAVALLAKAHQHIANQRRDFHHKEARKLVQAYDVIYHEDLRVANMVQNHHLAKSISDAGWSAFLAILTFKAANAGKRVVSVNPAFTSQRCSAPGCGVIVQKGLSVRWHACPECGTSLHRDHNAALNILRLGQEIQ

SEQ ID NO: 28327 - protein, 471 aa, Bacillus sp.
  misc_feature (55)..(55): Xaa can be any naturally occurring amino acid
  misc_feature (71)..(71): Xaa can be any naturally occurring amino acid
  misc_feature (159)..(159): Xaa can be any naturally occurring amino acid
  misc_feature (250)..(250): Xaa can be any naturally occurring amino acid
  misc_feature (284)..(284): Xaa can be any naturally occurring amino acid
  misc_feature (378)..(378): Xaa can be any naturally occurring amino acid
  misc_feature (391)..(391): Xaa can be any naturally occurring amino acid
  misc_feature (393)..(393): Xaa can be any naturally occurring amino acid
  misc_feature (440)..(441): Xaa can be any naturally occurring amino acid
MAAPKDRTPSFIATIRLKTDTKAGKQLLVLSECARQLYNACLGESLKRLKAIQSXELYKETIQLSKTLEKXIEKRRANFAYLNETFGFTDYSIQSFGTKTKNDSKFIAEHLGTHICQKISTRAFKAVQRLAFKKAKKVRFKRKGEFVSLEGKNNKTFLXYSNGYLSVGKTLSLKCLIDPKDQWMQHALKQRIKYCRLIKKEVKGKNRFYVQLILEGHPFRKYQLGKEKVGLDIGPSTIAIVGESKAELKXFCEEVVYLDKEKRKLHRKLDRQRRANNPNNYHSXGVVKKGKKKWTNSHHYIKTRSAYRELERRIKEVRKQLHGRDTNQILQLASSIQTEKLSYKAFQKMFGKSIGRKAPSMFLNMLKRKVKSQGGMFXEFPTYSTKLSQSXHXGAVKKKRLKERWHSCECGVEAQRDLYSAFLARFVTTTNRLGLEQAKXXWDRFSMVLDECIAKMKKMKSEKKFNPTFGL

SEQ ID NO: 28328 - protein, 409 aa, Bacillus sp.
MTRKTTKQRNEELAPDGKQLRHYGLKLRMDPNPKQQKQIHQTFGNARFTYNFYLSEKKEVYRLTGETLTYGEFKKAFNQLKDHPYYSWLKASDKFALETAMEQVDDAFKRFFSGQNKFPKFKSKHKSKQSYSTKETKGNIKLNIEKQTIQLPKLGEVKVRLSKQHRKMLKENGLKGTIKSATVTYHSSGQYNVSLKMEEIIPVKEPVDVSKIPGESFIGLDLGIAHFFIDSNGKKVENPHYLKRNLRKLAMLQRQLKNKSIGSHNYKKLQKKISKLHLHIANQRKDFLHKVSRKVVDENQVIILEDLHIKGMIRNKKLARSIADAGWGLFKTFISYKALWSNKTVVWVNRFFPSSKLCNGCDTKNIMLSLSDREWICPSCGTKHDRDFNASKNIKEEGMRILHYRPLLV

SEQ ID NO: 28329 - protein, 486 aa, Bacillus sp.
MPRKRNEQAITFTGTIVSPPINGLMILDELMRKFQSAKRFSRERIFDGMDRKTAVAEAKALFLPNSRYMRDAFLEAEASISSQKELLPLYVEQYKTAIQKIEKKIEKIRNSKKKNKEDLILYQQSRIKKLIKKMNYYLYHIQNGSVPKVVDGTKKRLIQLNKHKITKQEWIDSRTNALYSRGEASKGGNENIKLDFLQDCSLEMNVLNPLSSKKNDRLFFEVKFSEKHLFTILTHLASGQAYSVRILRENGKYYVHVTFNQPLSSTYDFSKGCAGIDINPDNIAVTIVHPNGNFRASKVFWMEDINHVHSNRRDWIIGNTVASAIGWLKLLGIETIAIEDLYFKNDLSKNAKFNRMSSNFVYRKIITTLISKCIKAGVSLAQVPGYYSSLIGRVKYQKTYGLSIHQSAALVLARRAMGFNEKIPKQMMSVLFAKEAKEGPQPSDLFKHWKKVQAWFSAVKDKAYKNNEQYNHWFINDFIRYASINE

SEQ ID NO: 28330 - protein, 423 aa, Cyanobacteria sp.
MATLIVLRFKKKVKHFVKVLTLSYEYKLEPTKAQILQIDEWLEFCRKVYNHALASRKAWVNSRKCSVHACSIQSEYIIPADAKRPTYASQCKELAAAKKEYPDLKFPQSHVLQQTLKRLENAFVGMWERGFGFPMFKKVGGLRSFVFPELGKEVIKGKHIKLPKLGWVKLRLSRPIPDGFQIKQARVIRKAKGYFVVLSLQSDVSVPEVSLSGYPIGIDMGLESFLATSENELIARPKFLDCAYGKLKSLQRKLKFKKKGSRNWNQVKQRIARLHFHIFCKRKDWHFKLAHRLCDGVGAIFAEDLNLKAMSRGMLCKHTWDASFGQFLEILRWVCFKRGVYFAKVDPNGTSQICPNCPTHTGKKPLSVRTHHCLECGYAGNRDVVAAQVLRERGLSTVGQTGKMLAEGKDFGELVYTSSRISL

SEQ ID NO: 28331 - protein, 525 aa, Parageobacillus sp.
MFPKKDERGGLELLQTYQTKLSNIQLNHHLDSYRYLDEFGKFFGFLERKLFVLFYVKKQSVSSVKPSFCKEYGITSRQFNALRMQLEGKLSAVKRVRKYQIEQLKHRIMELERIIEKKIKQKEKQYTKLMETKETDSCFQKIVKRYRNIKFVLHQKKRKLRNLKQKLEQLQQDERNNIIRICFGSKRLFHKQFHLEKNGYSSHEEWKRDWQRARSSQFVVIGSKDETFGNQSAIYNTKNELHLRVAHQFVDTYGKYIVFPSVMFPYGQRVLNQAKIPYMGITKGGKPKKYFRAITYRFLRKEKGWYLFATVERDVPEISTTDLGGYIGIDLNAGFLSVCEVDRFGNPLQEQKIRVSMYDRNKNQIFASLSNALQQVMKYALSVGKHVAIEDLYFFKKRAVLGEMNSKYARMLSGFTYSKFKSLVESKAKKLGVGVKLVYPYYTSQIGHMKFMARYGLSPHGSAACVIARRALRFSLEKPKYDTVLQLPKTLDKHQSNYSKWRSITNSVKKNYWFHDKIEILKADI

SEQ ID NO: 28332 - protein, 439 aa, unknown
  TnpB Polypeptide
MYTTVVMPINPRAEQRRAIDAALECNRMVFNASVTAVGLFFKENGRLPTEFEMNRLVTMMRGSCPTLRNAYAETEYDAAHRALQGYVSLLDRDRKAYCRRMRESSWGYYPEKLSRPRYRKRDRYHSYAYIEHGIAIVIRPNADGRVRRYLKLGKIKGLVKCLNQGTEVDGKPVRCTISRKDYGTHYEYEAAVTFKKDDIESGVEHISGGPEYIGVDLGVSHIAAMSDGTIYDNPHDFRKAKAGFQKKCRALSKALPGTARYRGCRNRLCRSYERLSNKRKDRTEKISKEIVRSADVVVLEKLSVKQMKGRSKCRSMQNAYADASLGLLIRRIVGKAEGAACTVVFVDPRGTSRECSACGADVPKKLSDRVHRCPCCGLVMDRDVNAAINILARGSARDPFPVGGEWPRPTAGARYFDCSIFGHHSKFTLSVKVRYKQCL

SEQ ID NO: 28333 - protein, 574 aa, Paraburkholderia sp.
LAKKKSKTAITRSYFLKVAPELNVTKRHALLALRAEWKRTVCKAWGWYWAPFWQSGQFDPHMAVSGLGSRFPATQLVTSQKDLMLVALAAQAKGWTGNVVNRARPSVANASVNDSFRHELFWINAMRLWHVSNARQNELLADQNKAADLNAQKATTKKRKLAKPEERLTAISQAATRMMRKWFAKHLQRVKLPNPENLPLAFNINSATLVKARESKYQYFNWWARISTLERGQRVEIPLQGSQYFDTRQGEMNTTLELHERGGELYLKVCFTREPEKWSAFKTDVLALDLGLRNFLASSEGDLRGENFLNKLRQFDKQIQFVQKGLQQARVEKFGECRRYSSLIARVRGYLKTNIRKWLRSILAARQPRRVVIERLAFTGQDMSLGRTLNRLIRGFGQALFKEALAQWSVEFGFEVEEVNPAYTSQTCTHCGFVHRRNRIGNRFACLSCGFKAHADVNAAKCQRGRSAPEPESAVLPAGRHEWWSRTLKGWILRLRESLLKAAPGSTLELCLVGRACAGVSLLLKQKGPKALSKKMKRWLERALQQPDIRHLRNVVVRCIPRMYRLETLNVSTR

SEQ ID NO: 28334 - protein, 376 aa, unknown
  TnpB Polypeptide
MTKGGTRMTIFKAYKYRLKPTKEQKAMIEAAFGVRRFIWNTFLDRMSKAYKRRGVTMTYFDCMKEITRMKTYLPWLKEYDTHTLRMAAKDLIDARQKFFQNCKQGRPGGYPKFKSRKYPAQSFTTCGRIHVTNEYVQLPKIGRVRYRNSRPCIGEPKEATVSKDAKGRYWISVCCKVEAEPLPVTTNEIGIDLGLTVFATDSNGTVYENPKYLKQSEERLVREQRRLSRKKQGSSSWKKQKARLAAVHEHIANQRDTFQHQLSRQIVDENQVIALEALNVRGMLKNHRLAKAISDAGWSQFARKLRYKSEWVGRSFVQVDPFYASSQICSTCGYKNPAVKNLAVREWICPECGTVHQRDFNAAKNILAQGKATLAV

SEQ ID NO: 28335 - protein, 345 aa, unknown
  TnpB Polypeptide
MKTLQVRVKDKHAAHLRKMARDVNFVWNYLNELSSRAIRERGLFLSAYDLEKYIRGCSPYFTISHNVAAQVCSEYAVRRRQFKKARLSWRKSGGARRSLGWVPFRKGNLSHHESGVKFYGRVYQVWDSYGLDQYEFRNGSFSEDARGRWYLNITVVVPEQKSTGAGSVGVDLGLKDCATDSNGGQLHTREFRALEEKLAVAQRANKPKRVRAIHAKIKNRRKDAQHKYSRKLVNENAAIFVGNVSPSKLVKTRMAKSVHDVSWCTLKTMLEYKCDHAGVVFEEVNEAYSTVTCSACNSRTGPTGLEGLRIREWTCGCGVTHDRDVNAAKNILALGHERLAVGSSI

SEQ ID NO: 28336 - protein, 211 aa, Okeania sp.
VGIKTFATLSDGTKIDAPKPLKKRIKKYRKLSKLLSKKTIGSKRYEKARLRIAKFHAKLKDIRTDFLHKLSTQIIRENQTIILEDLNVSGMVKNRKLSRAISDLGWRQFRTLLEGKAEKYSREFRVIDRWLATSQICSNCGFKGGKLDLSIREWECLNCGRRHDRDHNAAINVLVAGGQSETLNGRGGKQKTTAKVAAACEASTRRGATAR

SEQ ID NO: 28337 - protein, 367 aa, unknown
  TnpB Polypeptide
MIAYKYKLYRTDKTKHLDKMLREASFVWNHALALQKRYYQLYHKYIGIGRMKNHFVKHIDRCLLHSQTVQEILERLDEAYMRFFKHLAIRPPKFKKANHFSSFLFKQGGFKLDGNKIRINKISKTYKFSLSREYQGKVKTVKFKRSPLGEYYIIVTTDAVGNTYGKSHNGASVGIDFGLKTYMTMSDGTTVESPRFLKTDLPSLQKRGRKLSMCKQNSNHRERSRKDLNRLYERIVNKRNAWQWQLAHRLCRQYDRIFIEDLRLTGMTKLWGRKMSDLAHAEFVNKLEYVAGKYGVTVHKIDRFFPSSKTCTCGYVNKELTLRDRYWTCPECGTRHHRDELAACNILRQGIAELESGRKTTCRPKTA

SEQ ID NO: 28338 - protein, 330 aa, Thaumarchaeota sp.
MRLSAWARKTGLSHKTARRLWKTGRLPFLPAEQLATGTVIVHLRSPDLTESQEAAAMKLVRAYKTELAPDDAQLASLYSHAGAARFAYNWGLEWKSNVHLFNLLPHPKLKTPTAVDLHRELNRLKKTKLSWLYEVSKCALQEALRDLDTAFSNFFGRRAGPPNFKSRKRGAGSFTLTGGIKVRPGEVRLPRIGWVRLKERGYIPSRAHVNCVTVSERAKRWYVAVNVVVEERRKELTTPPGPVVGVDRGLNSLAVVSDGTVLENPRVLRRYERKLKHLQRNLSRKRKGSSNRRKANGALARLNMRVVNTRLDAIQKFTTMLAKTKPGARR

SEQ ID NO: 28339 - protein, 415 aa, Erysipelotrichaceae sp.
MPKIVRTIKLHLHANEETDAAFRNMTERYAQACNEISEYTFNNGLILNSNELQNRLYQTVRKKYGLKAQLAVSVFKTVTARYKTVETQLKQNPCRFRDGEKTYSFRRDLTWLQKPIVFSRPQADLVRNRDYSFVADGNGKRLISINTLDGRVKLEYDLPKCCQQYFMSDEWKLGTGKLVSLYGQWYLHISATCETDDTFDDAAPRHVVGIDRGLRFLATLYDEKGDTMFIDGREIMKKRDRFRQLRAELQARGTRSAKRALKRLSERENRWMSDVNHRITKTLVEKYGPDTLFVLEDLTGVSFSERNMNSRSSAGRSELRSWAFYQLEQYLSYKAEANGSGVIKVSAEYTSQRCPKCGRIHKENRHSDIHEYICDRCGYRSNDDRVAAMNIRLLGTMYVSGDENPRFGARRRSGK

SEQ ID NO: 28340 - protein, 417 aa, Frankia sp.
  misc_feature (295)..(295): Xaa can be any naturally occurring amino acid
MLDGVAVVRYRYRAYPGPGQARALARAFGCARVVFNDAIRARDEAYKAGEKLSDTEVQRRVVTLAKLTDERTWLSEVSSVVLVQACQDARRAFRNWFDSLSGKRKGRQVGHPRFRSRKDNRQSIRLTRNGFTVTPRGVRVAKVGDLRLAWSRPLPLVPTSATVIREADGRYYVSFVVDVDDVPSPATGAEIGVDLGLDRLATLSTGQIVANPRPLRSRQRRLARAQRALARKRKGSVNRRKAVRRVAVEHRKVRDTRRDHHHKLAARLVRDNQAVYVEDLAVAGLARTRLARSVXDAGWSMLVGLLEEKAARCGRAVVRVGRFFPSSQVCSACGHRDGPKPLQVRTWTCPGCGVSHDRDLNAARNILVEGQRLVAAGRKGVAAMPRQAETVNACGADVRPGPVRAAGCETGTHRGAA

SEQ ID NO: 28341 - protein, 424 aa, unknown
  TnpB Polypeptide
MVDDAPRRTVPIKLNVPKERRGDLHQTKDQFLHCANRTSEWAWRYDDYCITSKSKAEDALYDDLREETDLTANLVQKGIRRAIEAVDSGVEKLKQGEKTNQPHFESWSVVYDKRSATFNDDHATLSTPNGRVAAEYVLPPEDDREDTPFGRYYENDEWDASSATLQYDEQDDTFYLHVTLKNPDYEVDGTERQEAVSPDDHDKNGVVLGVDLNVTGAFAVTSTGAFIGSADYLNHTRDQYEQRRASLQQTGTRSAHLTIKSIGSKFSEWSLDWLHNRANDLLKEAHDADVDGIIFEDLDHIRENIANGSKFQQWAYKKFVELVAYKVESTALFVDFVNPAYTSQRCSQCGFTHEENRDNTQFECQDCGYEVNADYNGAKNIANRYCGYIHRGQKSRGGWATSQLALKSGTLTVNGDYTPAELLG

SEQ ID NO: 28342 - protein, 355 aa, unknown
  TnpB Polypeptide
MLKRRRGRWYAVFVFDVASKSEPPAEVVAFDVNENSVAVARVSLLATVDRVATWNRQYINPAVYSIRTDFGRLAKRYEAVRNAKLEELKRKYPFAGRDDEEKVQNVTDMREFRKFARRLRERRRKEGRVRQIAREMTKSPAVIITEELGKNPQEEMIGVEKKAKKGVKKKVGKRELRHRIKQTPFRRILRAVEDKAAEGGSVVVYVSPYRNSKVCPIHFSLLKNGSGWHTLHCSCGHDVDRDHAAVLNMLWKITPEGAAKAPWWDLRDVKRRLEKGRGLVSKEAVRRRNPLVPWPVAYAVWASLRSLKAGGKWPAVLARAAPMTPAGGAGEGGARAPPRPKGTPALQGWEEVRMT

SEQ ID NO: 28343 - protein, 406 aa, unknown
  TnpB Polypeptide
MKVNRVYQIQINKSHPMWGMCDKLCFKSKNIYNYANYVQRQLFIKGKPILKYKDLTFQLKHSDPFKDLGSNSSQHTLKMLDKVWKSFFIAIKDYTKHPNKYLGKPKIPKYKKKKGKYICILTNWQSQIKDDYLYFAFRPLKPFNNMFKIHFQGKHLQTRIIPKGSIYVLEIVYEKEVQEIDKNFKSKRICGIDLGLDNFATLSNNIGIKSMIISGRSIKSYNQYWNKQIAKIKSDLKKRHKKDWSNKLEKLTQKRNNKMEYFMHCASKQVIEYCISNNIDTIVVGKNDKWKQKSNLNKTVNQSFVQLPYESFISKLQYKSEDTTIRFIENEEKFTSGTSFLDNEMPIKENYNKSRRIHRGLFKSNKGILINADLNGSYQIMRKVFPKAFADGIMGVDLHPIRVNVA

SEQ ID NO: 28344 - protein, 435 aa, unknown
  TnpB Polypeptide
MSSFKAYRYELRAPPALSARLRRFSGMCRWVWNAALAEQRARYARGDRYASYVDMAKWLTAWRNAAETSWLAEGPTHPQQQVLRRLDRAYQRFFDACKAGHGAGRGGVAGPRFKMRGQEAGICFPDPKQFTLDAANGRIRLPKLGWVRLRMSRPPDGVLCNANVTREGSGKHERWFVSLQVRTYETVPALATAPTLGIDLGLTVFAATSDGAMVEPLKALAKQQRRLKRYQRSVARKKKGSANRKKAAQRLGDLHRRIARQRSDWLHKLSTELAKSHAVIALEDLRIKNMTASAAGTVEMPGKNVRAKAGLNRNILDAAWGEFARQLAYKLEWRGGRVILVNPAFTSRTCRMCGRESAENRKTQSVFSCVTCNHTEHADVHAAKNILAAGHAAWLSMAQAASAAACGEAVSHNLRESEGRAASGKQEPAEAKALA

SEQ ID NO: 28345 - protein, 537 aa, unknown
  TnpB Polypeptide
MDKEVLEMLTGKKSNSNFVTVECLLAFDKDEDKGRVLALMRKFSSMVRFAYKRLLDGAERKELKKLLSRKYGINTRYSGDAILLAQQSLDSCVERGQNPKKLVFGSRELFEQLKKKHLTGKRRDELRQKWEERRYGVLYSRGEKSKEGNLNLRLVNLNNHWNLRINLGNGEYVWAKVIRSATRKTDKWISFISSVEQAEKTGEWFPYTVRLKLRNGKIYAQFSREEKLPEVTITKDNGVIGIDINAYPFHLALVHTTKDGNLKKYERISLGNLLEGSLEKREYLSWQIAHQVVRIAKREKKALVVENLEKLPKGKRGDGLPKLRQKLQKWVYKGLLQKIEIVAKRNGIQVIKVNPAYTSIIGKLKYAPLYNIDKDTAGAYVIARRGLGFKERLPKNYQNLLKDNEFLSYSVAIVEDRIVNLRRGIGEEKNEYKRNKLRSDLRRLKGKLEFLLKSLLDSGESESATQQTVNRKMERVRGGAQALQKSWQVLSVALAFSCLESFRDLSPLKRVILTRDWVGAAKRNGLVPPYLVRGRLC

SEQ ID NO: 28346 - protein, 547 aa, Streptomyces sp.
MAASALREIAPSFVALGPAGVAIRDRLGRLTAEDEDVLRLVGAHMGSLASKDLVARCRDGLEHSTDTWAARKRSLTPESSARWAGAVTKATHDQWALSRRGQLAHIQNLEAGIKTIAHRLSQPIGAKGTKKAPGGYRSESEWFHKTRRLRVLEDRLERERADRGRGRVRVVRGGKRLARGRYNLAAAQLTAEQWRERWEAERWFLAADGESGKRFGNETIRITPDGEVSIKLPAPLAHLANARHGRYVLACKVSFPHRGPEWADRIEANRAVAYRIHFDADRGRWYITASWQYAPTKTIPIKSALADGVIGVDTNADHLAAWRLDTHGNPTGRPRRFSYDLSGNADHRDAQLRHALTRLLNWAKTCGVKAIAVEDLDFTAEKTREKHGRRRRFRQIISGIPTGKLRARLTSMADRTGIAIIAVEPAYTSRWGAQHWQKPLTSKNRKTTRHDAASIAIGRRAQGHPIRRRTAPPPHDRSDRAGHRTVQARPGTPRREGTRPRIPGPRTRSVQPDTERKRETRTSKTVRDVRSAQAWVQDSLLLTDQER

SEQ ID NO: 28347 - protein, 257 aa, Cyanobacteria sp.
MVTPLALSPNEYHPCQGVLGPLLCQLRCRGRGDQTPLDCQGGRPRPGLGIPRRRKRRRRDSSSQVSALCVKDNREVQRSLSRKAKGSSNRQKARLLVARAQEKVAHQRLDLLHKLSTQYIRKNQTVVLEDLNVAGLSRNRRLAKSISDSGWRMFRTLLEYKANCYGREVKVISRWEPTSQRCSSCRHLDDKKSLAIRCWTCSACAAEHDRDINAAKNILAVGQAEMINACGAEGKSSLLIPGYEAGTRLDQGVIRAT

SEQ ID NO: 28348 - protein, 366 aa, unknown
  TnpB Polypeptide
VTRTFRYPLQPTKIQEAILDRWLLTCQRFYNSALEERREAYRRQRVSITRYDQQKELTKLRRDAAEYRDIPVTVMRSPLRRLERAFQGFFQRVKTGKTPGYPRFKSRDRYDSFSVGRVAIDLAAKRIRIPKLGDVKVHLYRPLGGEVLDIILHRSAKGWYACVACDVGEAPPKVAVRPGKVVGIDVGLTKLATLSDGGVVENPRYFREAEEQLARRQRILARRKRDSRSRRRAKRLVARSHEHIKNQRLDYARKVAKQLVNDYDLIVHEDLQIARMVRGNLAKSIHDAAWGVLLRCIACKAEEAGKHVIAVDPRGTSQRCSMCGTVVSKDLSIRVHACPSCGYTADRDLNAARNILALGLSAPEAA

SEQ ID NO: 28349 - protein, 365 aa, unknown
  TnpB Polypeptide
VLRSYRYPLRPTVAQEAKLDQWRIACCDLYNGALEERRETWRRQRYCVTFYDQQRELVELRHSVAEWESVPSDIARSALRRLDRSFKDFRRRLRRGEDPGPPRYRGVDHYKSFSLGDRHRIVENRLHVPKLGWVKLHLYRPLGGPVRDVVLKKEAGGWFAYVVCDIGAAPPKGVVHPNKIVGIDVGLNVLAVLSDGGAIENPRYMKKSEVLLARRQQAYRRKRPGSRSHARAVNLVARMRQHIGDQRLDYARKTAKQLINNYDLIVHEDLQIARMVRGNFAKSIHDAGWGILLRCIASKAEEAGKHVIAVDPRGTSQRCSMCGKAVAKDLSVRVHACPNCGYTADRDLNAARNILALGRSVVAVA

SEQ ID NO: 28350 - protein, 401 aa, Kribbella sp.
MDGMSRFRLYPTPAQQASLLEQCKHARCVWNLALEQWSMWTRDKGPTPGYVEQARQLTEARGTFEWLRAGSQTVQQQALRDFDQAVRSFYSGTHRRPTWRKAGLHEGFRIVGSQATRIVTKNRRWAAALVPKVGWVRFRRSRAVPDAKSYRVTRDRSGRWHIAFAVVPEPVPAPDTGEIVGVDRGVAVSAALSTGELLVCPGLSNRAAERLKHLERRLARCCRGSNRRQRVKATIAKLYARAVDRRKDWVEKTSTELARRFDVIRVEDLRIAKMSRRPKPKPDPERPGGYVRNGRRAKAGLNRGMMANGWGELVRRLEQKAPGRVEKVNAAYTSQTCSICGHCAPANRESQAVFRCMACGHEVNADVNAAINIAAGRAVSARRETPARVSPKREPQLTTSA

SEQ ID NO: 28351 - protein, 410 aa, unknown
  TnpB Polypeptide
VSATITRTLEATLVPPTTHKERRLQRIVATYRRALTDAFESGASTRSAVNDIVTEYHLTSYAKDALKSRIPKLRRIYDASEIDDDQPVQFTNRGWKLDHSADRTHEFCWRVPQAGWGNSFWIPLRINPAQRGLWDDLYDEAVTVGEFQLQETRTNWILRVTVEYEVAEPTVPADPTPIGFDIGESKLLTGCAYQDDRPTQPMLFDGGRARQLRKEMFTTLRRLDQRDADWRFDERRDYYQNALTDIVETATREAVEYATQFEDPVIVLEDLSDIRESIEYGSWMNRRLHTWAFGRLTRRIEEKAREDGIPVQFVSPAYTSQICHACGHIGTRPSQAEFRCSNSECWVTEYQADINASANIAARVDPWGESVPWKPERDDSLRDGSARDSATGHRESSPKSGQLTLAAFSS

SEQ ID NO: 28352 - protein, 373 aa, Methanococcoides sp.
MLKAYKYRLYPTKEQQEMLFKHFGACRFIYNWGLEQKIKTYEQDGKSVSRFDLNKGITMLKRDGEHEWLKEVNSQSLQGATLNLDNAFTRFFREKKGFPKFKSRKNPVQAYNVPQNYKVDFENNMIYLPKIGNVKTILHRSLGNGDLKTATVSQTSTGKFYISILVDDGGENLKKMEFSENDTVGVDVGIKDFAIMSNGDKIDNPRHLKNSMKRLKVLSKRLSRKQKDSSNRNKARKQVAKLHEKISNQRHDFQHKVSAKLVSENQAIAIETLNVSGMLKNHHLAQRIADASWSSFVEKLEYKAEWYGKTILRIGQFEPSTKICNVCGKYNGSLTLADRKWECLDCNTTHDRDINAAINIKTFALQEQNLIGI

SEQ ID NO: 28353 - protein, 403 aa, unknown
  TnpB Polypeptide
MRTAYQYRLRPTKTQVTELDRWLSMLCSQYNYLLADRFNWYEQNRSPINSCPLICHLPELRNNPDYFSQKKTLPQLKKTHPWYKEIYSQVLQDVVLRVKVTFDRFLKGDSNGKRSGRPRFKQRSSYRTFTYPQMKDGCWQGNLVNLPMFGKVKVVLHRPIPDGFKVKTASVTKKADGFYLTLSLEDATVPTIKPDFNPDKITGIDVGLKEFLTTSEGETVAIPQHYRKAQKRLRVIQKRVSRRKKGSNRRQKAVKQLGCQHKKVADKRKDFHFKTANSLLSKYDVIAHEDLNVKGLARTRLAKSVLDAGWSSFLSILANKAENAGLLVIPVSAHNTSQDCSNCGEKVPKKLHVRWHDCPHCGCSLGRDHNAAINIKNRAVGQPVLKAQLKSYADAGVSEKPTL

SEQ ID NO: 28354 - protein, 173 aa, Okeania sp.
LGINKAARIVINHCLKKSIGTIVLGWNKGQKNQIELGKKSNSEFVPIPTARLKERIAQLCSEYGILFIETEESYTSVASFLDGDNLPNYGEKPNDWKPLGKRIKRGLYRSSNNCLINADCNGAANIIRKVSRKLSLDLSRLCRGTLTCPQRVYLWSAKKKQSNMDLSCCVVSA

SEQ ID NO: 28355 - protein, 151 aa, Brasilonema sp.
MKRYVTLSLEDPTVPTTKPDINPDLIVGIDVGLKHFLTTSEGFQAPIPQYYRKAEKRLKRLQKRISRRKKGSNRRNKAVKQLARQHKKVTDKRKDFHFKTAKRLFNRHDVVAHDDLNVKGLGKSNLAKSIHDAGWSSFLSILANRAGAIRC

SEQ ID NO: 28356 - protein, 413 aa, Brasilonema sp.
MLSLTYSYRIYPDAAQEARILTWMESCRKVYNYALRERKDWISSRKCAVNACSIRSEYIIPADTPYPDYYKQQNALTPIKKDNPELQDVQSQVLQDALKRLDKAFKFMMERGFGFPRFKKFGQYRSFVFPQFKSNPVTGFQIKLPKIGAVPINLHRPIPDGFVVKQVRVINKASGWYAQLVLQSDVSVPDILPNSSSIGIDVGLEKFLAASNGLLVERPRFFNSLQSELRWLQRKLKNKTKGSANYRKVQHKIRRLYERIYDTRKQFHINTAHALCNGVGMVFAEDVNLKATSRGMLAKHCLDEPVRCGGSPRCSTWRAAWGSFLEILSWVCWKRRVYFAKVNPNGTSQTCPQCGNHTGKKKLFERVHVCHECGYTTDRDVAAAMVVEQRGLAAAGLAVKLPVEVTLTPGISV

SEQ ID NO: 28357 - protein, 170 aa, Brasilonema sp.
RLYQKGKNQRRIARRRYAKKHLRVSRQRNEHAKRIARNVCKLNSLVAYEALNVKGMVKNHCLAKSINDVAWTLFRRWLEYFAVKFGTTIVAVNPRMTSQKCSDCGAIVKKSLSTRTHKCNCGCELQRDVNAAINILNLGKQARLGHNRSNATGVGTSTLLGASLVEQVLT

SEQ ID NO: 28358 - protein, 393 aa, Brasilonema sp.
MYAIKVELKLNNKEQTLMRKHSGYARFVYNYGLALTQGLHSAGVKGSITKQINEIKKVFTNYTKKQPENQWMNELSSKVYQRAFMDLGQAYQRWAKGLSGKPVLKSKKNGDSFTVYDSNGKVLILFGKKIKIPTLGTFRLKEANPCSYCTQTFTISRQADKWYVSFAVDADRIPPTYHPQEAVGIDLGVKCFCTLSDGFQIEAPKPYKRAKTKLAKAQWRNRNKQSGNRRQGIKQSNRAKKFYNSIAKKHARIANQRQDFLHKTTTDISCKFYRIRIEDLNVSGMLANRKLSSAISDLGFYEFRRQLIYKSEFFGTKVELVDRWYPSSKLCSICGNKHDNLKLSDRVYQCQDRSCLAHTITMDRDLNAAYNLLNAPLDFVRLAQPEVTLVDKK

SEQ ID NO: 28359 - protein, 363 aa, Brasilonema sp.
MLLSIKTKLKLTVEQKTMMSKHAGIARFTYNWGLATWKSLYQDGFKPNKYLLKKFFNNSVKTQLEWIKEKGICQKITQYAFDQLGAAYDRFFKGLGGYPKFKKKGQNDSFTIDASGKPIPVGGVRVKLPTIGWVKTYEGLPHTTTAKLSISRIADDWYIAFAYEVEVEPTPKFVEIVGVDLGIKELATLSTGVVFPNPKAYKKNIQKLKRLSKAHSRKNKSSNNRHKSKIKLAKHHARVSNIRKDSLHKVTHYLCKNHAVIVIEDLNVSGMMQNHKLAQSIADCGFHEFKRQIEYKSKKFGSKLVLADKWYPSSKTCSRCGGKKDSLSLSERVYSCEHCGYVLDRDLNAAINLSHCSTRVPQA

SEQ ID NO: 28360 - protein, 346 aa, Brasilonema sp.
LGNRPRFKSIRHYSAWTYPDGAGFKVESNGEDGYLNLSKIGRVQMRGKAKYWGKPTTCTIVYRNRKWYASITVDVPDQALKLEALPSGAVGIDLGCKSALSITDGENHQQIDAPKFLRNAERQIKKASIEKRRKRAPNRKKKIKASRRWKKAQSKVSKLTRKVGLQRQNWVHQVAAEIVSSNSFVATEKLEVKNMTSKAKKAKRRKQKAGLNKSILDVGFGMLRSTIKYKVEQVGGVFIEVPTKKVKPSQTCPKCGHQHKKTLDVRVHECRSCGYVQDRDIAAAEVMLYWARGNLTGLGTNLADADAASSTSRTTKKAGSMKQLGQTKRQKSGSTGLGAETQTSTK

SEQ ID NO: 28361 - protein, 142 aa, Brasilonema sp.
SSSAVSLVAIEDLTGIRERTNQKPRNKTERRRSNSWAFYQLRIFLEYKGLKDGVEVVAVSPAYTSQTCNRCLHIGLRSEKKFKCGHCGLSCDADLNRAKMIALLGLSVNQPGGSNGLYCNLSTDSSGLLKAQTVFGTPNQCG

SEQ ID NO: 28362 - protein, 267 aa, Brasilonema sp.
MLLSIKTKLKLTAEQKTIMSKHAGIARFTYNWGLATWQNLYQDGFKPNKFLLKKFFNNSVKTQLEWIKHKGICQKITQYAFDQLGAAYDRFFKGLGGYPRFKKKGQNDSFTIDAAGKPIPIGGVRVKLPTIGWVKTCEGLPHTTTTKLSISRIADDWYIAFAHCVETEPSSKSVDVVGVDLGIKELATLSTGVTFPHPEAYKKNIQKLKRLSKALARKTKGSSNRHKAKIKLAKHHNRVSSIRKDSLHKVTNYLCKNHALVVIEDLQ

SEQ ID NO: 28363 - protein, 391 aa, Brasilonema sp.
MLLSIKTKLKLSKAQEIIMSKHAGIARFSYNWGLATWNNLVKDGLKPNKYILKKFFNNHVKPEFEWIKEKGICQKITQYAFDNLGDAFSRFFSLKGGYPNFKKKGAHDSFTIDASGKPIPVGGKSVKLPTIGWVRTYEGLPHTTCKSITISRTADSWFIAFAHEQEHEPTVKSHEIVGVDLGIKELATLSTGVAFPNPKHYKTNLEKLCRLSKKFARKAKGSKNRGKAKIQLAKHHLRIANLRKDTLHKITLRVRHFAIVTEAAKTASGLTTFLCKNHAKIVVEDLNVSGMLSNHKMAQVIADCGFHEFKRQLEYKAKKFGCEIIIADRWFPSSKICSNCGHIQDMPLKERTYNCKSCGHSMDRDLNAAINLSQCSACVKGVVDARRAASR

SEQ ID NO: 28364 - protein, 414 aa, unknown
  TnpB Polypeptide
MKAHRTLLIKLPRDKCNVDYIRRLMALTNLAYRDFETWAPDMLKNIQYQLYGFKNYTESLVFSTKPKRWFTRTWVPLETLRVYGDGSMKGNRSAPVVLDFRGGVIRLRQICRNEPRYTVEVPMPRWVIDRVKEGGDVRFAMIGLKDGEPYLALIAERVVEPYEPSEYKLVVDVNSWKYGISWGLIRSGRIVSYKQEGLNLGRYYGLYDEVVRLGREYGELKRSGLHRTTEGRKLWKRIKAMHARLYAITRDKAYFLASKLVRKALKYKALLIIDDMTEESRREILEEKLPRGVIKLLMANTKKFIKQLTTLAKWYGVPYELRRLPSTVCPVCEHELTQLPGRVMVCENCGFKAPRDKVPIHWALRECINDCLRNPSPYTAETIAWEWYAEDVIRCLNAIEEGTRRYEDMRNAHG

SEQ ID NO: 28365 - protein, 319 aa, unknown
  TnpB Polypeptide
MVITKAMKMRIYPSKEQAAKIDATLNSCRFVYNHMLERNTKAYKRRSEHLNYNAMQNLLPKMKRYMTWLSDADSQALKYACRQVDYAFKRFFRKQGGYPNFKSKKNPLQSYTTTNAKSIHYEPGRVCIPCLGWMKCSDKRALEGRICYSTISRKRGRYYVSVTYKVENDAHPVYADPDKVIGLDYSSDGLFVSSNGECADMPHFYREAQDSLAKQQRKLSKKQGFRKGERRSGRYLKQLQTVQKLQEHVANQRSDFLHKLSAQIANECDAVAVEDLNMQGMSRSLNFGNGSLDCLYSTIAREALFYGTVERFPVIAVPI

SEQ ID NO: 28366 - protein, 346 aa, Candidate division WPS-2 bacterium
MTRTIAIRLLPTEPHAAKLAALQATYSAACNAAAYLAVEHRCCNAVKLHHLAAQGLRVHRANGRDWKLLTFRREGSVHVDARTFRLVDGTLSIFTKEGRERVAMRLGAFQRSYLDCGAVREADLVRRRDCWYLHLMIVLPKVERSPQTGVLGVDLGENIVAATSGGTLYGGGKLRNTRDRFLAFRKRLQGNGSQSAKQLLAHVSGRESRHVRHVNHVISAQIVAEAHTSGCGAIALENLKNIRTRIRMGKRMRTRLHRWAWSQLQKFVEYKTEAFGIAVVYLDPAFTSQTCSACGELGQRSRHRFLCNSCGIFAHSDRNAARNLAKIGVSALAPTGDVMRPHVAAQ

SEQ ID NO: 28367 - protein, 311 aa, Nitrosopumilales sp.
MKRAIKEGKTPKSPYIQKPYLVSCYGFKINGMLLSIPIGNRKYINIILNHHTQQILSDKSFKVKSFVITPDSISLGIQKEVEEIKCDNTIGIDRNLRNVTVGNHEKVIMYDMEDLPKITYRTKKITSSFKRNDHRIRQKIYSKLGNRRARRIKQFLNRISKDIVSKARESNSIIILKDIKGIRKLYRKGNGQGNKHRGMMNSWPFYELQRQIQYKSAWEGIPIRFVSPVRTSILCPICGNRTRKDAEQHRQVWCSSCKRMMDRDVVAAMNISYKGLQRFCNPSCDASEAMKGNLRMPVILRVDASKLGLKA

SEQ ID NO: 28368 - protein, 476 aa, unknown
  TnpB Polypeptide
VATRRMTFRLYPNKQIEQSLRYHRKLHKDLYNAAVYNRFTQYQKFNHSVGYIEQQNSLPAFKEVWTEYKEINSQALQATLKRVDFAFERWFKGLGKRPRFKSIRHYSGWTYPAKTGYSVESDGENGYLNLSKIGRIQMRGKAKYWGTPTTCTIVYRNGKWYASITVDINEQVLKVEVLPTGAVGIDLGCKSALSITDGENHQQIEAPKFLRNAEHKIKQASKKKRRKTAPNRKKKIKASRRWKKAQKAVSKLTRKVGLQRQNWVHQVATDIVRSHSFVATEKLEVIKMTSKAKKGVAFGPKNKPSLNNLTTNRDAKQTNPEGPAYFSRHFPGKRKKQKAGLNKSMLDVGFGMLRSTIKYKVEQIGGVFIEVPTKLVKPSQTCPKCGHQHKKTLDIRVHECSNCEYVQDRDIASAEVMLYWATGILPGFGTSLVNAESSSSTSRTRKTAGSMRQLGAKKRSKSTLTGLDVETSPSTK

SEQ ID NO: 28369 - protein, 430 aa, unknown
  TnpB Polypeptide
MIITYEYRIQPTQEQQSTMDWWCELLRRHYNYSLGQRLDWLRRTRCLLDRCSLVSEPIGEIPGAFPNYNLQAGLLKQTKELFPDYKNIYHDVQQQNLKRLEKAWERWIKPDKSGRRGGRPRFKKVGDLRSFTFPRVNSEKAGANIKDGILTLSKIGSMPLILHRPLPDGFTPKTCTLVKKADGWYACISLEDSSVPMPIPLDEIKTVAGIDVGLKEFLTTSDGDAEPIQQNFRRSQKRLARHQRRLARMQKGLKNAQKQKNRVAQIHQRIKRQRKEFHYKVAHKLVKAYDLIGVEDLNIQGLARANLAKSILDAAWGEFITILEAVAVRRGVRVVKVKPHGTTTDCSTCGWKVPKILEIRIHDCPKCLTVLDRDLNAAINILVRAINDVGLTLSACGGYLSWVTRHADHLVRADETGMSNCEVGSLRHTA

SEQ ID NO: 28370 - protein, 384 aa, Lactobacillus sp.
MFDIISKRKKETNVLKGIKLRLYPNRTQQNQLEQMFGNDRFVWNQMLAMMNERYQNNKALPFLGKFKLNYLLKPLKKEYPFLKNSDSSSLQVVNEFLTQSWKNFFQDKSGQIGKPRFHSRKYLKKSYTGKSTIRITGKRYLKIPKLGYVRKYYLSLQVEISEPEKYSLTGKQVGIDVGVADLAILSNGLKYPSFDSYYFEKKAKVCQRKYARRRHLAKLLVLQDRNKKVLCPRSLESFTNWQKAQKSKAKYQAKAANQRRDYLHKLTTHLVKQYDVIAIEDLKTKNLQKNHHLAKSIANASWRMFRQMLEYKCKWYGKKLIAVDPKNTSRICSKCGYNSGAKPLEIREWTCSKCQTKHDRDINAAVNILHKATPTGQGLTMVTS

SEQ ID NO: 28371 - protein, 333 aa, Lactobacillus sp.
MFDIILKRKEGTNVLKGIKLRLYPNRTQQNQLEQMFGNDRFHSRKYLKKSYTGKSIIKTAGKRYLKIPKLGYVKTSKTGVLQNTKIKRYTVLLEPTGKYYLSLQVEISEPEKYSLTGKRVGIDVGVADLAILSNGLKYPSFNSSYFEKKAKIWQKKYSRRRHLAKLLVLQDRNKKVLCPRSLESFTNWQKAQKSKAKYQAKAANQRRDYLHKLTTHLVKQYDVIAIEDLKTKNLQKNHHLAKSIANASWRIFRQMLEYKCEWYGKKLIAVDPKNTSRICSKCGYNSGAKPLEIREWTCSKCQTKHDRDINAAVNILHKGSTKPTGQGLTMVTS

SEQ ID NO: 28372 - protein, 403 aa, Lactobacillus sp.
MFDIILKRKEGTNVLKGIKLRLYPNRTQQNQLEQMFGNDRFVWNQMLAMMNERYQNNKALPFLGKFKLNYLLKPLKKEYPFLKTSDSSSLQVVNEFLTQSWKNFFQDKSSQIGKPRFHSRKYLKKSYTGKSIIRITGKRYLKIPKLGYVKTSKTGVLQNTKINEPTGKYYLSLQVEISEPEKYSLTGKRVGIDVGVADFAILSNGLKYPSFNSSYFEKKAKVWQRKYARRRHLAKLLVLQDRNKRVLCPRSLESFTNWQKAQKSKAKYQAKAANQRRDYLHKLTTHLVKQYDVIAIEDLKTKNLQKNHHLAKSIANASWRMFRQMLEYKCEWYGKKLIAVDPKNTSRICSKCGYNSGAKPLEIREWICPKCQTKHDRDINAAVNILHKGSTKLNGQGLAMVTS

SEQ ID NO: 28373 - protein, 380 aa, Lactobacillus sp.
MFGNDRFVWNQMLAMMNERYQNNKALPFLGKFKLNYLLKPLKKEYPFLKNSDSSSLQVVNEFLTQSWKNFFQDKSGQIGKPRFHSRKYLKKSYTGKSIIKTAGKRYLKIPKLGYVKTSKTGVLQNTKIKRYTVLLEPTGKYYLSLQVEISEPEKYSLTGKRVGIDVGVADLAILSNGLKYPSFNSSYFEKKSKIWQKKYSRRRHLVKLLVLQNKNKRVLCPRSLESFTNWQKAQKSKAKCQAKAANQRRDYLHKLTTHLVKQYDVIAIEDLKAKNLQKNHHLAKSIANASWRMFRQMLEYKCEWYGKKLIAVDPKNTSRICSKCGYNSGAKPLEIHEWTCSKCQTKHDRDINAAVNILHKGKYKAKWSGTGHGNKLSSVS

SEQ ID NO: 28374 - protein, 445 aa, Lactobacillus sp.
MKNMKQMSSLAYHFGIKLRFYPSSKQKKIIKLNYDAQRFVYNSYAGRNRTNYHARRFLAVKQINAMPFAFPILNDYEAKLAETVVANDELLAKPKNIRDAYSFLRVKEIDSLALANAIQNYRKAWNHYRKIGHGIPTFHKKRSDWSYQTNCQYPKQKEAYLDNGTAKFIDAKHVKLPKLGVIRIAGLRKLIKERLLKHVSTRIGTVTIKKTAGDQFYLSMQLGSDIAFSQKLPKTQSQIGIDLNLDNFLTDSNGAMVANPRFYRQAQKKLAHAQRVLSRRQRRAKQEGHNLRMAKNYQKQRLLVAKLHAKIRRQREDFLQVLSTALIKKHDLVVAEELRSKNLLKNHALSQAISDVGWRRFLNMLAYKAKLYGKEFQTIDPKYTTQRCHNCGTIMGQNGCRKLKLKDREWTCPMCQTYHIRDWNAAVNILEKGLGSWKNPKKQAA

SEQ ID NO: 28375 - protein, 412 aa, Leptolyngbya sp.
MLTRRCTYRLYPSRRQDAKLHYWRRLHGGLYNAAIYNRKTQYQKFGHSVDYFEQQNCLPAFKEVWPEYKELGSHALQATLKRVDFAFLRFFRGLGKYPKFKASRRYSGWTYPDKAGWKAETDGKNGHLKISNLGRIKMRGRARTWGTPTTCTIFFRHGKWYASITVKCQPQRETGTGSIGIDLGCKDAVTFSDGTKESKPNFLKEGQQKVKTASKRLRRKRAPNRNQRVKASRRWKKHRATVSKLQRKVARQREDWLHQLTSDIVRGNSLIAGEKLEVRNMTRKGKKRKRQKAGLNRSILETGFGTIGDLLSYKSAEAGGFYVESPTRQVKPTQRCAKCWELTPKTLSDRVHRCQHCGHVEDRDVNAAQVNLIWARGREPSSLDADAPSTTDCGSMKQLGRLKRQKRLPRAE

SEQ ID NO: 28376 - protein, 419 aa, unknown
  TnpB Polypeptide
MEVRRTAPVKLDVPNQRREDFHKSAKQFLHCANRAAEFCWNDTGYEQCITANSTARSALYDELRAETDLTANLVQAGIRRGVQAVTSCVERWKQGKRVSQPEFTSWSMVYDKRSATFYRNKVSLSTVNGRVECDFELPSDSPTPYEEYVLSEEFEFRASTLQYDEVTDEFYFHITTLKYNSDSDNTTNTEVPADTGHQTVLGIDLGVNSLAVASTGQFWTGDEYDHWCREFEKRRGEMQQRGTQAAHNALLRLGKRETAWRKQHLYIIANEIVTEAVENDCDVIVFEDLSDIRERLPQANWHHIWAFRRLVEYVEYKAPEQGISVEKIDPSHTSQRCSRTDCGFTHEDNRNGEQFCCLKCGYEVNADYNAAKNVGTQYARKQTHRLRSSPKSPGGDAPVNVRITGGTLNGESHQPIAGD

SEQ ID NO: 28377 - protein, 401 aa, unknown
  TnpB Polypeptide
  misc_feature (329)..(346): Xaa can be any naturally occurring amino acid
MAKQVVTRTYTASIRNQQQVQDDLDSLGFAASKLWNVGRWVCDRVWSEIGHIPSHNELTTYLKSHERYDDLHSQSSQRVLQELAEAFTGWYGKRRNGDTKANPPGYRKHGDDHPRSTVIFKAAGFKLDTKYGRVRLSKGANLKEYWSDFTLCKYQIRPDVDLSTVENIRQVRAVWTGDEWELHFVCKVEIEVAESPDKKTVGVDLGINNFAALAFEDGHSELYPLNCLKQDDYYFSKRLAQCDDSDSDQATRLNQKKSARRTHYFHTLSKHIVGRCVDKGVGAIVVGDLSGIREDEENGESKNWGKHGNLDLHSWAFDRFTDLLTYKAXXXXXXXXXXXXXXXXXXLSSSESTIRLPFREETSSCFQNSLWWIPPVSRTNSSPRRSSGVNCGSVCFGVLIV

SEQ ID NO: 28378 - protein, 329 aa, unknown
  TnpB Polypeptide
  misc_feature (329)..(329): Xaa can be any naturally occurring amino acid
MAKQVVTRTYTASIRNQQQVQDDLDSLGFAASKLWNVGRWVCDRVWSEIGHIPSHNELTTYLKSHERYDDLHSQSSQRVLQELAEAFTGWYGKRRNGDTKANPPGYRKHGDDHPRSTVIFKAAGFKLDTKYGRVRLSKGANLKEYWSDFTLCKYQIRPDVDLSTVENIRQVRAVWTGDEWELHFVCKVEIEVAESPDKKTVGVDLGINNFAALAFEDGHSELYPLNCLKQDDYYFSKRLAQCDDSDSDQATRLNQKKSARRTHYFHTLSKHIVGRCVDKGVGAIVVGDLSGIREDEENGESKNWGKHGNLDLHSWAFDRFTDLLTYKAX

SEQ ID NO: 28379 - protein, 174 aa, unknown
  TnpB Polypeptide
VVKHRDIPDTETIKEVTLKKEPTSEWFACVTVDGKETPEEPDNPDRCVGTDVGILKYAHDSDGRAVGSLDLSQERDRLHREQRKLSRKQHGSNNWEQQRKKVAECHQTIKRKRRDFLHKLSNYYASEYDLVAVEDLDVKPMLESSGNSRNTASAAWDTFTTLLEYKCELEATHF

SEQ ID NO: 28380 - protein, 420 aa, unknown
  TnpB Polypeptide
VPNQAVTRTLTASLTNHSQVSDDLDSHGFAASKLWNIGRWTISRVWDAIGHIPDADELCSYLKKHDRYADLHSQSSQRVLQELGEAFVSWYKQDDPDANPPGYRKHGDEHPRSTVTWKNQGFKLDTTYNRVRLSKGTNMKPSRYAADYILCEYTIQADEQTLADVETVKTVRAVWTGDQWELHFVCEMQIDQPETPGEKTAGIDLGICNTAAVSVGDETLLYPGNVLKEDTHYFRQEEYNTEGKNGPSNHAEWARQKKSRRQNHFLHALSKDIVEQCERRNIGTIAVGHPKKIREDEDWGRHGNKRLHDWAFETLLSHIEYKAEERGISVERVLEGKLKTSKTCCECGKEADSNRVERGLYVCENCELVANSDLNAAENMRSTVTPSPEVDRSNGCLAQPSVRLFDKSTGRVAPQEQVVP

SEQ ID NO: 28381 - protein, 336 aa, unknown
  TnpB Polypeptide
  misc_feature (310)..(316): Xaa can be any naturally occurring amino acid
LKDHERYSDLHSQSSQRVLEELAEAFTGWYSSGDGNNPPGYRKRGDRHPRSTVTWKQEAIKHDDKHGQVRLSKGWNRKDGRPDFILVEHEIRPDVTVENIQQARAVWNGNRWELHLVCEKKIPVEDAPGENIAEIDLGISNYLTIDCEDGPSELYPGNRLKEDRHYFTREEYQTEAEHGPSKRARRARRKLSRRKDHFLHTLSKHIVRRCVKGGVERIAVGDLSDIREDDTGDSRNWEQSGNKKLHGWEFDRFTRPLEYKAEEHGILVDRVDEENTSKTCSCCGQIRDANRVERGLYVCDSCETMMNADXXXXXXXTQLVLSERPTATRRRRPRGA

SEQ ID NO: 28382 - protein, 416 aa, unknown
  TnpB Polypeptide
VDLLDASASLWNELNYERRQQFFNGESVWDTTDYRKQYVDITGSATAQQLIRKNTSAWQSFFSLQEEWQNGELDKRPSPPGYWGNEDDGRELRTIIRNDSYTLETGNRSRIEIPVGSQLKDEYDHTGRLRLELCGVPKWDGKQGRLEIQYDKIEDTFRAFQPVTVPDSQQDSPLASHEAALDVGANNLVACTTTTGQQYLYQGRDLFSRFRETTEEIARLKSALPEGRYSSQRIRRLYRKRTQRRDHAQDTLVRNLIEQLYDEGVATVYVGDLTDVLSTHWHPEVNEKTHQFWAFRSFIDRLSDTAEEYGITVRVKSEADTTRTCPVCGEQEGTERNGDLFRCPCGHEAHADLCASRTFLEQQAGKSEVGSMARPVRLKWDDHIWSEIPHSPERVSPNEERTNRSTSIGKVASVGG

SEQ ID NO: 28383 - protein, 368 aa, Nonomuraea sp.
MAQIVKRAYRYRFYPTRGQAEQLARTFGCVRLVYNKTLAERTRAYTSDGRRVSYGESSATLTAWKKTGELAFLNEVSSVPLQQALRHLQAAFANFFARRAKYPTFKSRKKSRASAEYTRSAFTWRDGRLTLAKMREPLDIVWSRPLPQGAQPSTVTVSKDAAQRWFVSILVEEAIRPLPPAATRVGFDAGVAALATFSTGEKIVNPKHERADRRKLARAQRDLARKEKGSANRQKARLKVARIHARITDRRRDFLHKLTTRLVRENQTVVIEDLTVRNMVKNHSLARAMSDASWRRMRSMLEYKAAWYGRELVVIHRWFPSSKLCSACGALHENMPLAVRAWQCACGALHDRDVNAAINILAAGLTER

SEQ ID NO: 28384 - protein, 530 aa, unknown
  TnpB Polypeptide
VREAGGRSGGDPWDRSPLLRGGTGPGHARDHHGVLGASVRSPVTQGAQADRSPEVRRGACHGPMSQHLKGLGKSHRIALAPTDQQETRMLEHAGWARVAANWARGRFQLAWFGHTDEQHAEEWYAHVDVNPEGGQWLSDMDLRKEFNAVKADLFEWSGDHSQYVSKNAIVHMGRGLDAWGEYCKARKHGKPQRKVGFPPLRKRHRKLAFTPSNGRHSIQVDGRQVHLPRIGWVRMREALRFDGDIMSVTVSRKAGRWYASFTVDTCQPAPEARPGPTVGIDMGVKMLATVSDGSGNAPDLYANPAALHSALKSIRRLDKAIARSRNTHGKENHSKRRDRKYAKQQRAYAHAAHIRNNHHHQATAQIAKRGGTVKVEMLNVAGMKRNRRLARAISDAGMSECVRQLEYKCAWHGAGFVRMDRWYPSSKTCSACGAVKQSLLLSERTYRCNLCGFECDRDENAARNIQAYTGHSEPARHLNEFPGPARSAGGEMDVETRRTHHREACARSVKRLPDSQPPCSVIAPDSDRLA

SEQ ID NO: 28385 - protein, 422 aa, Halogranum sp.
MDDAPRCTVPIKLDVPGESRGDLHQTKDQFLHCANRTSDWAWRYDDYCITSKSKAEKALYGELREETNLTANLVQKGIRRAIEAVTGGVEKLKQGEKTSQPYFDSWSVVYDKRSATFNGDHATLSTPNGRLTAEYVLPPKDEREDTPFGRYYASDDWDASNATLQYDEQADEFYLHVTLKNPDYKVESEHQEVESRDEAPENGVVLGVDLNVTGAFAVTSTGEFIGSADSLTHKRDEYERRRGRLQQTGTRSAHLTIQSIGSRFLDWSLDWLHNRANDLIEEAHNADVDGIIFENLDHIRENIANSSKFQQWTSVTFVELVEYKVESTELFVDLVNPAYTSQRCSYCGFTHEDNRDDKHFKCQDCGYEVNADYNAAKNIAVRYCGYIHRGQKSRGGWATSQLALKSGTLNVNGDYTPTKLSG

SEQ ID NO: 28386 - protein, 267 aa, unknown
  TnpB Polypeptide
MIPYVIPKDKVYSKAAQMVLWQFYNNLKILSSLSKKGKRIGKLRFKPKSRYNSINYNQSGFKLLQDNTIKFSKIGKIKCVFHRKIEGKIKEIHVKKEIAGAWHAIVVCENEYKKSCSLLRKKIIGLDVGISNYCYDSDGHVIAHPQILRNSEEKLRRSQRKMSKKVKGSSNIWKEKLRLSKIHQKIKFQRNDFLHKVSRYYVDNYDTIFVEELKIQNMMKNHHLSKSISDSSWNSFFQKLEYKAVKAGILFAKVKPHGTSQSCSNCG

SEQ ID NO: 28387 - protein, 247 aa, Halorhabdus sp.
VVRLFGLETDGTDLPEKPNVDSLDTSNIVGIDLGIQNYIHTSDGKTVDWLGLEDDYERLRREQRKLSRKEKGSNNYERQRREVAKVKRHIKRKVLDYQHKLTTWLVKEYDAVFVEDLNVAGMLQGDGNARNKQDMAWRQFITLLEYKADLYGAHVVQVEARGTTKECASCGVETAKPLWVREHSCPSCGFETDRDANAAMNVLQRGFSELGLGWPESTPVETVTATDTTQFESVSASHVVEAGSLPS

SEQ ID NO: 28388 - protein, 370 aa, Deinococcus sp.
LPSILKPRLDELSAASGALYSQVFTTFWRTLRRSAGKRKDHRRQAVFLSSGTLQKLFPKDPAGLLHSNSCDAVVDAFIASMDSARTRKKTDPKARFPRRRKRFFKVTFKSSAIRVRDGQLILSTGDRAHPLVIPWAFDLPVNVEIGWRACGGYELRAMYVDTRPVQTPLGDGVAGIDIGEARIAAVYDGQGVHLHSGRLIRARNHSANKHQAKLDARIARKKNGRPPGQRSSKRLRRLQRAQRTLRDRIKRQNRDQLRKQARQVVSTLHESRVQTIAVGDLGDTRNRIDYVPRPDVRSVPDRTESTGGGSSDCRSSSSMQRSPRRHAHGRDSGANHAGDTSCRPVGSTAWIGTGGRRGEYQSEVSGDPGR

SEQ ID NO: 28389 - protein, 454 aa, unknown
  TnpB Polypeptide
VGRLVLEQLVLSPLDRTSVTGCIERVRRKPTSMNYNYRYRLKPTERQRETLDSHRDTCRQLYNHALYRFNQIPESEGTVKQRVRKIRDELPDLKDWWDALADVYSKVLQPTVMRIAKNITALGKLKEQGYNVGELQWKSPREFRSFTYNQSGFELDKKGGQTVLSLSKLGDVTIELHRPLPDDATVKEVTLKKEKTGEWFAIFGIEMDTAPPAKPPLEDIDSDEMVGIDVGILKYVHDTDGVAVESLDLSEDRDRLERAQRTLSRKEYESNNWENQRQKVAECYLDIKRKRRDFLHKLSNYYAREYDLVAVEDLEVKEMLESPRNSHNTASAAWNTFTSMLEHKCKREGTHFVEVEPEGTTKECAKCGVETDKPLWVREHSCPACGFEADRDANAAWNVLSRGLAKLGVGHSEGTPVETALPAGTAVVPAKRVVEPGSPCLQERAATPRVSRQG

SEQ ID NO: 28390 - protein, 462 aa, Calothrix sp.
LYRTIPIKAKFSEEEKGFWIDQCQQANSLINSAVYETRQRHYAMLQNNSDGFCVYWRGDELRYGWKTYHCKTTYPELDKTLKYNPHYKAMAAQSAQQTLKSVGESITSYNGLVKTYYRGEVDRPSLPKYRKRGGLAAVTFPRQALTWKNGCFYPSVSKETKPHLLTEITLQLPDFIDSDWVKEVTLRPYLGELWIDWVIDDGKQPIEVNPNLDYTQAWSLDHGGTNWLTGVCTGGQSLIIDGRKLKSMNQAYCRLVAKYKQGKSEFYWDVNLDRVQRKRNNQMRDAVNKAARFIVNRCLNDGVGNIVIGWNDGQKNGSNVGKRGNQNFMVIPTGRLIERLKQLCPEYGIQLTITEEAYTSKASYLDGDSLHKHGEKPNGWKPSGQRVKRGMYKSRDGHIINADCNGAANIMRKVATQLGLNLAEVGRASLTVPQRYDLFTRLNKSYRKRCLARILSGQATSV

SEQ ID NO: 28391 - protein, 206 aa, unknown
  TnpB Polypeptide
MSMPTSMIGVDLGIANIATTSDGTRLSGKQMNRVRHRNRQLRSKLQRKGTKSAKRLLRKRRRREARFVTDINHGISKWIVAEAQRTGRGISLEALQGIRRRVRLRSPQRAAMHSWSFHQLGTFIDYKARRAGVLVVFIDPAYTSQTCSACGHVDRRSRINQSTFKCRRCGFAEHADVNAAVNLSVSGWAVVNQPDADMPLAASEAA

SEQ ID NO: 28392 - protein, 393 aa, unknown
  TnpB Polypeptide
MKSYKTEIYPTKAQIALIQKTFGCTRYIYNQFVHHNLNNLKSGLPFISAYAYSKQVNHDPNTPVWLKEVPSKAVKQALIYADKAFQNYFKKRSGLPRFKKKGLHNSFYLIGTLKVERHRIFVPVLKWLRLKEFGYIPQHIRSVTISMKNNRYYISCLTNETVTDERIALSNYSMGIDFGLKDQFITEYKVIPSVNKTVRVKKLEKQLRRAQRSLSRKYEANMIKVYYKSGVKKGQLKSYKWVKPLTECKNIQKQKLKVARLHERLTRIRTDYNQKALRSLILERKPSSIIIEDLAIRNLVKNRHLSKAISQAQWYQSRCYLEQLCNKFGIELRLVNRFYPSSKLCSNCGFKYKTLSLKERYWTCESCGYKHDRDINAAINLGKCKTYTVLTTV

SEQ ID NO: 28393 - protein, 425 aa, unknown
  TnpB Polypeptide
MTTITLVTESKLYLKDNTALYTYFDDYSKLFNFLVRRCVHHLKNKLKGEKESQYRTNLMLKFAITNRMAKAVIKTAKKQLKSLSEFARYQYNNLYKRRRSLFKKIQKLKVILSSSSVSLKQRKLAKVRLFWTQMKLNKVNQLLDNGLKLHLTFGTKHLLKTNKVKFLAKRDDQVVYIGDKNETCGNQQFQIRFNTKYNRFDYKLRLDNKWVLGTDKYIFGSFVLKNKEAKVHILKTLSDKKSNPLTYRIIKCDGNLYLQIMYRRETSDVTRNTYGVLGVDFNKGFISVSEINSDGKLQSLTRYNYLHQGEATKTKTSMLNLVSKLVSQAINVGKDIVIEDLVSLDSNKKQDKTTSKNYNHMINSLKFGLFKRCLISKATKEGVSVHTVNPYNTSKIAKANYTDRMKLNVHDAASYVIARRFYQYN

SEQ ID NO: 28394 - protein, 382 aa, unknown
  TnpB Polypeptide
MLTAAKYRIYPNQHQAMLINKTIGCARLVYNLMLYDFYNNNLIKTPAKYKNEYSFLKEVDSLALANSQMDLKQAFRNYKNNKDHFGKPRFKKKSHAKLRYKTTNQKGNIRIENGKLILPKFRAGIKIVLHRQIDGIIKSVTIEQVPSGYYTASILYEIPDQQDKPLLSKENIVGIDLGLTHLAITSNHQKYTNPKHFHKMQVKLRKEQRTLQRRLEQNVAKRVYDGNGKLINTIYKKPLKDCKNYQKQKQKVAKVHDKIKRQRLDCLHKASHDIVKNHDYIVLETLKIKNLMKNHKLAKSIADVGWSMFINMLRYKSERSGKVVVQIDQWFPSSQICSHCNHQDGKKALSIREWTCSNCHVKHDRDINAAINIKNKGLELIS

SEQ ID NO: 28395 - protein, 409 aa, unknown
  TnpB Polypeptide
MRSQKLRLKPTKEQERLMWWYSKVSRNFWNLLVDIDKRNNIGEFDEILSNYVNKTYHSNFYDREIYSLSQSDYLNLAKIVVTKGYEEDREMWSWYHQPNQSFIYVFIARELVKIRRQNKGKLNFRSIGKIQPNFNVRCDTFPSKKRPSRIYLKNNNKLQIPTIGEVSFGSVRPDFDLSCKKQVANISFDGKYWYLSYTEDINTQITDLPNYTDGIGVDLGIKTLATISDGTTIPNIKTFRRVRILEKRLKRLQRKVSRKYHINKHNKTKNIIKLERQIKLIHRSIRNIRINHIRKFVSVLVKKQPQYIAIEDLNVKGMMKNKHLARDIANCSFYTIREHLIRKATERYIAVRLVDRFYPSSKTCSNCGNYKQGLKLNQRVYYCNNCHEKIDRNLNAALNIANTNKYILA

SEQ ID NO: 28396 - protein, 248 aa, unknown
  TnpB Polypeptide
MLLSHRTSLKICPEYSNIIGHMCYAASKLWNVCNYERHHYKELGLEKYPDWYYQKKAHKGDLWYRQLPSQTAQETCKQLDKAWKSFYVLKKTGGIKEPNPPRFKKDNIPVTYMQMGIRNEKGSDQLRLSLPKDLKSYMEETYGIHEKFLYLENKIFRNMDHIKQLRIYPPKNGKCDLIVIYEIEEPEQHSQNGHYLSVDLGLHNLMTCYDSGNGRTFILGRKYLSVSGKQKELSVTGLKNPEIIKVAV

SEQ ID NO: 28397 - protein, 438 aa, Moorea sp.
MYGCQQHLITTDPDNRAVLEFICGEANKLTNCAIYYCRQVLFKAGKYVKKFELDKILKTNIHFRAMRSACAQQILHSVIESFKSYQALAKLYKSGKLRDKPRVPKYRKKGGMAVVSYPARWVKLKDGQLKFSLGNQVKAWFGIDHFLLPMPSNLDFKSINEFRFVPRNGCFYLEFVYKQSDIEPVQTSGNALGIDPGLNNWLTCVSTTGKSFIIDGRKIKSQNQWYNKQVAKIKKGKPQDYWDERLANITEKRNRQMRDNINKAAKFFINWCLRNQISTVVFGWNQRNKDGIKIGKKNNQEFVQIPTARLKNRVQQLCEQYGIKFIETEESYTSKASFLDQDFLPTLGAKPIREACPSGLGWKPSGKRIRRGLYRSANNELINADLRHACNILRKVATQLGVDLAEVGRAALNLPQRYRLDSLSSQYCKHHAARFQPA

SEQ ID NO: 28398 - protein, 120 aa, Moorea sp.
LWRFDKKQIKRVRIVRRADGYYVQFCVSVDINEKLKPTGNTVGLDLGLKDFYTDSDANTQPNPRFYRTGEKRLKFYQRRVYRKNKGSANRRKAINKLGRAHLRISRQREEHCASNPSHVA

SEQ ID NO: 28399 - protein, 295 aa, Moorea sp.
MYIKIGRYSVIILEFKAKGKESQYSAIDEAIRTVKFIRNSCISLWLDNKGTGKSDLSRYSKILAKEFSFANELNSTARQAASERAWSSIVRFYDNCKKKVPDKKGFPKFQKRARSVEYKKSGWKLSPDKKSITFTDKKGIGKLKLKGTWDLWRFDKKQINRVRIVKRADGYYVQFCVAVNVKEEVEHTGEMIGLDVGLKEFYTDSNGHSEPSPRFYRKGERRLKFYQRRVSRKKKGSSNRRKAINRLGRQHLKISRQREEHAKRLVRSYRKKSAAFIVDRLCIKGGRFCCKAALF

SEQ ID NO: 28400 - protein, 622 aa, unknown
  TnpB Polypeptide
VGAAGRSLPYPAEQVRAVTLLADGGRLWLAVTAAVPVQQHHLDPSRIAGVDLGIIHPYAVVTETSGLLVSGRALRAEAYLHLEDQKARQAKAARRAPKPGQRGSRRWRRHRGRLRRVEARHRRRVHQAQHEAAKQVIAFAVQQRIGTLVVGDPTGITSRDAGRVQNSGCGGGAAPTLCRPCLTRPNRQASWCGWWTSGAPPPPAPPAGDGSPSPAAASFAVPPACSRGTGIWSVPTTSPPRPAPDPRAQTCRCSSSTVGPASCRHGVTVAATSTTSGGDGPAWPRATQASKRVRLAVARRTRGSHPRLARIKHPYPAPGQRLPEGAVASFRFAPDVDDGLVDGAAGGPGGARHGGDRVPGADAAGDQRGDLGGQVGHTGRARPRRRRATDDQRQLAARAVGRKPLRHLGERAPQHLLVDLGQLAHDRAGTIGAERRGHRGQGGEGPVGGLEEHHRAGLGGELGQAAVASAHPPWREALEAEPVGRQPAHHQRRQDRARSGHDVDLQPPCQAGGDEVVAGVGDAGHASVGDQRQPRPGGDPVGEELGAVALVDVVVAGGAGRHAEVGQELAGLAGVLAGDQVGLGQHPGQPGRGILEVADRRPADDELAWRHAPRLSVPGLRR

SEQ ID NO: 28401 - protein, 318 aa, unknown
  TnpB Polypeptide
  misc_feature (280)..(280): Xaa can be any naturally occurring amino acid
MRKFRDAVEMAHSMLYKKQLSETEVKRRLTRYLSNAWYANSAIKVAKLYREQDHIKLRKPLLYSVGSSDEKGNRNIKFTSTDSVLVKFPRESGSHEWIECKVLFGKKQLPVISELITGSYTYGAGISIKVKRSEDWRSMWKKRLIIYVNIPIELYAKHRRVGGVPTNSGAELWAGFDFNVDRVCVAIVDSAGRLRDVKTRLFSNAVNTPSEVSKTIREEALAELVKYAVAHGVKHLVVESLERPGRVKGKVGKWALRQYIQHLRVLARRHNVDVVEVSPXYSSIDAIGVALALGLDRHTASAYLIALRGLAHQIKKMK

SEQ ID NO: 28402 - protein, 374 aa, Thermoprotei sp.
MKQIEYITLRLPFHVTGGNAKLIYWTAWLCKICAHRLLNIIKENPLLADLSQYDFIKFSRRLCYDIIPNRRYIDGISTLLHASLQSAKALKVDITKLELKPWLLFQSEAEPWAKGNLNIQFIDYNKVRVLVFDKDKSSRKITMKPVIPKGYAKLTRSLVEKALRKEIGYPARIYITDYGGGLEHLYGEIQVMVKYDFYLEAMKRYDKPPGNNIAGIDVNVDRLNLVVINRSGDIVWRYTARFPQVTSRGYKRKRAWSIIGERIHEILRNAYSHGASVIAVENPEIIGYLRYYWIRNGERKTKNYNYKVSIFRNSIIERIMWKAALYGLQVITVNPKGTTHSNNHEYVMRKCGLDEHTASAYLIALRARRNLQRP

SEQ ID NO: 28403 - protein, 414 aa, Microbacteriaceae sp.
VKRVERIRLYPTRRQVEQLRFMLDVTRQLYNALLEERREAYRRRRVRVTAKQQYAEITALRGPVHRIDGRLAAVYRECEDAVLHRLELAFQAFFRRLRRGEKPGYPRFRSRCRWSQVEFPHGDRALLFDEHQRRLRVPGVGDVRLRKGREVPPAFGRAWIVERNGRWYGCFECDRAVQLLPATGCIVGVDRGVHVLAATSDGCLMRNPRHLERARHHLEQLQRTVTRRRKGGKSRGKAVAQLARAHERLANARRDALHKASQRLVNSADVVALEALNLRSMTRSAKGTIEKPGTNVVAKAGLNRVLLDASFGLLHRLIVEKAESAARRVVLVDPRYSSQTCSRCGHVAAESRRRRRFVCITCGFVLHADVNAALVIRRRAELRPAGSGASREDRNDLRSALSQARTLLTQSDVA

SEQ ID NO: 28404 - protein, 427 aa, Microbacteriaceae sp.
MERVRLYPTRRQAAALDRMLVVCCSLYNAALQQRRDARKRRGVSVSHRAQYAELTALRRADPRVAAVYRECLDAALHRLDLAFQAFFRRCSRGEAPGYPRYRAKRRWNTLEFPHGDRALKFDERQNRVRVPGVGRVKLRKGRGVPPYGRAMIVRSCGHWYAQFECEREVRPLPVSGKVVGLDRGIAAYVATSDGELIENARIERHQASAVRRKQRAIARGRRGSQRQGRRYHELARAKDRQRWSRRDWHHKLSRRLVDAYEGIALEALTVRAMLRSARGSLKEPGRNVAAKAGLNRSIADAGWSQFASMIVSKAEEAARTVVFVDPKYSSQECSRCGHVASENRRTQAAFCCVACGHAENADINAAKVILKRAELRPAARGLALGRLRRPAKCAIAGENPAHAIGCCVRAHPTNRSLARRSRAAHSG

SEQ ID NO: 28405 - protein, 387 aa, unknown
  TnpB Polypeptide
MELRMYKYRLYPSKKQQQILFNTFNICKKIYNNLLEMSIKTYEETNKTLRKYDFDKILVGKYPEVFSQVKQNVSDRVHKVFQNFFRRVKDKSCKKKGFPRFKSRIHSITYPQFGFKFLSQRRLKVSKIGSIPIVLHRIPKGKVKTLTIKRNRVGQWFAIFACEVDVKPVKNTSKKEIGIDVGLTSFATTSDGIFVSNPRYLVKAEKRLKFLQRRVSRKKKGSKNREKSKHLLARQHLKVSNQRLDFLHKLSHELTKNNKTIVVEDLNIKGMTRNHYLAKYISDASWNSFIHMLEYKAVTSGSTLIKVNPRNTSKTCSNCGAIADIPLNQREYRCSVCGFVCHRDLNASINILKIGLDKSKFTPVDDHVRPSLLKAKVCEAGTILDNS

SEQ ID NO: 28406 - protein, 486 aa, unknown
  TnpB Polypeptide
MSKKENEHAITFTGIVITSSVTESIILDELMRKFQSAKRYLRERIFDGLDRKSAVAKAKQLFLNNSRYMRDAFLEAEASISSQKELLPLYVEQYKTAIQKTENKIEKIQNSSKSHKEDLIVYKKARIKKLTKKMYYYQYHIENGSIPKIVDGSKKKLILLNKHKITKQEWIDSRTNALYSRGETSKGGNENIKLYYLHDRLIEINVLNPLSSKRNDRLHFNVQFSEKHILTILTHLSSGKAYSVRIFRKNGKYYVHVTFDQKVESSNDFSRGCAGIDINPDNLAVTIVHPNGNFRISKVFWMTDVNSVRPNKRNWIIGNTIASVIKWVASFGIDIIAIEDLYFKNDLSKNPKFNRMSSNFVYRKIITTLISRSIREGIFIIQVPAYYSSLIGRVKYQKIYGLSIHQSAALVLARRAMGLKENVPNQMMSVLFAKEAKKGHQVHDLFRHWKKVQTWISAIKKRAFQNHVHYKHWYIDDFIEYDAVKE

SEQ ID NO: 28407 - protein, 421 aa, unknown
  TnpB Polypeptide
MLLSQKTTIPLQKAEFNIIGHMCYAAYKLWNVCNYERRNYKQLQLPVEYPDWYYQKSAHKDDLYFKQLPAQTAQEVCKQLDKAWKSFYTLKKSGGVENPNPPRFKHSGIAITYMQNGIVHEAGSDMVRLSIARNLRKYMADTYQINDTFLYLKNRIFKGVDKIKQIKLYPPEHGKCEVIIIYEVPDVDMLPDNGRYLSIDLGIHNLMTCYDSTSGKDNTFILGRQYLSICRYYDKEIARVQSQWARTQSKHGIKYPKLSRHTRRLYQDKQNHICDYLHKVTRCITAYCKQQDIHTVIIGDWTDIRKDADFGDKTNQKLHSLPFRQLTDMLTYKLALEGIRLEVISEAYSSQTSPLAPEVSRKYAKKSNRVKRGLYIDKEYVWNADCVGAFNILRLYLKQKKIDLALDAKSISHPYHFKVAA

SEQ ID NO: 28408 - protein, 423 aa, unknown
  TnpB Polypeptide
VEYRRTAVIKLDIPEGADSLLRETVDQFKHCANTASEWCWHGRRQIPEESGCQPETRRVSGDDDGYHVTSKAKAERALYDQLRDKTDLTANLIQKGIRRAVEAVKSGVERLKRGENTSRPYFSADSAVYDKRSATFHRDHVSLSTVDGRIACDYILPDDSEKPPTKYISDEDFEFRMAHLQYRDGDWYLHASMRKVEANESESDSKHRTVLGVDLGVNNIAVASTGRFWSADEFNHWRKEYEKRRGSLQQCGSRHAHENIESVGRKETGRFEIHLHTVANELIEEAVENDCSHIVFEDLTHIRENIPEATWQHLWAFRRLFEYVEYKAEEHGVEAVQVDPRNTSKRCSTCGFTHDDNRHQESFECKQCGYKNHADYNASKNIGLQYLRRRQNADDGGAPVDVRLNRGTLNVSGEYIPPASIEA

SEQ ID NO: 28409 - protein, 418 aa, unknown
  TnpB Polypeptide
MITRKAFRYRIYPTPEQEARLFAWENALRWLWNLAQEQRLMCLSRVSYRRIYLTAFDQINELKALRAENPWLADVPRNVCAQLLVELDKAWQRCFKRLALAPRWKRKGRDQVTICEPHPKVWHLGTDGLVFPKLGTLCTVFHRPIEGIPKTCSIVRDGDQWFISISCVVEIPAPVTPPGPPIAIDRGVVNLLVDSTGRVVENPRWLKRQEKRIAHAQRVVSRRRKGSINQAKAKRRVARLHRMVRRQRDHLLHCEARYYAKNHGTVIVEHLQVRNMSRSARGTVDGPGKRVRQKAGLNRAILDGGWGRFVSFLRYKTMWAGSTLMEVAPAYSSQTCARCGQVDASSRRSQSEFVCVACGHHDHADVNAALVLLGRGSHGLAACGGSAEVRRPMKQELRVVRRGPRRGSEPKAPSFRTG

SEQ ID NO: 28410 - protein, 377 aa, unknown
  TnpB Polypeptide
VRKSFKYRLYPTKVQAAAMSETVETHRTLYNRALAERKVAYETQKRTVRYAEQSAHLKEDRPANDYLARTNFSSCQATLRRLDKAFVAFFRRIASGGKPGYPRFRGRGRYNTVEFPSYGDGCKLKENRVYFQHIGTVKIKMHRPIEGTIKTVSFTESAGHWFVVFSCELPDSMLPPSTNPAIGIDLGLKSFLTTSDGEQVAPPQFYRKAQAKLRRVQRHLSRCQKGSNRRRKARMRVARLHQHVGNQRRDWHHKTALALVNRYGVIAHESLNVKGIARTRLAKSTHDAGWTQFVGILGHKAAEAGVAMIAVNPRNTTQACSDCGCLPAVPLTLRDRVYHCASCGHVADRDVNAATNIRTIGLGLSLRTLTPAVVEVV

SEQ ID NO: 28411 - protein, 392 aa, unknown
  TnpB Polypeptide
VLIQKGFKYRLYPTDEQRQNLLQQGGNARFIWNLFLVQNCLYYRETGKFIFYHELAVSLPKLKQQYPFLLESFSQSLQMVARQFDRALKDSFKKQKGFPSFKKKSLFTDSFSCPQKWRLGKGFIFIPKIGEVPWKKHRALKGKPKSITISQDGNNWYCSVLCEYTIKDKEKQKDNIIGIDVGLKEFAVFSDKTIIKNPKYLKKQESKLKREQRKLSRRKNNSINKYKQQIKIRKIYAKIKNSRKDFIHKTTSNIITKYDGVVLENLNISGMLKNHKLAKAISDVSWFEFKRQLEYKTKWNFKHFILIGRFEPTSKKCSNCGYIQEMTLKKRIFNCPICGLHLDRDLNASINIKNLGINTVGHTEINACGDDKIHAHLGRWSSMKQEKECLVN

SEQ ID NO: 28412 - protein, 403 aa, unknown
  TnpB Polypeptide
VVTCGIHHISWQPYQKIQKNKLENIFKIRKESEVKSVEKAYKYRIYPNKKQKEIIAKTFGCCRFIYNKYLAKRIEMYEQNKETFSYVQCANDMKKLKSELKWLKEVDSTALQSSLRDLDSAYQKFFKEHIGYPKFKSKKTHRYLYKSKCVNNNIKYNNKYIKLPKLGMVKTKNKLTPQGRILNATISQEPSGKYFVSLCCTDVDIKLLEKTGNSVGIDLGIKEFCITSDGEMIPNPKYLKRSLDKLAKLQRELSRKSKGSSNRNKARIKVARLQEHIVNQRKDFLQKLSTEIIRNNDVICIEDLQVKNMIKNHKLSRSIADVSWSEFVRELEYKASWYDRKVIKVDKFYASSQTCSVCGYINKETKNLSVREWDCPKCHTHHDRDMNAAINILNEGLRILEVA

SEQ ID NO: 28413 - protein, 362 aa, Thermofilum sp.
VLKFRAELPAELKDFIERVYQPRASMRYWQRLLGLDSEELEVAWKAVPWAYRDAFDDIVAPRMPKRKSYVRFPLLSWMLKRTGANLQGDVLVVRLCRRSFSIPLPERGIKWLQSQEDACRDSGGKLTRYVAVKVDGQVSVVLHCSHSLSVEELLENLEAIAVVDINSSHGFYFLAYDLRNGSFTIRRFKVPEVNWGRIKELQQKAAKSRKPGAWATARCALRKAYRRRRAALLSAVAKAAGELKGRKAIVFVDVPFDESLRSNGLQRTLRSFAKRLENVLGFHGIPVIERTLPSKRCPLCGGKLEGVERRGRTRVMRCMECNMEFERDSVPALHALRLFIDKAEVEELAGKLARHYRLQSSQ

SEQ ID NO: 28414 - protein, 486 aa, Rhodococcus sp.
MSRNLLKHPTTHTGIIINPSATDSIILDQLMRKYQSAKRFLRERIFEGFNRKEAVRKAKPLFLNNSRFMRDAFLESESSISSQKELLPFYVEQYKVAIQKIERNIKKIKKSSKPKKEEIISAKKARIKKLSKRMNYYQYHIQNETVPKVVDGTKKKLILLNKNKITKEEWRDSRTNAIFSRGEASRGGNENIKLRFLQKNLIEMRVLNPQSPRKNDRLHFVVQFSEKSILSILSYLSSGKAYSVRIIREDGKYSVHMTNEQIIENSFDFTEGCAGIDINPDNLSVTIVHPNGNYCVSKVFWMNDVNIVRTNKRNWILGNTITSVIKWVKLNGIRIIAIEDLYFKNQLSKNKKFNRMSSNFVYRKIITTLISKCVIEALSLIQVPAYYSSLIGRVKYQKSYGLSVHQSAAFVLARRATGFEEKVPKQMMSVLFTVEVKEGHQISNLFKHWNIVQIWYKKVKEKAFKNKIHYKHWYIQDFIKYAELRI

SEQ ID NO: 28415 - protein, 363 aa, unknown
  TnpB Polypeptide
MNKGVIFRAYPNKAQQELINKTLGCSRLVYNKGLAFRNEKYAKGEKTGYNQTSAMLTSMKKEEKYAFLNEADSIALQQALRDLENAFVRFFEKKARHPVFKSKHHYQLSYRTLNQKNSIRIEGNRIRLPKLGFLKIKQSVEVGHINNVTVRRTATGKYFVVLNVDFEPEKKEECNSFTGIDVGIKSFYTDSNGNVVNNPKYLEKSQEKLRREQRKLSRKKKNSKNKQKQRKRVARVHEKIVNQRNDFIHKITTKLVSENQVIAVEDLNIKGLLKNHKLARAISSVSWSKFFDTLEYKAEWYGRKVIKVPTMYPSSQTCSKCGYKNPLVKNLSVREWECPCCHAKHDRDLNASVNILNKGLSVA

SEQ ID NO: 28416 - protein, 478 aa, Lentzea sp.
MTLIKMGFVVSGVVGVGHYGVGEMVTVIQAYRFALDPTAGQYSALRSHCGAQRYAFNWGVARIRANLDQRAAEKTYDISGDQLTPPVSWSAYSLRKDWNQAKNEVAPWWAKNSKEAYSSGLANLAAALGNWAASTKGARHGRRLGFPRFKGRRSGLSCRFTTGAFGLGIDRRHVTLPRIGAVRTHESTRKLARHVERDTARIRSATVSYRAGRWFVAFSVEITRADPAPALPDSVVGVDLGVASLAVLSTGEVIANPRHLEAALRKLRRLQRQAARRTGPDRRTRRPPSARWRKTWARIAVLHAGVANARRDGLHKLTTRLVRTHGAVVVEDLNVSGMLRNRRLARHIAGVGMAELRRQIEYKAGWAGVRVHVADRWYPSSKTCSACGVVKAKLRLSDRVYRCDACGLVCDRDLNAARNLAALARRETSSPSCGATRNEPAGNPGKTRATRATGTATGRPAPPGTGQRRRRKATTARI

SEQ ID NO: 28417 - protein, 562 aa, Streptomyces sp.
VTQQVKRAFKYRFHPTDEQAAELSRTFGCVRLVYNKALEDRTRAWYGEQRRVSYVQSSAALTQWKKTEELAFLTEVSSVPLQQALRHLQTAFGHFFARRAKYPRYKSRKKSRSSAEYTRSAFTWRDGRLTLAKTAEPLDIRWSRPLPEGAEPTTVTVSRDSAGRWFVSMLVEDTIAPAPATDAAVGLDAGITSLVTLSTGEKIANPKHERRDRTRLARAQRELSRKAKGSNNRAKARVKAARVHARIADRRRDFLHKLSTRLVRENQTVVIEDLTVRNLLKNGRLARAVSDASWMELRSMLEYKCAWYGRELVVIDRWFPSSKLCGACGTVRAKMPLNVREWTCDCGTVHDRDVNAARNNLAAGLAASACGDGVRPQRESSRTGRSSVKQETQRATAGLPRLEAGEEVKASSLRGWSPGGARAGRSAAAATTRRSSRGSRRRRPRPSRPCRPRPPRRGPRRRSRRRRTAGSADCGGPRRARAARPPRRCRDRRPRHRAWPARSVPRRPARRRRARVRRSGPAPAAGPRPRAARRRPGRRRGGGRTCRAGAGPAAAPAPPPRR

SEQ ID NO: 28418 - protein, 392 aa, Andreesenia sp.
MKKSIRAYKTEIYPTESQKVKIHKTIGVCRFIYNFYISENEKSYKEEKGFISGYDFSKWINNNYVPNNPDMAWIKEMSSKAVKQSIMNCERAYKRFFKGESRYPRFKKKKKQNVKAYFPKNNKSDLTVERHRIKIPTLGWTRLKEKAFIPVGATVKSCTVSQKSNRYFISVLVEEQEHQKLEDFNEGIAIDLGLKEFAVMSNGERKKNINKTSKIKKLEKKLKREQRKLSRKFEALKIRKKKGGESATRNNIVKQTIVVQKLHMRLANIRTNYINHIVDDILKRKPSFVAVEDLNVRGMMKNRHLAKAVANQKFYEFRTKLTYKAIVSGIEVRIVDRWYPSSKTCSECGFIKKDLKLKDRTFICECGAKIDRDLNAAYNLAKTDKYKIAKLK

SEQ ID NO: 28419 - protein, 439 aa, Catabacter sp.
MKQITAYGVRIHAVSMKPVQDMIRIYRQAVTFLIKVCDEQWSSVSVIPALVRKQSFVEGLIHHTKNRTKVQYDQFDVLFYKLPSYIRRAAISEAIGAVDSYRSRLKTWNENPVGKAPGVPQAGYTYPVLYEGNVFEQTGDYSARIKVWIRNTWDWMEVTFRKSDADYIHRHCSDRRKLSPTIVKKGRNWELMFPFEEEATVRTVDIQEQKILSVDLGIHNACACSVMKSDGTIVGRRMLRLPVQEDCLNHLLNKVKKAYRQGHRHIPTLWSRINNVNRMISVETARFISGVAEEFQVDAVVFEKLELSGRKRGTGRRQRLHLWKSRDVQGMVACKVHRMGIRVFHVNAWNTSCLAYDGTGKVERGVKHNYSICRFATGKVYNCDLNASYNIGARYFIREIIKTLPVTTGLDISAKVPECSKRSTCTLSTLISLNAALAV

SEQ ID NO: 28420 - protein, 201 aa, unknown
  TnpB Polypeptide
VRTKQWKKDRQRDFLGSILPCRECVYFLQEKEPGTLCFTEKQRKNLQENRESSPAVKKKPELSETEKRVALCHEKIKNQRKDFQHKLSRELAERYDAVCVEDLNLKGMSRGLHFGKGVQDNGYGQFLSMLGYKLEERGKHLIKVDRYFASSKICSVCGHKKKELALSDRMYVCECGNRMDRDVNAAVNIREEGKRIYKECA

SEQ ID NO: 28421 - protein, 419 aa, unknown
  TnpB Polypeptide
MLTNVFECVNIYSRGDINMKHRINDKRLKAYKVEIKPTQKQIQKINQSIGVCRWLYNEYLAKNNELYNQFKDGCIDKKQAFMSANDFDKYINNEVKVLEEYTWINNCGSKARKKAIQNAETAYKRFFKGQSKFPRFKKKNKSDVKIYFPKNNKGDWKVDRHRIMIPTLKNVRLKEYGYIPVSAKVVSGTVSKKANRYYVSVVIDVNPTIDNKQYTCGVGIDLGLKDFAICSNKINYKNINKTQRVKRLEKKLLREQKKLSRKYESLKIRNKKEKGVATRQNIHKQIVKVQILHQRLTNIRTDYINKVVADVIRNKPSYVTIEDLNVKGMMKNKHLSKAVAQQKFYEFRTKLTNKCNALGIELRIVDRFYPSSKLCHECGSIKKDLKLSDRIYKCECGYVEDRDYNASLNLRDAKIYNIA

SEQ ID NO: 28422 - protein, 385 aa, unknown
  TnpB Polypeptide
VDIKRAYKFRFYPTPEQEIVLARTFGCARFAYNHMLRLRTDAWFKEKKRVGYHETSATLTLLKKQPEFAWLNEVSSVPVQQALRHLQTAFANFFARRAAYPSFRTRHGTQAAEYTSSAFRWDGQVLHLAKMAEPLTICWSRTLPKAAQLTTATVSRDAAGRYHVSMLCADTVQPMPVVEGQIGIDLGLTHFAVLSNGEKIAAPNAFRRREGRLALLQRRLAKKQKGSKNRFKARRQVARWQARTADIRRDFLHQLSTRLIHENQVIAVESLAVRNLQKNHCLSKSIADAGWSEFVRQLEYKALWAGRTLIGIDRWYPSSKRCHGCGHTVGRMPLNVRRWTCPGCGGEHDRDLNAAKNILAAGLAVSALGEAVSPVCTSVQTGSPR

SEQ ID NO: 28423 - protein, 413 aa, unknown
  TnpB Polypeptide
MLAAVKRIERIRLYPTARQAAALAVMLDVTRELYNALLQQRRDAYRLRKVTVTTKMQYADLTALRAEDGRLRAVYREAEDAVLHRLDLAMAAFFRRCRRGEAPGYPRFKSWRRWEQLEFPHGDRALRFDQPQQRVNIPGVGPIKLRKGRQVPATYGRAWLVRKNDRWYACFECERAVRPLPPRNEVIGVDRGVHVLAALSDGRLIANAAVGEKRKAATARLQRELESASVRDGAGRVINAREHSRMKARERLAGAKEREANARRDYAHKVARRLVNGADVIALEKLSLRAMIRSARGSVERPGRHVRAKAGLNRRLLDSGFGLLRQMIVAKAEEAARTVVEVDSRFSSQECSHCGHVASESRRRRCFCCVGCGYRNHADVNAALVIRGRAQLARKSESYPAEEAGRRGQDAAA

SEQ ID NO: 28424 - protein, 413 aa, unknown; identical to SEQ ID NO: 28423
  TnpB Polypeptide

SEQ ID NO: 28425 - protein, 613 aa, unknown
  TnpB Polypeptide
MVMAKTQTLSFPIRLPDAMQAEALRLLDASRIAINAILDALWPELDRFATDRSGPAWKQVEPHLLHTSGHGSRQVRCEMEQAGRILRAQATRKQVFLAILPLLSEGLIRPAEGTRPARKDYRAIKEQVRVLRADREDADAFMALTNVVEQACNCYLETGVFPTTYEAMQPAPVQEVAQLTFAGDDGMHAGQTYRARLSVAQCCDVQSRQEHKQASLWLKLRAPQTSGRWAWGEWSQEIPLPETVFQYLDQGASTQAPTLREIRSADGSRVAVLDVILEVPAVYVAPLAQERRVLGWDWGVRSLITVSVLETSEGNEQYRQVSRPVFLDTGGIDGRQARLRREIDRLNACRERYVLLVKQAVKAQTEQQTPLPAHFAGWQEQITSYTIHIKTCWKKYERRNHELAHLASNLLILLALLHDCRLICGENLTTLKTEGRGRGVRGRWRNWRNNTTVRGEVWRIRARQVEPRGTTHTCPHCSKPAKTYLSPALHDRKKAIDWGAWLHCTACGWNGARDYAASLNIARLGMAFLITYHETSRYQAYRMTDASVKPALYSRAGATLLLPSQGITPRPHEGKHVFYAGWSYATSLRTSHPKKMLALLSTSQLRKRLLRSA

SEQ ID NO: 28426 - protein, 416 aa, unknown
  TnpB Polypeptide
MNRTNTILLTPTETEERELRALADASAQLWNMANYERRQAYFASARVPSYENQWRRFKDTDTFKRIGTCKGQALLLKLREAWGSYHALKKLQRNSQLPPHIKRISPPRYMKDRKTRRRKADAIYVRNDGYRQDKDGDSLVLSKNLRVQFKSGDLWIGKQGRLELHYDPLREKWYGRIPIRVKWPRKGLPHHSTPKRASIDLGICNLATCVIDGNDKAYIYSGRAVLSDWRYWIKRIASCESMLKKMNGRDSSKRLSRLYRTRRRRLDHAVKSMLRDLYEHLENEHVTDLVVGDLKHIRDDKDHGKVGNQKLHNFWPFAQIRQRINELSEEYGIRVKFKSERGTSKHCSLCGEKHKNGRMRRGLYKCARTGTTLNADVNGATNMLYGREVAVLSGSRPMAWPLLLKWNTQEWEVSAA

SEQ ID NO: 28427 - protein, 387 aa, unknown
  TnpB Polypeptide
MTRRDNAIRATVSMNIAISETLLVFSKNYLEALRYVLYWLKEKRINPNKNNVISIVHKKLYNILKSFNLSSKIAQDCYRNAISIYKGWYNNPNKGRFPIVFKPTVWLTPKLSYTVNFNEMFVKISKIGEFKILGYPRNYKEYLSWKMRESRLVFRNGKALLKIVFEKFIQKIEPKDSIAVDINMQNITAGKDENNYVKINTRINEIYHYKSLAERLQIKYPKRWKENRNIKRRIMVFHIKAKNIAEDFAKKIGKRIINEAIKMNANVIKLENLRNLIKNVKRLHKKFRDKLYLMQYRKIQYWIDWQAKKHGLLINYVYAAYSSVKCPKCNRNMNEISYRWFKCSCGYENDRDIIAIINLNGRGSLSLSTAPHMRYVAPNQLRGTLVL

SEQ ID NO: 28428 - protein, 350 aa, Okeania sp.
MRTAYQYKLRPDKEQIATIEMWLELLRRQYNYRLGERFSWWSENRCPVNACPLVTPIPQLRDNPDYYSQKRDLVNTKDKFREYKLIHSQVLQDCIKRVKLAFDRWLTADKKGTRLGKPRFKGIRRYRSFTYPQIKQDCIEENQINLPKIGNIKLIKHRPLPDGFQIKTVTISRKADGYYVTLSLEDKSVPALTTKVEPTLKNTLGIDMGLKEFLVTSEGESIPIPQYYRSSQQRLKTLQKRLSRKKKGSKRWLKAVKAVAKQHKKVADKRKDFHFKTANELLLKAEIIAHENLNIKGLAKTRLSKSINDAFGGKFPVYFDCQSRKCWAENHSSEPQKYQPRLLKLWGKSR

SEQ ID NO: 28429 - protein, 459 aa, Scytonema sp.
LLLNYQYRAYPNTNQKQQFSSWLRIGQYWYNKQLGDRFSWYENNRNDINSCPLICSLPELRENPDFYSQKKQLPIIKQDLVTVQHSGELLDFTSVPSQTLQDVSKRVDLAFKRFLQGDSSGKQSGRPRFKNSARYRTLKIEGQAITVERIEKDWLFLSISKLKGWLKVRLHRPLPNGFVLKNMLLTKKSDGWYTTICLEDPNVPVFNPDDVTPTWANTLGMDAVLHEQDYLATSEGIKVPSLKSFRKSEKRLAKVSRRKETKKKGSKSRRKLAKRQGREHQRIARARKDHAFKTAHALVRTLKKVFVHEDLNLKALSKRNKAKQDEDGKFLPNGQAAKSGLNKSWNDAAFGQFFLTLEYIAAKAGSRVIAVNPAYTSQLLAYRDEIVFTDCDMRSYWDTELSLNVDRDINAGINIKRVGLGLFPTLKRRKGNLVVGDSTTNSTLKEVLETLKMCQKPTP

SEQ ID NO: 28430 - protein, 410 aa, unknown
  TnpB Polypeptide
MSRRLKLTIKIPVPKNLNTYAAELNKSSARVYNKTLSFVRKVHNRKGFWLSQNTVQKYILRWGVDIPLHTHSKQAMVQQYFNSLKSYFAARKIHQSAKPPFRAKKYMPTIWKTSAIHVKGEALVLSNGKGNKPLHVPIPSVLVGKLQNSTIKLAKLVWDSKNERYYIHLTIEVDGRTQKTGGKVISVDLGVIHPITAFDGYEVGIWNGGILNAKLRYRNKRLASLQSALVKSTKGSRKRRKLLKAEKRVLRKLNNQINDILHKITSNFVKWVIERNAKVIVIGDVTGIRNRAKYNKVANQKLHGWLFRKIANLIKYKAEAAGIEVDFVSEEYTSQTCPVCGHRYKPSNRNFKCPVCGFEYHRDGVGAINIHKKYTGCGLVVAGLAPAVGVRYNSHLRGPGVSPWKLASSQ

SEQ ID NO: 28431 - protein, 409 aa, Halorubrum sp.
MQYNYKYRLDPPEPVAETLLSHIDTCRQLYNHVLYLLNEEDDIPARYEVQGQLPDLKSWWGDLGDVHSKVLQMVVKRVYDNLSTLKAQKENGRAVGMLKWKPPREYRSLTYNQSGFKLKNTSGRPVLWLSKIGEVPIHLHRDIPENATIKQVTVKREPTGEWYATFGIDVEEATPEKPETPEKVVGIDVGILKYAHDTDGYAIESPDFSDERERLERAQRDLSRKEHGSANWKRQRRVVAERHADLKRKRRDFLHKLSNHYAREYDLVAVEDLDAKGLVELPGNSRNRAGAAWGTFLRMLEYKCEREGTHFVAVNPRGTTKECASCGVKTDKPLWVREHSCPSCGFEADRDANAAWNILSRGLEDVGVVHSESTPVETKLPVDTVVSAKRVVETGSPTLKERTASAVSE

SEQ ID NO: 28432 - protein, 333 aa, unknown
  TnpB Polypeptide
MHTDQVFRKFDVQKRLYTELRERFGLAAQPAIRVIGKTVDAYTTPRANLRAGNYGPPGSDRRRQVEDTPIRFRPQAGQPFDARCLSWQLGDAGRDGTVSVWTTAGRLRTVRIVGNPGHLALLRSRPVIGETDLLHRDGVWLLHAVVEGPEAAQREPVNGFPGVDLGIVNIATTSDGDRTCGARLNRYRKRQQRIRKRLRAKKTSSAGRLLRKRRRKEARFATDVNHQISTSQTCHACGHVDKRNRRSQARPKNRHSRRPASSFLHGRVHDCDPCSFGCGGVTGPFRGRRGTSTPRSGHARGVSPGPAVPPRPARPAAATLLGAGNRISRARRR

SEQ ID NO: 28433 - protein, 377 aa, Chloroflexi sp.
LTTARKAFKFRLYPTHLQETLLERQFEACRELYNAALTERREAYRMVGKSINYFDQANQLKEIRTFRPDLCAVNFSATQDVLRRLEKGFKAFFERIKRGDKPGFPRYKGKNRYNSVTWPSYGDGCKLKASGLVYLQGIGNVRFKQHRNLQGKTKTVTVERDGNNWYVVLSCQYEFEAVERHDGPVVGCDVGLEYFANLSNGQQVANPRYFRKSEKRLAKAQRKLSALARNNPLRRKARVRVAKAHRHIRNQRQDFAHKLSRTFVSTYSLVAVEDLNIRGLAAGMLAKSVNDAAWSLFIHMLEYKAENAGSLVVKVDPRRTSQTCPDCGNIVKKELSVRWHNCPCGCSMPRDVAAARVILSRGLATLRNQSVEAVCFS

SEQ ID NO: 28434 - protein, 191 aa, unknown
  TnpB Polypeptide
VLKRDSNLYMNVSFSQMVTLLEINANAKIIAVDVNENVIVYGNDDFVERIKTNEGIIRTRYFLKRRKIQVKVRGKEPRARLLGKYDEREWWRVREIYYKAAKEIIGRALEIGATVIVMEDLEIYKRDLCSEELNGRIHRWSYRRFQRILEYQAKLHGLNVKYVDSAYTSKTVRCVKVGWIQARMGVNLEDV

SEQ ID NO: 28435 - protein, 443 aa, unknown
  TnpB Polypeptide
MYYAYKYRLKPSDDHREELDRHRDICRQLYNHTRYRLNEYQDEHGELPSMTTLRSELPDLKKWWDSLSDVYSKVLQTVVERLFDNLKGLSALKENGYGVGQLKWKPPREFRSFTYSQSGFKLDKKGGQTVLSLSKLADIPIRLHRTIPDVHKSNSSCAAHQKSPISEDDATLKQVTLKKEPTGEWFATFGVQMAREPPEPPENPEKCVGIDVGILKYAHDTDGTAVGSLDLSDEREHLEREQRKLSRKQHGSNNYEKQRRQVAECHADLRRKRRDFLHKLSAYYAREYDLVAVEDLNVKGMVESPSNSRNTASAAWRAFLSLLEYKCEREGTHFVAVNPRGTTKECAACGVSTEKPLWVREHSCPACGFEADRDANAAWNILSRGLKDVGVGYSERTSSESQSDSDVRTRALLSSTPVETALPTDTDSVSAKRVVEAGSPTLK

SEQ ID NO: 28436 - protein, 401 aa, unknown
  TnpB Polypeptide
VPNRSFRFRLTPTPEQELMLRQTVGTVRYVYNLALEQRRDFWRQHRAATGRSFNYIGQGKEVTQLRAEVDWIGSVSSSALTQALRDLDRAFDAFFAGRAGFPRPRKRGCNDSFRVQWAQVGFARLNAKWMKLRIPNVGWVKLRASREVAGQPSSVTVCFDGVAWFASIECTGVERVRTGTAGTVAIDRGVVKAVALSNGEAFNLPEAVGRLEALSRHCRRRVSRSQVGSTRRQKALRNLRKTMSRLTRTRTHWLHQVSNCLASRYDTIVLEDLRIPNMTVARKGKGRAAKAGLNRAILLQGWGALEAFLAYKLEERGGALVKVNPAYTSQECSACRTVDARSRKNQAQFECVQCGFSINADHNAAINVLRRSTASKVVEGPGCRPVEAITSGAFCPGNLAA

SEQ ID NO: 28437 - protein, 273 aa, unknown
  TnpB Polypeptide
MAEIPCLKLTLNCKYIPTFQKIKQVEIGDIFAHISVEIQEPEMRTSEKFIGIDCNTTGHVVVVAIPHTGKIHKLGKSAIHTHSKYHSIRKKLQKQGKFSLLKKIKDKESRIIKNINHHISKKIVEIAVQTKSGIRFENLKGIRKNKKHSRKFRYSLNSWSYYQIQQLTEYKARKQGIEVAYVAPAYTSQTCSRCGSLGDRDGKKFQCVCGHADHADVNALFNIGKPVSHCLIDPTRIKNMSQLHKESDLCKGSTDTPQTAMSKMMVTVEPTKL

SEQ ID NO: 28438 - protein, 335 aa, unknown
  TnpB Polypeptide
MKKVEKHKIRKINKYFPFILEQLEQCKKISNSATFIIRQNFFFNKIKDNKGNEVRKYIKYNDMNRIFKRDRTELYRSLIYVQSVQQILRKVHSSFDSFFKAIKDYKKNKSNYTGRPKLPKYKSSKYDELIITNQNFKQNDKVLNFKGYLKELSFTMYNKGKANQVMFKYNGVDIDVYIIYDDGKTLISKEVVDYIEDDSRIISIDLGLNNLVTITNNIGIRSVIINGKGLKSKNIYYNYQIGKYQSILATVNEKDKEKKSYKSNRLTRLRVKRNNIMNDYIHKTTRYIINYCKENNIDTIVIGNNKFQKQNKRKKQIRGLKNFIQVPIKRIKVQE

SEQ ID NO: 28439 - protein, 360 aa, Hydrocoleum sp.
MKSIRTKLKLNNKQKTLMAQHAGYSRWCYNWGLSLWNAAYRDGYKPNARKLREVFTNQTKPLYPWMKSLSSKVYQYAFIHLGEAFKRFFQGLSKYPRFKKKGKHDSFTIDNSGKPIELNGWNHKLPFIGIVKTYEPIEAITQKITISRQASDWYLSCSYEFTPKLTQKTTKIVGVDLGIKTLATLSNGKVFQSVKSYRKFEAKLSRLQYLNRNKIIGSANWKKAQLKIAALHRRVANIRKDALHKLTTYLAKNHSLVVIEDLNVSGMLANHKLAKSITDQGFYEFRRQLEYKCQWYGCELVVVDRFFPSSKTCCRCGNIQDMPLNLRTYDCRSCGISIDRDLNASINLRNAVGLTVNACG

SEQ ID NO: 28440 - protein, 581 aa, unknown
  TnpB Polypeptide
LNKKIETKQEKEKKPKIDFIIDGSFSLRVSNRKAKKALTYSLTKDCSQIKNVIIMLRNSLYTQSKTSKFNKEIYDLFLSNEILRESVYGRIGSEKTKDDIKKLTLYFKNNELFNHLCEFSQQKIDAHNFVSIVNAIKSNFKTFNTNLNKYKENKAAYAKEMGNSGMPKPPKQKKLSRINNASLEIDKQMWSFRKETKIRYVEEEKILKSGKIKKIRKKIKERYDYLRVRIGKYTNKIPLNLNELPKPKGKEWRSLNVSHRNNEIYLNFTYGHLDLPIVNDLSIKKIKKVKKIPKYAAADVGLINTLSVFVYDKETPSFMLSGKRFIDYNCKYNKMVAKLSASINEEATEWKSVKIKTYDTEGNVIKDEKGEEVKEEISIPTGYNERGCFLLKFKSFLTEKRNRFFKEEFEKMSTHLVDYLEKNKITDFVTSKNLSFAKIKGDIKMHKKTKQKFYQIPFGKLLNMIERKCKLKDINFHNIDEAHTSKTSCLSKNINKIVKLRKTRKKSLSTNDYGGSRVKRGLYKDYENNILFNADINGAINQLKIKFKRLDFSWLVDFKGKICNPLRIKSDEEFIQKLLVD

SEQ ID NO: 28441 - protein, 366 aa, unknown
  TnpB Polypeptide
MNLTMQVKLLPTPEQAAALLKTMERFNAACDALAEVAFQHCCANKVELQKLAYHDVRDHFGLSAQMTIRAIAKVCEVYKRDRSVQPRFRPHGAIVYDQRILSWKGPDRVSILTLDGREVIPWVAGAYQHARLNRVRSQADLIHRDGAFYLHVTIDVGDVPPGDPVGYLGIDLGQKNIAADSDGEIFSGAHNANLRARHARLRTKLQQKGTKSARRLLKQRRAKEARFARDLNHQISKALVRKAKDTERGIGVEDLTHIRARTTVRKLQRRAHHSWAFAQLRAFLTYKAELAGVPVIAVNPKYTSQQCPCCGSIDRANRLSRDRFECQSCGHAEPADTTAARNIAGRAERHAAERRAVVQAPASRLL

SEQ ID NO: 28442 - protein, 425 aa, unknown
  TnpB Polypeptide
MFLVPDLVAIKVRLYPTESQAAQLDRAFGCCRFLWNQMLDDRRQAYEQYKIDGIKSRYKTEKEYKQLFPFLKEVDSKALQNVNWHLQDAYARFFQNCKDRKSNKTKRYVSYPKFKSRKSRQSYTTDTINNNIKIDFARQKLKLPKLDSWIAYSDPRVFTESIRKVTVSKTKSGKHFASILIARENPIVPLTVVHEEKVVAFDMSMKDFVVTDDYKLGNPRFFRQSLKKIVKAHRHVSRAKKGSANRAKACRQLDTVYEHYVNQKKDWMHKLTRVLADKHDAVIIEDLNIEGMKRFNKGYAKSITKDISWGEFTTMLDYKLTRQGKYLVKVDRFFPSSQLCSACGYRYRELTLDQREWSCPACSTHHDRDVNASQNLHDEGLRLLSGKGITLIRATVGTTGSHASRDRVNPPSLEVVVDERRIHAL

SEQ ID NO: 28443 - protein, 491 aa, Ruminococcus sp.
MSRSKTNSFVLELKLKTSPADDTHLEKCFSIGCRIYNTIVRHCRRQIASLRQDKTYWKLLTEYRSLENGAEKNAVSEQLNAIVASYGLTEYSLHSFVAVQQNKFKKYINSQVAQKIASSVWKGVEKVLYGNGKYLHFRKYTEFVSLEGKSNSTGFIFRGGVLKMNNRSIHVSRHKRDGSAARQYETEALKHRVKYCRIVRKPLGSSWHYYVQLVLEGTVPDKHSIGSGSAGLDIGTSTAAVVTERECILTVLGDNVENMEKEQRRLLRKMDRSRRAMNPQNYNPDGTVKRGRKKWVNSGHYHRMRMEYASLCRKRAAALKQWQEKMANRIISQCDTLYVEKINFKALQKRAKKSVVKENGKHTRRKRFGKSLQTRAPAKFCSILKRKLIAMGGRYLEVDTNSFRASQYNHVTDTYTKKKLSRRHNIINGRWVQRDLYSAFLLSNSAKDLAHADRERCIKTYDQFVKNHDACIEQIRNTKTKIPRSFGFQAA

SEQ ID NO: 28444 - protein, 145 aa, unknown
  TnpB Polypeptide
VWIAFICIKVISFISKLKNARKYFIHQITKKLVLENDIIVSETLKVKEMLEEKKISKFLSDASLSKICNLLKSKAEYYGKRYIQIDTYYPSSQKCSRCGYQNEKVKDLTVRDWICPKCGSYHDRDINASINILFEGIKKCRNEFI

SEQ ID NO: 28445 - protein, 279 aa, unknown
  TnpB Polypeptide
VNIERRCKARKHCSPILQKRGDEWFLDFPMKEYIELCDTDVADRIICAVDLGINSAATISVMCSDGTILGRHFLKLPKEQDCLTHSINRIKKAQQHGNRKMPRLWAKVNGINHEISVKTAKFIMDIAVLYNADVIVFEYLEKKGKKRGSRKQRLHLWKSQEVQRVVTDKAHRLGMHITRICAWNTSRLAYDGSGRVLRGKQAGFSSYSVCQFQNGKVYNCDLSASYNIGARYFIREILKSLPEKERLLMEAKVPPCSKRSTCTWSTLISLNAELMSFVS

SEQ ID NO: 28446 - protein, 385 aa, unknown
  TnpB Polypeptide
MKTKRAFKYRFYPTPEQTDLLERTFGCVRSVYNRLLDWRTQAYKQEQRRISFNDASAQLTALKKEPDRAYLNEVSSVPLQQCLRHQQQAFTNFFEKRAGYPAFKSKKHRQSAEFTASGFKYRDGQLFLAKCKEPLAIRWTKGRETLPSAPSTVTVSCDSAGRYFVSLLCEVETQPLPVSPRMTGIDLGLKVLFVAADGEQIANPRHTAKYATRLTKAQRALSRKQRGSKNRAKARLKVARLHAKIADTRRDCLHKLSHRLIHENQVVCVESLAVKNLIRNRRQSKAIADAGWGELVRQLDYKAAWAGRQLVKIDRWFPSSKRCSCCGHTLASLPLTVRDWTCPACATHHDRDINAAVNIKAAGLAVLALGESVRGIGQVPSSRSR

SEQ ID NO: 28447 - protein, 367 aa, unknown
  TnpB Polypeptide
MLQTLMVKLDPTKEQYQMLLDTMHRFNEACNSIAETAFAMHKANKVEIHKTVYYPIRERFGLSSQLTVRAISKVAEAYKRDKSIKPEFRPDGAIVYDQRILTWKGLEHVSIATLQGRQLVSVRFGEYQKARMDRIRGQADLILVKGIFYLCVVVEVSEASPYDPVGILGVDLGIKYLAVDSDGEVHSGERINQTRDKLDSLKARLQSKGTKSAKRHLKKLSGRMARFSKDANHCISKKLVAKAKDTLRSIALEDLEGIRSRVTVRKAQHRNLHTWNFGLLKIFVDYKAKIAGVPMVLVDPRNTSRTCPSCGHVAKANRPTRDDFRCESCGFAGPADHIAAMNIAFRAKVNWPIVSGHNLTSGTSPAL

SEQ ID NO: 28448 - protein, 902 aa, unknown
  TnpB Polypeptide
LYHYYKRFIIKNNFLINKFLKSKTRALTQSNLKKQANQSEISPKVEFKSDFSEDTIKSPPIVTMERTFHTPRKAVRETDTVENGLVQEPSPTPPTRTLTVTRKFGLKPRDKAKIITPRTFARFEKIANRMIRAGASLPDSLFEREGLPAAKDFYDEVRKTPSMDALWQRRKGTPSPLNERAWRCAAQHAYFSIRNHKTQVLLLRHLVGILQPLPNLTMFFASDFPQQEVFDAVYAGLYHSGIKMTKGQFSRVYLGNTLRWVRNLLKRGFHTKYMQLVVDSFKTLPNPPHLAVEIARWFTRDMTKFLKSYLRILSGRMTWFVKRVLNSSRRTLPSGGSGLGSSITKILAKNRLSIKNVGIKGWGKVRKQWRDGALQALQQKLGGIDIGALANHAVKEARAGLSPERIIKLLFNFRPNRMKLGAGDLMEFKAFLVKCAINEIEHRLITFLKPRLVPTIQQVLTALQGASRGWVQLPQFKKQSIPFGVDDRRVYRDADLQDLYILALQEQGVTMEEIVRKLIKKLPKQWRENPKTVAKIRKGVEELIKHDEETHWLEKIKKRKAPIRLQLRLERGNPMWFELKTPKRFLKLVQAGYAPQKATLLKKAGGGLILALPFEKEVPRSQCLEPSDLPQMQDPTAGLDLGLKTLAVLSIGKGDQTGLEAWGQAGREIARYFIDQKELLEKRSEWFKSNAKKATIPNPKKIKHPNYKGRLVTLQRAASAYQAERDAYRNALRERGINHRHARKFFDLNRNVKHIWRNVHNLHEELARQVATRVIAACKYHRVRVLRMEDLRWAKHARKQKAGYFLATWQIHWFFGQIQEHIADLAPRKGLFVEWVIAKHTSKRCSRCGKLGQRKGKIFKCPHCGFQLDSDLNAARNIRVAPRSDIPPSLYALAGGSPSLPQ

SEQ ID NO: 28449 - protein, 410 aa, unknown
  TnpB Polypeptide
LGSIQEQHAVSIKAFKYRIYANKATTEKLQWVLDCCRELYNAALAERKEAWRMAGKSIDYYEQKRDLVEIKEIRPEYKDIASHVLQDVITRIKRTYDAFFRRIKNGEKPGHPRFQGRNRYTSFCYPDHAGWRLEGKHLHLTKIGTVKIKLHRQIEGKIKTLTIKREGEHWYAIFSCEVETEKLPVSYEDAGIDLGITHFAALSDGTFIDNPRHFRKSEKKLASAQQALSRKKRDSHRRKKASARVAKCHRKIRNQRKDFHHKASRKLVNQYQIIAFEDLQTKNLMKRPKPKQDENGKYLPNGASAKSGLNKSIQDAGWRTFTEMVSAKAACAGRTVIFVDPFKTSQICSQCLKEGLHKELDERVHTCVHCGVILDRDTNAAVNILRLGHKSTLGGTRPTGQPPVEVSRCT

SEQ ID NO: 28450 - protein, 387 aa, Methanococcaceae sp.
MLTSYKFRLYPNKEQKTLIHKHIGACRFIYNWALNLKIQTYEQTGKAISRFQLNKTITTLKKEFPWLKEINSQSLQGATLNLERAFTNFFRKKSSFPKFKTKKHPRQSFQIPQHYKLDWENNKVFLPKIGWVKAKLHRKFKGEMKTATVSKTPTGKYFISIIVEDGKPIPDKLDENLRFSLLSTPSEFRQPFDEKTTIGIDLGITHFCILSNGEKIDNPKHLKKSLQRLKVLQKRLSRKQKGSKNREKARLKLAKLHEKIVNQRNDFQHKLSSKLIGENQAIALEDLNIKGLVKNHHLAQSILDVAWSSFVSKLMYKAEKFGKTIIKIGRFEPSSKICSVCGYYNNSLELKDRVWKCPACNTEHDRDVNAAVNIKKFALDRQNLIGL

SEQ ID NO: 28451 - protein, 422 aa, Methanococcaceae sp.
VSKLEVTRVLTINLTRKLTNEQWIILNHLTYSASKLWNIANYQIMQGIIKITELEKKLKTNFWYKNLHSQSAQAVLQKLKIAWLNYFKLHTKRPKYQPKDGHYPVKWKKDGFKIIGNKLRLSLSKQTKNYLKEKHGIESKFLWVEFRQNSKNFATRSEATMPKTLPLDAMQVKEVEIVPHDIYGQRFYVLHLIYKKEVKPKKPKKEKVMTIDLGVRNLATTAIQGEKQPPIFDGKILLSKLRWFAKEIARIKSEIAKQELKNCKRLSRLAVKERNYVNDYIHKISRWIVDLAKEKGVSKIVIGELNKGITKIDIGDRVNQQLHRIPFGKLIKRITYKAEEGGITVELVDESYTSQKCSVCGIIKKSNRKYRGLYVCSKCGTVINADINGARNILLKVVPNPERDRDSGLGNPWRVRIIPSLS

SEQ ID NO: 28452 - protein, 359 aa, unknown
  TnpB Polypeptide
MTSITLVTESKLYVKDNTPLYDYFDDYSKLFNFLVRRCVHHLRHQLKGESESRYRTNLMLEFNITNRMAKAVMRTAKNQLKLLRESARYRYNNLYKRKGSLYKKIQKLKLLLSSSSTSLKQRKLAKVRLFWTQMKLNKVNQLIANGLKLHLTFGTKHLLKNNKAKFLAKRDNQVVYIGDKNETCGNQQFQISFNSKYNRFDYKLRLENQWVSGSGKYIFGSFVLKNKEAKTDVLKTLSNKKYNPLTVRIIKRDNVLYLQIMYRRETSEVTRSNYGVLGVDFNKGFISVSEINSDGKLQSLTHYNYLHRGKATKTKTSMLELVSQLVTQAVSLGKDIVIEDLVSLDSNKKQEKKNGLAIT

SEQ ID NO: 28453 - protein, 412 aa, unknown
  TnpB Polypeptide
MRSQKLRLKLTKEQERLAWWYSKVSRNFWNLLVDIDKRNNKGEFDEILSNNGNKTYHSNFYDREIYSLSQSDYLKLAKIVAAKNYEEEQEQWSWYYQPNQSFIYAFLSRELVKIRKQNKGKLNFRSIDTIQPNFNIRCDIFPNKKRPSRIYLKENGKLQIPTIGDVRFGSVRADFNLSSKKQVANISFDGKYWYLSYTEDVKSQVAELPDYTDGVGVDLGIKTLATVSDGTIVPNIKTFRRVRILNKRLKRLQRKVSRKYLINKCNKYDKTKNIFKLERQIKLIHRSLRNIRINHIRKFVSELVKKQPQFIAIEDLNVKGMMKNKHLAKDVANCSFYSIREQLMRKATERCIAVRLVDRFYPSSKTCSNCGHYNKDLKLSQRVYRCSHCQEKIDRDFNASLNLAKTDRYVLA

SEQ ID NO: 28454 - protein, 491 aa, unknown
  TnpB Polypeptide
LGLRTIHLKLHKPGKLKREIIQKAFENYNNAFNYLLKTAFDNIDEIESNFKSPKGTYSTFSLSKWINSEISSELNKFNVQPFKDSLKLDFGMTLASYFVQKQAKPDMIFPNFRQDYALGQERLRPIYFCRYDTKRSFCLLYDTESNRYFAKLFLMNTKNAKVRKISADRRELIYISKNSEAAKSLKRETFIIIPLSFGKWQENMLRQAIDRPEILRTAHLLCRNDEYFLSISINLPEDKEIKADTFMGVSRGIRNDINYTITDIKGNTIKKGSLENCNNTKDRKQIICKMANSIADIALKNKSMVILQNLVGKGDKLSWRKEGTVHKPVYGCKMYNDLARVLEYKLPQKGLPIPAKVSSVDIFHTCCVCGSNTRKNRFSETVFICTTCGASYSMDELGSRNLAVKLIKYEKTTLKLKARKTPEGMYLSNELIGLNMFVHKSENPYDRLKEEIKLLLEKKQDNSANSKLDFKDIKSIIDKLVKNDFSNIEII

SEQ ID NO: 28455 - protein, 428 aa, unknown
  TnpB Polypeptide
LYSRGDKSKQGNLNLRFQWINDELYLRINTGDRQYIYAKVIRDVKRKKDKWIEFMFMLENAYQTNQWFPYSVRLKVKNGNIYAFISVEEKLPPITIKKDNGIIGIDVNAYPFHLALASASKDGNLEKYQSISLNELLEVNSEKRQYLEWQIAHKIIKIAKEENKAISIEDLNKLPKGKRGDGFVKLRIRLQKWSYKRLLDKIEVLAKRNGIELVKVNPAYTSLIGKLKYSPQYNIDKDIAGAYVIARRGLGYKEKLPKNYKELLNDTDFLLYTIASIEDNITKLKQKLKEEKNEYKRNKLKTQINKLRKNLKTLQKHLESGKSKTATQQPVNQRKEQVRGLPAGRHKSWQVLSIALAFCCLEKSYRDFSPLKRVIISKDWIAVANRLVPVLGIGAMTLPKYRLLGSEVSEMAEYKYPNPNCANFAQFG

SEQ ID NO: 28456 - protein, 432 aa, Halostella sp.
MEDVIRTVKVKLDVPDKRCDDLHQTKDQFLHCANTTTAWAWNYPEDYCVTSKQKAENALYERLRDETELTANLVQKGIRRAIEATKSGVARLKKGDNTSQPHFDAWSVVYDKRSATFYRDHVSLSTVNGRVECDYVIPENPEGTPIGEYLLNEDYEFRMSTLQYDRHSEAFYLHARMRRTTDEQESSTTSPNSKHRTVLGVDLNVDGSLAVTSTGAFIGNADEMNHRRREFEKTRGSMQQAGTRSAHLSIQSMNDREHRWMQDELHRASNQILDEARNHECTHIAFENLTGIRKRMAGAKRFHAWAFRRLYQYTEYKAEMFDIEVEQVNPAYTSQRCSSCGFTHENNRRSKHQFVCQKCEYKLNADYNASKNVARKLLKKLHSGQKSLSGGALCQCALTSGTLNLNGDFHASVDSTAEGESTDKPTTSVVGH

SEQ ID NO: 28457 - protein, 559 aa, Streptomyces sp.
VGGLREPAAPFVVPGPAGVAIRDRLRVSESDAAVLAEVGTFLGSLAAGDLADRSRQGVAHDTTAWAVRKQGLTGKSSARWAGSITKATHDQWALARRGMAAHLDWLRGQIAAIEARLARPLGAKADKRAGLARGYGSRAEWHAKSRRLHALKARLAEVEADWAAGRVRVVRGGKRLAHARHHLEAAGLSEQVWRARWQAARMFLAADGESGKRFGNETIRVTDTGQLSLKLPSSLAHLANAPHGRYVLDATVCFRHRGQEWRDRITANRAVAYRIHHDTARSRWYITASWQRAAAPVLPLQAALARGVVGVDMNNDHLAAWRLDVHGNPVGEPQRFFYDLSGSADHRDAQIRHALSRLLHYTRRCGAVAIAIEDLDFAAEKGRERHGRNKRFRRLLSRFPTAKLKARLVSMAAEQDVAVVAVDPAYTSRWGAQHWQKPLTTPTRKISRHDAASIAIGRRALGHPIRGRTAPPPQHQSDAAGHRTVQARPETRRREEPRPHLSGPRTGCAPPGGGAKAGDQGAQHRSGHPAEQESGTRTHSHSVFRNGCSPVPPRTRSPR

SEQ ID NO: 28458 - protein, 452 aa, unknown
  TnpB Polypeptide
MKTAHKIRINPTPEQVEYFKRACGTRRFIYNWGREQWEKQYQAYKQEQETVPEQERTRTSPSAFALKKQFNEIREQAYPWTYEVTKCVVDQAFDDLSKAYDNFFAGRADYPSYKKKGKSHESFYLSNDKFTVGSHWISIPGLGRFVLDQRQITKGRGKLLRKLGTVNLAEKLRFVEKGKEGTPRKSRTKRKQVICEAVKILGATVCCEAGHWYVSIQVEIKKQRPPAPTSVVGVDVGLKQAAVGSSGRKLENQKPFARHVKKLGKLQRKLSKKQQTKDPQTKRTVVSSNYEKQRLKVARKHQQIANIRRDVQHKFTTELARTCGVIGIEDLNILGMMANRKLARAIADAAMGQLLQFLKTKSTNAGGDLFIASRWFPSRHPLFVLWAYQEEDAAQTSHLSMSGLWAGHGERFERGLEFAVVRNRTASPASRGMSWPSWRVATAGRKMPGELM

SEQ ID NO: 28459 - protein, 766 aa, Acidimicrobiia sp.
LRCNCATTCAPSAGATCACSGPSFAPISRRLAGRAGWVSPPTSTPTGPPSTPAAPTATRASAPLAPSPTTTGTSPVRSSTASTATAPRPPREPDDERPTPARAAAHRRRRVRAATPQRPAGVAPAGRVAQEIRCRLGRCGPACEAPGALRHVAAVPQRGDPHHPSRPRRAARRGTETNCRRSAARRVGPAPSRRQEAPGPRQTAVAVAVTGVARRTRRRRGGGGRHPPPLHHRVGRGSPRPGRRTGMTTRDASIDVAAAHRLDPAGREAPGVSQQGAAVSASTVRRMAPDPSDGARGAAGGPVGLVAFKFRLYPSPEAARLLERYAAAERAIYNRVVEYQYELRALQQRRRRHGGRMGLPRAEFDYSDINAWAKAEAPWLVGIPGSVRSQAERIAYRALVDSLRLQGRRQARFRRRGGGTDGFSWQAATASGEVRKINKRWHEVRLPRARCAPVVWCRVRVDTGREPPAAAYRAGKVLRITRDAAGTWWLTMTAPAVPERAAPAGSSCGLDLGVIHTLTLADHTGRVLHLKMLRPLSDAEARRLVDLQRSQSRSRLANPCEQPPCPHTSGSCWRTSRRYQRRRVEIAVLRRRARRRAHDWIENVTTRIADRYHLVGVEDLSVRALTASAAGTVAAPGRNVAAKRSLNRGIREQRWATILRRLDDKVTARGGQLMRVRAANTSRRCHRCGHTAAANRTTRALFCCVACGHRDGADANAAQNIHDLALQGHPPARGGTATAPTGATPAETDAEARPEAADDASIAPAA

SEQ ID NO: 28460 - protein, 448 aa, Chloroflexi sp.
MRICVSYAQHSGTYALPLLLLESVALSFWMSWSGKNCNACNGKETSAMLLTKKIRLEVTKEEAEALEFMQAKCRGLYNWWVMRLRNSEQWPGVYMAKKTLQESKQYDPELDWVYGKLLHEVFYRLDNAMQAFFRRVLAGEKPGFPRVRPRHNFFTLCYPAMYLKIMGNVLILPTGSKGKHKRFPNIMARLTEQPPAGFREVAISRDARGNYYASFSYRAQEQERQAGAVVAFDLGIKTLATGMNEQGKVYHVGGFKGARWYNKQLDKIRSKRDKCKKKSRRYLYLSRVYKRVSEKKRRKQKDCLHKASHLIAGKLVERTVVIGDLSQRQMVMKAHQERNKHLNRAVLNEWGLYGFVQMLVYKCVLKGKELVFLDERNTSKACSGCGHVQPMPLYKRTYMCTECGLVLDRDENSAINILSRYFARLGPHVADATRCAAVFTVINTSQHV

SEQ ID NO: 28461 - protein, 396 aa, Aerococcaceae sp.
MLQGKKIRLLPTPEQEVLFKKSAGVARWAYNYAITRDHETYEAYKEDPTKPKYISEGNIRKEITQLKKTECPWLAEVGSNVAKQAVRDWNTAKLKCIKGLARAPRYKSKTRTTPSFYVNYESFRWKPKGFQGERLGVVKTAEPLPKIGKNQFYYNPRISYDGKYWYVSFTYDAPCTFDESLTNEVIGIDLGVKTLMTCSNGGTVDNINYSKRVKQLTKRLRRYQHHLSRQLTANTTSFKVINGHRKPIWKRPIEECCNIQKTIQDIKLIHRSLTNIRNNHIHQATTHIVKQLPKAIVIEDLNVSGMMKNKHLAKAISNCKFHTIRQQLEYKCARMGIELVVINRFYASSKLCSGCGYKKQQLKLSERTYKCECCGTILDRDFNAAKNLQACYSQVI

SEQ ID NO: 28462 - protein, 405 aa, unknown
  TnpB Polypeptide
MQHRQAYKYELMPDGEQARAMRCFAGACRFVFNKALALQKENHEAGNKFIGYVAMAKHLTSWRNGEETPWLKDAPCHPLQHALKDLEQAYKNFFARRAEFPRFKRKGCCDAFRYPDPKQIKLDQTNSRLFLPKLGWLRYRNSRDALGEVRNVTVSQSGAKWFVSIQTQREVDVPLPTSTSAVGIDVGIARFATLSDASHIAPLNSFKKHQRRLARYQRRMSRKVKFSNNWKKAKARVQKIHTGIANARKDFLHKATTTISQNHALVCIEDLQVRNMSRSAKGKVEQPGKKVAQKSGLNRAILDQGWGEFRRQLAYKMSWNGGMLLAVPPHHTSRTCPSCGHVSKDNRQTQSKFLCVDCGYENHADVVGAINVLERGYRLFACGEPAQSGRSTKQEPAEATTQVIA

SEQ ID NO: 28463 - protein, 419 aa, unknown
  TnpB Polypeptide
MNCRPFLETSIDFSTYTMYNISVKTRYRFRFYPTDAQAQELSRVFGCCRYIYNWALRLRSEAWRTEQKRINYYDTSKMLTVLKRQEETKWLSEVSSVAIQQALRHLQTAFLNFWAKRGRYPSFKKKRNKQTAEYTISAFKWDDVNKNLVLSGLGRLNIRWSREFKSSPTTVTIIKKPSGRYFVTLCLDEEVEKLPKTGKTVGVDLGVSRLATLSNGERIANPRYLGGNLSKLARLQRVLARRKKGSGRWQRQRVKIARLHEHVGECRANTLHKFTTDLVRQFDVIGIEDLNVRGMSSNHCFARVILDVGMGAFRQMVEYKCERYGKEEKLVDRFFPSSKLCSTCGHIVELLPLDVREWDCPKCSAHHDRDENAAKNIDMAEGHSVTARGGGVRRLRASAPRRTLCRSVNQLGATCALHN

SEQ ID NO: 28464 - protein, 420 aa, unknown
  TnpB Polypeptide
MNYDHRYRLKPTDDQRETLDYHRDTCRQLYNHALYRFNQIPESEGTVKQRVRMVRDELPDLKDWWDALTDVYSKVLQPTVMRIAKNIKRLGQLKQQGYMVGGLRWKSPREFRSFTYNQSGFELDKKSGQTVLSLSKLADIPIELHRPLPDDATIKEVTLKKEKTGEWFAIFGIEMEAEPPAKPPLDDIDAENIVGIDVGILKYAHDTDGIAVESLDLSDERKRLEREQRDLSRKEYGSKNWERQRRRVAKCRLIIKRKRRDFLHKLSKYYAREYEIVVVENLDVKGMLESPGNSRNTASAAWYTFTLMLETKCEHEGTHFVDVDPAGTTKERASCGVETNKPLWVREHSCPACGFEANRDANAAGNILSRGLSKLGVGHSEDTPVETALPVGTAVVPAKRVVETGSPCLKEPPKAANRQG

SEQ ID NO: 28465 - protein, 382 aa, unknown
  TnpB Polypeptide
VEKSFEYRIYPNRQQVQLLARTFGCVRLVYNHFLEEKIKVYKETSQSLKYGDCCRMLTQLKRLEDTAWLSEVEAAALQQSLRDLDRAFKNFFTQKWVGFPKFKKKMARKTYRTTYGKIIDESHVWIPKVGRVKARISRPVEGRIVSATIKQVPSGKYFIVFTCVDIPEPSKSNAGKVVGIDLGIASLVTTSDGEKIEGVADTRKLEKKLVKEQRKLSRKKKGSNNRAKQKIKVARVHEKIANKRKDHLHKVTAKLISENQVVCAETLNVNGMMKNHRLAKSIAMQSFATIFSFLEYKAKEKGKIFIQVDRWFASSKTCHECGVKMDAMPLNIRSWECENCGAKHDRDINAAKNILAEGIKILNGTEGHSGTTAESFAVTLVE

SEQ ID NO: 28466 - protein, 380 aa, unknown
  TnpB Polypeptide
MEKGFEFRLYPNWQQVKLLARFFGCVRWVYNFFLRLCIDTYEKTGKSPSIYECMRMVTELRKAEDTAWLAEADSTALQQSLRDLGKAFGNFYKRRNQGVGFPKFKKKMARKSYRTTKVRIIDSNHVFIPKLGMVKARITRPVEGRIVSATIKQVPSGKYFIVFTCTDIPEPPKAKTGKATGIDLGIKTLVTTSDGEKIGSLEGTEKLEKKLARQQRKLSRKKKGSNNREKQKIKVARVYEKITNKRKDHLHKVSAMLISENQVICAETLNVDGMMKNHHLAKSIAMQSFATFLGFLEYKARLRGKTFVQVDRWFASSKTCHSCGVKADEMTLNIRSWQCENCGAKHDRDINAAKNILAEGIRILNGTEGHSGTAAIVVAA

SEQ ID NO: 28467 - protein, 405 aa, unknown
  TnpB Polypeptide
LALFVVLAVKSVWQYYVPPGDVRQLLDVFRRMVNDSIRIGLLNDASSLRRLSLLSYNQLAHHDSPSYYKLCAISRAAGILAARKRSVRRGYATRTPYAVRQQLVSCYGFKIENGGLKIPVSRGRRFSIPLTKHVLEIISRPGVKVRSFTLTQNRLSLCIARDVPTVNCASTVGVDRNLRNLTVGNDQETSRYDLSKCVRIASTTTRIMASFRRDDDRIKTRIASKYGRRRISRTHHLLNNATKTIVALAVQRRTAIVLENIEGIRSLYQKGNGQGRKYRGRMNSWSIGEAQRQIEYKARWVGLPVIRLSRRETRGSSVSCPRCGERLQSDKRLERKLWCGKCRVVMDRDMVAAINLSRRGRVRFARSQPPIIEAQGRASEAMKGNPTPTVIPGVDAPKLTHQTKS

SEQ ID NO: 28468 - protein, 390 aa, Chlamydiae sp.
MKILKGFKYRLRPNRKQREFFAQFSGCARYVYNRGLERRQEVYEKEKKTLRYFDQNKELTAWRYEIDWLKSCHSQVLQQSLKDLNSAFDHFFRRLKKGGEPGFPRFKRKGDGDSFRFPQGFKLDESRVYLPKIGWVRFRKSREIEGEIKQVTITREGDCWSVSFSVEIERAIPEVIPTLERSVGIDLGCSVFAKLAIGESNLSGEIGHPKYLKSLLAKIKRYNHILSKKVYKSRNYFKFRKKLAKLHRHIRDARADFLHKVSTKLTQNHDQFFVENLHVKEMLEAGHTALRRAIADSGWRKFLDFLKYKAVELGKHFKELSPYFPSTQLCSCCGRRKKLSLNERVYTCDHCGLSLDRDLNAAINLKAAGASVVNACGATWCSAEAGISRL

SEQ ID NO: 28469 - protein, 419 aa, unknown
  TnpB Polypeptide
MRIGHVHVAKLTPAQQALVADEGPWARACRDVWNAALQERLEALRVARGRTMPKGWWPTYASQCRGLTEAKQVAPWLAEAPHHVLQQTLKDLDTAWGAWLYERRAGRPRFRARKRSARNWWAPSYRFPDRKQFTIRRLNRRWGDATLPKIGTVRFRWDRDLPDDAQVTNVTLKRDRVGTWTVAFALDIPDVEVAHPNPGTEVGVDRGVTVLAATSDGQLLDRELLEPDRDPERRKLGDDLLTNGERTRLSRLERRKARQQRGSKNQARQPPDRQTATAAGPPPHRPGPQDLRPPGCRLRDRRRRTARRGCDDGVRTRHRRTARHEGGAETGAEPRDRVEGLGVQHPPAGLQDRPCRWPACRGRRCLHVTDLPCLWAHRPCVAREPSAMGLCRLQPPVPRGCERRDQRPDQSRPGWPGTA

SEQ ID NO: 28470 - protein, 402 aa, Escherichia sp.
VKRLQAFKFQLRPGGQQEREMRRFAGACRFVFNRALALQNENHEAGNKYIPYGKMASWLVEWKNATETQWLKDSPSQPLQQSLKGLERAYKNFFQKRAAFPRFKKRGQNDAFRYPQGVKLDQENSRIFLPKLGWMRYRNSRQVTGVVKNVTVSQSCGKWYISIQTESEVSTPVHPSASMVGLDAGVAKLATLSDGTVFEPVNSFQKNQKTPARLQRQLSRKVKFSNNWQKQKRKIQRLHSCIANIRRDYLHKVTTTVSKNHAMIVIEDLKVSNMSKSAAGTVSQPGRNVRAKSGLNRSILDQGWYEMRRQLEYKQLWSGGQVLAVPPAYTSQRCACCGHTAKENRLSQSKFRCQVCGYTANADVNGARNILAAGHAVLACGEMVQSGRPLKQEPTEMIQATA

SEQ ID NO: 28471 - protein, 220 aa, Oscillatoriales sp.
MGVQQVLLSPTKEIKALLEYLCQQSGKLYNSGVYLARQTFFKTGKLLTGKFDLSFESSVAKSMVAKSLPSTPMQQTLMSVTEAFKSFKEVRDLYIKGQLHFKPKPPGYLTGSKLFKVVYPNSGGLRPKLVGNQLRFSLGLTVRRWFGVSEFFLPMPSNLDFSKVKEFTILPKNGAFYLEISYEVEKQQHNLDIGQALSIDLGTADNKASLCRYIRKFFFD

SEQ ID NO: 28472 - protein, 543 aa, unknown
  TnpB Polypeptide
MNKEVLKMLREKKSNSDFVTVECLLAFDKDDDKRRVLTLMRKFSSMVRFAYKRLLHGAERKELKKLLSRKHGINARYSDDAILLAQQALDSCVERGQNPKKLVFGSRELFEQLKKKHLTGKRRDELRQKWGERRYGVLYSRGEKSKEGNLNLRLANLNNQWYLRINLGNGEYVWAKVIRSAKRKTDKWIAFSSDLEHAEKTGDWFPYTVRLKLRNGKIYAQFSREEKLPEVAITKDNGVIGIDINAYPFHLALVHTSKDGNLGKYEKINLDKLLEGSSEKREYLSWQTAHQVVEIAKRERKAIVVENLEKIPKGKRGDGLPKLRQKLHKWVYKGLLQKIEIVARRNGIQVIKVNPAYTSIIGKLKYAPLYNIDKDTAGAYVIARRGLGFKERLPKNYRGLLKDAEFLSYTIAKIEDKIAKLKQEIREEKNEYKRNRLKSVLWKTRKELDTLLRYFRESGESESATQQTVNRKMERVRGLTHVRQKSWQVLSVALAFSCLESFRDFSPLKRVILTRDWVGAAKRNGLVPLPGQGTTVQNVYSFV

SEQ ID NO: 28473 - protein, 195 aa, Psychrobacter sp.
LTVGIDLGISHLLVLSDSSKVDNPKHLAKASQRLSIQQKIFARKQKTSKNYQKQKLAVARIHEKVRNQRLDLHHEVTYKLICENQATSYAIEDLGVKNMVKNRKLAKAINDVGWGQFVTLLTYKANWYGKNVLKVNQFFASSKICSHCHHKLDSLPLSVRHWVCPNCQTQHDSDINTGNNIRQQALADVAGLATV

SEQ ID NO: 28474 - protein, 402 aa, Escherichia sp.
VKRLQAFKFQLRPGGQQECEMRRFAGACRFVFNRALARQNENHEAGNKYIPYGKMASWLVEWKNATETQWLKDSPSQPLQQSLKDLERVYKNFFRKRAAFPRFKKRGQNDAFRYPQGVKLDQENSRIFLPKLGWMRYRNSRQVTGVVKNVTVSQSCGKWYISIQTESEVSTPAHPSASMVGLDAGVAKLATLSDGTVFEPVNSFQKNQKTLARLQRQLSRKVKFSNNWQKQKRKIQRLHSCIANIRRDYLHKVTTAVSKNHAMIVIEDLKVSNMSKSAAGTVSQPGRNVRAKSGLNRSILDQGWYEMHRQLEYKQLWRGGQVLAVPPAYTSQRCAYCGHTAKENRLSQSKFRCQVCGYTANADVNGARNILAAGHAVLACGEMVQSGRPLKQEPTEMIQATA

SEQ ID NO: 28475 - protein, 395 aa, unknown
  TnpB Polypeptide
MLVQKTLHVVIDPDPDLRETLDAFTAVCNQISPTAYNSGKPLNALRLHKAEYRAVKGALSSQLTCTAIRLTAGAYVAARKNGHDITHPFRWKTPYALFLIGKRGRDASFKSGNTLSIWTVKGRKHLAYQVPDVFRDAFDRAHTIDSVVVVPKGDRFIGHVCVTLEVPDAPGIVPVGVDLNETNAIVAVDADGRTLFITGLHRRVLNTRTRKTNARLQTKLEAKKAEGKNTRSVVRALKRLSRKRSRRTRDFCHCAAKHLVEWSPQNCMLVFEDLSFPKKKGKESQKKRSKASNRRLSAWPRGMIRAVVAYKVAGKGETAEVNPAYTSQTCSRCGLLGVRSRHSFSCPHCGHTDHSDINAAINIRNKFTALRDSGVPSTTPGASSGGKPPVSTGGS

SEQ ID NO: 28476 - protein, 398 aa, unknown
  TnpB Polypeptide
MGIRKYEYRLYPKEKQIIRLEEHLRLGAEMYNRLLNIYKEEFLKNEIKLGRYDLEYYITLLRREYPQYRAMYRITLNCLAKRLSWGLMYYFRRMAEWKEGKCKKPGMPRYKSFIRSIEFAAMSVKVLDKKTVKIGRIGKIEAVLHRDLTGKVKEVTVLRKASGKWFIIFTCDQEDEVEPRIDRREVGIDMGLINFATFSDGKVIENPHFLLKTEKRIRRLQKDLSRKRKGSNNWKRSKQLLAIAYERVENQRNAFLHKVSREVVDTYSLIAVESLGISRMIVGQTTAKAISDVSWYKFMRMLEYKASSAGAQLVRIDTYSPTSQTCSECGERRRMQLDERTFICPNCGLTIDRDLNAARNILELGRAGSARIHAGGDGANTSLVREKRAPSLKQELYV

SEQ ID NO: 28477 - protein, 415 aa, unknown
  TnpB Polypeptide
VIEATRTVVVPSVKLTERKLAVFKELEELYRQILVELVDYGFRNNIDSFTRLKRDKYRELRRRYPHLPSHYVHTACQDASTRVKSFNKLKKKGLAKSEKPEVSRVSIWLDDHLWRRVGYTTILIYTHRGWIPVELVPHKLYWRYINNGWALRTQPKVKIDYRRKRLLVYFVFAKAVNVDESGVKHVNSVDVNEDDVAVKVLGKVYILETGIKRLTIGYARYREAVQSVKGNGYVGRAIHGRERKRKRDIRLKIANIIANTAKNLNAIVVLEKLPKQCPRNMIKGVKDPALRHRIYQAGFRGMIRAIEEKCLERGVPVAKVDPRNTSSKCPFCNSKLMRGDAPRQLKCPRCGFRAGIDVIAVLNLEKKYLTLKGLVSLAPMPDEPTLEVAVLPMKEWARRKSLDATNKHKLMRMSI

SEQ ID NO: 28478 - protein, 542 aa, Streptomyces sp.
VGGLREVADPFVAPGPTGVAIRTGLKGLAGQDVMALRLVGGQMGSLASRDLKARCAAGLAHDSDQWAQRKRALTGQSSSRWAGSVTKATHDQWALARRGQLAHIQNLQAGVDMITGRLSLPVGAKGCKGSPGGYRSRREWFAKSRRLRLLEDWLERERADREAGRVRVVRGGRKLLRNRHNLQAAQMSEAKWRVRWEAERWFLRADGESGKRYGNETIRVSPDGEVSIKLPAPLAGLANRPHGRYVLACRVGFRHRGEQWADRVAANRAVAYRIQYDVERDRWYLTASWQTPPVRAVPLEAVRSGGLVGVDTNADHLAAWHLDIHGNPVGAPRRFDYDLTGCASHRDAQARHALIRLLHWAKRYGAAIAIEDLNFQAEKTREKHGRRKRFRRLISGMPVSRLRGRLVSMAAELGITVVSVDPAYTSRWGAQHWQKSLTGKRRKTTRHHAAAVAIGRRALGHPIRRRTAPPPHDRSDRAGHRTVQAASGIPGREETRPRVPGPRTRSVGAGRGAKAGDQCAHNRLGHTAEHESWHQDSLPLSH

SEQ ID NO: 28479 - protein, 312 aa, Streptomyces sp.
MRGIPFACSPDQLKTLVAHRKGESDLVCRGGKWFLIATCDLPDPEVYEPVDWIGVDRGIVNLATTSDGTNYQGRRLSRYRRWQARKRAELQRKGSRSARRRLARRKRKEQRHATHVNHRVSKEIVSVAQRTGRGIAVEALGGIRERVRLRRDQRGALSSWPFHQLGQHLAYKACKAGVPFLEVDMAYTSQRCPRCGHTERANRPDRDRFRCRRCGSLALPMSSLGSTCAIAHARRGCLSPHPHPPPDSCWGWVDATRDRPVVGGSRERDEVCTTERNKRPCTTEKVTHTGYGTPRALVHSPRSASTASTVSA

SEQ ID NO: 28480 - protein, 268 aa, Okeania sp.
MSEIKIPTSQTEIIEARIIPKSSCYIIEIVYEKSESKTENQQIAGVDLGVNNLMAVTTNQTGISPLLIKGRPLKAINTFYNKQRSVLQSQLKTNHNRYNSHRLKKLTHKRNCRVENYLHIASKRVIDWCINHEIGRLIIGQNQNWKQEIKLGKKNNQQFVNIPHYKLIEMLTSRAKLRGIKVIITEESYTSQSSCLDGDDLPKYGDEKPDFSGKRVKRGLYQTREKKLLNADVNGSLNIIKKVIPDVFDQGIKGLPFNPVVVDPLAFD

SEQ ID NO: 28481 - protein, 442 aa, unknown
  TnpB Polypeptide
MQIISSYGVELRKQNIPIRQTLEIYRSAVSYLIGIYVQVWEELAEIPDAKRRFNAAEHLVHTTKKNHACFDFDIRFPKMPSYLRRSAIQHALGTVSSYKTRLDLWEKTDGKSGKPKLVYENHAMPVFYRDVMYREGAEGKDEAYLKLYDGHDWKWSCVRLDHTDMEYLRKCWSGKKASAPTLEKRHRKYFLRFSYKEEVTLTKTPVKEQIICSVDLGINTDAVCTIMRADGTVLGRRFIDHPSEKDRMYRTLGRIRRFQREHGSAQTQGRWAYTKRLNTELGKKTAGAIVRYAEENHADVIVFEYLEMQGKISGKKKQKLHLWRKRDIQKCCEHQAHRKGMRVSRICAWNTSRLAYDGSGAVTRDWENHSLCTFQTGKRYNCDLSASYNIGARYFIRELLKPLPATERSLLEAKVPPVKRRTSCVYADLRKLHSEMERLKAA

SEQ ID NO: 28482 - protein, 352 aa, unknown
  TnpB Polypeptide
MITVQVKLLPTGAQAVALRQTTAEYISAANDLIDYCNTQTSMPRLSSATFRAELPSCVKSEVTLVVKSILQKHRRAKCNSLPVLRKPVATWNNQNYRVDEHSIAFPVWVGGKSQRIAVRAEITEYQHERLTGKLGALRITQKNGKWIAQIAVAETVSAAPGGGVMGVDLGLKVPAVAVTDTGKTKFCGNGRMNKYQKRKHRAKRRELGKAKKPKAIKKLNNKEQRWMRDQDHKISRQIVDFAIEQGASAIHMEKLQNIRQTARTSRKNEKNLHTWSFYRLAHYIEYKAKMAGIAVEYVDPAYTSQICPVCGAKNHAKDRNYKCGCGYSAHRDRVGALNIIYAPVASGNRKSA

SEQ ID NO: 28483 - protein, 365 aa, unknown
  TnpB Polypeptide
LKTFQTCIRINETTFGFKVQKGEYLAYEVVLPLSLRKNLTGKITKPRFLKRKRDGKYVGHCSYEVEIEPSEGQNILGVDLGKKKLFSSVVLYSDGSYSEEIVNSRLSSTVDEKFKRKKKDLDKLLNKNRVLEELINGDLNLFNSHLEEIRQNRIGQIIELRTNMLRTKRNQAKQIAGEIVSIAKENDCKEIHLENLSWLESQGGRWNHSEIQDFVTEFAELKGIKVIKVCAKHTSSAHPITGELGRKSGRNVRFSSGDVIDRDLLASINIAKRNKRNQKENKITKLRKNHTSTPKKVKKPSNRKVSLAIKNKLLEKNQRGTKIVVFYPRQTCKGTWEVLDISSKPHMLSLFMCHLRHPMSICYMT

SEQ ID NO: 28484 - protein, 406 aa, Thermoprotei sp.
MRVKVTAKVKAVTPNLSHHTKLLQFLRAYRNWTQYIVDQVWELDHVPSIRELHQRFYRMLRNRGFRAHHCHKIERRAREVVKATKKNKGTKPILRKLTARLDYQDYRLDAKNKILIIAVLNNEWIELKLVWYNYLSRYFKGKWKLKEILVSYREGMIWVYLTFEKEVKPKKSTTIMGIDINFNNITYTIVDKDGKLVSMEVIPFDGLKRALTHRIISEKIQKKYGKKWRFVRGIRESIRKHGRRARNILTDSCHFISRKIVEIAKEYNAMIVLEDLNRLRSKASGSKKFNKKLALWTYRRMQAYIHYKALIEGLMVTYVNPKGTSKASPIGDRLVFINYRWVKLPNGVITTRDIVASWNLALKGLKLARDVGSRGLVETPNTPDGDEAPNPMKGKPVQVSNTLKIT

SEQ ID NO: 28485 - protein, 341 aa, unknown
  TnpB Polypeptide
MADRSFRSFFGLLQKVRSGDYGSKDVRLPYYREKGGWFPLVLSTNAINIKKGFLTVPMSREYAKRHNGHRIRIPVPDRLKDKTIQEVRICPMYNGRYFKIQYCYLQDPEPMKTLPDCVLAIDLGLDNLAACVTNTGTSFLMDGRKLKSINQYWNKRKARLQSIAAKQGQKTTNQLCQLAKKRNCRMQDILRKTARYILDFCISHQIGTLVCGYNRDFKRGLKLGKVTNQHFTQINLSYLRNTLKHLCERYGITYLEQEESYTSQASCLDLDDIPVYKPDAPYTGTFSGKRVRRGLYRFADGRMANADINGAANILRKSKQNLDFEGLCKGLLDSPLRIRLS

SEQ ID NO: 28486 - protein, 383 aa, unknown
  TnpB Polypeptide
VKVSEKTNRRKLLLLEELYNKYQVALRLFYNYAKDNRVHELKKRTLIEKELQKLYYTVKESLNLHSQLVQSARRDVVDDIMSWLKTGGEFPKLSEKPLTLVYNRSYYLFEQGKEFRLWAKICGESYPLALGDRQFELIKKAVKIGEAKLVRIQEEWYLYISIEIREKDQIKPEGVLGVDLGLRNSAVVTASRPRFINHKKLLHRIVYYWKQIDRLKSKLPKGKRSSRRIRRLWRKIERINNFIAHDTSAKIVKIAVQRQYAIALEKLNFQTNKGYNKEWSRKLSNWIRGKTIRYVEYKARLNGIPVIKVNPSHSSRICHICSGEGERFSSRFRCKVCGREYDADFNASVNISRRATSLLAGLSNPARRGLRDEPTKLPTSVAE

SEQ ID NO: 28487 - protein, 421 aa, Burkholderia sp.
MLTAHKIELAPTAEQLDYFRRACGTDRFTWNWALAEWNRQYASGMKPNAMRLKKQFNALKYAQYPWLKEIHRDAHADAFARIGKAWTKFFTELKRGEEAHTPVFKRKGRCIDSFYVANDKLTLEERSVRLPLVGKVKLKESPRFADRLLGATVIREGTRWFLSVQFDVSVTLLAAKPERDVIGVDLNVAQIVCSDGTRYKTPRPLKVMTRRVKLRNRSVSRKTEAAKAAMGLSGQAIPKGTRLPQSNNQRKASQMLSSTHFRVGCIRRDFQHKTTTDIARKTHAAVVENLSVKGMTAAARGTAEKPGKRVRQKAGLNRVILDVGFYEIRRQLEYKLQRFDREIYIADRFFPSSKRCSCCGRINKDLTLKVRTWQCATCGAVHDRDDNAATNLELWATDSKLREAFAKVTPVSTGNQPGSRV

SEQ ID NO: 28488 - protein, 362 aa, Microcoleus sp.
MIPMIVTRRATFRLYPTVRQEKQLGKWRSMHQQLYNAALYHRKTEYQRFGRSISYLDQQNCLPEYKKEWPEYVELGSQALQATLKRVDMAFQRLFQGLGGYPKFKSIRHYSGWTYPGIAGWKAHRTGKNGFLNLSNLGQIQMRGEAKVWGTPTTCTIVYRSGCWYASITVNCTPHKRELGTGAIGIDLGTKTAAAISDGTEGYFIENPRWFQSILPKIKAASKQKRRKRAPNRKKKVKASRRWKKSQKKVTKLYQKAACQRQDWIHHVSTQIVSGNSLVATEKLEVNNMTRKAKSCSKRKRQKAGLNRSILDVGWSGLTSSIRYKLEEGEGVFIEVPTRTIKPSQTCHKASCKNKLYKFYLK

SEQ ID NO: 28489 - protein, 374 aa, unknown
  TnpB Polypeptide
MANRALVYTIYPNEKQNIQCQKTFGCCRFVYNQMLDVQKERHENGEKHLSKTKANTYCNQHLKKKYPFLKEVDKFALTNAIYHLEDGYDRFFKHLSRFPKYKCKHKTKRSYTTNITNGNIEISDNSIKLPKLGWVKAKIHHRPKEDWKLKSATVTQNRDDSYQVSILFAYEESISPAVVTKETTIGLDYKSDGLYVSSEGDTCGMPHYFRQSADKLAKAQRKLRHKTIGSKNYNKQQKRTAKIHRHIANQRKDFLQKKSTEIANQYSFVCVEDLNMKAMANRGFGNGKATLDNGYGMFLTMLDYKLRDRGGQLIKVGRFFPSSQLCSHCGFKNPLVKNLSIRHWDCPNCGTTGIDRDVNAAKNIKKEGIRLLTA

SEQ ID NO: 28490 - protein, 427 aa, unknown
  TnpB Polypeptide
MNRSYEYRLYPTRTQRGRLHELLRACRTLYNAALQERREAWKRRGLSIDLVSQCAQLKTIRAAGDPLAQFSHTTAIQVLRRVDNAFRAFFRRVKTRNGKAGYPRFKGKHAFTSVACIFGDGVGLRKDRLHLTGIAGGIKIKWHRPLPAEARIKMATVKHDARGRWAVCFQIEMPDTQAPIHAGPAIGLDVGLHALLATSDGDLIDNPRWYRAAQAKLAKAQRVLARRTLRSTRWRKQRRIVAHQQEHTATQRKDFLHQVSTTLTRQFALIAVEDLRIQNLVHGTLAKSIHDAGWGMLRVMLTYKAVSAGGQVIAVAPQGTSQQCSRCGATVRKDLAVRQHQCPACGLTLDRDVNAARNILARALASCAARTEPSVNSPALARCSREAPDLSSGESSRQWPADARPQRTGPRRPAEPRRGLLALPDHP

SEQ ID NO: 28491 - protein, 427 aa, unknown; identical to SEQ ID NO: 28490
  TnpB Polypeptide

SEQ ID NO: 28492 - protein, 350 aa, unknown
  TnpB Polypeptide
MIRRVQFSLNEANQGKLDTLDKVFKEGLRVVNLYIDHLWEKQDFASKFVTVKVETWMSARMQQCLGKQALEIVKSQRKRRKKTKPVLTRNVLNLDSRFLETQFDLNSFDVWFKLGSIGNKISLRLPSKKHAHFHNKMKNGGVLKKSCRLIRREAGYFVELFVEKVKPLERAEGKTVGLDCGYKTMLADSEGVEHGVELEAVYEKIARKKQGSKAFKRSLVERNNTINRVVNKMSFKGVKALVVEDLKNVKKNSKGRIRKTFNNKLQRWSYVRVLHKLALVCEELGLTFEKVNPAYTSQTCSLCGHVAKASRKGKSFSCVSCGHTSDADLNAAVNIRNRGTYSFPALQPKQ

SEQ ID NO: 28493 - protein, 259 aa, Halococcus sp.
MTNATDSEPFQPVTIDSSRLASPLADETAALDVGANNIVAATTSTGKQLLYGGRDLFDRFRETTREIARLQSKLHEGRYSSNRIRRLYRRRTKRRDHAQDALARDLMERLHAEGVSTVYVGALTDVLEASWSVRANAKTHNFWAFRRFVDRLACTAEEFGITVEVRSEAWTSRECPNCGSTDRTTRHKDTLTCECGFDGHADLTASETFLRRHSDTAVSRPMARPVRFEWDDHEWSESPRSLRPKEARTNPQVASVGGR

SEQ ID NO: 28494 - protein, 431 aa, Halococcus sp.
MRRVNVFRVVPRSESDAECLQRLLDASASLWNETNYGRRQYLTDPDIDAPIWEADDHYGEYKGVVGSATAQQVVRKNDQAWRSFFKLKESGEANGLPGYWGNEDEGRALRTYIRKDQYTLRWASGSREQSILDVPVGKQLKEEYDIGYRERLRLDVQGNPKWDGEAGQLELYYDEMSDQFRAIQPVTVEDSRLDSPLADESAALDVGANNLVACSTTTGTQLLYEGRDLFDRFRETTHDIAEYQSKLREGRYSSDRIRRLYRRRTRRRDHAQDALARDLMERLHAECVSTVYVGALKGVLGKHWSVEVNAKTHNFWAFRAFIDRLAYTAAEFGITVEVKPEANTTRECPECGEREDTVRSGDSFWCPCGYEGHADLDASAKFLAQETSGEVGSMARPARLKWDDHRWSELSRSRPNEVRAHQQKTSVGSTA

SEQ ID NO: 28495 - protein, 365 aa, Methanothrix sp.
VDKKDFEKLKGTVDAFQSACNYISQMAFNKGCFDPIALHALVYQKVRAIFKLPAGLAIQARNRVAESYRQHREKLHTFSRNSMALDDRLFSLLRSRDFTVSIATIKGRVKSGLVLGEYQRKILEKPVKSASLILRKAGLFLKICVAYDVPHKEAAVPVGVDVGIRKLLVGSNGFTACGGPFMVRMDQYESHLQTLGTKGTSSAKRRLKRLARKELRWARTTLHQISRRFVESLKDGEYIALEELPETKTSDIGKPCKCKDHPAAFRGWAISRLLSMLSYKCAGAGVPVVYVSPDFTSQRCPRCSTIHKNNRRTQALFRCVNCGFQHNADYVAALNLREQARGGWAAVSQPHAVHKGVDCKPPGSS

SEQ ID NO: 28496 - protein, 371 aa, Paenibacillus sp.
MLINKAYKFRIYPTPEQATLINNTIGCSRFVYNRFLARWRDAFQKTGKGLTYNSSSAELTLLKQELTWLGEVDSIALQSALKYLADAYQRFFKKQNDAPCFKSKKNPVQSYTTQIQGKSQSPEVSIVESRIKLPKLGWVKFAKSREVMGRIIHATVRRSPSGKYFVSVLAETEVQELSPAHSEVGIDVGIKDFAVLSNGEVFGNPKFFRTLENRLAKAQRKLSRRKKGGSNWNKQRIKVARIHEDIRNARKDDLDKVSTHIVKNHDIIAIEDLKVEGMLKNRKLSKAISEASWSLFRKMLEYKCAWYGRVLITVGRTFASSQLCSCCGYRNQEVKNLNVREWTCPACGSSHDRDLNASRNILAEGQRLLQV

SEQ ID NO: 28497 - protein, 402 aa, Salmonella sp.
MMLILKAYKFRLEPTPEQSQRLRQLCGCARFVWNLGLAETKRILGSGEKLPSAFELNRMLTVWKKMPEHIFLQDAYTDNLQQKLKDLHAAWKRCFDKKLAAKAPVWKRKNEGRDSIRFVNFEKYCRLENRRVKLPSGLGWVKFRQSQRVNGKIKNATISQLAGQWYISFQVEVKTAEPNHTSTTIVGLDAGVTKLATLSDGTVYQPVNSFKASQRKLATLQRQLSRKVKFSSNWQKQKRKVQRLHSHIANIRRDYLHKVTSEISKNHAMIVIEHLKVSNMSKSAKGTAEQHGRNVKAKSGLNRSILDQGWYEMRRQLEYKQLWRGGQVLAVPPAYTSQRCACCGHTAKENRLSQSQFVCQACGYTANADVNGARNILAAGHAVLACGGMVQSGRPSETGTRR

SEQ ID NO: 28498 - protein, 372 aa, unknown
  TnpB Polypeptide
MLKAYQYRLYPTKAQISTLNRTFDLCRKVYNNTLALRRDAWDYDQKSFSYYDTLKELVQWKQDYPELKTVHSQVLQNCHMRVDLAFKAFFQRAKKGCNPGYPRFKSFGRYDSITYPQAGYSLDVQNQTVSASKIGKMKVVVHRPCEGTIKTMTVRKSSTGKWYVSFAVEQDLVVREHVGDEVTGIDLGLTTFAMLSNGESIENPRFFQTDENALAKAQRRMSKEVKGSPERGVRRMVVSKIHERIANRRKNFTHQESKKLVDRFKIIAFENLNIKNMQQTSYLAKGIADVSWGMMVRTTENKAVEAGSRVVLVNPKNTTQFCSRCGQYVRKELSDRIHSCPQCGLVMNRDQNAAINILRLGLQSLSAFHAHE

SEQ ID NO: 28499 - protein, 493 aa, unknown
  TnpB Polypeptide
VYNAVLGEFLGRARAVKADPAWAAARGLPRRGNDQRRSCGAALGAVEAADGFDRGAAQSYASVLRKVWVREQMPAQEAQNLGARAFDAVQQWHVGKRGKPRFKSVKRGLHSLASKDGHGALRPKTDAVGRLVGLQWGAGFVIPIVPAAAGGRRGKEQLAELGEIEALIAAGKVLSARIVRNTINGADTYRMQLVCDGSPARRHVVGDGRVAFDLGPSEIAVAVQRADGSWSGWVESLAARVRSDTARLRRAQRKLDRRHRAGSPDCFGPEGIHKTGGCRWPRSGSAKKTSVRVAEQHRRLAEHRKSLHGRLVNQLFGHGTDVACEKLDYRAWQKNFARSVRDRAPGLLVEIVRRKAESAGGDRLYQFNPTTTALSQTCLCGRKQKKPLSQRVHRCECGIEEHRDIFSAYLALHVRAAGDGSDRLDLQAAQQGWLHRQDVDGSPRTSRSPCKRRGRRHPPSRRSVARIKARRAARRQSRSARTSHTNRPTAIPT

SEQ ID NO: 28500 - protein, 386 aa, Ignisphaera sp.
MSSGDEGLLTLTIKMRVSLEPSLFKELVSLMKRYREALNHAIKVVIENKALSLGKAHKLLYSILKERYGLPSKIAIDCYREAIAIAKSWLGNPNRGRVPGAKTPRLWLTNKYSYRVRDSYVEILGGFRLRIIGWDKRYDAYPNGDAILLFKDGKFILGISKRVPKPAKYIPRGILAVDINEKHIAVGNSKTEHRFETAIRRALHYKHLAEELQKKYSSPKCSAWLRRRGILNRVRYFHRKARNIIEDWAKKTSYRLVSMAKQHQYAVAREYLTGLIESVRKLPKEHRVGLTILSYRRLEQWIDWQCEKNGVPIIVVEPRGTSIACPMCSSKLIENGYRRLRCSRCGFEADRDTLAVLNIERRALVQMWGALTPLNASQMTDVSPNR

SEQ ID NO: 28501 - protein, 226 aa, Oscillatoriales sp.
MLVFESKLEGTSEQYERLNEAIRTARFIRNSCIRYWMDNKGVGRYDLSAYCAVLAKEWTFAAKLNSMARQAAAERAWSSIARFYDNCKKAKTGKKGFPRFKKYETHGSVEYKTCGWQLSFDRRSINFSDGFQAGSFKLWGTHNLHFYQLNQIKRVRVVRRADGYYAQFCIDAERNEKRSPTGKTIGLDVGLTHFYTESISDAAWTAFRNWIEYFGKVKVLSPKWVD

SEQ ID NO: 28502 - protein, 486 aa, Oceanobacillus sp.
LIWGISFVPSCLATTSLGKEFKIARMVYNSCLGETLKRHKAVKTDKLYRALLRETKSKERNKKLADIRLNYDFSECGIHHFVKEVQSKFKEHIGSLEAQKLATRAFQTVEKLHFGKSKKVHFKNSNDDISVENKSNKTGLRYIEGNILWGDKPTKKNPKPKNWLCMPISPKDDDEYAHLALLDKTKYVRILKREVRGKIRYFVQLIQEGCPPVKRNREIANDETKRIGLDIGTSTIAICSESRVELRELAPECHNDEKEIRIIQRKMDRSKRSTNPNNFNENGTIKKGRLTWTYSKGYEKLRQKHRELYRKVAVQRKMSHEKLANDILALGSNIRVETMRFQSLKRRAKNTTRNHTNGRINRKKRFGKSIANRAPAMLIEIMDRKLNYQGRLIKKIDTYATKASQFNHLTGKYEKKQLSERWNDFGEFHIQRDLYSAFLIRNTNETFDSVDIDLCNTGWNNFIELHNCEIERLKHSASETIRWFVT

SEQ ID NO: 28503 - protein, 338 aa, unknown
  TnpB Polypeptide
MTCNQMSKELTILKQQEHLKWLKEPDKYALQNSLKNLESAYENYFREIKKGNKNQGFPKFKSKKDNCKTYRTTRSYRKESNTYNINIKNNKIQLPKLNWMKFKNSREIKGKILNVTIKQIPSGKYYIYVCCEINIIQKVTTILNNKIGIDLGIKEFAILSNGKKVNNPKYQKKYEQKLKNQQKILSRKQKGSNNRNKQRIKVAKIYEKINNCKLDFLHKLSSKLINENQIICLEDLKISKMLQTKNSNKIMNKNINNVSWNKFTMQLQYKTDWYGVIIQKVNQYFPSSQLCSDCGFKNIQIKDLSIREWICPNCGEIHDRDINAATNILNEGLRLLNI

SEQ ID NO: 28504 - protein, 341 aa, Microcystis sp.
MQSLSAAAYLGRWMDTKGTGKNDLYRYSKELAQDFKFADELNSTARQASAERAWSSISRFYDNCKRKVSGKKGYPQFKKFSRSVEYKQSGWKLLSPKTVKFTDKKNLGVLKLVGTWDLGYFQESDIKRVRLIRRADGYYCQFVLSCDVKEDVKPSGKCIGLDVGLASFYTDNNGNKVDNPQFLRKSEKRLKRLQRRLSKKKKGGKNRQKARQRLAKAHLKVSRQRQDFAVKLARCVVHFLDVIAYEDLRIKNLVKNHCLAKSINDAAWYQFREWIEYFGVKFGKITIAVAPNYTSQNCSNCGETVKKSLSTRTHQCKCGCVLERDENAAINILKRGLSRAC

SEQ ID NO: 28505 - protein, 303 aa, Nonomuraea sp.
MLGLGVPPTAVAASYVRLQGVGHVRVHQHRPVKGRVKTISVKREGSRWYVVLSCDDVPAEPLPATGAVAGVDLGVASLVTTSDGERLANPRHLAATADRLAAAQRDLACRKRGSKRRRKAVARVAALHAKVRRQRLDGAHKAALTLVRDYDVIVHEELRIANMTRSASGTMEAPGRNVAQKSGLNRSILDAGWGVFLTVLAHKAESAGRELIAVNPADTSRTCARCGHCVKENRVTQAEFACRACGHAAHADVNAAVNILRAGLALRQAAGAAWREAAPFRERRSHRFMLLHTAGICSCLRDI

SEQ ID NO: 28506 - protein, 378 aa, unknown
  TnpB Polypeptide
MLKRQAFEFEIQPNGAQQRRIKQFCGCARFVFNKALDGQKQAYEADNNTTFSYTKIANQLPQWKKTFTWLKDCHSQVLQQSLKDLERAYCNFFEKRANFPRFKKKGIKERIRFPQGCKLEQHNSRLYLPKIGWVRYRNSRNVVGEIKNVTVRQKCGRFYVSIQTECEVEIAKHQGGEIGIDMGIVRFATLSNGEYFEPLNAFKTYKGKLAKLQRQLKNKIKFSKNWQKLQAKIAKLHHKIANCRKDFLHKISTTISKNHAMIYVEDLQVSNMSKSAKGTVEAPGANVAQKSGLNRAILDQSWSEFRRQLDYKSQWQGGALVAVPPHNTSRTCPCCGHTDKENRPTQAKFECVECGHTENADVVGAINILERGRATVQS

SEQ ID NO: 28507 - protein, 516 aa, unknown
  TnpB Polypeptide
MPCFFEVFLNFLPGLNIAKRLCSHLLADEPVAYAGRVGAEFPRLNRPEEAAALIALLAAVAPLKKRSDLVVLFPILLEAFAQGILVHGFVSMKQNLYAYNPRRRPARRSAPIYICSKSQISVRAYKFRIYPSKTQEKEMMHHLWIAKNLWNELLFHAKQTYANYGRFPTRNSLQIMVKKSGLYSQTQQEIAHRIEMAIWRYCRLKRECKKAGFPRFKSFDRMKSVVYSQKDFWLDKKLEVIPFGAIAIVKHRNVSGVIKTLSLKRESSGRWFAIFSVEEPKGLKATNDGPSIGIDLGLRTFATLSDGTRIANPRHIRRYEEELSFRQRKVWRKKRRSRNRKKAIIRLARTYERLKNSRKDFLHKITRKMAATYSMIALENLACQEMAEQRFGKHINDAGWDTFADMLCYKAENAGCKVVFVNPKETTKKCSNCGKIQDMPLSARSYQCSGCGMLKDRDLNAAENILARATAGHAGSNACGEEREGMPLNETRNREQDSRCATTSLSHEKLEPAERI

SEQ ID NO: 28508 - protein, 400 aa, Lactobacillus sp.
MISANAKNNERRSRMTTVVKGIKLRLYPNKAQIDQLWQLFGNDRFVWNHMLAMAKKRYENNPKSRFVGEYDMNYLLKPLKKEYPFLKVSDATSLFVVNHNLALAYQNLFQHRGGYPRFKSRRSAKQAYTGQSICTVEAKRRLKLPKIGSIRTSKTGRLTNGKIKRYTISHESTGRYYISLQVETEVHHLPKTNQQIGLDLGVSDLAIDSNGVKYGTFDAKWLEKQAQRWQAKFSRRRHQATVAMHQWNHHHKLSKMELNDYQNWQRAKMTKARYQAKIANQRKDYLHKLTTALVRKYDVIVIEDLKTKNLMRNHHLAKAIANASWYQFRTMLEYKCDWYGKRLVVVSANNTSRICSSCGHNGGAKPLAIREWTCQKCQTHHDRDINAAVNILKRGLKATG

SEQ ID NO: 28509 - protein, 384 aa, unknown
  TnpB Polypeptide
MYKQILKAYKIRLYPDDDQQVFFAKSFGCCRFIWNKLLSDKIEHYEKTRKTLRQYPAQYKKEFQWLKEVDSMALSRVERNLHQAYQSFFKQGTGFPNFKKKGVRDSYTTNNQKGTVAVTNNTVKLPKIGHIRAKFPSRLNGLIKSATVSKTPSGKYYVSVLVETVVNELPKTKSNIGIDLGLTDFVVLSDGTKVANPKFLSKLEQKLAREQKILAKRREVAKAQQRKLSESSNYQKQRLKVAKVYEKITNTRKDFLHKLSFNLIKNHDVIAIEDLNVKGMVKNRKLAKAISDSSWSSFVTMLIYKAEWYGKQVVKIDRWYPSSKTCSNCDHLLIKAELPLSVRNWICPSCSQQNNRDLNASINILNQGLLLVKQSKTVGATGLA

SEQ ID NO: 28510 - protein, 451 aa, unknown
  TnpB Polypeptide
MKSACKYRIYPTKSQISKLENVFSMCRHLYNWSLTERDNNYQLWKQAKTIEKSVNPDVKKKVIFSSPMGQLLYGKDEEESAVNILTTIEGIFGIQFTTAWENVRRNINYNYQQDNLPALKKDRPWFKGVHSQVLQDVLWRIDDAFSGFFNEGKGYPKYKKKGQWTSITYPQHSTRPLDDKITVSKIGEIKIVYHRHIPKEAAIKTLTIEKDGGKWFACFSFEVIHTHIEPEQDLSKSIGIDVGLIDFYYASDGSHVEVPKYLRKSEEKLKKLQRRFQKAEKRSKKWYKILKSLQKGHYKVRCQREDFLHKEANRLLKDFDVIIHENLNIQGLKRRPKPKQGEDGKYLPNNAGAKAGLNKSISDVSWGKFFEILKYKALIAGKTVIAIDPKYTSQICSGCRNVVEKSLSMRTHICPICNLIIPRDYNSAIYIKDLGLESLSMDALEAPAILP

SEQ ID NO: 28511 - protein, 424 aa, Clostridia sp.
MRKIIHGEIYSVNFECLDRLVADWSSCYRFCFCRFQKDNLKFNDVRNQAKASYPCLNTRQISDATLAAQALFRRVENKKVIFSGRGNWNRLIKGQISKEEWRNKRDNQIYSRGDITKKQNPNIRLLNKNGDFYIRVTIGHRRFEEYKLFMPAKFKENLLSLFYSREPYNVRLTKKDPTHYRVTVDYETPNPEPKIDFSNGSIGVDVNPDRVAISEIRSDGNLIKSFTILNNRMFFASTRKRNYEINCIVKQIINHALRDNKAIVFENLKFKKEFENQGRKFNRVKSTFVWKKLLTLLEHKSIENAIMYRKVNPAFTSVIGKLKYQKMYNLSIHESASYVIARRGLGFNEKLSLYKYPSKPLKELILDRAGDRTKRIHSWALWRMLRDNYKATLTASQGRLFNLKELNGNPCCKGGNPLGKDVSL

SEQ ID NO: 28512 - protein, 270 aa, unknown
  TnpB Polypeptide
MIRAIRIRLYPTPDQKKYLAGLFGAVRFCFNKALYLKTHFYKVKGVNLHPIHDLKKLIAIAKNTKKYAWLAEYDCMALQESVRNLNKTYSRFFKKEAGYPRFKSRRGEQSSYHCTGVSAGDDFVKVPKMKKIKAVMHRKIEGKVKSITLSMDACGDYWASVLYEDGLTEAVPATCVRQTKTVGVDVGIETFGTCSDGEKIKSPKALKRAEKKLKKAQRAFSRKQKGSKNREKARKRLAKLHRKVKRRRSDFLHKTSRRLVIHGQLPFCKG

SEQ ID NO: 28513 - protein, 367 aa, Mycobacterium sp.
MARFEVPEGWCVQAFRFTLDPTEDQARALARHFGARRKAYNWAVATLKADIEAWRVTGIGTVKPSLRVLRKRWNTVKDEVCVNAETGAVWWPECSKEAYADGIGGAVDAYWNWQNSRSGKREGKTMGFPRFKKKGRDQDRVTFTTGAMRVEPDRRHLTLPVVGTVRTHENTRRIERLIATGRARVLAISVRRNGTRLDASVRVLVQRPQQPNVAQPGSRVGVDVGVRRLATVANEAGAVLEEVPNPRPLDAALKELRYASRARSRCTKGSRRYRERTTEISRLHRRVNDVRTHHLHVLTTRLAQTHGHIVVEGLDAAGMLRQKGFPAPAPAGADCRTRPWALRAGTCPTRRAGTGRRWWSPTAGSRR

SEQ ID NO: 28514 - protein, 350 aa, unknown
  TnpB Polypeptide
VFKSKELNSNRLSRAFYAAVRKKFKLPSQLTCSLFRHVTGSYKTLKTLGKWDLAVFKRPTMPLTYKRDFARNKKGVTILGETFTLQHPSIPETGWKDSKLKRVGKIWYLCLAHEVEIPELKTEGCIVGVDFGIKRLMVATNSANSKTFFFHGGHLEQVRRSIRQHRSAIQAVGTRSAHRLLSRMSGHEAAVTEHLLHVASKALVRYAVTNGARKIVMEDLSNVRDASLSKGKDLRSKVCRWPYASGQFKIAYKAAAVGIETEKVNPKNTSRGCPRCGHVAASNRKGLDFCCQKCGHRGDADRNASENIRLRSINAEQDLALSRSIKPLENSEPFDITTGSCAAIGDSVLV

SEQ ID NO: 28515 - protein, 350 aa, unknown; identical to SEQ ID NO: 28514
  TnpB Polypeptide

SEQ ID NO: 28516 - protein, 264 aa, unknown
  TnpB Polypeptide
VKTDFENCTIFLPKLKNVACVFHRHFKGEIKTVTVSKTSTGKYFVSILVENQKELPKKKPVRERTAVGIDMGVKTFATISDGTTFDNPKHLRSNLRRLRVEQRKLNRRLKKGAKEQSKSYQKQKLVVAKLHEHIKNQRQDYLHKASTNIIRCFDTICLEDLNIKGMMQNEKLSLATSEVGWHKFKTMLEYKAEWYGKNILYIGRFEPSSKLCSHCGHIFKELSLKDRSWTCLSCGTHHERDENAANNIKSFGLRNQPATVNVRQ

SEQ ID NO: 28517 - protein, 184 aa, Acidimicrobiaceae sp.
MPLERTCCEIGIDLGVVNQIATSDGELKKGDHFGSKAQSDLARAQRELATKQRGSNRRRRQVEEVARLHLKIKNQRRNAAHQLSRQLINDYDFIALEDLKITNMVRAPKGKPDPEQSGALLPNGASKKAGLNRSILDAGWGQFISLLSDKAESAGRTVVSVHPRYTSQMCAECHYVDSDNRVSQ

SEQ ID NO: 28518 - protein, 396 aa, unknown
  TnpB Polypeptide
MSRYRLLPTPAQQAVLRDHCAHARYVWNLAVEQHQHWRPGRKGAPGYLEQCRQLTAARTEHDWLRHGSQVVQQQALRDFAQAMAAFFKPGNPARRPSWRKAGRDEGFRIVGRRGQHWDVCRVSRHVGQVRVPKAGWVRFRWSRAIPPGVKSYRVRLDRAGRWYVSFAAIPDPVSAPGNGQVVGIDRGVTVAAALSTGELLHAPGLTARERKRLRRLERRLARARRGSHRRARMRLTIARLHAREGDRRRDWTEKVSTGIARRFDLIRVEDLQIGNMTRSAKGTRENPGRNVRAKAALNRGILISGWGMLVRRLEDKAPGRVEKIRPAFTSQRCSACGHVDPNSRESQAWFVCTACGFADHADVNAARNIAAGHAVTARGGVRDAGPANREPHLLAS

SEQ ID NO: 28519 - protein, 396 aa, unknown
  TnpB Polypeptide
MRYKGIKFRIYPTIDQQKFLNETLGACRKVYNISLDEAIKEYENYKLNNILSKPKVSGFDLTKRLINIKNKEEYKWLYNYSSCALQQKLLDLGKAFNNFFRDIKIKRKTGYPKFKSRFHNESFRLTPMYFKIVDNKLFIAKLSTEIKVKLYKQLPSEPSQVTITRTNSGKYYATFLCKTEPKVTNGSGIVGIDLGVKDFIVTSDNESITNPKYFNKYQNKLKLYQRRLSRKVKGSNNRNKARIKVAKIHETISNLRLDFIHKTTRSLVNRYKTICIEDLNVKGMSKNSKLSKHILDSGFGMFRRFLTYKISDSNWCNLIIAHRWFPSTQICSNCGVKPDEKIKLSIRNWICINCNTEHNRDFNASKNLVNIAKRPEIEDLLIQKFGTIFITESFEI

SEQ ID NO: 28520 - protein, 407 aa, unknown
  TnpB Polypeptide
MSRKLSRAKTKKKRQSQQCKVYEIKVDKSKLSKNSLHHLNMVFVEAKWLYNHVLTQEDITKIDTTILTVPVKVKDGFQKRAFKHISAQMKQSVKDRTFINIIALSTLKKRGHKVGRLKFKSELNSVPLKQYGHTYSINRVTNTVKLQKLKRPIKVRGLGQIPLNSEIANAMLVKRSSNYYFQITTYSTKEEKVMPNKSIGIDFGCETQLTLSSGMKMEYVVPVSDRIKKLDRKIMKNDRKRSNNKKKDQVKRVKAYQKVVNKKKDKKNKIVHYLVNNFKYICFQDENIKGWQASGHGKKIQNTAIGGIISDLKKKSRTPLVVSKWFPSTQLCPDCGHKYKPSLDERVYHCSACSYENDRDVKSAIMIEREGLKNLLPTDRRKVTPEDMGTSGCIGYLGESVQLSFCG

SEQ ID NO: 28521 - protein, 289 aa, Nonomuraea sp.
  misc_feature (238)..(287): Xaa can be any naturally occurring amino acid
VERLSPGVLRFLSRWHGVGDNVFEVKLVVQVRLLPTPEQAAALEATLRAANDAATWVAALAHTQRVFRNYDLRRHVYGQVKDRYGLAAQAAQHVIKKVADAYATLHAHVRKGNLGRPGSVRRERVLARPIVFRPGAAQPFDDRCLSWQLDARTVSIWTVGGRMKGVAFTASADQLALLAAHRKGESDLVCRDGRWFLIATCDLPDVPVRAPDGFVGVDLGIANIATTATATATGTGTXXXXXXXXXXXXXXXXXXXXXXXXXXXXXXXXXXXXXXXXXXXXXXXXXXGC

SEQ ID NO: 28522 - protein, 597 aa, Alloactinosynnema sp.
LEGRGHRHRARHHPAVHLGQEGAAQPTRAGRPDLLGRRRQAQHDDPRGDLRRRRQADRGLLAAQREQRADQGALRPVQLDGARHPGHLAAPGTSAVATPYPPGRSRPSTLKALPVPTPAGPFGRFCRSCSVGSAPMIVLQAFRFALDPTTAQEGGLRSHCGAQRYAYNWGLALIKANLDQRRAEASYGIAGVDLTPPVAWSPYSLRRDWNQAKEAVAPWWSENSKEAYSSGLANLATALKNWNASKTGKRKGTRVRFPTFKGKRTALSCRFTTGAFGLAEGDRRHVKLPRIGLVRTHESTRKLARHVDRGTARIRSATVTYRGGRWFCSFSVEIDRRDPAPGRPDSVVGVDLGIKSLAVLSTGEVIANPRHLDVALRDLRRLGRQAARRIGPDRRTRQAPSGRWRKTQARIARLHTAVANARRDGLHKLSTRLVRTHGVIVLEDLHVAGMIRNRRLARHIAGVGMGELRRQITYKSGWASSRVHLADRWYPSSKTCSACGAVKAKLRLSERTFHCDQCGYALDRDLNAARNLAALVDEVTVGMSSPSCGATQNEPDGNPRKTRTTRAPGTATGRPSHKARSTPHREMAAHDTVSTAS

SEQ ID NO: 28523 - protein, 396 aa, Alloactinosynnema sp.
MSRFRLQPTPAQERALLEYCAHVRFVWNLAVEQHAHWRPGRKSVPGLTEQCRQLTEARAVNPWLAAGSVIVQQQALKDFSQAMANFFGRTHRRPTWRRRGRAEGFRIVAVKPGDLRRVSRKVGEVRVPKVGWVRFRWSRAVADGVKSYRVTRDRVGRWHVAFALVPDAIAGPGTGAVVGVDRGVVVSAALSTGELLNASMLRGPEKARLLRLQRRLARAQRGSNRRGKVKTAIARLKARETDRRKDWVEKTSTRLAREFDVVAVENLKISNMTRSAKGTRETPGRGVRQKAGLNRGILANGWGRLVTRLEQKAPGRVVKVDPRFTSQRCSACGVVDREARESQAAFRCRSCGFACNADVNAALNIRLAAGHAVTARGGPPSGEPANREPQRDPLAG

SEQ ID NO: 28524 - protein, 267 aa, unknown
  TnpB Polypeptide
LTGAIKVFETAVQLPRLGTLRLKGYEYLPTRGVHILSATVSEHAGHWFVSIQVEEEVPEPTPATGQPLGVDLGIKTLAVCSDERTIENPRALRKTLKRLIRFHRRTSRRKKGSKNREKARQQLARQYYRVGNVRRDVLHKATSTITATTKREKKGPQRKQTVRTRPKTIVMEDLNVAGMLKNRTLSRAISDVGMYEFKRQMRYKTQWNGEMLLLADRFYPSTKKCSRCGHVKEQMDLTERVYICEREDCGLVLDRDLNAALNLVALA

SEQ ID NO: 28525 - protein, 245 aa, Proteobacteria sp.
MNPVTNALYTPGAIGNAIKRTGNNGQGLEPDEGQLSCPVLRGLEGGNTLRLPGGLTTYLTGSDGTAHQAPQPLQHSLNALAQVNRRLAGKKKGAHNRKPALANLARVHTPIANQRQAFHGELAHALCKTYDVIALETLSLSGMKALWGRKVSALGFATFVETLHSVASTTGTIVQHIGKWFPSTKLCSACGCVNQAITLRDRVWICPDCGITHQRDPNAAVNIFREGASAHGGNHVSQASAGVDC

SEQ ID NO: 28526 - protein, 366 aa, Proteobacteria sp.
MRRNWLAARAFAQQCTNKLTLQRLYYHELRTHFALPSQMVVRCLARVAGTYRRDKTICPTFRPDAAMPYDQRLMRFAGLDHVSLTTQQGRVLVAFLIGPYHRQRFDDYEPRQCHLVVRADGQWYLLVVVQVPDGTPMPPTDFLGVDLGVVNLATASDGTPHSGEQIEACRARYLQYRRRLQRAATVAQMDGKRPKNIRRALKRTAKREAGFRRDTNHCISKTLVAAATGNETGIALEDLTHIRTRTRFRKPQRARMAGWAFTQLRDFVEYKARLAGVRVVLVDPRYTSQECSACGHIAKANRQSQARFSCQHCGYTANADFNAAVNIRSRAHVNAPLVAGRVPQQLWLLAGVGASDKLRHFSASSH

SEQ ID NO: 28527 - protein, 350 aa, Proteobacteria sp.
VSILTYRYRIKDATSGTHLRQMAGAINYAWNYCNEVSLLAFRRDKTFLSAYDLHKLTAGTSKDLRLSADTIQQVCTEYVTRRRQFKKVKLAWRSRKRSLGWIPFKAAYIRLQGDTVTYCGQRFRLWLSRPVEGVVKTGSFTQDARGRWSVNFQCEVLDATEPLGRLDLGIDLGLKSQIACSDGVIYRRENLTRQHAMALAMAQRAHKTRRVKAIQAKIANVRSDWTHKATTAIARRGKLIVIGDVSSAQLIHTPFATSTYDAAWHRVRTQLAYKAIRLAGVCVSGRETFSSVTCSDCGARSGPRGLSGLGVRAWGCPCCGVMHERDVNAARNILAFRSGRATPIKGIPVL

SEQ ID NO: 28528 - protein, 457 aa, unknown
  TnpB Polypeptide
MFVNFTFKLHTEFEEDLHVFLGVINKQLNFLLQHDYQISDLRKIKFRNQLLSKLAEKPYYDELFGNKAKYFRIVIEQYRQILASQQHRLAIVKILQQNGDVYKDLTSFRKPSFSELANIRRSIEQDNVCQTTASAEIDYSSEDEQISHIDWSANETHYLITTRLKYSSQKLGGDNIITHQCRIPKKQIAGNVLKFTRPVIRLLNGQLCISYCAEITGVSHVKDTDSVLGVDLGLVKPFSAVAVCEKNGFQAISDELTYSSRVRHLSNKLVRLQRERERGYAKCRAYELLGLTGKKYEKLKAIGKHLRSKAAKLKDDIGFLVANEVVKHAVDYQVSAVHMENLKFVREKAHTTWDFSRTQQKIERKAEIHHIKVKRVSAKHTSKHNPFTLEAEEVDANRKLVKCLFDRDYAAAILIASRKKRENLDDFHAVNRSHDCSIPQVMAFPQLNYTLFCKLTV

SEQ ID NO: 28529 - protein, 361 aa, Clostridium sp.
MLKAYKFRLYPNEEQRIYLAKTFGCTRFVYNRMLAERIKSYEENKNLDIKTMKYPTPAQYKYEFEWLKEVDSLALANAQMNLDKAYKNFFRDKSIGFPKFKKKTNTNNYTTNNQNRTVYIENNHIKVPKLKSMIKIDQHRQFTGLIKSCTISQVPSGKYFISILVDAEIMKLPKTDNKIGVDLGIKEFAITSDEEFFGNPKHLKKSEKKLAKLQKNLSRKQKGSNNRKKAKIKAAKIHEKIANQRKDMLHKVSTQLINQNQVIVIEDLKVSNMVKNHKLAKSIVDVSWSEFRRMLEYKAKWYGREIIIAPVSYASSQLCSNCGNQSSQTKDLSCRTYICPVCGMIMDRDINASKNLLKLAM

SEQ ID NO: 28530 - protein, 367 aa, Nocardiopsis sp.
MKRAYKYRCYPTREQAELLLRTFGCVRYVWNRALAERSRRYKDGSKNTTYTDTAKWLTQWKTEEDSAFLREVSNVPLQQALRAQQQAFATFFAKRARYPRFKSKKKSRKSATFQNNAFTFRDGELKPAKTSEPLPVRMHRPLPEGAAPSSVTVSQDGAGRWFVSMLVEETITPLPSTGAAVGADAGLTHLVTLSTGEKITNPRHERADRRRLAKAQKAMAHKAKGSANRARARTRVARIHARITDRRRDHLHKVTTRMVRENQAIAIEDLAVRNMLKNRSLARAVSDAAWRGFRGMLEYKTRWYGRELLLVDRWYPSSRLCSTQGCGHKNTKMPLNVRTWRCPSCQTVHDRDVSAALNILAAGLAER

SEQ ID NO: 28531 - protein, 542 aa, Streptomyces sp.
MADLRSIAEPFVALGPSGVAVCDRLKCLTPADEEMLRLVGAHLGSLAAKDLKTRCRDGLEHSTDAWAARKRELTAQSSSRWAGAITKATHDQWALARRGQAAHVQSLEAGITTIRHRLSLPVGQKGTKRAPGGYRCAHEWFHKTRRLHVLEDRLDQVRADREAGRVHVVRGGKRLLGTRHHLEQAQLTEAEWHERWEASRWFLQADGESGKRFGNETIRITPAGEVSIKLPAPLADLANAEHGRYVLAAKVRFAHRGQEWADRVEANRAVAYRIHYDVQRERWYLTASWRHPVTRTVPMATALARGVIGVDTNADHLAAWRLDTHGNPIGRPRRFSYDLSGTAQHRDAQVRHALTRLLNWAKSCGVKAIAVEDLDFQAEKTREKHGRKRRFRQLVSGMPTGRLRARLTSMADATGIAIIGVDPAYTSKWGAQHWQRPMATDRRKTTRHDAASIAIGRRAQGHPIRRRTTPPRAHRSDVHGHRTVQADRRAPGREGPRPRIPGPRTRSVPPDAERTRATRTSKTVRDVRSDREWVQDSLLLTD

SEQ ID NO: 28532 - protein, 374 aa, unknown
  TnpB Polypeptide
MLVNKAYKFRIYPTKEQEILITKTFGCSRFVFNHFLAKWNETYQETGKGLTYNSCSSQLTQLKKELTWLKEVDSIAIQSSLKNLADAYSRFFKKQNNRPRFKSKKNKMQSYTTKYTNGNIAIVGNKIKLPKLGFVKFAKSRDVEGRILNATIRRNPSGKYFVSILTETEVHELPKTHSSVGVDVGLKNFAILSDGTKYENPKWLRKLEKKLAKEQRILSRRKKGGSNWDKQRVKVARIHEKIVNARTDYLHKISTDIIKNHDVIGIEDLQVSNMLKNHKLAKAISEVSWSQFRTMLEYKAKWYGKQVVTVAENFASSQLCSCCGYQNKDVKNLNLREWDCPSCGTHHDRDINAGQNLRNEAIRLLTVGTTGLAY

SEQ ID NO: 28533 - protein, 410 aa, Calidithermus sp.
VRYKLYPNQAQLETLERWNRLHCELYNACIEQRRRAWAKGKSLSYYDQQNELPALKAVMPEYEPLGSHALQETVRRVDRAFQAFYRRVKRGEKPGFPRYKSPKSFVGFCYPDRAGWKFERGPNGKHGILHLSKLGPIKARGKPRQWGELRQVVLTRTSHGWYATITLRCQPVRETGNDAVGVDLGVDAVATLSDGTRVGNPRFLKQASQKLKGLQRRLARRKRFGSNWKRTKQQIARLHLKVANQRNDFQHKLTSLWVSRYGLIATEELRVKNMTANGGSRKAGLNRAMLDVGMRGILQKLAYKAEEAGTRLVEVPTHKVKPSQTCPVCLRQEKKALAQRVHRCPCGCEMPRDQAAALVMLRWALDPWVYGRPPVPQGIYPWELGGGEGLRFGPDEPRNPDHTAIAVGQG

SEQ ID NO: 28534 - protein, 379 aa, Eubacterium sp.
MCFRAKNLYNEANYVIRQEFILNGEYISYNKMNFEFKTHENYKLCFSQPANCTLRLLDKNWKSYFRAIEDWKEHPNKYLGMPKFPKYLPKDGRFPWMIPNNQLVYDYEKSSIYIRNRLLNDFDWKCRCFGRPIQVRFIPKGTCYVMEIVYEIEVPDQPSESNHIAAIDIGVDNLITMSNNIGKRPIIVNGKILKSINQQYNKQRAKLQSEMMKINKKNWSKRLDSLTFKRFCRVKNYMHNTSAFVMKWCKENNIDTLVVGKNDTWKQGKKNMQNFTFIPYEMLLEQLKYKCENAGIKYVEVNEAYTSGTSYLDDEVPTKENYNKKRRITRGLFQAEDMLINADVNGSLQIMRKVFPDSYTGYGIEVDLTPIIINVVKAA

SEQ ID NO: 28535 - protein, 463 aa, unknown
  TnpB Polypeptide
MKRTITIDYFLENNVDDLEKLGQDFASDINYFYYRFSSVKNMDNLNFREIRDTILKELDHLNLSGHYLQRCLNAALGNIKSMWSNTFRFIKSNISANKNLTKEEKHFLLTVIKIKSFVDYIVNTNKSFDELLKSKYFLNWKKENPGYIIDERKIRQYLKRQIRKLKPKIPHTKKKYFKIDSTLYYFKNGKLYITNPYKKYNRFELVSVNKDIYKSEATVHFNGNKIRIGFPISIKQKKLTNDKIDEIGIDKGFIDLITTSNNTVYGNNFCNIVKPHIDKYLKTQKERGKYWGLYHKYKDSNPEKAENIKKNNLGYVKFNKNKNLTKETKKKFINHSINEFIKNEKPTEIIVEDLSWDKKSNKKRYRLGYDLSSWDKGYLQERIEFKAYENSITVTKVNPAYTSQICSCYGKLGERKGKQFKCESCNIVLDADYNASINIKNRKETSIETYMKPSEALEILGLV

SEQ ID NO: 28536 - protein, 534 aa, unknown
  TnpB Polypeptide
MANKFENKYLSAVRHETLTNKGKIQNLDPLWSLYSDLLDKFMKDINRNLVKGNTILSKTLAKPYQNDINELFDRAIKKHEKKLKDGKNPELLLEKLKEIGDNAIQTPLSARYVQCCYNQAFETYLSWTALLSDKVKEFLGSSTIDDTLIEDQPLLTTCYRVNKNKLWYNKPTLKWAYDEDNNLVVPTKKNPAKIELEVPEEIMKFIRRLVKQARKLISLPDLSKVRTLKLDNRLASLEISVDAHHVDFWLKLSTLDKGKPIYIPLKNNPYYKELLKTGEQVNFVQVCLRDNRLTVSPILAHDKAPLRTNTEELGLDFGMITMFTTSNGERHGIKAFDKLKIWDELLLARTKELQKQGKKLTSDPYYKDLQSKIKSFFKNEINRILNKLANKGYAVFVVEKLDFRFTNLSKKMNRLLRRTYRKVIKDKFARLEEKFGITTIEVNAAYTSQECSKCGHVSKENRKSQSKFACKCCNHSLNADVNAARNIIKRRSFDIELRTYAREQKVRITRCLILEKLLEKHDCSCSNSFASCHL

SEQ ID NO: 28537 - protein, 410 aa, unknown
  TnpB Polypeptide
MTKAERIKESLHKTKERRKSLKPKVFQLKLQNLTKTKEERLRRAFLEAKWLYNWLVSDTQRLAQPANKVAEVEVKVGEAFERRTLTLLGSQVKQEITDRLKDNLKALSKLKAKGHQVGALRPKSFINSIPLKQYGVTYSLDFARNRVRIQKLGDFRVLGLHQIPQGVEIASAVLVRKPSGYYLHVTCYLAKGDSPEPIAEAVGIDFGIESKLTLSNGIKIDFEVHETPRLKRLQRKLVRAKRGSKRRGKIRFLLRREYEKLNNRRKDAENKVLAFLKLYGKVVFQDDLLASWARRFGRQLHSSGIGGLKLRLRNSLKTPLPVGRFEPTTRECYACGKRHELPLSQRIIACSCGWECDRDVNAALVILRKGLGLSPDQTLGLDRPEVTPLEKEAAARILGSNPSIRVSFLQ

SEQ ID NO: 28538 - protein, 376 aa, unknown
  TnpB Polypeptide
MKIKKSYKIRIYPNAFQKNLIEKTFGCVRQIYNDFLEMCIEEHAKNNSFCINKYELIKLLPEYKESFPYLKEVDSIALQQAILHLHSAYINFFKHNAEFPKFKKKKNDRGYTTMNINSSIRLIGNDIQIPKLGKVRCKNSFNIPNDFSFTTVTVVKNGIGYFVCLMGKQENPYEDLTDRVLDYQNSIGLDFSCMSLYVDSNGNKGDMPNYYQRSLKKLAFLSRNASRCKKGSKNSIKAYEKLRKYQAHVANQKNDYLHKLSFKIAARYDYVFVEDLDLKQMQSKDKEIKLTKRLIDRPNATFLNYLNYKLEWRGKKLIKVGRYFPSSKKCSECGYINQNLTLNDREWVCPICGKKHDRDVNAAINIKNEGLRLLAI

SEQ ID NO: 28539 - protein, 326 aa, Okeania sp.
MKARFKYRIYPKPGQKYRLAKLFGCVRVVWNDSLACCQQKYRSGEKKPTNSQLQKQLITKAKKAEDREWLSEVSAIPLQQSLNDLNQAYQNFFKSTKGQRKGKPVKPPKFKSRKSKQTARFTKGGFKVGQHKVYLAKVGKIKIVWSRELPAAPSSVTVIKDSANRYFLSFVVEIQPEILPQTDNSVGIDLGISTFATFSDGTKIDAPKPLKKRIKKLRKLSKSLSHKNKGSKKYEKTRVRVAKFHAKLKDTRTDFLHKLSTKIIRENQTIVLEDLFAKHSEGNVSGMIKNRKLSRAISDLGWRTFRTFLEGKAEKYGRDFRVISRP

SEQ ID NO: 28540 - protein, 484 aa, Clostridiales sp.
MKGMKIVKITIQAVLFNISEESEETLNNMMLIFCTAIRYSFKRLLEGKRKGDLEKDVAFKYKLNIRQAKDAVESARQTIQSQKELLKLNYNNYDKKAKRIEKELKIEKLSEKKQNVLIKKLEKRKRKLDYYKKLIDNDKIPPIIFGTKKMFIRRCKGLVTNEEWKSCRNNRIYSRGDKTKKGNPNLRIIIKNNMSYLEISTLQKTKTNRAIKIQIPIYLPQKKSKKTGKINGNNYREMFLNTLETNEAYQVEIKKRNNKYYVHITFDIKQKSPIHTNKNGVIGIDTNPDGFALTCIDNKGNHKWHKCLKQHELLYARSNRRKNLCGELVKQAVEIAKINKSGIAIEDLKFEDDKDVQRKFARMKHQFIYKTLLSMLENACKREGVEIRKVKPQFTSKIGLYKYCHQYGMDVHNGAAMVIGRRSYRLKEKIPKILKNKLIENKEEFNKKNEWSKWSIINNIIKGKVGEKPDLWIKNRKQTLGLAS

SEQ ID NO: 28541 - protein, 441 aa, unknown
  TnpB Polypeptide
MEQEVNPEVCDEVLYLTYKARIYPNSTQEKAITANIENNRYVFNLMVTYCRLHIDGYGRLPSLNDLVRFGTLIWKRCPFFHDMYQNSMNDTAKRVLISYRRCLEKAHAIAGDGSVTKGHGRPRYRKAGNCSSYGYPSSVGFSIFEKGGKHYIRLGKVTARKGLKNEGIRLHGPDIPNGTPKTCTVSRKDMGTHYEYYVSVVFRMDPGFCRGEEHIELDQSQPIGIDVGISNIAAFSDGTVYENSKEYVKGIERFRKIHRRYSKTIPNTPENTRWRSRLNHAYKNLVNRRKNTIDRIAHDAVYLHDGIAMEDLSVEQLRSRSRSRRMTNQYNDASIGRIRTRIAEVAASARREIILVDPRGTSQICSGCGRVVKKDLSVRVHNCPGCGLIIDRDINAAINILNRGWACHPDPVRWSNRPALGHDERCSARSPFILGSVKKLI

SEQ ID NO: 28542 - protein, 417 aa, Kibdelosporangium sp.
VSRYRLVPTPEQERELLRHCAHARYVWNLACEQHSFWQPGRPAAPGYVEQSRQLTEARAEFAWLRAGSVTVQQQALRDFAQAMANFFGDTHRKPSWRKAGRNEGFRQVGVKPEHVQRLNRRFGKVWVPKVGWVRFRWSRAAPSGAKSYRITRDRAHRWHVAFAVVPDPISAPGNGRTVGVDRGVVVSAALSTGELLTAPYLTPGEQKRLLRLQRHLARSARGSNRRRRIRLMIARLNAGGRNRRRDWVEKISTRLAREFDVIRVEELKVNAMTRSARGTVASPGRNVRQKTGLNRGILASGWGALVSRLTDKTASRVEKIKAAYTSQQCSACGLVTPDNRKSQAEFQCVACGFGCNADVNAARNIAAGRAVTARGALQPTGGAVNREPQLVAAAPQVARGSWNPVAPATGGRQGSLR

SEQ ID NO: 28543 - protein, 381 aa, Glycomyces sp.
VETRHRAYRYRCYPTPSQAENLIRTFGCVRLVYNKALDARTKAWYRRKERVGYAETSALLTKWKRRSDLAFLNEVSSVPMQQALRHLQKGFAHFFEGRTGYPRFKKKRVLSGAAEYTKSAFTFRSGELRLAKQDAPLRIKWSRPLPAAADPSAVTVSRDGAGRWFVSLLVEEDIAALPQRSEEVGIDAGITSLFTLSTGEHVTSPRHERRGRLRIRQRQRDLSRKQQGSANYRKAQVRLARAHARVSDRRHDFLHKLTTRLVRENQTIVVEDLSVRGMLSNHTLARAISDASWSTFRRMLAYKADWYGRDLVVVDRYLPSSKTCSECGTMRQAIPLNVRTFRCPSKRCGHSEDRDVNAAKNILAAGLAVAACGDGVRPKRS

SEQ ID NO: 28544 - protein, 412 aa, unknown
  TnpB Polypeptide
VKYLTFIFGFVIINLYLCDMLRGYRYRIYPTQEQTVFINKHLGCVRWLYNYALDKKISAYQKDKTQISRFDLQAELPSLKKQKDTEWLAEVNAQSLQATLKNLDMAYTRFFKYKKGFPKFKSKHNNRQSFQIPSNKREIDWNNQTLTIPKIKDIPIVLSRTFKGQIKTVTISKTPTNRYFAGILVDTNIKPQKKAKIKGATTIGIDLGLKHFATLSNGEKIDNPRYLRNDLQRLKVLQRRLSKKVKGSNNRNKARLKVAIQYERITNKRTDFLHKLTYKLTHESQVQTICIEDLAVSNMLKNHKLAQSISDVSWGKFKELLTYKCDWYGKNLITIGRFEPSSKLCSCGELNKDLTLADRTWTCKYCGTKHDRDVLAANNIKNMGLHPKNTGADSSSVPVESPALAGAMKQEC

SEQ ID NO: 28545 - protein, 351 aa, unknown
  TnpB Polypeptide
MELLETFRDMVNEAIRVGLEKGVRSRFSLIRLVYGYFKERYGLHTHYILNACEVAFSIIKKHRRWQRKPYAKRVMIKLDNQTYQLNYMMLRIPVKPREFILIPLKGGEYQLSYLRDETLKRGSITITPNTITVAFSKTADAVKPLGKVAYDINEKNITGVSSDGEVIRYDLSQSARIRTEYAERRSRFQEKKPKDRRVKQKVLSKLGRREKERAKRMFHNISKAIVEHAKKSEAAIVLETLRNILFSHRRGNGESRTIRARLHRWSFRELQRQIEYKAKWEGIVVECVSSTNTSKICSNCGYVNKALKNERGWLCPSCGAILDRDVNAAKNILSRSKLVCLPVVRGGAPSK

SEQ ID NO: 28546 - protein, 441 aa, unknown
  TnpB Polypeptide
MPHLRGFTKTFRYNLLMSVKVEEQASCTTTLYRKVVSYYLQVFQDHQDLIGHSQWLKMAENLTHRTENNPNPEYSFDEEFPNLPSGFRRNAIAEAHGKALAWKTSYEKWKEKKRKHEEKNQKRITAGKKPIEFTERPPQYPEDNDCWLSYYGTEHKWLDSNHIMLKMFTGKSYTYRKVALLQPFVVPPGYAAGSPMLVKKPTGWELHVPVVQVARLDLKKTKKMVKDSSLKICSVDLGINRHAVMTVQDAEGRVCAAKFISGAKDNHLRKRYLEKIVNLQVQTGVIPKGERFAKDLWDKVSNLNDDIAHRVSRQIVDFAKHHEAKIIVFEYLGNLKPSKGTKSRYLNRRFNHWVKGRIFRYTQYKALHEGIITCRVSAKNTSTRCPYCGMLTIQRYNKGQSGKKSSGVDLTRCANCGVRDVNSDFVGSLGIGAAFRLKHCS

SEQ ID NO: 28547 - protein, 182 aa, unknown
  TnpB Polypeptide
VRRKSKVLQGTLERIKSAQRNLSRKGRGSRNREKWRTKLARLHEQLVNQRDDFLHKLSRFYVDNYGTIAVEDLNIAGMVRNHNLAQHILDASWGKFLHFLSYKAERAGRAVVEVNPRGTSREYGHGEMDRDYNAALNVLERGLVGLGRPEPTPVEMEPLLSVPASAVIVGQVPSLKQEAAGL

SEQ ID NO: 28548 - protein, 539 aa, unknown
  TnpB Polypeptide
MPTSRKNDRNFITVECLLAFDKDEDKEKVLNLMRKFSSMVRFAYKRLLEGVEKKELKKMLSQKYGINTRYSDDAIFLAQQTLDSCIERGQNPKKLVFGSRELFEKLKKKHLTGKRREKLRQEWEERRYGFLYSRGDKSKEGNLNLRLVNLNNQWHLRINLGNGEYVWAKVVRSAKREKDRWIDLVWDLTQAERTGNWFAYTVRLRLKNGKIYAQISREENLPEITITKKNGVIGIDINAYPFHLALAWTSRDGNLEKYERISLNGLLDGNTDKREYLSWQIAHQVVEIAKREGKAIVVENLEKIPKGRRGDGMPKIRKKLQKWVYKGLLEKIEVVCKRNGVQLIKVNPAYTSVIGKLKYAPIYRIDKDVASAYVIARRGLGFKERLPKNYRKLLEDKEFLSYSVARVEDKIAKLKKEMEEEKNEYKRNKLKSRLRRLKRELKLLLKFLLDSGKSEPATQQAVNRWRKPMRGRAKSLQKSWRVLSVALAFSCLESFRDFSPLKRVILLGDWVGAAKRKGLVPLPGQGTAAQNMCSFIHFG

SEQ ID NO: 28549 - protein, 311 aa, Escherichia sp.
  misc_feature (259)..(292): Xaa can be any naturally occurring amino acid
VKRLQAFKFQLRPGGQQECEMRRFAGACRFVFNRALARQNENHEAGNKYIPYGKMASWLVEWKNATETQWLKDSPSQPLQQSLKDLERAYKNFFRKRAAFPRFKKRGQNDAFRYPQGVKLDQENSRIFLPKLGWMRYRNSRQVTGVVKNVTVSQSCGKWYISIQTESEVSTPVHPSASMIGLDAGVAKLATLSDGTVFGPVNSFQKNQKTLARLQRQLSRKVKFSNNWQKQKRKIQRLHSRIANIRRDYLHKVTTTVSXXXXXXXXXXXXXXXXXXXXXXXXXXXXXXXXXXAQCPGKIRFKPFDTGSGLV

SEQ ID NO: 28550 - protein, 402 aa, unknown
  TnpB Polypeptide
MYTTRYKLFRAPRLRHLKHQTDIARQIWNYFLGWHRMRYSLGLPYMNYHAMSREFTILRTAHPEMFAHWRELDSWASRDILMRLHRAYERFFTYCKQRREGGKPRKVRLPRFKSWRKPYSFTMSPSGYKFDEDTVHILGRPYRFNLSRPIRGNVKTVTVKFDALGDAYLTVVTDDVASEVTPKTGKAAGFDFGLRRMFTGSEGIAHESPEFYRQAQTNLAKVQRALSSKPFGSGNRERAKQDVARTHRKIRRQREDHHWKLAKHLVLTHDILVFETLTFEGMKRLWGRKVSDIAPYAFHMKLKHLATKHGKQVIYIDRWEPTSKTCSVCGQLNALMDLKTRRWQCQGCKSKHDRDVNAAINILRVGTSTLEVGDVRLAIASNHRRNYPVPRTHNPTRPCQIL

SEQ ID NO: 28551 - protein, 414 aa, Quasibacillus sp.
VEGGKNMARKTTKDRNEELKKEGKRLHFFGLKLRMYPLHSQETYFNRTIGSARFTYNFYLNEKMEVYKETGQSLSYSVFKKAFNQLKDHPYYNFLKEPDKFALESAMENVDDAFERFFKGQNRYPRRKKKHAAKQSYTTKSTNNNIKLDIEKQKIQLPKAGWVPVRLSAKHRKMFAEDGFPGKIQTATITRHSSGQWFVSLKIEQVLPIQPKIEIANFEEAATGCDLGITHFLITSDGEKIENPRYLNRSLKHLASLQKQLSKKKKGSKNFAKAKRKVAKLHLKITNQRKDFLHKISRQLVNENQVIVLEDLNVKGMVKNKKLARHISDVSWSTFKTFLSYKCRWEGKYLILVDRFFPSSKQCGGCGEKNVMLTLSERIWACSSCGQEHDRDINAAKNIKKEGLRLLQEELATA

SEQ ID NO: 28552 - protein, 449 aa, unknown
  TnpB Polypeptide
MKMKKTFEGYYTRNAKFFGIKKNPEFEKSLKDAVAFQNKLSVFIKNGLNDGVIVYVNKSSKGEDKPNPGIIGFSDGTNMTDSGFTKHYCDLVGIDIKGKSNAARSLVQYVCNRYAGYKRRNGEKIPTIHFKGKDYHLKDNQIRLDIENKILIATTMHGKYELEYRGSIKEQELKDYLDEVGKSDFGGNYIVKQNCIIAAIKAKFESSYEPTGATGTDFNKSNKDKIVLSNGVKYPGTQEQVEIEKEIKSLKALLGEKDKPVSERKIRSKQRRSLRKKDKKLHKKQMVAYAKTVNEIIEYVKENKLLLCIDSVGTGQKNGTFGQDKIKAGLLTECQNQGIPYYVVPCKNTSRRCPECGYIHKDNRVDTDNFLCHECGHSEDAQLVGALNIKYYGELLYKSNVPHDDWTTGSKRRSVQQLIEKYSDQVTEVLPTLRGPLKSEQPQSRSLFD

SEQ ID NO: 28553 - protein, 363 aa, unknown
  TnpB Polypeptide
MIKAFKYRLYPNTVQQQYFAKHFGCARWVYNFGLEQKVKAHTQENKKNLSVFDLTNMLVPLKIEFPWLKDVNSQSLQASLRNLDTAFTKFFSKKANFPKFKNKSSKQSFQCPQGVKVAFEHGKISFPKIKDVKIILHRPFEGKIKTVTVSRTAAGKYFASILVDNSDPEPVAIVPDINQSIGVDLGIKDFAILSTGEKIANPRLIKTTKKKLARAQRSLSRKKKGSSNRNKVRHKVALVHEKLTNQRKDFQHKLSNRLISENQAVCLEDLAVINLLKNRRLSRHISDVAWSQFRSFCTYKAAWSGKAVKVIGRFEPSSKMCNICGTINRGLKLTDRVWTCECGAVHDRDILAAKNILNFAFVK

SEQ ID NO: 28554 - protein, 467 aa, Aquifex sp.
MKRTFSVRLFPTREQKEILRELQLRCAKLWNKANYILRQHFFKTGQIIPYEELFHLVKNSQEYKSLPSDISQAVLKKLSESWNSFKELKKLQEKGKLPEHIKKVSPPKYYKDRKENKTIPMDVIPILSPRSYSLGDFFFSFTLPKDLKKKYSIKKRLTILATYTIPYKDFKFGRAEIVKKNGKWYVHISVEVEKTQKSLEGKNYASIDLGARNLIVLAIYDKERKLIRVYQFKSKELWKEFKYWDRKIAKYQSKLAKSRHKGKSVKLRKLYERRKKRIMSAIRGMGNKIVELLQRYEVKEVFVGDLTGIRNGKDYGRKVNKLLHNFWIRRQIEQVLKDKLEEAGIGFVPIPEGYTSQTCFNCGSKALRPKRHLVICQKCGKLHSDTNGAISILKLGLKLKDLEWEKIREVHLVWKFRKTNRWVFRYLRVYKKNKDKLLVRGRVNNPPVRVAKSYSPKSSLAPSVRGG

SEQ ID NO: 28555 - protein, 510 aa, unknown
  TnpB Polypeptide
MECVRRAVAVEVENPPSELYAVEEQYRRIVEEVAAYVAERGKLEKEKYGELYRKFRRLYPLPAQLIQQAINQGVEIGKSFLKLKRDGRVHKPHPEVRRVSIRFAKDSWNYKKAISSTAPVRLGLSLLGGRREIWIKPHRRFWLYWWKVLRKEAELASTLALKRRRGTWYAVFIFDVAPKKETPAEIVTFDVNENWITVARLSLLSTVDAVAQWNRQYLDPAVYSIKTDFGRLAKRYEAVRNAKLEELKRKYPYAGRDDKEKVQNVTDTREFRKFVRRLRERRRKEARVRQVARQMTKSPAVIITEELGKNPQEEMIGVEEKKVKKRELRHRVKQTPFRKLIRAVEDKAAEVGSVVFYVSSFRNSKVCPIHFAKLEDGGDWHVLRCLHGHVVDRDVAAVLNMLWKTTPTGWVKGVWWYLKETRKRLKKGIVPKEAVRKANPIIPRPVAYAVWASLMALKASSQWPAVLARAAPMTPAQGADEDGARAPPHGAPAPGEEVRGGVALRRQAGG

SEQ ID NO: 28556 - protein, 461 aa, unknown
  TnpB Polypeptide
MVQPLFLTFMREVPVLQGGDESAYISRATLQFVVAMKRAYRFRLYPKEKRAEQFEKMLTLCRRLYNAGLEHRITAYRNGQSVTYLQQQNELPAIKKALPEYASVHSQVLQDTLKRLDRAYKAFFKRVAEKRKGKNVKAGFPRFKSSNRYDSITYPQSGFKLLSNGHVWLSRIGELRMFMHRPPKGKIKTLNVKRDRCGDWFAVLTVEKQAVRKRAAPVVGIDLGLRNLVALSNGETLPTPKFLRRSEAKLKRLQRWTSRKVKNSGKRRKAILRLAKGHRLVERQRTDFLHNLSHDLARCDVVFEKLNVSGMLKNHRLAKSIADASWSRLVGMTVYKAEEAGGRVVLVDPKFTSQECSNCHTRVKMLLKDRVFVCPNCGLVICRDVNSAHVVLSRVGRGTAEFTPVENAPLLAEQACSMKREAPRLLGGGGCHNGLGVNIAIQVYFRLDASLKKVFYGNSQI

SEQ ID NO: 28557 - protein, 435 aa, unknown
  TnpB Polypeptide
LDRVAKNKEIKATIKKTRDRRKNQVCRTYELKIDKSHLNTETQKHLTRLFLEAKWFYNSLVAQGKADRGGLWNADYKVQKVMVRRKGVFEERELKCLSSQMKQEIISRIKDNIVGLSKLKKKGRRVGSLKFTGRVRSIPLNQHGVTYWISNNHIHIQKLKQPLRVHGLRQIPKDAEYANATLIQRNGDYYVHVTTYQPKPQIQFKQKSTGVDGGIRKQLVLSNGIEIEESVPITKKVRRRHREFSRKEEGGKNRWKAQQKLDRAYDELTRQRRDIRNKIAGKLTKTFKVICVQDDNVSGWQRLWGRQILATGIGGLMSALNKAHTPVQVDRFYPSTKTCSRCGYVQNVGLDERVFRCEACGLVIDRNLNAAINNEREGLKSIGVPVVRREFTPVDTKTAAEFVRYFNGIPRVRASLVAEAGSWASARKPTTSVVW

SEQ ID NO: 28558 - protein, 383 aa, Actinomadura sp.
VQLRYQFRLYPTPGQQQSLARALGCARTVYNDALRARREAHAAGMPYLSDGDLSKLVITEAKKTTERAWLGEVSAVVLQQALADLNTAYRNLFASVSGKRKEGKVAPPRFRSRKDQRQAIRFTRNARFKVTACGKLRLPKIGDVRVRWSRPLPSEPSSVTVIKDAAGRYFASFVVETTDQPLPETTAEVGIDLGLTHFAVLSDGRKITSPRFLRRAERRLRKAQQALSRKQKGSANRKKAAARVARLHARVADARRDHHHKLSTRLVRDNQAVYVEDLAVNGLARTRLAKSVHDAGWSQFVGMLEYKAARYGRTFAQVDRWFPSSKLCGACGTVAQAMPPNVRKWACPCGAVHDRDLNAAKNIPAAGRADRLDACGGTVRPSA

SEQ ID NO: 28559 - protein, 159 aa, unknown
  TnpB Polypeptide
MRDAIHKAARKVIDFCLHHSIGRIIFGWNKEQKQECGLGKVNNQNFVLIPTGWLKERIAELCQHYSIEFIEAEEAYSSQASFLDGDELPNYGEKPDGWRPAGKRVKRGLYQTAKGWLVNADANAAANLLKKVSRTLGLCLQELSRGALTTPLRVLLWTA

SEQ ID NO: 28560 - protein, 566 aa, unknown
  TnpB Polypeptide
VTDWKKVFTVSISKDKIDNLNLDISLASSDIQLVKKVAVTDVNDAFCCLLLSNTAKKLYNSALYLFKEQYRKNQTTLTYETLDKLMKNETLYPDYARIYQDLPAKVSQQILKLFSQNTKSFFGRKQSKKLTDEERSKKKVNLPKYYTKNGLVVVTFTNQALSKTAFNKEGVIQLSGTDLKIKLDLASLPEIKNFNQINQVRIVPAIKNDKDKRLSDLLEEYYPSSDKTTNEQCGKQTSLFTIEIVYTVPKSEKRNNNKSLELLYRNSVIYKINPKTNKIATIEKEELAEARYTQEFLQSVAGIDQNLDHLAVGVIAAGETTAFNYDIKYLKSVNQYWNKQKAKLQSEISKQKQILQELAEPSEKLDFYQTVLTEYSFSKLIESEKIRLKKLKNKLKRITTKRNHKINNYTHQLSRKLINHLSQLGVKNIVYGKNVNFKQEINLGRVTNQNFVNIPFNLIIERLRYKALLAGINFMTVEESYTSKTSFLDEEKLHSYKRGKPKKGYTFLGDRFARSLFQTKNGYVIHADINASFNIIRKVTGDSVYNFVDKRAIKGSSPKRWKISIQ

SEQ ID NO: 28561 - protein, 301 aa, unknown
  TnpB Polypeptide
MTQFEDEEEVTLSTTGDRVRCGLALPEDQDGYQYRYINDDSWVLTESTLTVRDGDYYLHIGFRQQKTKAGESTAEDRTVLGVGLGIENLAVTSTARFVSGGELQHRHEEFEKVCGGLQETGTESAHRTYVRRGDAEARFNRDYLHRVANTIVDEAVVHDCDVIAFEDLRYIRDSVPDQRKFHQWAHHQLVRYVEYKADERGVDTAFVDPQDTSNQCSECDHVSDDNRPQRDHFRCQECEMEANGDYNAAKNVGLRYVRRGPQSSRRTGDGRLALKSGTVRPGEGFVPSSDGQPRHRQARST

SEQ ID NO: 28562 - protein, 426 aa, unknown
  TnpB Polypeptide
VSPITQKKKCPVCGYVTKDNRLMNCPNCGTELILDVVLPNLNVQDSFFDTQINELKEEQLGLSASNKKIDQQAWQIMDQEGGITQYPLFVKKEVNLYPTIQIPRISFNFFRQYRVVSIVLISILSLLQSGSFLFLISSLHALLYQINSTKVVSVVPLLITGLVFYFIVSYLQLKFILFLKQKNFPERKFEQNSSFVSFALINAIQFFFSIMVLGVVFIIMRNSEVNIESSIVSQLILGLGLLILTPFLLVFRIAKMLSLMRKTGLFQNIYDSFQFSKFSLRRGYGILFLSILLPTFIVTLAIESVTRCLSFLFSISDHTGTTLNVVISIFLLLSISVLFTISNSEDLDILSIYESFLFSFSVPPIITWINKEAKMESLKEEKPEFEDLFNLDNVDALTEVRYCPVCSTKLPEDVDYCVNCGHPLRE

SEQ ID NO: 28563 - protein, 459 aa, Crocosphaera sp.
LYGCQQVLIHPNSDLKAILSLICSQSNKLSNCALYYARQIFFKAKRYITKFELDRKMKSNRHFQTLYSQTAQQLCRSVYESFASFKQLNALYQPGELLERPRPPKYRKNGLNSVSYPKQGLRLIEDGQIRIPLGQTVKVWFNLDCFTIPMLSNLKFDSIREVRILPRNRCFYAEFVYKTEAVISDVDKSRVLGIDHGLNNWLTCINNIGTSFIVDGRHIKSLNRWYNKQVATIKENKSQGFWSNKLAAITEKRNRQVRDGINKTARIVINHCLENRIGRVVFGWGQGIKQEINLGKKRNQQFVQIPTARLKQRIEQLCQQYGIEFIETEEANTSTASFVYGDTLPKHGEKPNDWKSSGRRVKRGLFRTAINWYINADANGAANIIRSLGKLLLLGRTQDCTFRKVSTTLGLDLSGVCRGGLTHPIRIYIWVTAKKKPSRRGFNPSRSIFLESPRLQAGE

SEQ ID NO: 28564 - protein, 494 aa, Oceanobacillus sp.
MARKHTPSYTIEFPLHIPLWQQHRLEKKFNIARRLYNSCLGEALKRHKAVKSDKRYRALLKEPKSKERHKKLADIRSNYGFSEYGIHYFVKEAQYKFKEHIGSLEAQKLATRAFQTVEKLHFGKSKKVYFKHAKDAISVENKSNQTGLRYREENILWGDKPTRKNPKPKNWLCIPISPKKEDEYAHQALLDKTKYVRILKREVRGKTRYFVQLIQEGYPPTKRNRKVAHDETKRVGIDIGTSTIAISSDSLVELRELAPECHNDEKELRRIQRKMDRSKRSTNPDNFHKNGTIKKGSLTWKYSKRYERLRQKRKERYRKVAGRRKMSHEKLANDILTLGSDIRVETMRFQSLQKRAKNTTRNNTNGKINRKRRFGKSIAKRAPAMLLTIIERKLKYQERELKKIDTYATKASQFNHVTGKYEKKQLSERWNDFGELRIQRDLYSAFLIANTKETLDSVDIELCNAKWANFIEMHHGEIERLKQSKSKTMRWFIA

SEQ ID NO: 28565 - protein, 496 aa, unknown
  TnpB Polypeptide
MHAVQLKLNTKMQDVRSLNKRFYEMNHIHNVLVKYGTEQLNALKSDPEYIELLQIYKDATKAKKKHISEQLSVVRLQYGLSEAQLQAYAKLCGKQFNKRLSSQQVQKEATRVWQGIRKCIFSDGKRLHFKKYNELTTIQGKTNTNGVKFNKETLAIDWQGLYISCKCPKQPKDIQYLKETLNHNIKYCEIARKMFNNGWHYYVNVYLDGDAPLKQMKVTNGVMGIDPGVSAIAAVSNNKIFLRELAPDCKKYNKKIIRLQQQIDRSKRQSNPNKYNPDGTIVKSNRDKWIYSKTCKKKMRRLKTLYRRKAAYIKQSHRLLCNELIKCASVIYIEKMNFKALQRRSKKTERSDKLSNIKQKDGSVKRIHKYKRKKRFGGSLNNRAPASFLEILEYKANRYNINVEYINTRTYKASQYNHKTGKCTPVTLGQRTKEIGRTTVQRDLYSAFLIQHPKKSLMTPKRTACVKDFKHFVQMQNALITEMQQKGISMKQCFGF

SEQ ID NO: 28566 - protein, 423 aa, unknown
  TnpB Polypeptide
MQLVEQTIISKSDPRFAAIDAASFAAKNLYNLALYEVRQSFLHEGIYLDNVQVYHRVKHTEAYQALPRKVSNDILRQLHKNWVAFFEEGKAYKQDPSTFTGRPKPPKYKDKTNGRFLLTYDQQAISKKALKRGMLAPSGLGIEVPTEQTAVKQARIVPRSRFYVVEVVYERKEQAPRGDPDLHASIDLGVDNLAAITSNKAGFVPRLVNGRPMKSTNQWYNKRRAELQSKLGHPGTTARMERLTTKRNRRINQYMHTASKRIIELLGEEGIGTLIVGKNPLWKHKVEMGKRNNQTFVQIPHARFIDLLRYKAELAGIRFLEQEESYTSKASFFDLDEIPTYDPKRTEQPHFSGKREHRGLYRAANVRRINADVHGSMNIGRKAVPHSARHGVEARAVAPVWLPVFTVCQPRALTDAGSVLTDL

SEQ ID NO: 28567 - protein, 446 aa, unknown
  TnpB Polypeptide
MSDKLVVFHEVQHKVLKIRIYPNQDQTILINKTFGSCRKLYNEHLQERNEFYIDNILPIPKEERKAKSKEIYKNFKPKTEKEWKIIYPYMKEVSSCALQQARMDCDQAFVNFFKSNNGSRKGKSGFPKFKSKHNNKQSYREVMVSDNNFYFEERKVKLPKVGLVSFKDRKFPTWWNRKTKLCSMTIEKNCSNQYFVAVLFEVQKAVHKIDNRKDSIGMDFSPAEMYINSDGKSGKDFGYVAQKQAHHKQLRKLSRRLAKKQKGSNNRNKARIKLARLEEHIVNSRKDWIEKESLRLVRSYEKVVVEDLNLKGISKFLRNAKNMNDTSWGMFVSRLQAKGEDNNCKVIKADRYFPSSKLCSKCGWKYENLTLDIRKWTCCNCGTHHIRDVNAAINLKNYVPMEGRELTPVESDKVKSLALLALQVGSLNEAGSTTGDSVQECAKALA

SEQ ID NO: 28568 - protein, 375 aa, unknown
  TnpB Polypeptide
MRRAFKYRLYPTREQEAALAAMLETHRRLYNSALEQRKNTYEQEQRSVSYKEQSGLLKGRRLEDPFLAQTNFSSCQATLRRLDKAFQAFFRRVKAGEKPGFPRFKGRNRFDTVEFPSYGDGCKFDGGKVYFQHIGWLKVKLHRPVDGKIKTLSFTREPDGWHVVFSCELPDPEVEASTLPAVGIDLGLKAFLVTSDGESIEPPKFYRKAQAKLRRAQRHVARCKKGSNRRRKAVKRVAKLHQHVANQRKDFHHKTALALVQTHGVIAVEDLNIKGIARTRLAKSTHDAAWGAFLAILQYKAAEAGVAVVAVDPRNTTQACSRCGALPDTPKTLADREHNCPHCGFVADRDHNAAVNILLRGLRSQTLTEPLGAVV

SEQ ID NO: 28569 - protein, 387 aa, unknown
  TnpB Polypeptide
  misc_feature (49)..(49): Xaa can be any naturally occurring amino acid
  misc_feature (99)..(99): Xaa can be any naturally occurring amino acid
  misc_feature (101)..(102): Xaa can be any naturally occurring amino acid
  misc_feature (104)..(104): Xaa can be any naturally occurring amino acid
  misc_feature (122)..(122): Xaa can be any naturally occurring amino acid
  misc_feature (130)..(130): Xaa can be any naturally occurring amino acid
  misc_feature (142)..(142): Xaa can be any naturally occurring amino acid
  misc_feature (146)..(146): Xaa can be any naturally occurring amino acid
  misc_feature (148)..(148): Xaa can be any naturally occurring amino acid
  misc_feature (175)..(175): Xaa can be any naturally occurring amino acid
  misc_feature (194)..(194): Xaa can be any naturally occurring amino acid
  misc_feature (204)..(204): Xaa can be any naturally occurring amino acid
  misc_feature (207)..(208): Xaa can be any naturally occurring amino acid
  misc_feature (210)..(210): Xaa can be any naturally occurring amino acid
  misc_feature (231)..(231): Xaa can be any naturally occurring amino acid
  misc_feature (238)..(238): Xaa can be any naturally occurring amino acid
  misc_feature (279)..(280): Xaa can be any naturally occurring amino acid
  misc_feature (293)..(293): Xaa can be any naturally occurring amino acid
  misc_feature (328)..(328): Xaa can be any naturally occurring amino acid
MAKKRKKKQKKHRRTYKYPIREHPKNVRLGNMLDDLGDVHNHFLKLENXYYRRYGKYAGRYRLQPHLTKLLERTKQHWAWIPRDTLDAVIIRLHLSFEXFXXIXGVGRPKYKKRDKYRSAKXQSGYLLEXGRVRLSFKAWDXDAEXFXFNKRWFSFHQHRKWKGNVKYIQILRDXAGTYWLYVVTDDTSKEVLXATGESVGADXGMXXAXLTLNTGEKIQSPQFLKHALTXLRSLYKXLSRKVKGSNNWWRCLRQLTRLYRKITNQRKDWHWKLATDLXXRFDLIATETLNLXGMKRLWGRKVSDLAFGQFVEILKFKCFKHNRDFRXVGQWTPTTKPCSDCGYHNKDLRLSDRQWTCPECGSHHDRDVNAAINILRAACGPSVEQQ

SEQ ID NO: 28570 - protein, 542 aa, unknown
  TnpB Polypeptide
MNKEVLKMLTKQKSESNFITVKCLLAFDKDEDKGRALTLMRKFSSMVRFAYKRLMDGAGRKELKKLLSRKYGINTRYSDDAILLAKQTLESCIEREQNPKKLVFGSRELFEQLKKKHLTGKRRDELRQKWEERRYGILHSRGDKSKEGNLNLRLVNLNNQWHLRINLGNGEYVWARVIRSAKRKTDKWIGFISDIEHAEKTGDWFPYTVRLKLRDGKIYVQFSKEEKLPEVSITKDNGVMGIDINAYPFHLALVHTAKDGNLEKYERINLDSLLEGSSDRREYLSWQVAYQVVEIAKRERKAIVVENLQKLPKGKRGDGLPKLRQKLQKWIYKGVLQKIEIVARRNGIQVIKVNPAYTSIIGKLKYAPLYNIDKDTAGAYVIARRGLGFKERLPKNYRKLLKDKEFLYYSVAKMEDRIAKLRKEIETEKNEYKRNKLRSDLRRLKGELRLLIQSLSDSGVSEPATQQTVNRKMERVRGLTHVRQKSWQVLSVALALSCLESLRDLSPLKRVILVRDWVGAAKRASPSLPGQGTSVLNMYSFV

SEQ ID NO: 28571 - protein, 355 aa, unknown
  TnpB Polypeptide
MLLSKKTSIKVSREYANLIGHMCYAASKLWNVCNYERQHYKETGMAQYPDWYYQKKAHKEDLWYKQLPSQTAQEVCRLLDKAWKSFYALKRSGGIETPRPPRFKQESIPITYMQMGIVHERDTDRVRLSLPKTLKKYMEETYQIHENFLYLENKIFRGMDQIKQLRIYPPEKGSCKIIVVYEVPDQEELPQNGHELSIDLGLHNLMTCYDSENGKTFILGRKYLELERYFHKEIARVQAQWYGQQSGKGVKHPVTSKHIRKLYKRKQDSVTDYLHKITRYLAEYCREQGITCVVTGDIRNIRREKDLGHRTNQKLHSLPYNRIYIMLEYKLKRYGIRFVKQEEVIPASAVRCHRK

SEQ ID NO: 28572 - protein, 234 aa, Halogranum sp.
LAFEIKDNVALTALSEDGVEDTLVIDFPEIKFERHRYFTMRKRVQNAGKDSIHDTLEGREERLVRDRLHKVSRHIVEWSRQFEKPCIVFEDLKEMRDSIDYGTRMNRRLHHLPFRALQYYTSYKASFEGIPTAWIDPSYTSQRCPMCGHTERGNRNKKRFKCRSCSHQDHSDRGASVNIAVKGVKKLDWNVPALNSLPVVRKVRRQVSGAVDAPTVTHPTVRGYQADGRVGVSD

SEQ ID NO: 28573 - protein, 448 aa, Methyloprofundus sp.
MKGTRILHSVNLNPGKYAALKEQADLLGQVRSEVWQRFGSLRGVGVNHREIRTDWVKNKDFSPLPAKAWKETLRDALDDIRLYEASAKEKVRKQIARRFNDPAERKHYFGLLRSHDWVSDPLLSRWMRKAKKHGRNHTFNQIILENGVYSQFQGKDGNTWLKVPSLVKGKRLAIPLNSKVKLQGMLRLILIDGRVEVHYLAKGKQHKPCGTEVIGVDKGYSEVFADSDGAFHGEGFNHLLTPISQARMENNRARNKLFQIAEKSSAKKKARIYKNNLGTKKRVQQNRKIKQQIRTHCFKAAHSVVDKAAEVIAEDLTSPIPKKNQWKQFNRLMNSWMKGAITEALEKVTKLRGSELHYINAAYTSQIDSTTHHLQGNRVGDKFYHVNGEVSHADINAACNIKHRYIDKAITRYMPYRQVKRILLDRLHASKELSGAAQAVLETVPSGL

SEQ ID NO: 28574 - protein, 460 aa, Calothrix sp.
LLTNYVYKLRPNATQSTKMSNWVDMLRSHYNWCLNDRLTQYAQQFIMGEYCDIRTKAEACPLTCFVSKNGATGEPWKESKIDKKGNPVNPRRNAGMIQDAALPELKKARPWFAGIDSTALQQNIKRLDKAYENFFDGRGFPKFKNRSNFTSFTMTMGIKIQKNKIYLPKLGWMRFYHSRQIPDGFTIKAATTRKRQDGWYISLRIEDKTIPDYVSSPLTNVKSILGCDLGLTKLVHLSDNSQIDNPRFATNKKTRGTLKLRQRRISRKVKGSVNRKKETKKIGRLHKKIADKRQAREWQVANKIISRNVDAIAIEDLNVSGMMRRCKVKVDSTTGRFLSNGQSRKKALNRSISDASWSDLTLKIEYLAAKQGKVVIKVNPKHSSQECRNCGHVDKSNRDGEKFICVKCGHMTHADIGAAKTIRDRAFDMVRGDSAKPQRPKQRKETSTRTKSANVLSLGT

SEQ ID NO: 28575 - protein, 401 aa, Calothrix sp.
VLVLEYKVKARQSQYQAINEAIRTTQFIRNKAIRYWMDSLKDSKINKIALNNYSTALRKEFKFVEELNSMACQSATERAWSAIDRFYSNCKKNVPLKKGSPRFQKDNRSVEYKTSGWSLHPTKRRITFTDKKGIGEVKLLGKWDIHAYPAKSIKRVRLVKKADGYYCQFAVDIEVSTESRIADGELGLDVGLEFFYSDSNGHHEENPRFLRKAQKAIKHAQRQIYKKEKGKNQRRKARQRYARKHLKVSRQRNEHSKRLGRCVCKANALVAYEDLNVKGMVKNHCLAKSINDASWSLFRHWLEYFAVKFNSQAVAVNPRMTSQKCSDCGAIVKKSLSTRSHVCGCGCELQRDHNAAINILNLAKASLGHKQSNATGLVTSTLLGETLVEQVTRVNVESPTL

SEQ ID NO: 28576 - protein, 394 aa, Calothrix sp.
MYALKRELKLNKKERSLMRGMAGFKRFVYNYALDLITASWDFDGVKLGDSKRLDAIKKVFTQVTMNKSEYAWTKKYPSTVYQSAFQDLKNAFSRWRRGLGEFPVKKSKKKGDSFTVYKTSGIYPKKGNPAIPFTNRVVINQGKNIVLPGIKTFRLKEGIDFICSAQTFTVSRTADRWFVSFVLDVEKVPPVIHPIEKMGVDLGVKTLATCSDGTTYAMPITTKIAKTKLQLLQWRNRNKVLGNKKLKIRASKNAHKFYAKVAKKHARIANIRQDTTQNMTTDLSRKAYIIRIEDLNVQGMIANSKLADAVSNNCFYEIRRQLTYKQSFYGTKVELVDRWYPSSKQCCKCHHVQPMNLSQRVFHCQSCGHLQCRDENASINLKDAPSNQVRLAQP

SEQ ID NO: 28577 - protein, 407 aa, Calothrix sp.
MIVYEAKAETTKEQLLKINEVLRTALFVRNSCLRYWLDGHAKTGFDLNKYTKVLSDNPDFPWVSKLNSTARQAMAERVWVAILRFFDNCKKKIPGKKGFPKFRIFQTRLSVEYKQSGWVLSECRQFITFTDKFCVGTMKLMGTRDLNFYQINQIKRVRIVRRVDGIYIQFCIDHDRKEQLEPTGKTLGIDLGLTHFLTDSDGKKVDNPRYLRKSEKSLKKAQRRLSRCAKESKNRAKARIRLGRKHLKVTRQRKDWAVKLAQCVVKSADIVAYEDLKVRNMVKNHHLAKSISDASWSIFTNWLEYFGKVYGRIVVAVFPHNTTVDCSNCGYPVHKTLSTRTHICPVCSHHECRDINAAKNILNRGLELIKNTDGLSEIQYASGESDPCLKKATSKSKSSQRKRKIQQ

SEQ ID NO: 28578 - protein, 431 aa, Calothrix sp.
MYRAIKVRIYPTDEQESYLAQCFGNTRWLWNYMLNATTTAYKETGKGLSKAAMDKLLPALKKEYEWLGLAYSQVLQRVTFNLSSAFVNFFEGRAKYPNFKSKHGKQSIQYPQNVKLMPQDSFIKFPGNLGIVKTVFHKGLPDAKFTTVSISKNADGRYYASILFNQEDEPIAAINEAIGVDLGLKNFAITSDGSKYDLPKKLLAKLERNRKRKQKKLARKKDKTSNKRQKARCLVAKISGKISRVREDFLHKLSRKIAYENQVICVEDLAVKNMVKNPNLAKAISDQGWGMFLTMLKYKAERFGHTYQEINRFFPSSQLCSETLLPIPMLQKGYDSLKIRFIDCPHCQKQHDRDINAAINIKNEALRLLVSQYGLGVSPNEVTGELVRVLGTSTSAQGGDVRPKTSGRKKSTKSEAIPNDLGSLHSPVRGV

SEQ ID NO: 28579 - protein, 378 aa, Calothrix sp.
MLLSFKTALIPNNKQQTAFKKACGVARHAYNWSNAYVKEVLELRKHDKSIKVPSAIDLHKKLIAEVKSANEWYYEVNKNVPQKALADLRKAWDRCFKKTSKQPRYKKKGQRDSFYLEQGTKAQPKIPNDGKRVRLPSIGWVRLAEPLPITAVHNCVISRQADKWFIAIKYEIEKPPVADNRPIVGVDIGIKELAVTSNGEVFKNPKAYKRMNKRMKRLQRSVSRKVKGSKNRQLAVEKLSKIHAKITNVRKDAIHKLTNYLAKNHSEIKIEDLSVKAFLKNHKLAGAIADCGMYEFKRQLEYKTEKFSSKLTLVDRMFPSSQICSNCGQHRHKMPLKNRVYVCPECGHIEDRDLNASKNLERWFDGMYIPKCSDLVSQ

SEQ ID NO: 28580 - protein, 403 aa, Calothrix sp.
MIVLEFKAKGKTTQYTAIDEAIRTAQFVRNKSIRFWMDNRGVGQKDLYRLSKSLRGEFPFVKALNSSACQASIERAYSSIARFYDNCKKSVVGKKAYPKFKKNSRSVEYKTSGWSLSQDRKQITFTDKKGIGKLKLKGTWDLNFYQIEQIKRVRLVRRADGYYVQFLVSVDNKVETQPTGKTIGLDVGLKEFYTDSNGHSEPNPRFYRTGEKRLKFRQRRVSRKKRASANRKKAINKLGRVHLKISRQREEHAKRIARCVIQSHDLVAYEDLRIKNLVRNHCLAKSINDAGWYQFRKWLEYFGVKFGRVTVAVNPAYTSLECSNCGAIVKKSLSTRTHVCECGFVMDRDWNAAINILKLALSTVGHTGTWILDPNASGDSTSTHAGVILSEQVGSKIEESSPL

SEQ ID NO: 28581 - protein, 410 aa, Calothrix sp.
MIVYEFKVKGKDKQYQAIDEAIRTSQFIQNKCLRYWMDNKESKVDKYALNKYCAVLAAEFPFADELNSMARQSAAERSWSAIARFYNNCKKKVKGKKGFPKFKKNCRSVEYKSSGWKLSDTRKAITFSDNKGIGTLKLKGTYDLNYYDIKQIKRVRLVRRADGYYAQFAIDIDVRVESQPTNQIVGLDLGLKYFIADNKGNVEQSPQFHRKSQKQLNRANRKKSKKFSKERNKAKQRQSNNYHKARIRYARKHLKVSRQRKEYCKKLAYSVIQSNDLVAYEDLNVKGLVKNRHLAKSISDAGWYTFRSWLEYFGHKYGKVTVAVPPHNTSQNCSNCGEKVKKSLSIRTHVCPHCGYTEDRDINAAINILRLGLSTMGHTGTYATGDLPSWAVGASLLSNGESLNVESPPL

SEQ ID NO: 28582 - protein, 407 aa, Calothrix sp.
MIVYEAKAEATEEQFIKVNEALRTALFVRNSCLRYWIDGHAKTGYDLNKYTKFLSDNPEFPWVSKLNSTARQAMAERTWAAITRFFDNCKNKVPLKKGFPRFRQLQTRASVEYKQSGWSLSECRNYITFTDKFGIGTMKLMGTRDLNYYQVKQIKRVRIVRRSDGIYVQFCIDHERKEQLEPTGKSLALDLGLNHFYTDSDGKKVENPRFLRKSEKALKKAQRRLSRCTKASNNRAKARNRLGRKHLKLQRQRKDWCVKKALSVIKSADLVVFEKLQVRNMLKNHKLAKSISDASWSIFTQWLEYFGKVYGRVVVAVSPAYTSIDCSNCGHQVYKTLSTRTHSCPNCSYTACRDFNASRNILTKGLELFKNTDGQSGIQYASGEIDLCLEKATSKSKSTPRKRKVQE

SEQ ID NO: 28583 - protein, 386 aa, Calothrix sp.
MLKAYKYRIYPTGEQVVLLAKSFGCVRWFYNFALNLTSETYKATGKGLSRNDIINLLPSLKKEREWLTEPPSQCLQQVALDLSSAFLNFFEKRAKYPNFKNKGQKQSIRFPQQVKLDGDYLTLPKLGKVYCKVSRLPEGKLKSVTVSFAPSGEYYAACLYDDGKDKPTSSSEGKAIGVDMGISHYAITSDGNKHGNPKYYRKYEVKLAKKQKQLSRKHKGSQNRNKARIKVARIHTKITRCREDFLHKLSRKLVDENQVIVVENLAVKNMVKNHKLALSISDAGWGQFCTMLKYKAEWEGKTYIEVDRFFPSSKTCHVCLNQVGSLPLDIRFWTCEKCQTKHDRDINAACSIRDEGLRLLAGGHLATASGQRVRPSKGTAFRGDVG

SEQ ID NO: 28584 - protein, 407 aa, Calothrix sp.
MRLVERHVIKIGHQFYKEIDDLAWRSKNLYNYANYLVRQSFIFEDKYLNNAAIFHLVKHHESYSALPRKVSNQVLMVLHRNWKSFFEAQKSYKQNPSKFKGRPKLPKYKDKDKGRNIVIYELGAISKPLLTKGVIKLSQTEITFPTKASDVKEVRLIPQCGQYVIEVVYSQDVKPQQLNQNWIAGIDIGLDNLAALTSNKSGFKPVLVNGRPLKSINQQYNKTKSHLQSQLKGNTKISKRIQALTCKRNNRVDNYLHNASRWIINHLVNEGISTLVIGKNDQWKQEINLGTITNQNFVSIPHARFIEQLKYKAELVGMTVLINEESYTSASSFLDLDPIPVYKEGVKHSFSGKRIKRAWYKSKNGKLIHADINASLNITRKVVPAAFSLGIVGIAVCPSRITPGQVV

SEQ ID NO: 28585 - protein, 411 aa, Natronomonas sp.
MNVTLRCRACPDEETASEAWRHIELHRQIRNHAVRDYYSHEPGNRPSSFDQHNKLTDWKQRWPVFKDVSAHAAQQTISEVHKNIKILREKRYKGCKTGRLKWQGSGERRSVAYQSEGYDVNHTTGRDGYVSLRLSKIGTIQIRAHRDLPPTESIKRVVLKKELTGEWFACLVTERPDDSLPEKPNPDDLSPADCVGVDLGIQSYIHTSDNLAVDMLDLSDEYDRYAREQRKLDRKEYGSNNWEKQRQKVAKAKRRIKRVVLDFQHKLTTWLVREYDMVAVEDLDVKPMMETSQSAKNKQDASWSRFLTLLEYKGELHGTHVVKVDSAGTTKECSRCGVKTDKPIWVRQHSCPACGHEEDRDLNAAKNILSRGCKQLGAGRSESTPVETALPTFTPSRVNAKRVVEAGSPEA

SEQ ID NO: 28586 - protein, 318 aa, unknown
  TnpB Polypeptide
MNIAYRFRIYPNREQEVLLAKTFGCCRFLYNQMLNDKIREYEATKKMLRNTPAMYKKAYPFLKEVDSLALANVQMHLEKAYKNFFRNPKTGFPKFKSKHRSRKSYTTNVVNGNIQVEDHRIKLPKLKWIRMKKHRDIPEKYCLKSVTISMEPSGKYYASLLYEKSDCENQAEEFDYEDAKILGIDYAMHGMAVFSEDIQKENEGYFRKSEERLAREQRKLSHCVKGSNNYYRQKKHVALCHEKIRNQRKDFLHKLSYEMAEAYDVVAVEDIDMKAMSQCMHFGKSVMDNSYGKFRELLEYKLTWRGKIGTCRPFFPFQ

SEQ ID NO: 28587 - protein, 376 aa, unknown
  TnpB Polypeptide
MQSSDSYKALPAKVSQQILMVLDRNWKGFREGLAAYYEDPSKFLGRPKPPKYKHKTEGRNLLVYTIQAISKPSLKRGLVQPSMLPIEIKTQHTEINQVRIVPRSGFYVMEVVYEHEQPKSAVNPAYYAGIDSGMGNLVALTANQPGFVPVLVNGRPVKSVNQYYNKRRAELQSKLGHPGTTKRMERMTNKRNRRIEHYMHTASRWIIDDLVAHGIGTLVIGKNEGWKQEANMGKRNNQNFVPIPHARFISMLSYKAELAGMRVIITEESYTSKASFLDRDEMPIYDPHQTEKPTFSGKRIKRGLYRAADGTLINADCNGSGNIIRKVAPDAFGSEGVEDGKSHKPVVHPVRLSFPSRSQKASNGGSKRSIERYKTL

SEQ ID NO: 28588 - protein, 419 aa, unknown
  TnpB Polypeptide
MAWNSIEGLLFRDAEKVHFYKKDDWATFQGKQAERCIILKRNPDYTFYVKFNKMKFPLIVKKDDLYIKETLANIVHCMKHRDEMDRRNMALYNLGLPLISTYRVCNNRIVRKIIRGKTRYFVQIVLEGKPVPRRKKDSSLRHTYGVGRLGSDVGTQSLGTVDNNNVILENLAERSENTFSHEHKIYLLQRYMDRSQRAMNPQNYDKNGTIKKGKKAWVYSKRYQKARARLKELHRKAAESRKYAHNEEVNRMRTMGNELIIENMNIKGLQKKAKEVTINQKTGKFNRRKRFGKSILRRSPGYFIKQAKYRFETSGGIVKEVNTWTFKASQYDHILDGTSKKKLSMRWHELPDGTKIQRDLYSAFLLYCSGKDLQSPDKALCDAFFERFLELHNRCVEDIKTSRKVVMNSGIRFSGKSVA

SEQ ID NO: 28589 - protein, 371 aa, unknown
  TnpB Polypeptide
MQLRIRKYKFKHSNFIHKTFFDWYSDYRYSYNKASWISKESTCNYSGYELTNLIVPTIQGVNNHIPWINKTPSNIRQQAVQQFDSNKKSCFSNLKNKNTTHFSMPFMKKNNRWCINLPANCIKSIKNKYIKVFHIKTKDYKFRLSKELPNSYLGKKLPFQHKIYYDGLNFWLLLVEEIPEKISKIGICSVDPGIRKLATVYSNKTFRYFGKKEYMSLKKIVKKIELSQSKKQKKKKLFLENKKKQILVNLYHQISNYLLKNFNNILIPTLDIKQLLKSGKNNRWYNKMILSMGVLSALENLKIKSSLYVNSTIYSNSIEHYSSKLCSRCCVINLKKNESEIFYCNNVNCKLIEDRDYNAVKNIYFMNKHLV

SEQ ID NO: 28590 - protein, 371 aa, unknown
  TnpB Polypeptide
MQIRTRKYKFKHSDFIRKILFEWYSDYRYSYNKATWISNESTCFYSGYNLINLIVPTKQSVNDHIPWINKTPSALRQNAVLQFDSNKKACFKNLKNKNITHFTTPFMKKNSRWCINLPAGCIRSIKNKYIKIFPTKTKDYKFRLTKELPDSYIGKKLPFQHKIYFDGLNFWLLLVEEIPEKNSKKGICSVDPGIRKLVTVYSNKTFKYFGKKEYLNLKKIVKKIEKSKKNKRLKLFLENKKKKILTNLYHQISNYLLKNFNSILIPTLNVKQLLKLKKINRWYNKMILSMGVLTFLENLKTKSSLYTNSTIYSNSVEHYSSKMCSRCCTINFKKNESEIFSCSNFNCKLIEDRDYNAAKNIYFMNKHLVKT

SEQ ID NO: 28591 - protein, 228 aa, Bacillus sp.
VQSYTTKHTNGNIAIAGNKIKLPKLGLVKFAKSREVEGRILHATMRRNPSGKYFVSILAETEVQELPKTCSSVGMDVGLKDFAIRSTGEVFGNPKWLRKLEEKLAKAQRVLSRRQELALKRKCKLDEAKNYQKQKRKVACIHENITNARTDYLQKISTYIVKNHDIIGMEDLQVSNMLKNRKLAKAFREVSWSQFRTMLEYKAKWYGKQVVTVSKTFASSQLCSVCGY

SEQ ID NO: 28592 - protein, 455 aa, Lentzea sp.
VQRRVITDAKRTEPRAWLSEVASVALVQSVQDAHRAYRNFFDSLSGKRRGRRVGRPRFKSRKDGRQSFRLTRNGFRLRPGGRLFLAKIGDVAVRWSRDLPGEPSSATIIREPDGRYYASFVVEIAPTPLPPVEREAGVDLGITRLATIACTAGTRRDVVNPQYLARAHRKLVRTRRALARKARDSNNRAKARRTVAVQHGKVARARRDFHHKQALRLVRDNQAVYVENLDIAGMVRNRRLARAVHDAGWGGFVQLLKRKAERHGRTVHVVSRWLPSSKTCSACGHRMESMPLKIRQWTCPGCLSVHDRDHNAALNILAAGRAERSNACGAQVRPPLGVAQGVETGSTPDTAQPCGNPHPSGRRARQMVTNNEAESRYEVHVDGKLAGFLEYRDVAGVLALVHTEVDEAYAGQGFGAQLAKYALDDVLARDVKISPLCPFVAKYIDKHPEYRVTVR

SEQ ID NO: 28593 - protein, 479 aa, unknown
  TnpB Polypeptide
VNIVHNLQDKFLRLGFLEELEKEFTAGYVYEIYPTTEQRQYIHKNCGCKRQLHNIFVAQLYDYLESINFKCGYIPKEFVKNLPTVKSIKEKFSYMKEVDSLALSAARLDFVNSIKKYNDEYVPKGNQYKKKALKQVKTIGKELTFRDLKGMPKFSAKFFSEQSFTTNNQKGTVRLEGYLGESSRYMALVIPKLKNPIKLRYHRDLPENCRITKAVIKRIGQDRYTVSLIVIYTKEYVTLKHDKETLAKVKDYLNNHKELCLGLDYAQQGGCVPSSKDKTLLDNILASFQKTYHKNECKLKALQKKLAKKEKQSNAYLKLLKRIQKLHRKVANIRKNALHILSFRIVKQFALVSVEDIDLRAMSQTLKLAKNLLDNGFGMFRLMLEYKLKHKGMIFVKINRFEKSTQKCHECGYINTLTKNLAIKEYDCGGCGKHLYRDYNASLNIRDIGISMIEPKLFEEKQNKFSLANLRSKRARNLS

SEQ ID NO: 28594 - protein, 372 aa, unknown
  TnpB Polypeptide
VRILIVEITRGMEYRIYPTKEQRILINKTLGCKRFIYNHFLQVRRDEWKFNHKSVNYSATNAMLTDLKKYDEYSWLNEVDSTALQNSLRDLQVAYDRFFKKISKYPKFKSKHAYCQKYRSQCVSNNIKLVGNTIQLPKIGKVKIKLSRDLVGKIVNATVTCTASNKYYVSICVKYETELLSNSGHEIGIDVGVKDFYADTNGNVVKNPKILAKFAKKLARAQRKLVRKKKGSAQYEKQRIKVARIHEKIKNVRDDFQHKLTYHLTEDNAFIAIEKLNIKGMLKNHKLAKAISDVAWGKFFIKLEYKAKEHGGVVVKIPTFYPSSQTCYECGYKNPLVKNLLVRDWVCPVCGAHHDRDRNAAINILAKAKDIA

SEQ ID NO: 28595 - protein, 386 aa, Shimazuella sp.
MFAKFQRGGDSMYKAFSYRLRPTKAQATLIHKSIGCSRFVFNHFLGEWNKVYQETGKGLTYTTCSRVLTEKKREFVWLKEVDSTSLQNTLKHLADAFQRFFQKQNDAPCFKSRKNRVQAYTSQCNYPKNNRPTIEIEANKIKLPKLGWVKFIPSREISGRILSATIRRTGAGKYKISILCEGCYLQSVPARKEAIGIDLGLKDFAIFDDGTKWSPNRFFRQYEQKLANVQQAMARRKKDGSNWHKARIKVARIHEKITHARHDFLHKLSTKLVYENQVICLENLQVKNMVKNHKLAKSITDASWSEFVSMLEYKAKEYGRKVVKVGKSFPSSQLCSCCGYINKEVKQLKLRAWICPNCNEHHDRDINAAKNILQEGRRLLAVGLTV

SEQ ID NO: 28596 - protein, 393 aa, Shimazuella sp.
MIRGKKVSFRASTSDLDRLFACNRESAKVWNTCVQIAKQFALNHAGKWISKTQLQRATKQQFHLLSQSTQAVCHKYLFARESARQALHKKVKGIRYPYRQKLHFNTKWAKDGFTIHADGKIELSMGIHDGKRENPIVIRTRNLPEGEIKEMELCYEKELYLSVTYEDSTTAEPYQQQRAVGIDPGEIHTLAAFCETGDAVVITGRKVRSIHRLRNKKLAAISRLLAKCKKGSRNWKRYQKVKQFIRAKSERQLRDALHKTTKQFVDWCLAQEVSDVHLGNPDGVQRNTRKKKKANRKQAQRLSNWSFGKVRAYLAYKLAMQGIRLHEVEESYTSQTCPVCKEKRKVSSRNYRCCCGYCEHRDIHGARNILAKGIWSEIRHFDVPTQAMYLRIA

SEQ ID NO: 28597 - protein, 361 aa, Shimazuella sp.
MSTITLKLELHKPTQAKREMYQQMTAVHTDFANWLLMHPEINKATSMIFKEYSLQKFPSAVVNQTIREVKSQKKKQGAKTFKKLWCCFNNQNLKVEKKGDLYTVAFPTFEKKVGVPVVVKPYQQAWLERIMNGTAKQGAGKLCQKKRKWYLAIPITFEVAGSNKEKAMGVDLGLRYIAVASVGTKSLFFKGNQVAFTRRRFSSRRIKLGQTKKLDAIRKSKNTESRWMKSQNHKISRQIMNHALIHGVGVIRMEDLTDIRNTAKSKKESGRNLHSWSFYQLKEFIKYKAEMVGIRFEEVDPKYTSQTCKCKHREKSNRKGLVFKCKSCGYTAHADLNGAINIGKAISGLSSKKKKKKGKAA

SEQ ID NO: 28598 - protein, 376 aa, Fictibacillus sp.
VNFLILAKKVRLKPTFEQENLLWKSVGTARWVYNWALFKQEESYKHGGTFISDVDLRKELTRLKKQQDFSWLNDVSNNVAKQAVKDACDAYKKFFKGLADQPRFKNKKKSKPSFYNDNVKLKVKKDSVLIEKVGWIQISEQVPIGVKYKNPRISFDGKYWYLSVGIEQENPKQELTNETLGIDVGVKELAVCSNGMVFKNINKTRTVKKAEKHLRRLQRRVSRKYEMNKEGNRFVKTSNIIKHEKKIRLVQRKLTNIRNNHIHQVTCAIVKTKPGAVVVETLNVKGLMKNKHLAKAIGQQKLYDFKVKLQYKCEKYGITFVEVDKWYPSSKMCSSCGSIKKDLKLSDRVYTCTCGLEMDRDINAAINLANYGKLVV

SEQ ID NO: 28599 - protein, 301 aa, unknown
  TnpB Polypeptide
VLQEVPKKVELAFDRWLKGDVNGKKSGRPRLKGVGQYKTFTFPQFKQHHFVNNKITLSKIGDIKVIVHRQIPDGFDIKTVSVTKKADGYYVTLSLDDKTVPTIKPDFNANNIVGIDVGLIDFIVTSDDERIAAPKFLRKAERKLKSAQRRVSRRKKGSNRRKKAIKKLGIQHKKVSDTRKDFHFKTANNLLKKYDVVAVEKLNIKGLARTRLAKSINDAGWGQFISILTVKAENAGLKVVAVNPNGTSQECSSCGHKVKKPLSQRMHNCPVCHGSLCRDLNAAINIKNRGTHGLKAQSMSS

SEQ ID NO: 28600 - protein, 436 aa, unknown
  TnpB Polypeptide
MDIVSSYSVKIRNYNRIFNDTAKLYREAVDYFICVCLSEWDVMESVVGNLAKQRYIETCTHATKNNTCPRFAFDQKFYKFPSYLRRSAISAAIGKVLSYKRNLANYEAGVNNYRPSIPKAGFVFPAMYRDNCFMRTGTYTARIKVYIRNTWDWLDVELRKSDVDYINRRYGTQKECAPILRKRGKEWFLDFAFEEKVMLCEVPVPNRIIVAVDLGINNACTCSVMNAEGTILDRKFLHLSREQDSLYHALNRIKKAQQNGARHTPRLWAKAKSLNEHIAGLTANFVIDIASYWSADVIVFEYLKLQNKKEYGRKQQHHLWKAQRVQDMVEHKAHRLSMRISRVCAAGTSMLAYDGSGAVKRCVDGNYSVCKFRNGKNYNCDLSASYNVGARYFVREILKSLPETERLDIQAKVPGCAKRTTCTLSTLLELNAVMTA

SEQ ID NO: 28601 - protein, 445 aa, Escherichia sp.
  misc_feature (365)..(416): Xaa can be any naturally occurring amino acid
VKRLQAFKFQLRPGGQQECEMRRFAGACRFVFNRALALQNENHEAGNKYIPYGKMASWLVEWKNATETQWLKDAPSQPLQQSLKDLERAYKNFFQKRAAFPRFKKRGQNDAFRYPQGVKLDQENSRIFLPKLGWMRYRNSRQVTGVVKNVTVSQSCGKWYISIQTESEVSTPVHPSASMVGLDAGVAKLATLSDGTVFEPVNSFQKKQKTLARLQRQLSRKVKFSNNWQKQKRKIQRLHSRIANIRRDYLHKVTTTVSKKHAMIVIEDLKVSNMSKSAAGTVSQPGRNVRAKSGLNRSVLDQGWYEMRRQLEYKQLWRGGQVLAVPPAYTSQRCTCCGHTAKENRLSQSQFRCQVCGYTANADVXXXXXXXXXXXXXXXXXXXXXXXXXXXXXXXXXXXXXXXXXXXXXXXXXXXXRAVVIQRKKIACHKVNSDARYVDIQRTPM

SEQ ID NO: 28602 - protein, 606 aa, unknown
  TnpB Polypeptide
MDTHYDDNLTRHTTHVSQKIMSDLDLRIRILKKQSCFLRFVVEVTIYKSDGVGRVECGMAQYDRLDKVEPYSDDLTLEWGKALPSPGTATIENVEDPTQWPPGVRKMAGRTEGDGFTPRWFNVSVSRITAKPPSHVQGDLHSAMTRANAQRPTNKKTVTHTLPWTQGVDKDGKDDNGELMRVKTVRVLPTQTQKQTIGQWFGGFRFVYNRCVALSHECFCAKTKMPGLTELRQRFSNADSPLVETNVWLQSVPLEIRNGAVQEFVSAHGKEVKRVRDFNKKNKKRNKGTTAAISFELSFKTRKGKQSIPLLKGSWGQKRSDSRYRDVLRSNVLKATEVIPTPRNTYRLTKGNTGRYDLRIPYMQAPSQENQVLEGRHSTVAIDPGVRSPFVMYDADGLVVDVGAGDMATKVFAFKYAADRLQARLTKNAEGKNNKTKRRRRRKAILRTNKHIRGLVDELHYHVIQWLVDTYKVILIPKFGVAQMVQGRLNKTTKNHMLTWRHYVFRQRLKEKAALVPGCTVIECIEPYTSKTCGQCAHLHQKLGGRKVFKCPNPTCGFVADRDAHAARNILMRWLTLMGLSPTKRKRVASLWDRDPDPPAKRQRRE

SEQ ID NO: 28603 - protein, 232 aa, unknown
  TnpB Polypeptide
LTSTRPFSKPIPLTASSFKSVDRFDDPFGQEIQSMPSFGITSFSLGNSLSNSALSFAKKRYTSKRIRLRFRKRQRRLKHAVNTMLRSIFSLLEKRNVGELYIGDLNGIRKEANHGKKGNQKLHNFWAFNLIDKRIMELGEEYGIAVRKVSERNTSRTCCLCGRRHNGRVERGLKVCPETHQSINADVNGAVNILKVAVKRFPSVLSTDKGETSGSRLLAEPLLLRWNYNEWS

SEQ ID NO: 28604 - protein, 378 aa, unknown
  TnpB Polypeptide
MILTFNIKHGRDLSGELRKAKQIAEFALKTHTLSSKDVKQFGLKSTIANQILRKYSRNKEIKVVRHVNLTVPSQGVVVDREKREIYIPSLKLTLNYNFRNDFEKVNQIELDEQYAHVSVTIPEKPMMKPVTWIGVDRNAVGHIAVIANPQTGKVWKLGKRAEHLHRKYREIRRKLQKAGKYRLLKKIKNRESSIMKDLNHKVSRKIVEIAKESNAGIKLEKLDGIRNDKKHTKSFNYVLNSWSFYQLEKFIKYKAKLEGIPVTYVEPKNTSKECSWCRSIGIREGKLFKCPHCGHVDHADVNASFNIALRPPLVEGIGQSHADRDACEGSTDTPKGATLRTAETLEPPKLQRGEYVSVWLWAHANYSPIFGQNNQEMG

SEQ ID NO: 28605 - protein, 145 aa, Lachnospiraceae sp.
MQKGSNNRNRQRVKVAKVHEKITNQRNDFLQKRSTILVSENQTICIEDLNVKGMTRNHKLAQHIASRSWSKFFAMLEYKATWYGNDIIKEPTMYPSSQTCSCCGYKDPFVKNLSTRELECHICHAKHDRDTNASINILNKGLSLA

SEQ ID NO: 28606 - protein, 353 aa, unknown
  TnpB Polypeptide
MTVKSDRIELKVIVQGQWVVLYFPVPPQLLEDGCEPGVPDIWVDKNNRVMFGFHGKTDPGRPKFSERYIIGVDVGVTNPAAYVVWDTKNKEIVEQSLLDQRARSLSNKIKRGQVQVTSLKRKGKDEEAVSHRAHLSNRRKELSILIAQEIADAAWRHGNALVVFEDLSHISDTMRFGRWFRGEVLRRTRDMVESDGGRVLRVNAAFTSKRCHVCQATLDMSDYSNPVCHSCDITHHRDLNAAANIAQRANHAKACQTRRRHATKTKRIRRSKCHAKPLKHPGTKNKPTPKAPQNRPKIHPSVTPSREVSKGMCPADTRVSAVDHNVWFQTTSGTTIPKANLSANTVGGVHSKE

SEQ ID NO: 28607 - protein, 436 aa, Actinosporangium sp.
VVGQQADGGGELKRQRGHKARLDLTPVQRWKVEEQGHAARALWNLIHDVWTMTPKCQRSVSRMDAEICRARKEIDWLARLPAQAAQQVLKTYLRAWVNCWEGRAEAPTFKARLRTRAAVDIPQGRDLRITRINRRWGQVWVPMVGLVRFRWTKDLPGVTKGSPPGRVSGARLVKDALGWHIVFRTELIGDEPKPHLGDGVGIDVGVTRPLALSDGTFRDHDTWLKPKEAERLRRLERTRERRKFRQRLGEKISNRLRRINQLIAGYRARAKRRALDWQHKTTTRIAETFGVVGVEALTIASMVKSAQGTVAEPGKNVRQKAGLNRSISGEAWGRTVTLLAYKLADRGGHLVKVPAPNTSRRCHACGFISEGNRESQAVFVCKNETCGWSGNADTNASCNIETATKQQTPQEIAGVRTWSLSRRAGREASTTHPVTR

SEQ ID NO: 28608 - protein, 616 aa, unknown
  TnpB Polypeptide
MSSSKFRVWLNHEYLPQHPEYLWIKEAYSKAVTQAVNHGQTAFKKFFNHESAFPKFKKKGRSDVKMYFVKNNPKDCRCERHRVNIPSLGWVRIKEKGYIPTTKEGYIIKSGHVSMKAGRYYVSALIEIPDNKTADLSNEGIGIDLGLKDFAIVSNGKTYKNINKSARLKKLEKRLVREQRCLSRKYENLKKGESTQRANIQKQKLKVQKLHHKIDNIRTDYINKTIAEMVKTKPSYITIEDLNVSGMMKNKHLSRAVASQKFYEFRIKLKAKSRENGIELRVADRWYPSSKICHCCGTIKKDLKLSDRMHHYFGDIRDKEKVNSHIQEIKPDFIFHLAAQAIVSTSYVDPFDTITTNVVGTASVLEAIRNITWNCTSVLITSDKAYDNVEWIWGYRETDAVGGKDVYSGSKGAAELTIKSYWKSFIQSMPNIKLGIARAGNVIGGGDWAKDRIIVDCVKAFSENEIVEIRCPKATRPWQHVLEPLSGYLTLGQYLFEDKVENGEPFNFGPRAEQTKTVFELVQDLAELWGLDKNNAAKLTDNLPFQEATLLKLNCDKALAYLDWHSTLHYCECVHFIADWYKAFYIEKNDNLYELTISQIEMYMNVAQQQQLKWTE

SEQ ID NO: 28609 - protein, 339 aa, unknown
  TnpB Polypeptide
MAISVFKTVLARYKTVGELMKQETVTYTVDGRHDTFRKSLDWLQKPVVFRRPQADLVRGRDWGFTAGMEMVSVNTLGKRIKCTYQCRPDSRLFDPAWKHGGAKLVFHDADRNWYLHISVTKAFPDTGRSRITEIYGHDRGLVNLVTSCGDNGETVFQDGQDVRRIKERYARTRASLQAKGTKGARRVLKRISGRENRMMSDVNHRISKTLVSGCRAGVLHVFEDLSGVSFQNLEDRNTFGRYELRSWTFYSLEMKTAYKAAMRRGAILKVDPRYTSQKCPGCGTIDKTARNHSQHRYTCKHCGRVYNDDEVAAKNLHQLGIWYISGVDNPHFSKKVSGY

SEQ ID NO: 28610 - protein, 403 aa, unknown
  TnpB Polypeptide
VIVQKSVRVQIYPRESDKELLAKHFGVRRFVYNKFLEIRQREYLENGITLGYNACAALVTTMKRNPDFEWLREVNSQSIQAAIKDLDGAYDRFFRKIAKFPKFKSKHDARQSFKVPQHFDIDWEERTLKIPKFKTPFKFRGKFSGSLIKTTSVTISKNTSGKYFASVQGEFEIEQKKSTGEIIGVDLGIKSLLIDSNGTEIKNERFLKKALKRLKYLHRQLSKKKNKESATRVKAKIELARQYQTVVYQRNNYLHQVTSKLIDENQVICLEDLAIKNMVKNHCLAQAISDVSWGRLVSMLKYKAVWHNRQIIQIDRWYPSSKTCSSCFHLMPSMKLSVREWTCPICGEVHDRDVNAAKNILRQGLNITSGLGTKSDVKQKREEALAKSAGSVSHENTPSLVVC

SEQ ID NO: 28611 - protein, 530 aa, Ammonifex sp.
VITLKSLLEFQNEEDRQRVLDLMRRFSSAERYGYRRLLEGHERNGLKSHLAHVFQINTRYADDAILKAQSILKSCRERGQSPSKVVFGSRNLFEKLKKKHLNGSRREELKREWRERRQGNLYSRGDRSKRGNLNLRFVWLEGELYLRICVGERRWVWAKVIRPVKREKDKWIGFIWSLRQAEKTGEWFPYDVELKLKDGEVYALVSVKEKFPPATITLENGVLGIDVNAYPFHLALAEVSPDGNLLGYERISLHELLSASHDKREYLCWQVAYQVVNLALEKGKAIAMEDLEKLPKGRREDGLPKLRKKLQRWIYKSLLEKIEILAKRHGVEVAKKDPSYTSVIGKLKYAPQYLVDKDVAGALVIGRRALGFEEKLPESYRLLLKDEEFLLYSTAQLEEKVKELKRELRKEENEWRKRAIKKRLSAVRSELKTLQRHLRTLQSGESEPASRHPANRGKEPVRGSLSGLRKSWRVLSAALTVPLLEKFPQVKGTVRDFSPLRLILVSGDWERAVGRSVPVPGAGAAVQRCG

SEQ ID NO: 28612 - protein, 531 aa, Ammonifex sp.
VITLESLLEFQNEEDRQKVLDLMRRFSSAERYGYQRLLEGWPREELKKHLARVFQINTRYADDAILKASSVLKSCRERGQSPSKVVFGGRNLFEKLKKKHLNGSRREELKREWRERRQGNLYSRGDRSKQGNLNLRFVWLEGELYLRICVGERRWVWAKVVRPVKREKDKWIGFIWSLYQAEKTGEWFPYDVELKLRDGEIYALVSVREKFPPATITLESGVLGIDVNAYPFHLALAEVSPDGNLLGYERISLHELLSASHDRREYLCWQVAYRVVNLALEKGRAIAVEDLEKLPKGRRGDGLPKLRKKLQRWIYKSLLEKIEVLAKRHGVEVAKKDPAYTSVIGKLKYAPQYLVDKDVAGALVVGRRALGFEEKLPESYELLLQDEEYLLYALAQLEEKIKELKRELKGEENEWRKRAIKKRLSVTRSELKTLQRHLRMLQSGESEPVSRDPADQRKEPVRGYLLRWRKSWRVLSAALTVPLLEKFPQSSKGTLRDFSPLKTVLVAGDWKRAVRRLVPVPGAGAAVQECG

SEQ ID NO: 28613 - protein, 313 aa, Synechococcales sp.
  misc_feature (46)..(137): Xaa can be any naturally occurring amino acid
MPAGATSPRSWWKWSQRACPPMAKRLASTWAWHPSPSLQPVKRSPXXXXXXXXXXXXXXXXXXXXXXXXXXXXXXXXXXXXXXXXXXXXXXXXXXXXXXXXXXXXXXXXXXXXXXXXXXXXXXXXXXXXXXXXXXXXQKGSNRLAAARRQVATLHATIADKRLDFLHQLSTRILRENQTVVLEDLNVSGMLKNRKLARSIADAGWRQFRTLLESKAEQYDRQVVVINRWLPTSQVCSACGHHDGKKELSIREWQCPSCGEVHDRDINAAQNILAAGLAESQNGRGAAHKSTALVAAGWEASTHPIAEASPCPA

SEQ ID NO: 28614 - protein, 393 aa, unknown
  TnpB Polypeptide
VNQHTRTLKIKLRLTPVQEHTLTYQASHARYVYNWGLARRQEVYKATGKGLTYVQQSAELTKLKAENRWLFDTYSDTLQHALKDLETAYKNFFERRARYPRFKSRHKVRPSLKYAKGAVLESNRIKLPKLGWVRCFNSHEHGAIKSVRVKQTAAGDWYATCVTEFVPLPPKPVQTACGIDLGLNSFAVITDGETYHDVAPPKFFREYEAKLAKAQKKLSRCERGSNRRAKTKLAVAKLHKRIANLRANWLHQLSNRIVNEYDAVMLEDLNIKGMARGNLGKSLGDAALSEFVRQLEYKAAWRGKAVQKIDRWFPSSKLHAACGVVNKELERGERLWLCDCGETIARDENAALNILKEGLNVLSGSDSATLKPLRWGKTSNTLAPVGDARIPPL

SEQ ID NO: 28615 - protein, 384 aa, unknown
  TnpB Polypeptide
MKYEVNLVWNFCNETMRKRWKESRLPTDMNLLHALTKGSSQELNLHSQTIQATYEELLNKSKQFKKFIRWRSLKRHLGWIPLKASAIKFNGDYITYCKNKYRFWDHRKLPEGSRILCGSFCEDTQGRWYLNLVVKFPEYLAKGLKEVTAIDLGLKTVAVLADGTEYKRDNLTKKYQDKLAKSQKHRKKRQVKKLHAKIKNARSDFNHKVSHDIAKNYQTVFCGDVSSSKLSQTKFAKSVYDASWYQLKTLLSYKVLRRQGVYQEINEKFSTVLCSTCGSKSGPSGVKELGVREWTCSACKEVHNRDVNAAKNILRFGHETLSGTLKNRLYEGSPALKGGEDVTIQRRFTNVKTAVLSVMKKTSSTPKIPFNQRAFHEFGQASSL

SEQ ID NO: 28616 - protein, 435 aa, unknown
  TnpB Polypeptide
MESDVVQKACRGKVVNLATSKASVIDFMLRDQRRLWNWVHDLNVARHRDSGEFIFYNEAAALLTKERGNGTFADGSVVAQQQCLRSYERALKSSFPNSNNRQGFPKPRKHANQCSLRFPAKDVRTVRNGEILSHVKLPKIGLLRVRNIVVPIGAKINSYCLKHEADGYWLSVQYTIVVDPPINNNPNTVGIDAGLSVMASFSNGEQVHALKPLRKARKKLCKAQRSLARKRRGSVNRRRQAKRVARVHAKVRHARRNAQHQLSRRLVDENGLIAIETLSLSGLKRLKHQGFAWSDIGFGELYRHLRYKTNWAGGEIYEHPRFARSTGCCPDCRHIGPKIDLRIRNWTCTQCGVRHDRDIAAARWLELCALEHRAQVGAACPEPVEVKPRPKRGSSGSAPRTIAVMRSAPFGSPVHGGSPANGLSDVRCLASASTG

SEQ ID NO: 28617 - protein, 387 aa, unknown
  TnpB Polypeptide
MVKAIKVMLIPNNVQETKMFEYAGASRFAYNWALAREKENYEKGGRFISDSELRKEFTKLRHSDEYAWLLNISNNVTKQAIKDACNAYKNFFKGLKKIPRFKSRKRSMPKFYQDNVKIQFSNTHVKLEGFSSSRKANKQKLNWVRLAEHGRISTHAKYMNPRISFDGLNWWISVCVEFPDCKEILNDDGVGIDLGIKDLAVCSDAVKYKNINKSQKVKKLEKQKRRLQRSISRSYEKNKKGESYCKTNNVIKKEKLLLKRNHRLTNIRKNYLNQTISEIVNRKPRFICIEDLNVSGMMKNRHLSKVVQEQGFFLFRKQLEYKCSDKGIQLIVADRFYPSSKLCSCCGKIKEDLKLSDRIYRCECGNMIDRDFQASINLKAYGERFAS

SEQ ID NO: 28618 - protein, 367 aa, Bacillus sp.
LKTKNKKGVNLSMAKKRTGVTLTYIGVFIQPKKDETTILDTLMRKFSSSKRYSRERIFDGENRKEVVNKTKELFIPNSRYMRDSFLEAEASISSQEELLPTYALQNSIKIKNLEKKIDRLSSSIPKTEKKKARLHQQILYTQSKIHKLAKQRDYYQYHIDNGTIPKMVDGTKRRMELLKRGKITKAEWRESRSDSLYSRGEKSCGGNENMKLTYKGDSVFTIAILNPLSSKRGDRLRFNICFPEKLKLTIAAYLETGESYSIRLKRRNGKYEVHLTFEEELKVEPDFSNGLAGMDINPNNFSVAIIHPNGNFKTSKVFWMHDINTVSANKRDYIIQNTLHEVMSWIKSFGIDTLAIEKLKVFTGRRK

SEQ ID NO: 28619 - protein, 672 aa, unknown
  TnpB Polypeptide
VNGNIGAPAPVDPTTIMAPDPGREYTVACSLKKATPDNDHVKHIRDAVVRVHRCTLYATELLNLYIRDRIENHGGTGLESIFSQNWLLNAYNVVSNSTGKRLSSIDEGVRAVFDQHMCGTFTAENRTGITQALTYECINLAAVGSTNVWMHFQKRVLSYVRSCFAMDREDHDKLIKKQKQERKLALLQVAEDLCRNPTSSRRSPPSYHEWIDQERVRLGIDAAVVDWKDKPLLYHLKARPHRFISAMYTMSTKQHQLGRKALALFPLRRSRVPGHVRFDKKVLDDLLGLKCAYAAAKAKKNQGVNLNSEPAGPSGRAPKRRRDDPSLVHEKAEVFNKVLDLRAAGVRRRHHFAFAFTTDGVSLHLNMETPGSKKTKAAKLASMPLRGVHSIDALKAVTRAEDVHTIGIDPGKQELVVAVDQDDPKHAPVVRYTLAQRQRDLRTRQYMDEARRTRPYAVTAEEEDLSLFNSKAPSLDEFAKFAAARRSALRSTPAIQEFYDELHHRDRRRKRKIKAQKSEADLVNRLSSMHSKDDERQVVLAYGAWGLVAGRPNAVANKGNPPAIGVGLMKKLALHFVVAPTPEHFTSKTCVRCMGLCGAHPTLKTKKGKEIRGLRVCQHEGCGLFQNRDKTGATNIGLQFTRLLQGKPPIRKMDDTELEFHRLNVCLECGDS

SEQ ID NO: 28620 - protein, 377 aa, unknown
  TnpB Polypeptide
MKLVATIKVKVNKNSELLDMSKTFLQAVQYAIDKGFEAKVSNRFKLHHLVYRDLRQWLPADFACEAIAKASENLKAVKLKKKPIMKSCPISFNRNLFTFSFEKVRIATFTPRQRKDITLNIPEYYWKYLDWRYQTLELVKDRKGKLFFHITFSRDVNTPTSCGNEKVVGVDVGVNNLAVTSDGKVFSGYKTKIIQYQYLRKKLQRKGTKSAKRKLKAISGRQKRYMRGINHIISKKIVASADTIVLENLKGIRKSRNKYCGKRLNRWLNSWSFYQLQGFIKYKAEREGKRVIFVNPYMTSQICSNCCKIGSRYFDSFFCSHCGFSSQSDYNASKNLAKFNAYYTLRRLPVTKPNVSDNEGKGQLTTEPEFRDKSPLL

SEQ ID NO: 28621 - protein, 382 aa, Escherichia sp.
MRRFAGACRFVFNRALALQNENHEAGNKYIPYGKMASWLVEWKNATETQWLKDAPSQPLQQSLKDLERAYKNFFQKRAAFPRFKKRGQNDAFRYPQGVKLDQENSRIFLPKLGWMRYRNSRQVTGVVKNVTVSQSCGKWYISIQTESEVSTPVHPSASMVGLDAGVAKLATLSDGTVFEPVNSFQKNQKTLARLQRQLSRKVEFSNNWQKQKRKIQRLHSRIANIRRDYLHKVTTTVSKNHAMIVIEDLKVSNMSKSAAGTVSQPGRNVRAKSGLNRSVLDQGWYEMRRQLEYKQLWRGGQVLAVPPAYTSQRCTCCGHTAKENRLSQSQFRCQVCGYTANADVNGARNILAAGHAVLACGGMVQSGRPLKQEPTEMIQATA

SEQ ID NO: 28622 - protein, 435 aa, Acidobacteria sp.
MRHEKSEESLPLQVPSVRPRVAETDREASGPVSKLQTAEVGCASEREAVERQLRAFQFRLYPNAGQRAQLERILADNCETYNASLQERRDAWKLQRKSITYRNQQDELTELRKEAEFQWIACDIQRDPLRRVDRAFKAFFRRCKTGEAPGFPRFRSRHRYDSFTFSLPAVRERSIRIPNVGDIRMRGGRSIEGKAKVCSVKRDGKRWTASVVCDIGPVPEKCAVSKAVGIDVGLTALATLSDGVEIQNPRWTRKYEAKIAAASRKLSLKQRRSKNRIRAREVLRRAHQRAANARTNYLHHVSKWLVANYDLIAHEDLKIRNMARSAKGTVENPGTKVAQKSGLNRSIMDAAWGQLIWQLTYKAASAGRWVVPVNPRGTSIRCSQCGEPVPKTLADRQHVCTCGANLGRDHNAAINVLRLGMSLAGVKAPSEYVLA

SEQ ID NO: 28623 - protein, 402 aa, Lactobacillus sp.
VIKFNKAEPLILLTYKVEIKPTEKQAWQLDCHIGGSRWAYNLFLDINRQRYERGYCYLNAYAFSKWFNHEYLEANPDDRWIKELYAKSVKQAFIDADTAMNRFFKKQSGFPHWRSFKRDQGSYYFVKNSKTQIIACQRHRIKLPKLGWVRLKEFGYIPTDSEHFVIKQGRIKFKAGRYYLTCLVEQAELPKLASTGEPIGIDLGLKEFAILNDGTLYPNQNKSSRVRRIRKRLRRLQRKLSRQYHALKARRQKEGKSATDLNLAKTQRKVQRLYQRLTHIQADYQNKIIAAVVRTKPQWVALEDLNIKGMMKNRHLAKAISYQGFYNFRIKLIAKCQQLDIPVHLTNRFEPTSKLCHQCGHKKVDLKLQDRVYECQNCNYTEDRDINAALNIRDTENFEFAY

SEQ ID NO: 28624 - protein, 363 aa, Rhodovastum sp.
MKLVAAVKLVPTPEQAACLSETLTRCNAACSWLAALGFATKTFRQYNLHKAAYADLRSRFDLTAQAAVRCIAKVADAFKVNREVAPTFRPDAAQPYDDRIIRFVKAGAAVSIWTVQGRMVIPVVMGEHQRRLMVYRKGEVDLCCVRGKWMLAATCDIPETDDFQADDWLGVDLGIVALATDSDGKIYSGAEVEKVRQHLARRRRGLQTCGTRAAKRRLKKLAGKQRRFQAHTNHCISKALVGDAERTGRGIALEDLKGIRSRVTARGDQRARLGNWAFAQLGGFVVYKAGCAGVPVCFVDPRNTSRACRACGCIDKRNRPTQATFKCVSCGHEAAADHNAALNIRQRVLSVRGDVVRPEVLAA

SEQ ID NO: 28625 - protein, 244 aa, unknown
  TnpB Polypeptide
VKIDGACCTYLRRNFHFWKSRDITGTFKSGSFNQDARGRWYVCFQCDVPDDLPTGKGRIGIDLGIKTLAVCTDGTSVPALKHYRRYEAQLAVAQRAGNKRRVRAIHAKIANARRHHLHEQSTRIACENELIVVGNVSAAKLAKTRMAKSVLDAGWSTFRTMLEYKARRHRARYVEADERNTSRTCSDCGAVSGPKGIAGLGIRHWQCSGCGASHDRDANAAWNILGVGLERQAPAVEISVIERR

SEQ ID NO: 28626 - protein, 400 aa, Lactobacillus sp.
MLKGMKLRLYPTRKQEQQLIIMFGNDRFLWNILLAGINQRYKNNPSFKVPTNRQMDYLLVPLKAEYPFLKDSDSTSLQVVTQNLYQAWKNFFNDKTHKFGKPRFHSRKAAKQSYTGKSNVKVAAKRYVRLPKLGYVKTSSTESLKNCKVKRYTVQKEPTGKYYLSLQVEFENQELKPTGKVVGIDLGVHDLAITSDGIKYDKLQFKQLEKKARKWQSKYNRRLHGVTNIVESHNHDKHRLYDLDVQDFSNWQKARKNKAVYQAKIANQRKDILHKITTELVKNYDVIVLENLKSKNMMKNHNLANAISSNAWYMFKTMLAYKCNWYGKQLIVVDPKNTSRICSNCGKKNHNFDNLTQNQWLNIRNWTCPYCHKNHDRDINAAKNILNRGLKQTNIQLVKD

SEQ ID NO: 28627 - protein, 381 aa, unknown
  TnpB Polypeptide
MSVVKLNRAIQYRAYPTEEQAVLLGKTFGCVRFVWNHMLKDAQRFLDESGAFFVPTPAKYKKDFPFLKEVDSGALCNTQLDLKEARKRHKEDPKAVGSPRLKSKRKSKMSYTTNIHSYKANDGHVVHTIVLGYDSIKLPKLGWVKINKHREPEANWVLKGATISCTRSGKYFISLLYEFKKDIQPIKPAKETSLGLDYSSHDFYVDSNGDVANYPRFYRQSEEKLAKEQRKLSRMQFGSHHYDKQLYKVRILQEHIANQRKNFCHTASTAIAKRYDAVFVENINLRGLAGSLKLGKSTNDNGFGMFRTMLEYKLTSQGKTFAKIDKWYPSSKTCSVCGSIKDDLTLADRVWTCSGCGTTHNRDHNAAINIRNVGLLGLYPA

SEQ ID NO: 28628 - protein, 409 aa, unknown
  TnpB Polypeptide
MLRAYKYRIYPTPEQAIFFAKSFGCCRFVYNRTLDYMSMWWNGGRCSVGRFAAQAQLVAMKECYSWLGEVNAQSLQYAVKQCADGFANWFAKRAKHPLPKRKDARQTFHNPQQCSIDWKHGLISISKCPNLKAVLHRGFRGTIKDITISKESGDRYYASVLVDTALAPLAADSVIKASLSIGIDLNCGDIVCSDGRRFVCPRSYRKAEAKLRREQRRLSRKAKGSKNHEKQRRVVSGCHARIADVRHDFIHKVTHDLTHDSQVRSVFIEDLNVRGMMRNRHLAKSVGDASFGEFVRQLTYKGQWYGVNVIKIDRWDASSKTCSACGAVNRALKLSDREWTCVCCGSHHDRDYNASVNIKSFGLMALPPDRREVKPADCPPVDDRRVSGLRSSDRMNQEKFRGVTDAPVL

SEQ ID NO: 28629 - protein, 350 aa, Aphanizomenon sp.
VAILYAIIKTGRKETKNMKTSYQYRLKPTKEQAEKIDKILDMPRCQYNYQLAQRFNWYEANRSPVDRCSIFVCHLPELKDKPNRFSQQASLTQLKEDRPWYKNIHSQVLQEVPKKVELAFDRWLKGDSNGKKSGRPRFKGVGQYKTFTFPQFKQHHFANNKITLSKIGDVKVIVHHQIPDRFEIKTVSVTKKADGYYVTLSLDDKTVPTIKPDFNANNIIGIDVGLIDFIVTSDDERIAAPKFLRKAERKLKSAQRRVSRRNKNSNGRKKAIKKLGIQHKKVSDTRKDFHFKTANNLLKKYDVIAVEKLNIKGFTEERNDGKLSRSVLESSGGGNSFTDFNYQEPWDTRS

SEQ ID NO: 28630 - protein, 337 aa, Blautia sp.
MSSSKFRVWLNHEYLPQHPEYLWIKEAYSKAVTQAVNHGQTAFKKFFNHESAFPKFKKKGRSDMKMYFVKNNPKDCRCERHRVNIPSLGWVRIKEKGYIPTTKEGYIIKSGHVSMKAGRYYVSALIEIPDNKTADLSNEGIGIDLGLKDFAIVSNGKTYKNINKSARLKKLEKRLVREQRCLSRKYENLKKGESTQRANIQKQKLKVQKLHHKIDNIRTDYINKTIAEIVKTKPSYITIEDLNVSGMMKNKHLSRAVASQRFYEFRIKLKAKSRENGIELRVADRWYPSSKICHCCGMIKKDLKLSNRIFRCHCGYVKDRDFNAALNLRDVKTYKIA

SEQ ID NO: 28631 - protein, 491 aa, unknown
  TnpB Polypeptide
MGQTKRTTKLLLDLGKRTQGGANTGKRAYLDETAQVLTQGRAFYIEFFLAHAEKFQDTVVYYSQKDLEMRERLISAHELLTWAEAATVATADHPSPWAGWNFTERFPEMPFVYRRSVIKDAIGKVRSYLSHRKSWEQSGKKKGKPGLPGAANHPTLYQGTLTLDLETCKTHDRFAQLKVYTGSRWEWHNYPVQTSRYFEQRIQEASWEKESPKLVLHKNSAELHFPQTKTIAAKKVVESKADPDLVTVGVDLNVRNLAVITLRQHGQIIETVFVRDHGLDRARYLHLKKISKKQFLSGKPVKGEHSNQQLWRHVRRMNEDAAHKVARIIASVCATYPGCILLFERLRKIKRGGGSTSRRMNRRQSNQLRGKINQYAKEKNYAQGMVTVEVNPHGTSQYCSRCGAKGERFSYRNGVWVKQKWGNVFRCPTCGYEANADHNASVNMHHSFYREWHWHQKKKAPPSPVPRGSGRGQRPVRPLTGWEKPAGGTPR

SEQ ID NO: 28632 - protein, 373 aa, unknown
  TnpB Polypeptide
MEYSHRYPAYPTQEVAAELEHHFDIHRQAYNYTLYEYENVDADNIGSAYKHHCRLPRWKDEFPVFSEVNSKALQRTVTRFYQNLDGLSEQKQNGRKVGKLKWKSPREFQSMTYSQPSFDLKNTSGRRATLWLSQIGDIPIHYHRPIPDKTAIKEVTVKKETTGEWFVSFGLKADDADVPEKPDVDSLNASNSVGIDLSILNYIHTSDGKTVDWLDLEDDYERLRREQRKLSRKVKGSNNYEKQRRKVAKVKCHIKRKVMGYQHKLTTWLVREYDAVFVDDLDVKDMLEQSHNARNKQDAAWRQFITLLDYKADLYGCHVVQVEARGTTKECASCGVETAKPIWVREHSCPSCGFECDRDANAAMNACNAAFLS

SEQ ID NO: 28633 - protein, 268 aa, Hadesarchaea sp.
IFLNPAKYHLKLLERGEIRDFQLVKRCKKYYAHIVVQYEVEDRPVHAVLGVDLGIRRSAATVLLRPDRPLKREDFSVIRDGPKRQLLNWLNERAAELRRAKKWKALKRIQGKRRRIAEYFDRLTAKRIADISGNCLVVIGYPKWVRANNYRGNGKRWLRRKLTGWSYGRIIRYIREECAEKGIKAIESDERWSSMICHRCGSRNTERPIQSIIRCYSCGLIYNADFNAAVNIGSSFSAGPWSRGVQLNHPELRVIRPERSGSAEAAGL

SEQ ID NO: 28634 - protein, 430 aa, unknown
  TnpB Polypeptide
MQLVEQHVIDKSDPRHAIIDDAAFKSKNLYNAGNYEVRQSYIHEGKYLNYNEVQRRMQSHEAYKALPAKVSQQVLMQLAHDWDSFFKARDAYNEDPSKFLGRPKLPGYKHKTEGRNMLVYTIQAISRGKKGLQRGIIKPSMLAIEVKTKQKDIDQVRIVPRKGFYVVEAVYGKDVKQAPVNPAFYAGIDIGMNNLVALTSNKPNFQAIIVNGRPVKSVNQFYNKRKAELQKQLGHTGTTKRMERMTNKRNRRIDHYMHTASKRIIDVLVKEGIGVLCIGKNDAWKQEANMGKRTNQNFVQIPHARFIAMLTYKAELVGIRVEVTEESYTSKASLLDLDPLPVRNNGDEKHTFSGKRVKRGLYRASNGRYINADINGAGNIIRKVAPDAFGQRAVEDGKEVLASLVVHPVRIVVPLTKLKDKRSVAKASGQ

SEQ ID NO: 28635 - protein, 450 aa, Cenarchaeum sp.
MIRIIKVPLRRDVLFAEWAHHTNHASRYVYNRAVSEYLYSEKYFKRVVVDILHPFKLPGKSSFTTGMLDDYYQAYDFSPSKRALKYGMFKQLTGWRAEHTWLRECPMVFGRGAIQDASVACRRVVEDNSNHTPYRRKDGRIILSCINPPVRKGEHTIHIPGYGIVETAKPIDVSWDMRSFKIVDVTKRVDKHTKPSDHMFELHIAVYTPVKPHRNTGTIRGVDVGGKHLAVTVDTNGNVTIHNTRHRAILREIDALKNLRDHKVRHGRKWHVLNDQIKRLYRKADGIAVNTINQTVSRVVQGTDAVIAEILSIQDMTAHGGNYKKHMNRSMRENRLGEFLRKLAQRCEKEGIPLCGVMANYTSQTCHVCGHVDSESRISRDQFICTNCTRIFHADVNAAWNILYRVAGNVILRRPEHKEGYKPTPTMLYTIQRGRQKRHECTAEAVYFCI

SEQ ID NO: 28636 - protein, 427 aa, Escherichia sp.
MHQENTMLPRRISVSLFIDQSIIWPVKRLQAFKFQLRPGGQQEREMRRFAGACRFVFNRALALQNENHEAGNKYIPYGKMASWLVEWKNATETQWLKDSPSQPLQQSLKGLERAYKNFFQKRAAFPRFKKRGQNDAFRYPQGVKLDQENSRIFLPKLGWMRYRNSRQVTGVVKNVTVSQSCGKWYISIQTESEVSTPVHPSASMVGLDAGVAKLATLSDGTVFEPVNSFQKNQKTLARLQRQLSRKVKFSNNWQKQKRKIQRLHSRIANIRRDYLHKVTTTVSKNHAMIVIEDLKVSNMSKSAAGTVSQPGRNVRAKSGLNRSILDQGWYEMRRQLEYKQLWSGGQVLAVPPAYTSQRCACCGHTAKENRLSQSKFRCQVCGYTANADVNGARNILAAGHAVLACGEMVQSGRSLKQEPTEMIQATA

SEQ ID NO: 28637 - protein, 366 aa, unknown
  TnpB Polypeptide
MNYICSVKLTLQIKLLPDNKQANALKDTLKECNTACNEISKRCFEKKIWGQYRIHHEVYYSVKSSFNLSSQMVVRCISKVADSYKLDKKVQRIFKQFGSIAYDSRILTYKQSEVSIWTVEGRLKIPFVCHNPQYIPYIKGEADLVYKKGKFYIFQTVEVPEEDIKDIEEFIGCDFGQTDICTLSDGTNFNSEQLKKIRKKYSKVRASVQSKGTKGSKKLLKRLGGRERRFATISNHTVSKQIVAKAKEENKGIAIEDLSKIRFTAKPKSKAQKTELNRWSFYQLRRFLTYKALLNGIKLAVIPPAYTSQTCSVCLHIGKRVAKKFTCENCGNISDADENAAKNISAWGVAVNTPEKNNMFCSLHSC

SEQ ID NO: 28638 - protein, 405 aa, unknown
  TnpB Polypeptide
MKIQRAYKTELKPNNKQRTLLLKHCGVSRFAYNWGLNRKENIYTINQLPIPHIKYPTAIDLHRELNKLKKTDYQWMYEVSKCSPQEALRDLDDAYIRFFRCQAKHPKFKSKKKGVGSFRLTGIIKVNSKMVQLPRMGKIRLKESGYLPHDTHILSATISEKCGRWFVSIQVEENITVPINNNPVVGVDLCVSDKIAHCSDNIIFPNPRPLRQLEHKKKRIQREVSRRKKGSNNRRKSVRKLQKIEMKIANIRRDIQHKATTILAKNKSVIGMEDLNVSGMMKNHNLAKSVSDAGIGEFYRQMEYKTTWYGSKLITADRFYPSSKTCSRCGYIHKDLILSDRVFVCPVCNFMIDRDLNASVNLERFAISSMENLNACQSREVSFPSGKVLDNEAGNEYHIGDVLNG

SEQ ID NO: 28639 - protein, 401 aa, unknown
  TnpB Polypeptide
MIRSSKISLKYSNVQKRQSLLEIVVEYNRVIQSIIDLIWNLDQIPALLPKHLTSQVESWLSARMIQCAAKQASGIVRGTKKKHNQRLYMLAKLTKEGNHDQAVKLQKIINKKPITKPKIDNINPELDSRFVKFDWNNHTSFDGWVTISSIGSKKQIKIPIKRTRHFNKLYSKAKLKHGIRISKDSITFIFESSEIPKVKSGSTLGLDIGFKNVYSLSNDIVSTQCRHGHTLETITTKIIKKKKGSKGFKKVSDHRKNYINWSLNQFDLSGIKTLRIENIKNLRLGRKSSKLLSHWTYTIIFDKINSICETSGVHVEQIECSYTSQRCSQCGWVRKANRVGKLFTCNKCNYAIDADLNAAKNISLYLRKLDIRKIRQTKLNLKGFYWFGQEPIVPVTQGIKI

SEQ ID NO: 28640 - protein, 303 aa, Halonotius sp.
  misc_feature (250)..(256): Xaa can be any naturally occurring amino acid
MHYAYRFRLNPTPEQRERLDYHRDTCRQLYNHALNEFEQIPDSAGTLNQRVRQVRDQLTDLKEWWNELNDLYSTVAQAAIMRIEDSIKALSELKERGYNVGSLNWKAPQDFRSFTYIQSGFEFDSKNGQPVLSLSKLADIPIVKHREIPDDVTIKEVTIKKQPTGEWFASFAVDGKQTPEKPTDPERCVGIDVGILKYAHDTDGTAVESLDLSDERERLERAQRDLSCKEHGSNNWEKQRKVVAQRHADXXXXXXXSAARRRASGWRRRGRARSARGRCPRSRKERPRASLRACIARRSSRRR

SEQ ID NO: 28641 - protein, 556 aa, unknown
  TnpB Polypeptide
MATRKKHIRTPYKEKRKEHRAAASRHVLVLEAQIEENDKRKLFHIADDLRVYGNHLANISQKRLSQLFRTKAYREALKQYHNAKSALSSLDKGTTKYNEIKKKANSAAEVLKELQAKYKLTFEDLRHDMAEISKDSRINSIFLLSETENIWAAVQSVLYRDGKHLNYAKRGELPLIRAKQIEHGITLSFNNGSARCKIGGIDAFTLITKKNDSFAKNELACIEAFVSDPSAEEKAVAIFSETGIPQNTYRPCFIALKCVTIRGRLRVYAHITVEGDPIPKYTKSGDLKHPCGKGLVGVDLGPQSVAAVSDTSVILENLAERNSKSTKRHERKERLLLRALDRSRRANNNDRYNEDGTVKNGIRKPWKKSKQYRKKEASLKELRRKNALSRKYANNELANRIRAMGDDVTIEKSNVKALQKKAKPSVPEQGKKQTRRKRFGHSILHRCPGQLYAQLHSKFGENHFHVVDNMYRASQYDHKSNTYNKKKLSQRWHSFDDGTKVQRDIYSAFLLLCHNDDFKTINQDICTSKFETFKKAHDKCVSDIKASGHKVCNSGI

SEQ ID NO: 28642 - protein, 376 aa, Pyrococcus sp.
MKLTLKMKMRPLTRSKEWMLEQSIEAFKACVNDWLSAIAQLGEKPNRGNLHRFAYRAIRDKYPQLHSNVVQDAMNLAIEIYRSWLKNGGEFPKFRSDVIYFKGVDVRIENNGLVVPLMGRRVYLPLYVPKKYKKYLQYKHGRVIIKRVDKDWYALVSVNVPEKEPIKPVGTIGVDLGYYNLLVASDEKGRVVMRVQGDILIRHKEHMERLTARRQERLMKKFGIYARTNHKDRRFVNDLNHKIAKALVLKAKQLNRAIVLEKLKGLKKQRRPKLLRKILHLWSYADLIAKIVYKAKLYGVPVIFVSPRGTSKTCSNCGYYVRTFKDDRVFRCPKCGFVADRDYNASINIAKKGLEELRKRTFLPTLKDEASSPQGW

SEQ ID NO: 28643 - protein, 340 aa, Pyrococcus sp.
LPKWFKPKPPNYLKDGGKRKPLIILRNDQYKIDGNTLILKGLGRFKRLEIQFKGRIHLKGKQGRLEITYDEVKRKWYAHISFTVEEKLTRKGWVKIPRQPLGNLSAGIDLGVNNLMAVYVENGESFLVNGRPLKSIGFYFQKKVADYQSKLNKSGTKTSRKLRRLYERAKLQARHYINTAVRQTVKRLYHLGVSRIIVGYPKGIIRNSNKGKKQNFLLSHIWQFNYVIKRLIEVAEEYSILVEVVEEAFTSKLCPVCGRPHEGARFTRGLFKCPATGLIFNADLVGAFNILKKVIRTITQNLGGLYAQGRGNGPETGPSGRTETGDGSRWMRARKPLPAR

SEQ ID NO: 28644 - protein, 394 aa, unknown
  TnpB Polypeptide
MRHTYRVYPTKQQAESLSRIFGSCRFVFNRFLRIRTDAWFKENRSIGYNESSAMLTELKRQPETEWLNEISCVPTQQALRHLQTAYINFWNKTAKYPTFKKKRGKQTAEYTRSAFKWDAANRNLSISGIGRLDIHWSRGFQSIPTTVTITKLPSGKYFVTLCLDEVRLPLPKTGLKIGIDLGVSRLATLSNGEQIPNPRALGTNLLKLKKLQRKLAKKKKGSGRRRRAILKVARLQEHIANMRKDHLYKVTTDLVRRFDVIQIEDLNVRGMVRNHKLARVIGDAAFGMFRGMLTYKCDWYEKDLRIIDPFFPSSKRCNVCGYILESLPLSIREWYCPECKTHHDRDDNAAINIRDAEGHSVKARGEVTRPVRASARKGRPRRNVNQLGNVKHSV

SEQ ID NO: 28645 - protein, 255 aa, Streptomyces sp.
MLRSSRRPLPAPLPDLANAKHGRYVLASKVAFAHRGQEWADRITANRAVAYRIHLDVERGRWYLTASWQHAVVKTVPLDTARANGMVGVDTNADHFAAYRLDAHGNPVGDPMRFHYDLSGTADHRDAQIRHAITRILHWAKGCGVAAIAIEDLDFTAEKTREKRGRRKRFRQLISGIPTGKLKARLVSMAAGMNLSIVAVDPAYTSQWGGQHWQRPLAAPRRKMTRHDAASVAIGATRPRVPDPATDGTAPAPPE

SEQ ID NO: 28646 - protein, 367 aa, unknown
  TnpB Polypeptide
MMVNKAYKFRIYPNKEQEILINKTFGCSRFVFNHFLAKWDNAYKETGKGLTYNSCSAQLTQLKKELTWLKEVDSIALQSSLKNLADAYSRFFKKQNDKPRFKSKKNPVQSYTTKYTNGNIAINGNKIKLPKLGWVRFAKSREVDGRILNATIRRNPSGKYFISIGVEAEVSELPKTNSTVGIDVGLKDFAILSDGTVYSNPKFLRRLEEKLIKEQKILSRRKYGSSNWRKQKIKVAKIHEKIVNARNDYLHKISTEIVKNHDIIGMEDLSVSNMLKNHNLAKAISEVSWSQFKTMIEYKAKWYGKQVVTVAKNFPSSQLCSRCGYKNKDVKNLGLREWECPNCHTHHDRDINASLNIKNEAIRLLSA

SEQ ID NO: 28647 - protein, 416 aa, unknown
  TnpB Polypeptide
MALGCEGLLTLTIKMRVSPELSSHQKLLNLMRRYREGLNHAIRVVVESKALSLGKAHKLLYNVLKERYNLPSKVAVDCYREAIAIAKSWLSNPDRGRMPRAKTPRLWLTYKYSYRIRDGYVELLGGYKLRIVGWDRRYDGYSSGDARLMLKDGKFVLEVSKHVPKPVKYNPRGVLAVDINEKHVVFGNSRTEYKFETAIERALHYKLLAENLQKRYSSTRYNVWLRRRGVRERVGYFHKRTRNIVEDWVKKVSHKIVSLAKQHLYAIAREDLSGLVENLRKLPRKHRVAILLLSYRRLEHWIDWQCEKNGVPLIVVDPKGTSSTCPRCNSKLVENGYRRMKCVKCSFEADRDTIAVLNIEKKALSKMGGSLTTPTAPQMTDVSTNRCGEPMKPLKGTLTLQAGRRSAPFSIFQTFI

SEQ ID NO: 28648 - protein, 657 aa, unknown
  TnpB Polypeptide
VWARGASSSRAPASGTQSKNGGYTGGLITTPSPGRASSRSSSTTPTPTSVTAVTDAGSMSQFHRVAAKPASALPSSGVGIAYPVSDRPTASLRACATGAASAKSISATVSGSTPAGYVCHFALRRFLSTSTGSTGSSGMSTACSSSVSVSGCVPVGRGLAASRRERRRAKRDASGRDWKYAGVVCVMGAGVSWVVLSVVPGALDVCPDAGTPDRRTWCIAPPGRGCASPPPSGGGCWRCWCRGVMCGPACLKSTRGGGPGRTGHWFPIKRCAGNWPRPGRAVLGKLDTEGARSVLRRYSEAWFAAAQRRRDGDRTARFPRRRRALMAVRWYHGTFTLDGRRLRIPVARGRPPLWVRLDRDLPYPPGQVRSVTLLYDAGRLWADVTAEVPVRAYPAGQEPDPARVAGVDLGIIHPYAVAGPGGEGLLVSGRAIRAEHRMHLADSKVRRRAVARRAPKPGQKGSRRWWHYRRQQRLAEARHRRRVRQAQHEAAKTVIAWAVERKIGALAVGDPRGVLKLQAGRRHNQRTRDWRIGHLITVLQDKAEAAGISLQLVDERGTSSTCPACRSRIPKPAGRVMACPACQYTGHRDLAAAASIAARSGGGTTSATLPAGVTHRRAGAHLPGVSPARRDPRRRTHHRGASGSPGRHRPAPASPTS

SEQ ID NO: 28649 - protein, 513 aa, unknown
  TnpB Polypeptide
  misc_feature (332)..(332): Xaa can be any naturally occurring amino acid
MSEIYGAYEFKHFANKGKIEKIKAVLKEYRKTAQDIANYLWMEFFKNGGNLPHKKKISVKHISSNLSERYKYVCLWQVHGVLQSYISNLQRQFANIVWNSTLSREDKLILLALNQRQEWLKCSADKVNIYDSGKPKEVEVKDFHRILAKKIFKHLMDKNRKPSFKHISMHLDGKVVELLPKQQGKAKSFDYWLKISTLEKRKPIYIPLQKNSYAERLEGEFLNFCQVVERNGKLEFRIVKELKKRDYIPTTDVIAVDLGLNPLFATNRGDLIGRSFLSFLMKLDEKITKSMGSLQRRGLKPSQDKKYVKLITKLREFLKNEISRMLNRIVDXYKPAKIVVEKLDFRSPELSKRMNRLVQNFGKRFVREKLERFRELYGIEVIEVNPAYSSQECSSCGYVDSKNRKNTHTFECKACGKKVNAQVNASRNLLRRSSLKEFLNTNLPKKKLLKILVKRYLERLKGCRSAPLELLKSNPYFGDYFEEFLNPWQGSPLRVSVHGTFVHAEGNSKTALK

SEQ ID NO: 28650 - protein, 383 aa, Planobispora sp.
VQLRYNFRLYPTPGQCAALARAFGCARTVFNDGLRARQQAHAAGLPHLSDGELSQRVITEAKKTPERAWLGEVSAVVLQQALADLNTAYRNFFASLSGKRKGPSIAPPRFRSRKDNRQAIRFTRNARFSITAGGKLRLPKIGDVTVTWSRRLPSEPSSVTVVKDAAGRYFASFVVDVAAEPLPQTAAEVGIDLGLTHFAVLSDGRKIDNPRFLRRTERRLRKAQQALSRTAKGSNNSKKATVTLACAHARVADARRDFAHKLSTRIIRENQAVVVEDLCVKGLARTRLATSVHDAGWSAFVNMLEYKAARYGRTLVKIDRWFPSSKLCSACGALAGSMPLNVRSWACPCGASHDRDVNAAQNILAAGRAERLNACGGTVRPAA

SEQ ID NO: 28651 - protein, 361 aa, unknown
  TnpB Polypeptide
MLTYKRKLILSGDQQSRIEKWIGACRVVYNLGLEIRMEAWKNKQQTVHKFELMGQLTDIKDIDWIADVPAQSLQSVIERLDNSYKIFFKGGGFPKWATKRKYCSIKFKQMWGGLKVENNKVYIQKIGWLKIFKNTEIFGNIKTATIKKEQTGYFISIVTDATKNIQNKDENQVIGLDMGLSHFCVDSKGNFITNPKHFEKYEAKLRIENRSLARKKKGSNSWKRQCKKLALLHHKISNVRKDFLHKESTKIAKQYHTVYMEDLNVRGMVRNPKLAKHILDAGWGMFGTMVAYKTNRVGVNPKHTSQQCYVCGHIAKENRKTQSEFECVKCGNIDNADVNAGKNIEGKGITENRQRKALACA

SEQ ID NO: 28652 - protein, 408 aa, Cyanobacteria sp.
MLVREAKLLNGTKEQYLALDDAIRTAQFIRNKAIRYWMDNQAVGKADLYALCKDLAKEFPFAKKLNSAARQASAERAWASISSFYSRCKKKEKKKGYPKFKKHCRSVEYKLSGWKLSPDCMTIAFTDGFNSGTFSVYCNKETREDLLRLKINRVRVVRRSDGYYAQFCFDADRKEQGEYTGNVLGLDLGLKYFYKDQNDRAVIYPQYLRQSEKRLKKQQRRLGKKFVKGAKPQSNNYHKARIRLGKIHLKIQRQRKDWAIKIARCVVASNDVIVYEDLKVSNLVKNHHLAKSISDASWYQFTQWLDYYGKIWDKAVVAVSPHYTSQDCSNCGQRVKKSLSTRTHSCPHCKIEICRDTNAALNILKKGMGILGISWQNSTFGQKESASWEGKRGEKTASTIDGQPEIAT

SEQ ID NO: 28653 - protein, 458 aa, unknown
  TnpB Polypeptide
MAKRFTVPDGWVARGFTFEVEWPDDPAVVHSHFGARRYAFNWALSQVRADMDARKRDPAHQSVPWDFRALRNEWNRVKRDLAPWWTANSKEAYATGITDLVWALDNWKASRAGERKGRKAGFPKYRSRRKDRNRVRFTTGAIHLRPGRRAVILPVIGELRSKESTRRLERLTAAGKARILNATLTERWGRLFVSFGCIVRQQRPAPARPAARCGVDLGLRWLATVADSDGGVFEVPNPAPLRATLTARRRAGRQMSRRIYGSKGYNAAKTKRAALDRRCVHLRKEATHQLTSRLAGEYGEIVVEDLDIAGMKRSMGRRAFRRSVSDAALGQIRPQLAYKTAWRGGRLIVAGRWFASSQIHHGCGCRLAGGRLDEWKTCTVTGVRVHRDRNAALNLRDWPETNASLGVVDAQAPPGMPGGQAHGTSRGRGRPRKTRPSGQAVADEARTITEPREGVPAA

SEQ ID NO: 28654 - protein, 368 aa, unknown
  TnpB Polypeptide
VLRRTFEYRLYPTEDQVQILTYCLTTCRYPYNELLEDRKNAYDRCGIGLNYNDQAGQLKYLNLGVYSQVAQDVLRRLDKAFQNFFRRVKNGDKKVGYSRFQGKNRYDSFTYPQTGFKIKDSKLHLSKIGAIRIFQHREIVGKIKTCTIKRDDDQWYVCFSVELPDVEKKEIKTAVGVDVGINTLATLSDSMEIENPKTLNKYDSKLRKAHRNLSQKKKGSNNWDKQKIVLKGIYRKVRNARKDYLHKASRILADSYDRIIFEDLQIKNMVKNHHLARSIHDASWGILISLTTYKAEEAGGVIELVNPRNTSKQCSVCGCVQSMPLSQRTYRCPDCGAVMGRDHNAAINIKNQYVRADCPELTPVELVA

SEQ ID NO: 28655 - protein, 386 aa, Parageobacillus sp.
MNYLPKGGEPMELTLTAKVKLNPSPEQETLLHETRSAYQRGCQYVSNMVFQNKILKQRKLHDLTYRHLRSVFSLKSQMAQSVVKTVIARYKSLQSNGHQWNLVCFKKGEYDLVWHRDYTLCGDVFSINTLHGRIKVSFERKGMERYFDGIWKFGTAKLIYKNKKWFLHIPVFKQVEDVDLGNIRQVVGVDFGVNFLCTAYDSQGKTTFFRGKAVKQKRSHYQRLRQELQKRGTTSARRSLKKIGQRENRWMTDINHSVSKALVEKYGPNTLFVIEDLTGVRHATERVRLKDRYVTVSWAFRQLREMLEYKAMRNGSKVIAVDPKFTSQTCPKCGHTERANRDKRKHLFCCRNCGYRSNDDRIGAMNLQRKGIEYISAVTGGAGLRL

SEQ ID NO: 28656 - protein, 542 aa, Streptomyces sp.
LSGLRKVGAPFVVPGPCGIAVRDRLKHLTGEDERVLRLVGDHLGTLASRDLKARCVAGSEHDAELWAERKRALTPGSSSRWAGSITKASHDQWALARRGQLAHIQTLQAGVRTIEHRLSLPVGQAGSRRAPGGYRSKREWFAKTRRLHVLTDRLDAARADWEAGRVGVVRGGKRLLNTRHHLRAAGLTKEQWRARWRAGRRFLAADGESVKRFGNETIRVTPDGEVSVKLPAPLAYLANAPHGRYVLAATVAFAHRGEQWADRIQTNRAVAYRIHEDTIRGRWYLTASWTIPPVKTVPLTTARTNGLIGVDTNADHLAAWRLDTHGNPVGQPLRFDYDLSGTAAHRDAQIRHALIRLLHFAKRHGLAIAVEDLDFTADKTREKHGRRKTFRKLISGMPTARLRARLVSMAAELGITIVAVDPAYTSRWGAQHWQKPLTSTHRKPTRHDAAAVAIGRRALGHPIRRRTAPPPAHRSDEQGHRTVQAGSAAPGREEPRPRIPGPRTRFVRTGYGAKAGNQDTQHRSGCPAEHEPWQQDSLPLSL

SEQ ID NO: 28657 - protein, 411 aa, unknown
  TnpB Polypeptide
VVWEGGDNMKVTRTEQQKIKKSHPLWKVIDEMCFHSKNLYNEANYVIRQEFISNGKYINYFDMNKEFKTHDNYKLTMSQPANCTMRLLDKNWKSYFKAIKDWKEHREKYLGMPKLPKYLKKDGRYVWCLPNNTCYIEGNELHLRVKKLQSIKWYTQAKGRLIQVRFVPHSNFYMMEVVTEVEIFDIMDIESKRIASIDLGIDNFVTMTNNIELSPIIINGKGIKSINQFYNKQRAKMQSELKCRNDKFTSKKFNAITEKRNARIKNYMHCTSKYIVEYCKKNNIDTLVCGINKEWKQESSMSKVSNQKFITIPYDMLISQLTYKCQDYGIKFITNEESYTSGTSFLDKELPTKDNYDKSRRVKRGLFQASKQLINSDVNGSLQILKKVFPDAFKECYGIEGILTPVVINVA

SEQ ID NO: 28658 - protein, 412 aa, unknown
  TnpB Polypeptide
MVRLQYDKDYAALRQQYMELSKKLSKKEELSKEDKAEKKALSAQLAERRSAYGLSKSALECYLKVCGKQFSKLLSSQQVQTEADRVWCGVEKCLFGNGKALRFKRFMDFDTIGGKSNKNGACFDSEAMMVSWVGLSLKCFLPKSASSRSYVEESLKGTVCYCNIKQKMFSSGWRYYAEIILKEDAPARKRPIGTSTMGIDPGVSTVAGVSETACVLEELAPKAIRYEKKIQALSQSMDRSRRISNPDKYNEDGTIKRSNHEPWRHSENYLKMSRMLKTLHRKRHDYIVGSHRQLCNKLLLDSKYFLVEKMQFQALQKRAKETKRQEAVSEVRQKNGGIKLIQKFKRKKRFGKSIGRRAPARFLLELKQKAEAVGGGYAEVDTKEFKASQYNHVTGNYEKISLSQRENRSEEE

SEQ ID NO: 28659 - protein, 385 aa, unknown
  TnpB Polypeptide
MKVQLSPNNKQLTKLFQYVGCSRFAYNWTIAREQENHKQGNKFLSDNELRKEFTQLKKQENYKWLNNISNNVTKQAIKDACNSYKRFFKGKSKHPKFKSKKNSKQSFYQDNVKIQFTDTHVKVEGFTMSHRKNKQKLNWIKLCEKGRIPTNCKYMNPRITYDGLHWFVSVSMEVDNNTNSPPISEGVGIDLGLTDLAICSDRNTYKNINKSPKVKKLEKKKRRLQRSISRKYNMNKRGERYKKTSNLVKGEQELLKVIKRLTNIRRNHLHQTTSDIIKRKPSFICIEDLNISGMMKNKHLSKAIQQQGFYEFRRQIQYKSEWNNIPVIIADRFFPSSKLCSCCGMINKDLKLSDRIYRCDCGNVIDRDFQASLNLKQYGENVLNL

SEQ ID NO: 28660 - protein, 412 aa, unknown
  TnpB Polypeptide
MTVIQQVEKHVVKKSHPHYSMFCEYTHLAKNLYNHANFLVRNEFTNTGKWLRYQKLNEMLRQDADYPDYANMMAVQSAQQTLRLLDNNWKSFFNSIKDWSKNKDKYTGKPKLPKYKPKDGRMVFILTNQQVKRKDDLLYFPKSFQGFTLKPRCVRLDNFKKINQVRIVPNNQVFCVEIVYSIYVNDKLLSDNGRCMGIDLGLDNLATIVTNTGLTPIIVNGKGLKSNNQYYNKKNAYYRSVAKHMNDKFYTNRLYRLTQKRNFKIEDSLHKISKFIVTSALSNDINTLIIGNNKEWKQSISLGKRLNQSFVNIPHQKLIEKIIYKAKSVGINVILTEESYTSGTSFLDGESPTKEFYNKKRRLHRGLFISNHSVQINADVNAAYQIMKKVFPNVFADGIEGAVLHPVRVDIV

SEQ ID NO: 28661 - protein, 365 aa, unknown
  TnpB Polypeptide
MKKTYKYRLLANKSTFSKAAEWLVLCQNLYNAALEQRIKYYRQKGQTITCYSQIKQLPELRAAFPEYEEIGSQVLQDVIERLDKTFKAFFSRVKNGGIKAGFPRFKSKDRYDSFTLKQTGWKLEGNLLNIRNIGRFKLRLSRPVEGNIKTVTIHRELCDHWYVCFACDNVPERKLAPSNKSVGIQMGNDYFLADSDGGRQEHPKYLQRAEKQLRIRQRMLSRRIKGSHRRQKARILLAKNYEKITNQRDYFLHKIANKYIANYGAIYVEDFDIKEIDKEHTLAKTVRDASWGKFFELLNYKAEDAGRSLIKVPYSEIASETCSACGAINSDIISRDGQWVCSVCGVLHDSSSDIAKNILRVGQTL

SEQ ID NO: 28662 - protein, 365 aa, unknown; identical to SEQ ID NO: 28661
  TnpB Polypeptide

SEQ ID NO: 28663 - protein, 400 aa, Halomicroarcula sp.
VKYVEVRRTVPVKLDVDDSDADLLRETIQQFLDSANYVVDVASEGESVETRKSVLHEETYSDVRDRTDLHSNHVQSARDRAVDALKSVVSKWKKGEYASLPTFTTPFCEYNQRNATFYDDHATLSTIDGRVTVDYILPDEDRDTPHTKYLFNEDYERTGATLHEREDGLYLHIRTKADMDAPEHSENGTVLGVDLGVENIAVTSTGAFWSAAELAHWRTEYVERRRSLQECGTRWAHENVQSVGDTETGRFTQELHRIANELVKEALENDCSHIAFENLTGIRSRMPNARKFHEWTFRRLFENVEYKAEEYGISVEQVNPAYTSQQCSTCGFTHEENRHGESFECQQCGYENHADYNASKNIGLKLLRNQTGGEGGAPVGVRLNSGMLNTNGVTSVPELA

SEQ ID NO: 28664 - protein, 370 aa, unknown
  TnpB Polypeptide
VRKTFKYRIYPGKSQTSCLTRILGECRWLYNHLLEQRKTSWELKKRSLSYFDQLLTFRKLKKDRPSLMVVHSQVLQNVSARIDFAFKAFFRRCKKGKKPGYPRFRNKFRYDSFCYTQSGFRVIEGKSVVQLSKIGRVKIVLHRPIEGKIKTCTVKRTATNKWFVSFSCDIDLDVKQKPLDPVIGIDVGLESFATLSDGSKIGNPRFFKQEEKRLARAQRKLSGQKKGSPGRKWARRVVARIYERISNKRSNFSHQASRRLVDRFGVIAVEDLSINKMMKNNFRSINKSIGDVAWSMFIDLLSCKAEWAGKKVIRVNPAYTSQTCSRCGYRQSKKLSDRVHKCSSCGLILDRDHNAAINILALGQQSLALA

SEQ ID NO: 28665 - protein, 226 aa, Halorubrum sp.
VDSAGDGIAGIDLGITNIATVAFPDEYVLYPGNSLKEDKHYFTRAEYDTEGENGPSEQSRWARRKLSERETHFYHTLTDAIITECVERGVGTLAVSWPEDVRESDWGKTGNKKLHSWAFDRIYQYLEYKGEMRGVAVLKENEWNTSKTCSRCGDDTRSNRVERGLYVCSSCELVANADCNGAENMRQKITPSPHGEDRSNGCVAQPSTHLFDRESGTFHTREQVVS

SEQ ID NO: 28666 - protein, 401 aa, unknown
  TnpB Polypeptide
MIKSSKISFKFSNTRKVTILNRIIDEYTIVVRRFIDILWGLETVPKFIDKDITSKIDTWLSARMVQCAGKQASGIVRGTRKKEEKRLFIYNKLIRDGKPKKARKLKRIIDKTKISKPKIENLEMELDSRFVKTNLENETSFDGWITISSIGNKLKLKIPFRRNKHFNTLDSKGTLKEGARIGKNAISFNFDIPDIIKKNEGVVLGIDVGQKTAISCSNGFTSVKDIHGHDLDSITNKLVRKQKGSKGFIKAQKHRTNFINWSINQLNLDEVKEVRIENIKNLRKGKRISKKLSLWTYTDIFYKIEDYCNEHGVHVVKVNPTYTSKRCSVCGWTRSSNRKGKQFKCGHCGNIIDADLNASVNIATKLKPIWFKQRQQYNIKKGFFWNIVGEDNIVPLVPQTN

SEQ ID NO: 28667 - protein, 415 aa, unknown
  TnpB Polypeptide
LLALKSVKQTYRPTLEIQRLLEIFHHMVNDCIEIGISYDAASLKRLSVLSWPQRRKYDCPSYYKASAVSRAAGILASRKKSLRRGIPTKNPYSLRPQITAYQGFRVKDGTLRVPIGKRSFEYVPLTSHTASILLDPAVMVPSFTLTPTSLSLCISKEVPEVECTEAIAVDRNLRNLTVGNDNRVIQYDLSDTVRIVQTTVDVVGSFRRNDARIRTKIASKYGLRRRNRIQHVLHNVTKRIVALAFEGKQGIVLENIEGIRRLYRKGNGQNKKYRGRMNGWSFWEAQRQIEYKARWVGLPVVRLSRRETRGSSLSCPRCGERLQSDKKLRRKLWCGECRMVMDRDVVAAINLARRGRVRFARSRPPIVREAQGGAAEAVKGNPTPTVILRADALKSSQDARSRATEDLTEPSDTFF

SEQ ID NO: 28668 - protein, 357 aa, unknown
  TnpB Polypeptide
MSKSDQPTKTLKVRIKDKHVPLLRQWARSVNTVWNYVNELSSRSIKERGKFLTAFDIHAYTTGASKELGLHSQCPQVIAKEYVTRRKQFKKARLNWRVSNRNSAKYSLGWVPVNTGMASWKSGQVYHNGHYFGVWDSYGLAGYKFRSASFNEDSRGRWYFNVVVDVEEKLSAGQEAIGIDLGLKEIATCSDGTELGSGRWYRGAEQQLAVAQRAHKKQRVKAIHAKVANRRKDALHKFSRQLVNRCGEIYVGNVSSSKLVKTKMAKSVLDAGWSSLKTMLEYKGAHAGIVVREVNESFSTQACSECGSISGPKGLSGLAIREWTCPDCGAEHQRDVNAARNILGRGRAPLAVGILGL

SEQ ID NO: 28669 - protein, 421 aa, Kibdelosporangium sp.
VPAQCAQQVLRQLDAAYDNFWNPHHPAGFPQFKKKHHGQGVTFPGQAVAVHKVSRRTAQVKLPKIGWVRFRLSRPIDGTVRNATVSRDGSAGTSRSVSTSPSQRRRLSTRARRSVLMWGSRARCSFPTKTGSGSARPPSLQASGSACAVWSSARPGRWRSRRKHNGGKYSTRLRTTIGRIAALKSRQARRRADWNHKLTTDLAKNHGLIAVEDLKVRNMLRSAKGTVDQPGRRVRQKAGLNKSIANQGWFEIRRQLGYKTQRYGGVLVAAPAHGSSQTCSKCHVRDPESREGCGRLFACVACGHTEHADRNASRAILDRAFSTAGRKPTTRWEAGARTSGRVGSQSTRSPHGQGRRTASRLREPSPRSPHHDQEESPAFRRERTSRAWTIPGHDRRVVGVQSDLAPGTRCPGRQGFARDRA

SEQ ID NO: 28670 - protein, 285 aa, Lactobacillus sp.
MLKKMAELKYHFGLKVRIYPSDTQKQLIKRNSDASRFVYNEMVAINKELWQLRRVKLPIDTVRSRINQLKERKNAKAMSNHFQFLNAEGIDSLAKANAIQNYNRAWKNFHQTLGTGIPKFHRKSSVWKYQTNCQYPKQKEAWLTNGTAKFVDAKHFKLPKLDVIRIKGSKKRLSQLLSRTDQTRIGTVTITKDATDRFFLSLQLGSDTPFVSAFPATKRQVGIDLNTENFLTTSDNTVVANPRYYRTIKGKLAKAQRTLARRQRRAKKNIVLCGIAKTTNSNDWW

SEQ ID NO: 28671 - protein, 391 aa, Gloeocapsopsis sp.
MKQVLTIVCKLNPTPEQVVKIEATLKAFADACNYVNQTVKPTITSASSIQNLVYPEVRSIYGLSANLAVRACARVGANRKTAKLKGKPVKSFKPTSVDYDARIFDFREKDWTASLTLVDGREHIKLVVSNYQRGKLVGRKPTSAQLCKHRDGQYYIHIQVKDEAPQPIKSDNVIGVDFGRREIAHTSSGDQWDGKQIQRVRDKYNRVRASLAKKATKGTRSTRPAARRLLKRLQGRERRFQMWLNHNISKRIVQSAIATKSVVAIENLTGIRDRTNAKPRNKVERFRSNSWAFYQLRQFLEYKGLQFGVEIIAVPPAWSSQTCHKCLHIGLRSEKSFKCTNDSCLWHGDSNWIAANVLSLIGAVAVNPLRGSVLSCERIRATESPAILSLG

SEQ ID NO: 28672 - protein, 744 aa, Rhodococcus sp.
MNDVTAAPASLSGPFSGRCGRHSNNDGVSTTPRQFAFTTRAHVAVDDATGEPIGLDDVDTRVRWLLDLITAAGGQLVSRLWQPATFDVLAAGRDRHDRRLPAQGHVAAARLGWNPHYPDGIYVPSRVSRVVAAQVMATLRTLAYRDTAITALSERFDPATGRIAPPTAAADCAPLGFARGVRRQLVAHARRTGGALAGRLRITDVQGPPQVAAMAQLSAADRQLAQITATDRELVFTVKLPTCPAPAGRAQWRNVRLTATIPGHLHGRAITDWHLPTLVLDRKGLLWRCAATELVPDCDLGSATVAVGVDWSPSTLGAAAITTENPDGLSSDYRGFTYDDRGLGTKLARLQTEGQMLHRKAARLTQLAATAPPEVRARLEEKIAVLNEHRTSVGVKRGRINRELGFHFARQVTDYAEAAGAQVIAVEDLTTLETRGHGRVNNNRAAQSARRKAVTALAHTAASVGVAVVSVPARGSSAQCPGCDAPLARPGGYHTAWCPRCGVGGNRDHVAGVNLAKRALLGRGKAIRRRGQLPAIRVAEHAPVRRSRDKTSPTPPRPRHRRVRRSQPTATPRVGVTPKQHVPAPQASVWDTVKPAPPHGDAGSRDTRSISDIRHASGREYEIYVDAVSVHRVFVLCEVQDGVAVGEGGELPDVALDADPDLHSARCLPLGGDSPGVTAMLPRMLSGTVITTLLPRSLVPSPQVTVTPSAVSSMLVTVVFRRMSAPAASAAIASRSDLVPRANL

SEQ ID NO: 28673 - protein, 368 aa, unknown
  TnpB Polypeptide
MVQITHKYRFYPDAEQTVLLAKTFGCVRVVWNNILDWRSKEYTLNATKINYAGSTKHLTEIKQLEEYKWLYEVSNVALQQSLRNQDVAFSNFFSKRAKYPKFKSKHGKQSFRLTSSGFRVKDGELYIAKSATPLQVVLTRPMPEKLNSVTVSKDAAGRYFVSVQGEQEKQALPVIEKSIGIDLGLTHFIITSDGDKVDAPRFYRKAESKLAMLQRRLSRKQKGSKNRTKARIKVARHHAVITDTRKDFLHKLSTKLIRENQTIAVEDLNVAGMVKNRNLAKSISDAGWGEFTRMLEYKAEWYGRTVVKVNRWYPSSQICSACGDRGEKKVLNIRKWTCTKCGAVHDRDINAAININTAGLAEINDCQI

SEQ ID NO: 28674 - protein, 275 aa, Vibrio sp.
MTLVAYKYRFKPSKEQAEMLEHTFGCVRFVYNNALAFSKEQYEQGNKTNLSDWNKNLTTLKKHADFSWLKNVSSVPLQQSLRHLDKAFKAFFKSGFGYPKFKNKRGKQSACYMANAFKFNAETKQITLAKMKNPLKVKLSRPFNGSPSSVYVSKTKTGKYFISMLVETEIQPLPIASKTVGIDVGIKSLAACSDGVVFNNPKYTKKYEKKLAKAQRKLSKKTKGSNNFNKQRIIVAKIHEKIANCRVNFTHKMTTKLINETDKRKPSDLYRVIAS

SEQ ID NO: 28675 - protein, 393 aa, Streptomyces sp.
MATTCVKRAFKYRFHPTELSRTFGCVRKVYNLALAARTQAWARQERINYNQTSAMLTAWKKTEKLAYLNEVSSVPLQQCLRHLQGAFTNFFGKRASYPRFKSRKKSRRSAEYTTSGFRYRGGKLTPAKMTEPLDIVWSRPLPEGVSPSTVTVSQDAAGRWFVSLLCEDPTVRPLPAAGTAVGIDVGLTHLLTLSTGEKVANPRHERKDRARLAKAQKALARKVRGSVNREKARLRVARVHARISDRRRDTLHKLTTRLVREDQTLVIEDLTVRTMVRNRSLARAISDAAWSEFRSLLEYKAAWYGREVIAVDCFFPSSRPCSTCGTLRGQMPLGVRAWTCESCGAVHDRDVNAARNLLAAGLAVSVCGAGVRPQRSTPSGPSALKQKPSRREP

SEQ ID NO: 28676 - protein, 190 aa, Bacillus sp.
MLVQEICGELDISIVAMEFDKDHVQLFLNTPTLSPADTMAKIKGVTSKRLREEFPHLQHLLILWMQDQDHKVSRVIVDFATDNNISVIRLEQLTNIRQTARTSRKNGKNLHTWSFHRLAQFIEYKATLVGIKVEYVNPSYTSQTCPKCSEKNKAQDRKYKCQCGFEKHRDIVGAMNIRYATVVGGNSQSA

SEQ ID NO: 28677 - protein, 364 aa, unknown
  TnpB Polypeptide
MRAYKYRLYPNKTQTILINKTLGCTRFVYNYFLDARIKAYQEKEETLNYTKCSAQMTELKQELNWLKEVDAVALQQSLRDLDTAYQNFFKHKSGFPKFKSKHNNRQSYRTQNSNNNIRIEGNRIKLPKIGKVKFANSRNFEGRIVNATISRTPSNKYFVSVLVDELPEKLPETDKMVGVDLGIKDFAVCSDGTIIPALNSYRKLEKKLVRAQRELSRKQKGSSNRNKARIKVARIHEKIANVRQDFLHKTSSKLINENQVIVLEDLNVEGMVKNHNLAKSISDASWSKFREYLQYKADWYGRTLIVIDTFFPSSQICSNCGFRNEEVKDLKVREWTCSNCESVHDRDLNASKNILAEGKRLLSA

SEQ ID NO: 28678 - protein, 484 aa, unknown
  TnpB Polypeptide
MTILGNSINISQRLSPKQAEFFAQCIGCSNVIRNHKIKEFSNVSIDNNQAYSHIKKLKGLDFLKSVPVQILRNASSMAYQDLMSHEKGLRGKPRIKAKHKKRSAIFTNELWSLQSLNDNKTLLTFFNQQGKKGRLPVFSVTLPHSMHQIGKQFRVSRQGKTFTLSYTIEDNIKRPTNEQLLKDLAHLSEDELSLMIMGIDRGVKRNAQCSDGKTYAYSKEESDKLKALALKKTKQQRYLAKQKRRNHNKSKKCESNRQRQRKTKITTLDKKIAHIRINAVHHWSKQIAETAPNIVAFEKLNLKGMSKRAKPKKDDNGRKYIKNNANAKSGLNRALLNANMGKLGDFTKYKLNLLGKAWVDVHPANTSKIHHVCQTKNTSRPNQATLICHTCKIQENADENASHNIAYKAISVIQSETFLKGKPKSIALRKTVEGEDTSRKKSDSVGITGLKQPVSVCSEKPRTHRHKTSDFEALPLKEHCQEQE

SEQ ID NO: 28679 - protein, 449 aa, Acidimicrobiaceae sp.
VLSRSVTFQFALDPSEQQRILLAKCAGARRFTVNHHLARVKANLDVRSAEREALAEGTRAEEPTASLSWSAFSFINEFNAWKNGKSDDSPHNEDGTRGLLWRHELPGDVFECASVDAARALENFSVSRRGERSGTLVGFPRFQAKGKVRPSFRLRNRATSGQAPTSQSVRFSDRAHLRLPKFGPVKLFGSTRQVRRMIDAGRFHVYSATLTERAGRWTVSLTGVAAEFHQAERSRTNRHTVPVGVDRGITSLAVAADANGNPFEIFEGVKTLREAQRALKAANQALARTTLGSKGRQQARAWLAKTHRKVANTRRHLIHQVSKTLVTRAQVLVIEDLNVAGMVRNRHLAKSISDAAMGELSRQILYKSRWHGVDVRVADRFFPSSKTCSDCGGTKSNLNLSERTYSCDVCGLAIDRDLNAAINLARWLPKEVPANTPPVSTASLSVSTT

SEQ ID NO: 28680 - protein, 418 aa, Deltaproteobacteria sp.
MIRPRQVRLNLNDKQFSYCQQLSQESAKVWNTAKNFFWRAYRKKGIWLSESDMKRYIASRFSLHSQSTQAVVEKFYDNLKSARSLRKENPDIRYPYKNKKWFCVHWKKKAIKVDGRYIHLSNGKGRQGIVFKLPVELADCQPNCVELIWQNGYWLSVTLEVEGKQQVLGFNGACDRTRVAAIDMGEIHAITITDGEEAEVISGRELRSVKRRRNKRVAQISRLQSRCKKNSRRWRRLQAVKSKVIAECERRTKDLNHKITRLATDWCIEPNVKTVAIGDVTGIAQNTKSEKRFSSCFRKRSRWFAKARQRLNRKSRQKISQWEFYKQRQYLEYKCDEVGIETTLESEHGTSKTCPKCGHKHKPNGRNYNCPACNLKMHRDVVGACNIRTKHLTGVLNGNARFAHRRLALRWSYGTAQF

SEQ ID NO: 28681 - protein, 382 aa, unknown
  TnpB Polypeptide
VYPTLKQKETLNSWFGCARWTYNECVKLIKSRKVKANRGALRKACVNNCNFKDKDQWVTETPYEIRDAAMIDVVHAVDTNIKKGVRFDLKFRSRRDESQSISIRKRDWNTRQRGQFKFMNSTDLKSPETLPDELECDSTLIRTRLGHYYLCLPMELKVRSAENQGTFGTIQSACVDGVISLDPGIRTFMTGYDASGQSWEWGKQDIQRIYRLCHTADKLQSKWSEKDIKHKKRYSLQKAARRVRLKIRNLIDEVHKKLAKWLCENYKVVLLPKFETSQMLRRGQRKLNSKSARAMATWAHFRFRQRLLQKSNMYNGMSVVACDEAYTSKTCGHCGELSTTLGGSKVFKCTTCASEFDRDVNGARNILLRYMTIHCHEICTSV

SEQ ID NO: 28682 - protein, 413 aa, Micromonospora sp.
VLFVQLRYQFRVYPTPGQQMELARTFGCARVVFNDGLRARQEAREAGLPYVSDGELSKRVITEAKKTAARAWLGEVSAVVLQQALADLNTAYRNFFASVTGKRKGRKVAPPRFRSRKDNRQSIRFTRNSRFKVLDNGRLRLPKVGDLAVRWSRTLPSDPSSVAIIRDAAGRYFASFVVTVDAHETLPPVDAEVGIDLGLTHFAVLSDGTKVAAPKFLRRAARKLKRLQQDLSRKQKDSNRRKTAVVKVARAHARVADTRRDWQHKLSTQIIRENQAVYVEDLCVVGLGRTRLAKSVHDAGWASFTGMLEYKAARYGRTFGRVDRFFPSTRMCSACGRINEKMPLNVRSWDCPCGAAHDRDVNAARNVRAAGLADLNARGAHVRPALVPAARREAGTHPDAACSTRSVEGISVL

SEQ ID NO: 28683 - protein, 343 aa, Cyanobacteria sp.
MTEKAYQYRFYPTPEQEELLRRTLGCVRLVYNKALQTRIEGWYSRQERIDYKQTSAMLTQWKKQQELQFLNEVSSVPLQQGLSNLQKAFANFWAGRAKYPNFKKKRSGGSAEFTRCAFKWKDGQLWLAKCGEPLPIRWSRTLPENCEPSTVTVRLDASGRWFVSLLVEDHTVKVLPQADTRKDFLHKLTTRLVRENQTIAVEDLAVKNMMKNHKLAQAIADASWYELVRQLEYKCQWYGRTLVKIDRWFPSSKRCGKCGHVVDELPLDVREWDCPECGIHHDRDINAAKNIKAAGLAVIVCGANIRPERRKSIGQLRNTPERSLRERSQRERSRRGKKQKPKS

SEQ ID NO: 28684 - protein, 379 aa, unknown
  TnpB Polypeptide
MEQMTITAKIQLSAATDDKVLLNETLSVYSNACNYVSDYVFRTHDLKQFSLNKVLYSVLRERFGLKSQMAQSVIKTVIARYKTILENESRWIKPSFKKPQYDLVWNRDYSLTQNCFSVNTLGGRIKLAYFAKGMSKYFDHTIYKFGTAKLVNKHGKYFLHIPVTYNIEESNISDICNVVGIDRGINFVVATYDSRHKSDFVSGKVIKQKRARYSKLRKELQIRHTPSARRRMKAIGSRENRWMQDVNHQVSKALVKNNPKHTLFVLEDLSGVRNATERVKTKDRYVSVSWSFYDLEQKLMYKAKQNQSTVIKVNPAYTSQCCPVCGHIEKANRNKKIHLFSCKNCGYKSNDDRIGAMNLYRMGINYLEDSQVPGTVAAE

SEQ ID NO: 28685 - protein, 377 aa, unknown
  TnpB Polypeptide
MQLSETVKLYMTKEQKTHIAATMTEYIKTVNHLVSVAINGTSISKYTTADVAADLPSAITNQCIRDAKSIVSKYNKAVRKAARNQKSAKQDPKKKEKEVKVPVLKKPCCYINNQNFRLREDAIEFPVCINGKSKRIAVRTAMTERQKQRFANAKFGAMRIVCKGTKIVSQIVYEVSESEYPGDGTVMGVDLGIKCPAVSYCTDGNVKFYGNGRKNKYMRRHYQYLRRKLQKAKHVDALKRVNNKEQRIMKDIDHKISHDIIEMAVDHGVRRIKLEQLSNIRSTTRTSRKNNHSLHNWSFYRLAQYIEYKARLAGIKVEYVNPAYTSQKCPVCGHVHHANDRDYTCRCGFHTHRDLLGAMNICNSTEYVGDSNIRHTA

SEQ ID NO: 28686 - protein, 413 aa, unknown
  TnpB Polypeptide
MKQQVKQLSKEDFKIIKKLCHTAKNLANQAIYNVRQHYFKEGEYLSYEKNYVLLKTSENYKLLQSNMAQQILKEVDGMFKAFFGLLKLAKQGKYNFKDIKLPKYLPKDGYFTLIIGMVTTITDNVLLVPYSRTFTKTHNRIKIKLPPKLANKKIKEIRIIAKSNARFFEIQYIYEVDETQRELNKQNALAIDLGINNLATCVTNTGKSFIVDGRKLKSINQWYNKQNSILQSIKDKQGNKKHYTNKQVKNNQNRNNKINDYISKVARIIINYCLNNDIGLIVCGYNETLQRGTNLGRRNNQNLVNIPFGKLREKLEYLCKMYGIEFVKQEESYTSKASFFDKDIVPIYDADNPQNYEFSGKRVKRGLYQTKQGKLLNADINGALNILRKSSVVSLEALYSRGELDTPIRIRIA

SEQ ID NO: 28687 - protein, 329 aa, unknown
  TnpB Polypeptide
MPIVNRRVTYKLYPDARQHAALDRLCDLHRGLYNAALEERIDAYRKTGASIGFSDQCRSLTRIRRECPEYLAVNAQSAQVTLKRLDKAFAAFFRRVKEGDEEPGFPRFKSRDRFPGSGFKTHGDGFRFVPGDNWKHGRLRLTGIGTMQARSEARTPGRIVCADVQRKADGWFLSLVVECEPHREQTGQRECGLDWGVETFATLAYDLEEFVEFPNNRLLNQKSEAIKESQRALSKALRGNRSKRAVKAKRALSRRHRKVANRRKDMLHQRTTKLVREHSLIVTECLTIKNMTGTAKGTDENPGKRVKQKAGLNRAILDTAPGGFSSMLL

SEQ ID NO: 28688 - protein, 331 aa, unknown
  TnpB Polypeptide
LIKILKVITNRSKITKKHPTKYKEKPGLPNYKKRGYEFNLYYTSQSCKIKDGKIILSKDISIPIPQYEKYSDLIKDFKQIRIKPLACGYKIEIIYEVKDTGVSKCREEKIASIDLGIDNLATLISEDFTVLFSGKFVKSYNKLFNKTLAKLNSIKDLQKIKGTTRRIKKLYYDREQYIEDVFHKISRKIVNLLIDSKITKLIVGYNKGWKQNVNIGKKNNQKFTQIPFARLVSYLEYKCELAGIEIVIHEESYTSKCDSLAFEKIGKHENYLGKRKNRGLFQSSVGKLINADVNGALNIMRKVVGDSCESIRRIIDRGLLFNPVRITNVFC

SEQ ID NO: 28689 - protein, 454 aa, unknown
  TnpB Polypeptide
MNLSKTSEVDSTSKGKDLTPYWNESCLEMSLKLLSHTKTGCVGSDLNLLNLLPKSSIAKSWFSMTVHCHHNQRWLKTSCQSFTSSLAKCTDLESIVVRSKKIRIYPKNPQLARKYLGLSRWWYNRTINYLNQPDTKADAYYLQKILQIGEDIPDWSMDCPQRIRTHSITDACNAVKNAKSKCLKTSEFQQVKFRAKRDPIQSFGFDKVSLKQDFVFSRKNYKLEFKATETFHTDLEGTRIVREGSRYFVIIPQKQPYQVPENQRIDAVALDPGVRTFMSFYSEVLHGKIGEGDFQHIYRLCLFLDKIYSKMSKAKCRQKRRLKQAAERMRWKIFDLIEELHKKTANFLCRTFDRIFIPSFETSQMVTKLHSSTARNMMTFSHYRFKQFLMTKGQEFMCQVIECNEAYTSKTCSYCGTIHKIGSKKRMQCDCGANVDRDLNGARGVFLRALAVTP

SEQ ID NO: 28690 - protein, 364 aa, unknown
  TnpB Polypeptide
VNKNFKVRIYPNQEQQALIEKTFGCKRYLYNFMLNLKQKLYKFYGISLNYNNMSKVLTELKKHKLWLCEVDAIALQQCLKDLDIAYQRYFDKISKYPNFKSKRGKNSYRTNGRTIHLNQNNKKIRIPKVDWIKFKSKINFSDLTKINNITISKIPSGKYFASISAEIDITAFAKTKKSCGIDLGLKDFCILNDGTKFKNPRFLVASERRLRLLQKSLNRKVYNSKNYEKARIKLAKFHEHIINCRKDYLHKISIFLIKNYDIICAETLQVKNMLKNHKLAKAISDVSWYEFCRQLEYKCLWYGKQFIQIDTYFASSQICSNCGFKNSDIKNLDIREWTCPECDKHHDRDINAATNILNQGLQLL

SEQ ID NO: 28691 - protein, 414 aa, unknown
  TnpB Polypeptide
MNRTNTILLAPTEAQEQELHTLADASAQLWNMANYERRQAYFTGNKVPSYENQWRTFKDTEPFKRIGTCKGQALLLKLREAWASYHALKRLQGNGQLPLHIKRVSPPRYMKDRNTRQRTANAIYVRNDGYRQDGDGLVLSKMLRVRFTAGTLWLGKQGRLELHYDRLRKKWYGRIPIRVKWPRKGKPHYSTRKHASIDLGICNLATCVIEDSDRAYIYSGRAVLSDWRYWTKRIASCASMLKKTNGRDSSKQLSRLYRTRRRRLDHAVKSMLRDLYEQLEDEHVTELVVGNLKHIRDNNDHGKVGNQKLHNFWPFAQIRQRINELGEEYDIRVKFKSERGTSKRCSLCGEKHKNGRLKRGLYKCAEIGVRLNADVNGATNILYGRKVAAVSGSRPMAWPLLLKWNSQQWEVSVA

SEQ ID NO: 28692 - protein, 384 aa, unknown
  TnpB Polypeptide
VRTVKAVSQNYDPSPEILMLLGEFRKMVNDCVRIAIAENVTSRQSLGKRAYHQLSRYKVPTYYRLSAISKATSMISNYRKTLEKHPDAKKPFATKPMLTDCYGFRIIGSHIRIPISIKGVYIKLNKHTQAVISGHTVRSVTLTVRTVSIAFSKETAVMEPTGLIGIDRNLNNVTTATLDGKTQVHDLSEATKIKAMYREVKSHFKRNDVRIGKRIFGKYGLKQRNRVNQRLHLVSKAIVEQAKTEKLGIVMENLKGIRRLYRKGNGQGKEYRSRLNSWSFYELQRQIEYKATWEGIQVIYVHPAKTSSTCAICGSQISECTERLVYCRKCNRTVDRDENAALNIVKRGVRFAPVGLAGEAMVQEPSKQAILKVDASKLTQLTKS

SEQ ID NO: 28693 - protein, 232 aa, unknown
  TnpB Polypeptide
MEVKVKPVSGGYELLLVYQVKAASVQSGKHAAAVDFGVDNTMAVVSDTGKSILFKGRFIKSVNQYFMKKKAERISLMSKGKETTERVWSKYLDRLSAYRTSYIRDCFHKMSRKLLVWCQRNDIGCLVLGSNAFWKQNSCIGTVNNQNFVSIPFEMLKSMIELKACEYGVTVVRNEESYTSKASFLDSDDIPVYAEGDGTKHHFSGKRIQRGLYRTSDGTVLNADINGAANIF

SEQ ID NO: 28694 - protein, 393 aa, unknown
  TnpB Polypeptide
MAVATKTLKLPFLRLNHAKAEEFAHLQAINTELANRVLAVPKKDRRALTTKSFHDVELGSAWINQTIRNANANTKVKQFKCLPLETNNQNWTLHKTGDTYSVSFGIRRGIKKRVPLQVHPVVHQPWLDAVLCGKAKPGSIKLSRSRTGVWYALISVSMEVPDADSRDSWIGVDRGQNIPAVAALPNGGRLEFFKAKRINHLRRVYAKRRKKLQKLGKHRAVKKLEQRERRTITHINHKISKEIVGLAERTGNGIRLEDLSGIRQNSKQRKETKSDNGQNRDYWPFYQLETFCGYKAALSSVPVEKIPAAYSSKTHHTCGHIGLRKGNDFYCPHCDKHEHADGNAARNIGEPWGMFCAIEPSNGSSVMGDSALSYGLDGTAPNLVREVNPEGLA

SEQ ID NO: 28695 - protein, 445 aa, unknown
  TnpB Polypeptide
VQSSKLTQTLSFGLDIYTGSGDDLQHGCLESRRIRNETNRLDQHGWNWNDIKSTVVDNASHVKNTTQLIVDKALKEIETYHDNKDDGWGRPYPYTDGMYPMVMNHGEGYRLFPEDDGSVRFRITATKGTHVKGTLRGSPGHFDRLHTAFNDEQWRVGTAEVVQKHDEWRLHVTVTHENHRVASKHNADTIVGVDVNEDCIALVAMSRNGTVKDSVVFEYPSVKEQRHEFFTKRKRMQNAGQTAFETVVQTEERDYVHDCLHKISRKVVEWVSQFSNPVVVFEDLKDMRNSIDYGTRMNRRLHSLPFAALQDMISYKAAWEGIPSDEVDPEYTSQRCPRTECTHTERANRHKKRFKCRQCGFQDHADRKAAVCVVQNWVDEQYGNVPSLKTLPQVRKVRRAASGAGGGPDSHGHTECSGVTDNGMSAQGNRQVREELKTVASAVPE

SEQ ID NO: 28696 - protein, 364 aa, Pyrinomonadaceae sp.
MLRVKLIVNLKLQPTPEQARILRQTLELANKACNAISEQAWGTQTFRQYNLHKLVYHSIRDTFDLSAQVVVRLIAKVADAYKLDTKRERIFRLHGSIAYDDRILSCKRDDRVSIWTVEGRQAIPFVCGEYQRKLLPFRKGETDLIYRKGSFYLNAVCDVDEPLLDDAQDVIGVDFGIVNLATDSDGEVFTGAKVDETRRRYAHRRRNLQRKLTRSAKRKLKRLSGKQSRFQRDTNHVISKRLVLKAKDTTRAIAVENLKGIRERVTVRRSQRARHHNWAFAQLRNFLEYKTRLYGVRLYAVDPRHSSRECSRCGYTDKANRQSQDKFLCQSCGHCANADFNAALNLRARAVSISQTSTSVDKAA

SEQ ID NO: 28697 - protein, 270 aa, Clostridioides sp.
MHIKNSLKKKQDFLNLNQRKLIDFHIKLPKLGMVKIRDKQVPQGRILNATISKEPSGRYYVSLCCTDVDIEAFENTNNHIGLDLGIKEFCISSCGEFIENPKYLKKSLNKLAKLQRELSRKTIGSLNRNKARLKVARLQEHIANQRNDFLQKLSTKLIKENDIICIEDLQVKNMIKNRKLSRSISDVSWSEFIRQLEYKANWHGRQIVKVGKFFASSQICNKCGYKNEEVKDLNIREWICPSCNETHDRDINASINILKEGLRLITIQNK

SEQ ID NO: 28698 - protein, 362 aa, unknown
  TnpB Polypeptide
VKIIRAVKCSTKFATTKKKQTLEIVLKEYSNVVNFFIEFFWLKDKSILNKNKLLKSLVDLPKSVTWLSYRLRKVAAREAIDMILSVKERWKLDKDKLKANKPIHRGQRLCCSSTIAELQKSNSSFDCFLHLQSIGNKVNFRIPIKKHKQFNKWESKGKRLNSYIITKDYIQFVFEIETGTKKEVGKVLGIDTGIKCLATTNEGQRIGDKLEDIIIKINKCKHGSKRQKRLRKSLRHYIDFCAKEIFTLNPNLQRVIVERLKNMNFKTKIKHKLGKGVRKTIGSWNYRYWLSRLERNCEENRVRFTSVNPSYTSQICNSCGHSDRNNRLSQDKFSCIQCNHTDHADVNAAKNILNRGFSLIYR

SEQ ID NO: 28699 - protein, 508 aa, Moorea sp.
MYKYQLTMSTEGNSQTQNTTGADAVVEAIVSRKRKLSKTSGQDSTTVEKVLKPYWDGSCQEMSAKLWSLTKTVGHDSDLNLSNGMLSKTVAKSWFSTNHTYLQKEKWWKISLPSSMSLVVDSTVSENTSLLSKKIRVYPETQLKLKWRTWINAARWCYNKAIAILKSTKIGKYDLRKKVMSDVPQWVGNTPYSPREYAIFQAFEAHKAAKKAGGFTKFRKYSDPVQSVRFNKVNFRKGTFSPKDTKGLSFYTSEPLPEKMTHDPILSIDRGRWLISFAIEEKVEVRSVPQRAIALDPGVRTFLTGFDGQKFVDLGVGDIGRIYRLCSYLDDLISRAALAKGSSNKRKRFKLRKAAQRIRVKIRNLINEAHKKISCYLTSEYQVIYLPKFETSQMVSKSKRKIRSKTVRAMMNWAHYRFKMTLKHQAAKRGCFVVDVTEEYTSKTCTKCGHVHSKLGGSKKFACSECGHTLDRDHNGAFGIFLKALRDTSSSITGVLYTASGVCHELPG

SEQ ID NO: 28700 - protein, 416 aa, unknown
  TnpB Polypeptide
MYLTVKQQVKHLSKEDYKSIKKLCHIAKNLTNEAIYNIRQYYFTEGEFLKYEKNYTLLKSSDNYKMLNSNMAQQILKEVDGSFKSFFGLLKLAKKGKYAFKDCKLPHYLPKDGYTTLVIGFVRLNGNKLILPFSNTYKKSHKPVEITIPPILLDKKVKEIRIIPKANARFFEIQYIYEAGHIQRNLNTNNALALDLGINNLVTAVSSTGKSFIIDGKKLKSINQWYNKQNAHLQSIKDKQHIGKRPTNKQKANARNRNNKINDYMNKTARIIIDYCINNDIGTLIVGYNETFQRNSNIGKINNQAFVNIPYGQLRSKLEYLCELNGIAFVKQEESYTSKASFWDKDNIPVYNNDNPKTYQFSGNRIYRGLYKTANGKYLNADVNGALNIMKKSSVVDMSILYGRGEVDTPVRIRIA

SEQ ID NO: 28701 - protein, 348 aa, unknown
  TnpB Polypeptide
MKARFKYRIYPTLGQKHRLARLVGCVRVVWNDSLACCQEKYKLGKKKTTNSELQKQFITLAKKTEDRVWLSVVSAIPLQQSLNDLNQAYQNFFKSTQGNRKVKPIRAPKSKSRMSLPTARFTKGGFKVGQHKVYLGTIGKLKIVWSRELPATPSSVTVIKDSANRYFLSFVVEVWPEVLPKTDNLVGNYLGVKTFVTVGTLHGTSLRGKKIDAPKPLRKRIKKYRKLSKSLFKKTKGSKQYEKARLKIAKFHAKLKDTRIDFLHKLSTEIIRKNQTIVLEDLNVSGMVKNRKLSRAISDLDWRTFRTFIEGKAEKYGHDFRVISRWEPTYQICSCCGFKGGKLDLSIS

SEQ ID NO: 28702 - protein, 305 aa, Rhodococcus sp.
VEEDRRSGVPQRGVVGAAATDAAPSTGGVRQFLRQARPVSVIQIAQEVPSVRRVHPIRVSFPGRRGDVGEDEGTSRHPLVSATARRRGTVYGHRLPGQCRTLARVAAGRRNRHDPARDHERGRRRCGADRPGGTVHRGEDHQPAPRTPRPAHPARAHRALCRKQKGSHNREKARRRVARVHGRTTDRRTDFLHKLSTRLIRENQAIAIEDLTVRNMVANHTLARSISDASWRQLRAMLEYKADWYGRDLRVVDRWYPSTRVCSACGALHERLPLNIREWTCRCGTVHDRDVNAARNILAVGLAER

SEQ ID NO: 28703 - protein, 410 aa, unknown
  TnpB Polypeptide
MFVRNFKFRLYPSYQQQKKLQNNIETCRWVYNKFVKFAQRSFLTRNDMNYMLTDLKQSEPWLYNYHAKMLQMVSTQLDGAQKAIIRLRKNGHKTGGLRFATHIQYRTFIYNQSGYKLEKHGHTDLLWLSKIGYMEIRKHREITGNVKQIIISKSRSGKWYAIATCENDNNILPKIDFKKAVGLDVGIKNFVYDSHGCVTPNPLNFKKSLKLLAKIQRKITRRQKGSNKRKKAVRWYQIIHERIVNRRRDFQHKLSTHYAKNNDVIFVERLEKLNMVKNHHLARSILDSSWGSFCNMLEYKCKILVEVPAKNTSVDCSRCSNIVPKSLAVRIHRCNVCGLVLDRDQNAGINILRRGLEIFRVTPNLSHIVNLPQELREVTPVEIRKWSMKQEKATKFIGSSSLKVELKNLV

SEQ ID NO: 28704 - protein, 400 aa, unknown
  TnpB Polypeptide
MGTQTLTLKLPFLRLNATKAAEFARLQDINTATANAILSMPKEEQGVLTTAHFGHVEVGSAWMNQTIRNARAKTGVKRFKVLPLETNNQNWTLHKVGDTYSLGFGLWRGVKKRIPLDMYGAHAARSLDAILNGTTKKGGLKLWRSRRGLWYALVSVTMEVPVTEGSSQWVGVDRGQNHLAVASTPQGMARFWTFGVVRQARRHYADKRRRLQKAGKHKTITRLEHKEARLVRHANHVISKHIVQFAVDHGCGIRLENLSGIRQISKQRKDTKRQADKNRDYWPYFDLETKIMYKAALAGVPVEKVPAAYTSKSCCRCGAIGQRERHSFRCPCCGYRGHADHNASRNVGRWVGASCPVVLERGVGVMPASVSPGAVHDSPQAPYATDPVRGTAQEGESHRL

SEQ ID NO: 28705 - protein, 566 aa, Mycobacterium sp.
MGDRKLREWRGVKPVAAPGGVAITTRLRTSVDDEWVLDRVAAHVGRLRCADLAANACREPVDPRLSVEQRRAVRRGRLNARKKALTAQSSARWANAIIAGNDDQYRLARDAQYRHIIGLRAAITTIEKRLAAPTTDTLTVGERKARRKAKAPKGYAMQAERHAKQQRLQHLRAELARVEQDRAHGRVHVVEGGKRLARARHHLEAAGLTVDGWRDRWQAARYRITANGSPDEPFGNLTITVTPDGQVSIRLPKPLEHFANAARGRYVLTGRAVFTHRGREWVQRIIGGNSVSYTITRRPGRAGRYLTASWAIPSVPYWVGRDETGAGDDLYASGSVVGVDLNDGHLAVRRLDAHGNPVGAAERIDIDMTGSTSRRDAQVRHAITKLIHYTRRHHITAIAVEDLDFADARAIGREALGRGARGKRFRRTVSGIPTAVFRHRLAGMCHAAGVELLAVNPAYSSIWGAQHWQRPYHNVTRHQAAATVIGRRAQGYSARRRKGVTPQRPEDRTVRATNQTGPDSRQVNTGSRHRPRMRGTESRPPCRNARGDPRWATVTPALANNDQHHL

SEQ ID NO: 28706 - protein, 293 aa, Halothece sp.
MLRATKVRIYPTKEQEQHLAKSFGCYRFLWNYSLNLTNETYKATGKGLNRFAIQKEIKKLKQEYEWLKEPYSQCLQLVALNLSRAFINFFEGRASFPNFKAKHRKQSITYPQNVSLVDNGLKFPKMGVVYAKIHKKIEGTIKSVTVSLNCQGHYYASILTEDGKELPEQSSEGKAIGIDLGINHFAITSDGSKFENPKWLNKHEKNLKAKQKRLSRRQKGSNNRNKTRKQVARVHKKIADCRLDFHHKLSRRIVSENQVICVENLAVKNMVKNHNLAKAISQVGWGQFCTMLK

SEQ ID NO: 28707 - protein, 374 aa, Lachnospiraceae sp.
MADVKTNRAIKYRIKPNKAQEQLLQQTFGCVRLVYNHYLAERINAYDKNGTSLNYYDNANDLKLLKQELTFLKDVDSIALQQSLRHLDTAYKNYFRDKKVGFPRFKSKKNNHKSYSTVCVNNNISIESNHIKLPKIGKVKMIYHRPVPDDWNLKSVTVSQEPDGKYYVSVLFEFVISIKEVPSDITIGLDYSMSSLYVDSDGNSCDYPKFYKQALARLARQQRKLSKMEKGSNNYHKQKNKIARLHKHIANQRKDFLHKESTEIANRVDAVCMEDLDMKVMSQEHNFGKSISDNGWGMFTSYLEYKLRDRGKHFVKIDKFYPSSQICHCCGYKNEETKDLSIRKWICPKCNNEHDRDINAAINIRNEGMRYLSI

SEQ ID NO: 28708 - protein, 399 aa, unknown
  TnpB Polypeptide
MNTFNLTHSIRLYPNKAQETFFKKACGCARVAYNYGLGEYKKQLDAGQKPKVFDIKKQFNQEKKMLYPWMSETNKDANQQPFTNLQKAFTRFFKKQGKFPVFKKKGIKDSFYISNDKFGVEETKFWIPKLGWVKGAEELRFKGKITSATIKRKANYWFVVVSVETENTHTACENQAVVGVDLGIKTLATLSDGKVIESASPLRKRLDKLKLLQRWLSRKVKGSSNRRKVIQRVSKVHYEVTCLRKDVLDKLTTYLCENYQVICIEDLNVSGMVKNHCLALSISDMGFGDFRRQLEYKSVLNGNTLIFADRWFPSSKMCSSCGAVKEDLTLSDRVYKCNCGLVINRDLNAAINLKNYGLKQLRAVSPEVTPVEMEALTCRVASETTVVEAGISECSVMNT

SEQ ID NO: 28709 - protein, 402 aa, Escherichia sp.
VKRLQAFKFQLRPGGQQECEMRRFAGACRFVFNRALARQNENHEAGNKYIPYGKMASWLVEWKNATETQWLKDSPSQPLQQSLKDLERAYKNFFQNRAAFPRFKKRGQNDAFRYPQGVKLDQENSRIFLPKLGWMRYRNSRQVTGVVKNVTVSQSCGKWYISIQTESEVSTPVHPSASMVGLDAGVAKLATLSDGTVFEPVNSFQKNQKTLARLQRQLSRRVKFSNNWQKQKRKIQRLHSRIANIRRDYLHKVTTTVSKNHAMIVIEDLKVSNMSKSAAGTVSQPGRNVRAKSGLNRSILDQGWYEMRRQLEYKQLWRGGQVLAVPPAYTSQRCACCGHTAKENRLSQSKFRCQVCGYTANADVNGARNILAAGHAVLACGEMVQSGRPLKQEPTEMIQATA

SEQ ID NO: 28710 - protein, 373 aa, Enterococcus sp.
MKVLKAYKYRLYPTSLQEEFIKKTFSCVRLVHNLLLQERIQLYKQLKENPDLNVKLPTPAQYKKEHPCLREVDSLALSNAQVYLDRAFKKFHREKSVGFPKLKQKKNAVNSYTTNNQNGTVKIIDGKYLKVPKLKSLIKMKMHRPVIGKIKSATISLTPSNKYFVSILCEEEIPTVEKTHSAIGITLGVSEFAVLSNGRRIDNDKYTKEFEQRITREERKLMRRKEIAKSKGTELSQQKNYQKQKLKIVKMREKLMNQRIDFLNKITTEIVRKYDLICIEDIQQADFYRNNKLHRGVTDVSWALFVSKLEYKASWYNKRLIKVSACGKCSEHSDNKELSQIFFQDINTKKSKNDPETAASVQVLIRGLQEVVQ

SEQ ID NO: 28711 - protein, 373 aa, unknown
  TnpB Polypeptide
MLKAYKYRLYPTKEQQEMFFQHFGACRFIYNWALEQKIKTYEQDGKSVSRFDLNKGITILKRDGEHDWLKDVNSQSLQGATLNLDNAFTKFFREKGVFPKFKSRKNPVQAYNVPQNYKVNFETNMMYLPKIGNVKTILHRPLGDGDLKTATVSQTPTGKFYISILVDDGRETPKKTKFSENNTVGVDVGIKDFAIMSNGDKIDNPRHLKNSMKRLKVLSKRFSRKQKGSSNRNKARKQVAKIHEKISNQRHDFQHKVSAKLVSENQAIAVETLNVSGMLKNHHLAQHIADASWSSFVEKLEYKAEWYGKTVLHIGQFEPSTKICNVCGYHNGKLTLVDRQWQCPSCSTNHDRDINAAINIKKFALQEQNLIGI

SEQ ID NO: 28712 - protein, 399 aa, unknown
  TnpB Polypeptide
MLMKRGNKFRLYPNDDQKSIIENHVGACRFIYNYSLGIKSLMYDRFKINVSNKQLDEHLKVLKHTRYPWLKEVNSQSLQQANRNLMNGFKNFFEGNGKYPTFKSKRDSVQSFQVTQRYKINLTTSQVWLPNIGWMKFKMHRQLFDQEFMNQWIETSVNDNDEVILEKKYNKDFLRTVTVSRTSTGKYYISILSDDCITKPDKMEFNDTSTVGVDLGIKDFAILSNGKRIKNPKHLRDSIKRLKTLQRRVSRKPKGSRNRKKAVLKLAKLHEKVTNQRNDFQHKITNQLISESQAIAIEDLNVKGMVKNHCLAQAISDVAWGNFVRKLEYKAIWYGKTILKISRFEPSSKLCHVCGYKNKDLTLDIREWECPICNTLHDRDINAAINVKQIALSTVGTTG

SEQ ID NO: 28713 - protein, 347 aa, unknown
  TnpB Polypeptide
VILTYKIRHNTDFSNELKQAFKVAEFAVNNPRCRSSKEVKEIGLKSAISNQILKKYGNQKTIKQVRNVNLVIPNQAIKVDKESRTIRVVPLKLSLSYQFPDFQKVNQIEIDKEYAYVSCTVLEQPEMIPQTFIGVDRNTTGHVAVTANPDTGKIEKFGKSALHVHQKYSAIRKRLQKRGKFRELKRVKDRESRIVKDLNHKISRKIVDMAKVQHAALVFEDLSGIRKTRKQHRSFKYALHSWSFYQLQTFVEYKAKLLGVPVLYVDPAYTSQDCSRCGTRGQRNGKDFKCPTCGHVDHADVNAAFNIALRQKAMVDCMQKEMCTMGALIPHDAMLEECQATSEPHRL

SEQ ID NO: 28714 - protein, 800 aa, unknown
  TnpB Polypeptide
MDNQNKRKSSKIRSKFITNTSSKMEMVFDIDHCNYTMVSALNDDYDNGKNYAIYNERYTITKDHQLYELFVACSIQSNELYNYMNRIERARFLDKHTVYFHQDLKTYIYDRLSWRSNTNSLYHGLLKDEDFKMMRSFDRMPACLRLGTVYDAADRWYKFMNEEYQMLDYYNKHGDTISDDLFRSMLPKLPRTKLGINRRRSFTIDPNKIRVVRNPKYIEKYKRANYKNGSRNTIENYTSLIKLPADMLNALDNTTIHKSIKELNQLSKHYNLTIPTMQGQKSKIVEIRVTPNRGIFNIDIKYRIQQMKRPTSNSYDSYGFDTSRIAGIDFGLDNLMAVANNVGAAPLLIKGKSLVAMNTYYNEKIYHLMYECGLNSHRLTNQISRLDNRRMNKMHNMMNNAVIKLVSYLDLLQCKTLVLGINDSLFNGFLKEGELVNKRPLDFNYLIRRIYNACKKSNINVVTVDEYYTSITSILDNQLPVKENKEAYRRVTNRLYMTQNFGLINADVNSAMQIICKYKKDAFHKVFKKCGIDMIYNNNMSGAPIIHKHSSYHTHIVRDPSAGEYEIVRQFYRPKTEYDDPAGSASYYKAIPHSMLKDLPINYYRWVIGSHNEWRMSKVPYHYSMMEQWLDLDVQYSTILFSRSHLNISRYLYCQVMFDEYRIRCGKMPRFYHHKKKHVTIDGEKYKSTGRALEIQKLLDDMYPKYNIKQTAAPMLKGLPGAGMLQPVSVEISDAKTLCILDNRRRICLPCSYIEASSSHSYQLTSVNKMICSANYNRGIDKNTFKMFDPYVDKKRLSKG

SEQ ID NO: 28715 - protein, 386 aa, Clostridium sp.
MIIATKIKLKPTNEQEILFWKSAGVARWSYNYFLAESENYYSQYNKTLKEGEVRKHINNVLKKTTHTWLSEVGSNVMKQAVKDANLARKRWFEGLSSKPKFKSRRKSKISFYVNYESLKVVNGGFRGEKIGFIKTYQPLPKLKKGEKYSNPRISFDGRSWFLSVGYEKEFEAIELTGKSLGIDVGIKELAVCSDGEFKKNINKTKKVKNLKRKLRREQRKVSRKIEANIKSYDKNRRPIYKTPLRDMKNIQKQNQIIRNLYKKLTDIRTNHLHQCTSEIVKTKPSRIVMETLNIKGMMKNKHLSKAIQEQNLYEFKRQIKYKCEIYGIEFVEADKWYPSSKTCSCCGAIKKDLKLKDRTYVCPCGLKLDRDLNASINLANYSIQSA

SEQ ID NO: 28716 - protein, 290 aa, Scytonema sp.
VRIAYQYRLRPTKQQAQEIDRWLSMLCSQYNFLLADRFNWYEQNRCPVNACPLVCHLPELRDNPDYYSQKKTLPNLKKTHPHYGEIYSQVLQDVVKRVKVTFDRFLKGDSNGKRSGRPRFKPRDRYRTFTYPQMKDGCLQSNLINLPMLGKVKVILHRPIPNGFKIKTASITKKSDGYYLTLSLEDATVPTIKPDFNPNSITGIDVGLKEFLTTSDGKTVAIPQHYRKAQKRLKVIQKRVSRRKKGSKRRQKAVKQLGKQHKKVADKRKDFHFKTANNLLKNMMLSRLKT

SEQ ID NO: 28717 - protein, 409 aa, unknown
  TnpB Polypeptide
MKILRAYKTELDLNDKQRTACLKHAGTARWAYNWGLARKIEAYRAGEKVPTAIDLHRELNELKHGAVGWMYEVSKCAPQEALRDLDRAYANFFRRAKQKKNGTLKGKTGFPKFKSRKKGAGRFRLTGRIVVLDDAIQLPRLGKLRLKERGYLPVSGVHILSATVSQRAGGWFVSLQVETEIPAPVPSLGKPAAGVDLGVKTLATVSDGTEFPNPKALKSGLERIKRFQRSVRRRKKGGKNRAKAAAKLAKAQARVANIRINTLHQVTTWLTKTKSAICIEDLNVAGMLKNHRLAAAIADVGFGEFRRQLEYKGRWYGCEIQVADRFFPSSKKHFECGFINYNLTLADREWLCPYCGQLVERDLNASKNLRSLIAPTASSAESHAWGESVSPVQQAGLVEPGTKQQLYLV

SEQ ID NO: 28718 - protein, 504 aa, Thermus sp.
MKEVEDAGKRPPRGRGFGPGQPGPPGRLGVPWPGPPDEGLPHPLRGGGRGGVPQGLGGCKQLQLFLSPLSSTELAPLRYPLGDQMRVTQAFRFELAPNEGQKKALAQHLGAARFAYNWGLSLCLKALERKEKVPSAPELHKAWNAWKRENAPWWTEVSKCAPQEAFRDLEKAFKAWRAGRAKLPRFKRKKLAPDNTARLTGSIRVLPRHIQLPRIGRVRSKEATEKLLRLLEEGKARILSATLSREADRYYVSLTCEVERPDPRPKEVQSEDDVVGVDLGLSAFAVLSDGTRIEAPRPLARKLRLLKRRSKQFSRKRKGSNNQKKAALRLARLHRKVKNLRQDFLHKLTTWLARTKPVIVVEDLNVRGLSRGRLSRSVADVGWGAFRRMLAYKAEWYGATLVVAPRSFPSTRLCSRCGHLHGRMPLSQRVFRCGACGLEMDRDLNAAINLKKYGIAHLTGSTASSAGSHACGDPSGGGTAHLSWSTSQGSWKQEVARPHRPLEG

SEQ ID NO: 28719 - protein, 418 aa, unknown
  TnpB Polypeptide
MKANYIIITRCCIICTKAKDKMLSYKLRLYPTKTQESKLDDAIESCRMVYNDFIFESRLAYKEGYKINFDELQRMIPYMIPKDKVYSKTAQMVLWQFYNNLKVLSSLSKKGKRTGKLRFKPKSRYNSINYNQSGFKFLPDNKIKLSKIGKIKCIIHRTIPGKIKEIHVKKELTGVWHAIVVCENERKSICSLLRKKIIGIDVGINNYCYDSDGHVVEHPQILRNSEEKLKRSQRKLSRKVKGSSNRWKEKIRLAKIHQKIKYQRNDFLHKISKYYVDSYDTIFVEELKIQNMVKNHHMAKSIYDSSWNSFFQKLEYKAANAGILFAKVAPHGTSQSCSNCGRMVKKTLAIRTHCCPHCGLVIDRDYNASLNIKQRGIDSLPTGCREVTPLERTPLTVACMIYGHVISLNKEIDDSSRE

SEQ ID NO: 28720 - protein, 430 aa, unknown
  TnpB Polypeptide
MRQVERHWIKEGHALYPTCDDLTFKAKNLYNAGLYQIRQSIFERNRCREEEKPSVLSWVELVSQFRKEKQDDMLALPSKVSTNILKNLGSVIHSYYQTLKAFHDKSNSSVTSKPQLPRYLHKTEGRYVVEFTNQTFSKKRGSDGELILCPKDLKLSIPTKVEHPQCVRIVPKLKAFVVEVIYEVEVSPLKQTGNYVAIDLGIDNLATITFSNGANPLVVKGSKLKSINQDYNRLIAKAKSKLPANQKTSQGIHRLWRNRELKLQSELHKVTSFLSLYFDEMSIEKVFIGKNQGWKQEVSLGKKTNQSFTQIPFTTFIFQLTYKCLAKGIEVVEQEESYTSKASFVDQDEIPTYGESDKKATFSGKRVSRGLYRTKNGFLLNADVNGSYNILVKGLLALGKSLDREKVFFHTRSLKNWQSAANKDLLLQYM

SEQ ID NO: 28721 - protein, 344 aa, Oscillatoriales sp.
MLLSIKTKLKLNKSQTTVMSKHAGIARFTYNWGLATWSYLYQDCQKITQYAFDNLGDSFSLFFSKKAGYPKFKKKGHHDSFTIDAGGKPIPVGGTSIKLPTIGWVKTYEGLPHTTCKSITISRTADSWFIAFAYEQEHESTVKQHDVVGVDLGVKELATLSTGVVFPNPKHYKTHLNKLRRLSKELSRKLKGSSNRLKAKQRLAKHHEAVANLRKNTLHQITTYLGKNHATIVVENLNVSGMLANHKLAQVIADCGFYEFKRQLEYKAKKFGCEIIIADRWFPSSKTCSNCGHIQDMPLKERTYDCESCGHSMDRDLNAAINLSRLAFIVKAYGGITAPMLPMK

SEQ ID NO: 28722 - protein, 171 aa, unknown
  TnpB Polypeptide
VEYSYKFRLYPTAMQETIIQRTFGCSRFVYNHYLSVRKEAYGENKETMNYYACAKDMTKLKSSLSWLSEVDATALQSSIRDLDTAFQNFFRRVKRGEKPGYPHFKSKHDRRKSYKSKCVGTNIKIAGGKIQLPKLGFVECRISKLVQGRILSATVSQNPSGKYFVSLCCNL

SEQ ID NO: 28723 - protein, 474 aa, unknown
  TnpB Polypeptide
VPLRVSRTQERTLLARLEAARQVYNACLGQARRRVRLVRESSAYQRARMLPRDDPARKALFAQARSQHAFSEYALHAYAPQFGQSWLGDHLDSLPLQKLASRAYGAAHRLLLGRAKRVRFKGRHQLDSVEGKNNPSGLRWCGDRVEWNGLVVQALLDPRDPVQVHGLAAPVKYVRLVRRKLGEHHRFSAQLVCQGTPWQKPQHQLGSGIVGLDLGPSAIAVVAEQQALLQPFCPEVAPDATALRRLERHLDRQRRANNPANYDERGRVKKGRKRWQVSQRQRTVQARRREVYRKLAATRKRSHGQLAHRVLALGNTFQLEQLAYRAWQRTYGTSVQLCAPGMFVERLSRLAASAGGTLGPINAWRARLSQTCHCGRVKKKTRSERWHACACGTSAQRDLFSAHLARCVDPDTSLLSVGQARAAWPRWEPTLQAAYEQAINNQPARGRRLPAAFGRPPVGPSQSGSLAKGSPSRT

SEQ ID NO: 28724 - protein, 551 aa, unknown
  TnpB Polypeptide
MVKSKEKKYLKTFSIHEKDLSLVHKFTHIVLQYKHLENILNLLIAHEFNNKINNTIDLEGSKKIFQLLLNKIIMKAVLKSNPGGQKTSHHIAQVNHYFNHNHVNFELFNQAKTACLHLNDKNIGEIVGRLHKDWGNFFTALKKFKINNNLQKPSYPKPKKLSKVYNYSVPLEVSKFSMAKADKGLLGINLGNKMVYVKFFNFNKDKFNGNKPKYLNKKINSVTVSLSHGHIYYNLQYIDEKQNLKDNIKNKDLSTIKENKIAGLDIGINNIASIFVNDKDTKSIIISGKELISYNCNFNKRLAKINNEIANEVISYKEIVNKEGNKQLIPEEYSKKGKVLQNRKSQLFERRKLYMDDYMQKLSKKITSYLILNKVDNLVISRNLSFTKTSGEIKMVKKTKQKFYQIPFGRLLNLIEDKLTAKEIKVIEINEAYTSKTSSLNADIVKIQEKSKKKEKIFPNDLNGSRGNKVSGNLNNPLGRGLFKDIVINKVINADINAAVNHIKVGINQIGLKDIKINKDLFKYCNPIKIKSNHEFDKVIKTYQIVDIQKV

SEQ ID NO: 28725 - protein, 504 aa, unknown
  TnpB Polypeptide
MILDLEGEVLDTSSVLSLLASEIRDISGYAIYVVRNDVVLGERLAAITVSAPAEAGRQAGITLPEFLATERTGKSRKERLVQYNVVAAYRSWQERIKAANGDSSKYVSQGWRRTANAAAPTYGGDYINLGAVDRQYALIENSPSIDHEIILKMLIHGRWYRLIFDFDAVRFSEGKVTLPLIRIQDSQPVFIFTVVTDNPVVQFSGDWVVGVDVGIDDYATVVVRDTKTGRIVYETTLSQRVHSLWNSVKASERQVRFLRRKADQLLCQRQARMSALDEAQLHREASSRKKRELAILAAQEIAALSHRWGNAVVAVEDLSWIVDTMQNGRWNRGAFVQWLTHYVSQNGGWVVAVNSANTSQMCHVCGARVTHPSHKVSICPEHGAIDRDANAAANIAARAVSKVSKARKTRAKNRKLQAQKPLKTPVARDSLKYPGRDRTKSVLTPKRKKLKGVKTPLSPARVQAARLVTSVLADRGARGTSETSKAALKQGHVAYNKNELCSPF

SEQ ID NO: 28726 - protein, 321 aa, unknown
  TnpB Polypeptide
LEREYKNFQRYLHGDKSVPLYSATRQQADRLLRRISKPKEVKEYPLILRRDIYIAETKLTSYSLKIPIHGVRGGINVPVKPRTPITENMICREAKIIRRKGEWFIYITVEKEVEERDPKSVLAVDLGIRWIATTVNSNDAKPKFYGREIRRAKGHYFYIRRSLSLKKAYKTIKKIGCKEKRATNDILHKISRAIVNEALENDSIIVLGKLKGIRREDKGRRFNRKLNNGFLYYKLSIFIEYKARWLGIRVIKVDERNTSKLCHKCGKDGIRVGNSFKCPNCRYSCNADYNGAINIMKRAMGYMPMAGGELTQPITLPTVGR

SEQ ID NO: 28727 - protein, 487 aa, unknown
  TnpB Polypeptide
MERKELKKVLSQKYGINTRYSDDAIFLAQQTLDSCVERGQNPKKIVFGSRELFEKLKKKHLTGKRREKLRQEWEERRYGILYSRGDKSKGGNLNLRFVNLNNQWHLRINLGSGEYVWAKVVRSAKRKRDMWIDFVWDLTQAERTGNWFAYTVRLKLKNGKIYAQISNEEKFPEITITKENGVIGIDINAYPFHLALAWTSRDGNLEKYERISLNGLLDGNANKREYFIWQTAHQIVEIAKREGKAIVVENLEKVPKGRRGDGMPKLRQKLQKWIYRGLLEKIEIVSRRKGVQVIRVNPAYTSIIGKIKYSPMLGIDKDVVSAYVIGRRGLEFEERIPKNYEKLLEDKEFLSYSVERIEDKLAKLKREIKEEKNEYKRNKLRGRLKRLRKELKLVLRYLLDSGKSEPATQQAVNREMKPMRGRAKSLQKSWRVLSVALAFSCLESFRDFSPLKRVLLLGDWVGVAGRVSPSLPGQGTTASNCSSIQFG

SEQ ID NO: 28728 - protein, 452 aa, unknown
  TnpB Polypeptide
MSINVVHQAYRFALDPTPAQERDLASHCGAARFAYNWALAVVKANLDQRQAERSYNTGEDALTPVLGWSLPALRRLWNQAKPQVAPWWRECSKEAFNTGLERVARGLKNWSDSRNGKRAGRKMGFPRFKSKRRAGLSCRFTTGTIRVEPDRHHVTLPRVGSIKTHESTRKLARRIEAGTARILSATVRFSAGRWSVSFTCEVQRTQRTPAHPDSVIGVDLGVNHLAVLSSGEMIANPKHLKQALRKLRRTSRALSRKTGPDRRTGARPSRRWHKANQARNKVHHQVVGLRRDGIHKLTTRLARGHGVIVVEDLNVAGMLRNRKLARSIADAGFAEIRRQLDYKTLWNGGQLHVADRWYPSSKACSGCGEVKAKLPLQVRTFTCTACGLTLDRDHNAALNLKQQVARSGRETVNGRGADRKTGPGPAGGREALIPHQKSGQDGNRPLATADCK

SEQ ID NO: 28729 - protein, 347 aa, unknown
  TnpB Polypeptide
MIYKQYIPSAFEVALAVLKAHRRRLKRGNRTSVPYMRRLMLKAENQSYQLDRETGRLRIPIRGTEGVQLRLSLSEWHRSFLNDPSWGLGSLTVVPGKIILVVRREAPKTYEPEGAIALDTNEDSMDGVVASNEGLVPTILPFGGVRRIQETHFRRRRRLARKKAQDRRVMRSLLHREGRRERSRVRQRLHRLSKRLVQFANDRRAAIVLEDLTLHGAGGRSRRMNRRLSSWPRREIHRQIEYKAALAGVPVIKVNPQWTSKTCPVCGARRRDRVGKDFVCETCDWEMDRQINAGLNILKTALASNEALARAVRFQPGALRRDVMSPLYDVSALPTGAREEPSGVELR

SEQ ID NO: 28730 - protein, 371 aa, Bacillus sp.
MTIIYAKVQIYVPDEQVNMLVLTRDAYQKACNWLSKYIFETKCLDKFYLNKLHYSSLRERFNLKSQMAQSVIKTVVASYKSNKSNKHKWSLVQFKRPLIDLVWKRDYSLTQNQFIVNTLGGRLKLNYERKGMKKYFNGTWKFGTAKLVSKDKKWFLHIPMTKAFPVLDTSEVTNIVGIDLGINFLATTYDSQGKTTFYSGGVIKHKHGQYKAIRKQLQMRQTPSACKRLKEIGSRESRFVTDVNHQTTKAIVNQYPRGTLFVLEDLTGVRSATKKVRVKNRYVSVSWAFYQFRLMLEYKAELNGQKVIVVDPKYTSQTCPKCGHIEKANRNKKLLIFKCKNCQYQSNDDRIGAMNLHQIGMKQIGVVTAGV

SEQ ID NO: 28731 - protein, 455 aa, unknown
  TnpB Polypeptide
VEPRCRPCAHAVPRPAEDRAVEVHLRLQEREQPPTEEGVPRDQAQALEGVLLEQELLPAYDRRSPHRGHPPLHREPGAEMTVTMHKAVVYRAYPTREQAALIERTCGCARFVYNRMLADKIAHYEKTGEMLKVTPARYKREFPWLKEVDSFALCNAQLNLDAAYRNFFRRVKAGEKHGFPKYKAKHRSRCCYKTNFVNGNIRFEGDERYLRLPKLGSVRVRQKREIDPSWRIKSVTVEHTRSGRFEVSVLFEFETQEPEQVKPESFVGLDYSSHDLYVTSDGERPGYPRYFRHAERKLAREQRKLSRMQKGSANWRKQKLRVARVHEKMKNQRKDFHHKAANGLVERYDCVCVENLDMRGMSRSLKLGKSTMDNGFGMFRALLGYKLEDRGKRLVTVGRLFPSSQLCHECGYRFSGTKDLSVREWTCPSCGRTHDRDVNAARNIRDEGMRLALSA

SEQ ID NO: 28732 - protein, 485 aa, unknown
  TnpB Polypeptide
MRHTTFRFALAPTPAQAEVLARHAGASRFAYNQSLRLVTDALAARRTDPQARVPWSGFDLINSFNTWKKTEAAGRVFVVAPDGTTTKQVTGLGWRHEVSAQVFEEAAVDLGRALAAYARANDGKRRGPRIGFPQRKKKGRCRDSFRLRNKKRRGGTSSIRVGDGHPRSVTLPTIGTVRVHDDTRRLRRLLRPVAHLDPETGQQVLAPRGKVLFVTCSRHGARWYVSLNVEAPDLHPQRRHGPRGDRDHGGWVGLDRGLAAFVVAATADGAEVGRWQATRPLQRGMVGLRRRARAVARAQPRSRSRARAVRRLSRRHARIADTRHGFLHEVSARLVQTHDRLCLEDLAVANLLRNHHLARGISDAGWAELARQLSYKAGWLGAELVVCDRWFPSTKTCSRCQTVKRQIRLDERLFHCGRCGLTMDRDRNAAANLAAWAERQHAQLPDRQAGGRVTNALGGEGAGRRGGDGATGPGEGGIDAHALLA

SEQ ID NO: 28733 - protein, 201 aa, unknown
  TnpB Polypeptide
VSTPLAFSWSWPHIDPASLDPTTVTVSRDPCGRWYVSFAVDVPAPSPLPAAGAVVGVDLGITDFAVTSDGHKIANPRRLARRERGLARYQRRLARCQQGSANRAKARAEVARAHRKSGKTCSECGHLLTELPLSTRTWHCPSCGTRHDRDINAAKNIPAVSLAVSACGADVRHPGSLWVRSAVKQEPRSVRAGIPVPQRGE

SEQ ID NO: 28734 - protein, 524 aa, Klebsiella sp.
  misc_feature (105)..(176): Xaa can be any naturally occurring amino acid
VLCSAGFNRRNTDFYLFPAPVDSVLYIWLFIQVISIHTECKMLIQKAYKYRLNPTDAQAQRLRQMCGCARFVWNYALAETQRILETGQKLPSAFELNKMLTGWKXXXXXXXXXXXXXXXXXXXXXXXXXXXXXXXXXXXXXXXXXXXXXXXXXXXXXXXXXXXXXXXXXXXXXXXXGWKKLPDLAFLSDAYTDNLQQKLKDLHGAWKRCFDKKLAAKAPVFKRKSHGNDSVRFVNFDKYCQLEYRRVKLPSGLGWVTFRQSRAVVGKIKNATVSQHAGGWYISFQVEMVVEQPAHPSTSAVGLDTGVSKLATLSDGTVFEPVNSFKQNQSRLARLQRQLARKVKFSANWKKQKARISRLHSHIANIRRDYLHKVTTTVSKNHAMIVIEDLKVSNMSKSAAGTVDEPGRNVASKSGLNRAILDQGWYEMRRQLEYKQRWRGGEVLAVNPAYTSQKCACCGHTAKENRQSQAKFVCTVCGYEANADANGARNILAAGHAVLACGGKVQSDHPTKQEPDTERSAVTH

SEQ ID NO: 28735 - protein, 165 aa, Actinomadura sp.
VQLIKDAAGRYFASFVIEVTEQPLPLVESETGIDLGLTHFAVLSDGRKIAAPKFLRRAEKRLRKAQQALSRKVKGSNNRVKARRRVARHHAKIANARRDFHHQLSTRIVRDNQTVIVEDLAVNGLARTRLAKSVHDPGWSQFTAMLEYKTALYGRTFARVDRWFP

SEQ ID NO: 28736 - protein, 560 aa, Actinomadura sp.
MYVEPDSASAASCSGRTLDGPHPKRPSAGLISAGMAMAGFALSVTRRRLPDAYRPVLTVFDHAPTVRSRCAAQVQLPSLSDPGPARGAGPGVRVCSGGVQLIKDAAGRYFASFVIEVTEQPLPLVESETGIDLGLTHFAVLSDGRKIAAPKFLRRAEKRLRKAQQALSRKVKGSNNRVKARRRVARHHAKIANARRDFHHQLSTRIVRDNQTVIVEDLAVNGLARTRLAKSVHDPGWSQFTAMLEYKTALYGRTFARVDRWFPLLQEVPHAGAARSESPVFRPRSASIGVPYGHHQYQPGKQGHQHHSADSGDDSRRVDPVAAVGVVVDGGADGVVGEEREQDGAERGGDAAGDGVGAAAALLALRGVAAHLLGRVGGRSGGADGARGGSDVAFQRLVRVLGHDAHDGKPVQVGAPRPVRIGGRITTIGSRISRFFDPFRKGARAGGARRDEEPPGDESEGFSMPGDGDRILSEDRLRGVLERGRRRRGAGGLRPPRHRPPGPRRLPGGRRPAGRAVPLTRSGPRRTKAPGSVRTGGLRRVQRGGGGAGASAGRAIKHRA

SEQ ID NO: 28737 - protein, 374 aa, unknown
  TnpB Polypeptide
MLEEKLGYLNRKEKIPRITPAKYKKEYPFLKDVDSLALANIQLQNEKAFRDYFKNSKCFKLPKFKKKKNKQSYTTNNVNNSIKIDFENELVFLPKIKSGIKTVFHRTFIGKIKSATITKTKTEKYFVSILVEIEQQSNLQQPQDKICGIDLGLKNFAIITNEKGQITKIDSPKYLHRAEKRLKRQQRQLSKKQKGSKNKERQRVRLAKLHEYIINARNDFLHKLSSTIIRENQTIVVENLNVKGLSQTNLSKNILDNSLRKFLTYLNYKAQWHNRTIIVADRFYQSSKTCSVCGSINHKLTLKDRIWICEKCGTYHDRDINASVNLMLYGIKQVGMEQPEFTPVNYALTAERDLSRSTSYHRMKQEAYTSIGGR

SEQ ID NO: 28738 - protein, 424 aa, unknown
  TnpB Polypeptide
MDDDAPRRTVPVKLDVPEERRGDLHQTKNQFLHCADRTSEWAWRYDDYCITSKNKAEDALYDDLREETDLTANLVQKGIRRAIEAVDSGVEKLKQGEKTSQPEFDSWSIVYDKRSATFNDDHATLSTPNGRVTSEYVLPPEDDRENTPFGQYYEGDDWDASSATLQYDQQEDTFYLHVTLKNPAYEVDGTERQEAESPDHHDKNGMVLGVDLNVTGAFAVASTGVFIGSADYLNHKRNQYEQRRARLQQTGTRSARLTIQSIGSRFSDWSLDWLHNRANDLIDEAQNADVDGIIFEDLDHIRENIANGSKFQQWAYKKFVELVEYKIESTALFVDFVNPAYTSQRCSQCGFTHEDNRDDKQFVCQDCGYEANADYNGAKNIANRYCGYIHRGQKSRGGWATSQLALKSGALNVNGEYTPAELLG

SEQ ID NO: 28739 - protein, 388 aa, unknown
  TnpB Polypeptide
MNINKCFKYRIYPTKKQVQKLEWTLDKCRILYNSCLLDRRNHYEQTGKGLSRIDQQVILKNDKDRFEFLKDIHSQVLQDVLVRVDRAFQNFFRRVKTGEKPGYPRFKGEGRYDSITYPQESAFQITPQGLKLSKIGTIKIKLHRAIQGKIKTCIIKREIDRWYACFSVEYEPVKKPIPEKSIGIDVGIKFFATLSDGSVIDNPKYLIQSEKKLKNKQRCLSRKKKGSANRKKARKIVAKLHCKIRNQRSDFHHKVSRSIIDNYGFIAVEDLNIKGMVRNHYLAKSIYDAGWRQFLNYLTYKAEEAGCRVEKVAPHHTSIICSRCGNSVPKTLANRIHRCPFCNVILDRDHNAAINILLKSTAGIAESNAWGEVVHQCPSKNQEALSNL

SEQ ID NO: 28740 - protein, 223 aa, Tetragenococcus sp.
LKQADSLALANAQRNLDRAFKNYFSKRMGYPKFKTKNNTWQSYTANNQKNTIYLVGNQLKLPKLKSLVSVNLHREVFGEIKSATISAKNNQLFFVSLLCLEEVFPLPKTGKAIGIAYCPKHLVQLTSDRSLPVYECKGVQHRLKRANKKLELRAKVAKKRAVVVKQAKNYQKQKHKVQKLTVKKNNQKRNYIDQLTHLLVHEYDSIYLEENPHFIDNTQFFRS

SEQ ID NO: 28741 - protein, 192 aa, Lactobacillus sp.
MQYHYGLKMRCYPSDQQKKLIKVNSDASRFVYNEMIAIGQELMQLRRVKFPIDTVQDRIKQLVLRQNAKQMSNYFQFLEDRRIDSLTKANAIQNYRKAWSAFRKVHTAEVPKFHRKSYCWRYQTNCQYPGQQRALLTNGTICFIDNGHVKVPKIGRLRVTGSQSRLLNRNSEIRIGTVTLTKDAADRFYISM

SEQ ID NO: 28742 - protein, 367 aa, Vibrio sp.
MKERAYKYRIYPTPEQVTLLEQTFGCTRFVYNSILRWRTDAYHNEQIKINYNNASSYLTELKKNAEFPWLNDVSCVPLQQSLRHQQTAFKNFFEGRAKYPTFKKKRSKQSAEFTKSAFKYRDGQLFIAKSKLPLNVRWSRELPSEPTTITISKDSAGRYFVSCLCRFEAKSLPISKNTVGIDLGLTDLVITSNGFKSGNPRHIKRYASKLAKAQCVLSKKKKGSSNFHKARKKVARVQAKIADCRRDFTHKLTSQLINDNQVISCESLSVKNMVKNRKLAKAISDANWGEFVNQLKYKAEWYGRTVVQIDKWYPSSKRCNCCGHVVDSLPLYIRKWSCPECSSELDRDLNAALNIKAVGQTVLACGA

SEQ ID NO: 28743 - protein, 371 aa, unknown
  TnpB Polypeptide
VWWPECSKEAYADGIAGAVHAYWNWQTSRSGKRAGKRIGFPRFKRKGRDADRVCFTTGAMRVEPDRRHITLPVIGTVRTHENTRGIERLIRAGRARVLAISVRRNGTRLDASVRVVVQRPQQSSVVLPGSRVGVDVGVRRLATVATAEGTVIEQVANPRPLDAALGQLRQVCRARSRCTTGSRRYRARTIAISRLHRRVNDVRTHHLHVLTTRLAKTHGRIVVEGLDAAGMLRQKGLSGARARRRGLCDAALGTPRRHVSYKTGWYGSALVVADRWFPSSKTCHACGHVQDIGWAEHWQCEACSASHHRDDTAAINLARYEDTVSVVGPVGAAVKRGADRKTGPRPAGGCEARKGRSRKAAEQPRDGVRVA

SEQ ID NO: 28744 - protein, 286 aa, unknown
  TnpB Polypeptide
VSVATIVCHPPRTPAEPDAGCGIDLGIGHQWAVIAHCDGSIQRVAHPAPWIETHKQRRRVGRQRSRRIVGSRGHRQASAKLAVLDRRAANLRTNHVHMLTTTLTRRYGTVVVEDLDLAAMGRGMGRRVFRRTVYQAGIGKLRPMLANKCSWAGGRLLVADRWFASSKTHHGCGGYLADLRLGQRAWTCPACGAMVDRNANAARNLRDWTGPVTDRDVQRGGVAAPVPRVGDHDGQAHVVRRGRARPHKTTLVAGADDTRTEPGREPRPRRGTPSRGANQRTVTDAH

SEQ ID NO: 28745 - protein, 252 aa, Borrelia sp.
LCLHRCIKDNELVKNVVVEKDTDDKYHISITVECLDTKNNNETKGDKEEIVGIDMSMKHFLVSSGGEKINHPKYLLKNENKLKKYQRKLSKKQKGSINRAKSRLRVAKLHKKISNQRKDFLHKLSYYFVSNYKNIVIENLSIKGMQKGMFGKSINDLGWSEFVRQLSYKSEWYGSSLYKVDRDFPSSKLCSSCHIKNTTLRLSDAKWTCSSCNTLHDRDINASLNLKAYSYKEIKTKAGTARSKACGPCSSG

SEQ ID NO: 28746 - protein, 169 aa, unknown
  TnpB Polypeptide
VKTVIGGLKARDGDRRKDWVEKTSTDLATRFDVIRVEDLNIKGMTRTARGTIEKPGRNVAQKAGLNRGILKSGWGLLVTRLEQKAPGRVEKVKAAYTSQTCNACKHIASQSRKSQAIFVCVACRHQGNADVNAARNIAAGHAVTARGDRRVLARSVKREPQHVRPPKVA

SEQ ID NO: 28747 - protein, 392 aa, Anabaena sp.
MGNKAYKFRLYPNKEQSAFLAKCFGCSRFVYNHFLRLTTDVYAESKKSLRYKEWAKLLTGLKSEFEWLKEVNSQALQQTLKDLESAFVRFFKKVGGFPNFKKKSNRQSFRVPQHFLIDNNGFLNLPKMTPIKMVIHREMLGTPKNVTIFKIPSGKYYASIVTEQDIPHAPLNGDKIGLDLGLKEFAITSKGDKFENPKYFQKSLRRLKIRQRRLSRKNKGSSNRSKARLAVAKIHERVRLQRQDYQHKISLKLVSENQRISAESLNIKGMVKNRKLAKQISDVAWGNFLTMLEYKGDVYGCEVHYVDRFFPSSKRCSNCGYIKQDLTLAIREWECPECKSFWDRDINAALNLMLFSESKIPLEEGKFTPDQLVEILGMNRDTGSGQEATGAA

SEQ ID NO: 28748 - protein, 417 aa, Thermoanaerobacter sp.
MKGQKAGVDNNYVLQTTIRQVIKDYKSFLASLVEYRINPGKFKERPQPPKPKKLGKLTQVTAEFNSNVFEVEGNTLFLRLRMNGKKRIKIKLPRDVEGVSSVRLVYHLSDVWVDVIYEKELKEPEAGLIHLAGIDMGMDNLISLVSTNPDVRSLIISGREIKSFNRWFNKKKAAVQSAMDTLTDKIAREKDESRKKAMSKELFELKLYFHNLYNYRDRWIESHFHKVARVLADYLYETGHKAVYVGKGVTESKDGIDLGKVTNQNFVSIPFRKLINILKYKLEELGVKAEEKEEPYTSKASSLSDDILEIQRKYAETEEKQEEVKIKCSGKRIERGLYRDNVLNKVFNADLNGALNILKVGAKLRRLTPSLKVLLCKLCNPLRFNLYDFIYRFRSKAESPPGIGDSKLATAGLTRQI

SEQ ID NO: 28749 - protein, 356 aa, Marinobacter sp.
MAEFTKTFKVRVRDKHANVLRGQAAAVNSVWNFVNELSHRSIRERGQFLSAFDFHPYTKGAGKLLGLHSQTLQVVAQEYVTRRKQFRKSKLAWRKTHGVRRSLGWVPVNTGAAVWSNGQVRFHGQHYRVWDSYGLSQYKFRSGCFSEDARGRWYFCVVASVKPDRWCGTGSVGLDLGLKTTATPSSGEPLQAGRFYRDQQQKLAVAQRARKKQRVKAIHAKIRNRRHDALHKFSRELVNNNGLIVVGNVSSSGLAKTTMAKSVLDAGWSTLKTLLSYKCESAGGIFLEVDERYTTQTCSCCGSLSPNSPKGRAGIGIRAWTCECGVTHNRDSNAARNILALGHKRLEVGIPFQKAG

SEQ ID NO: 28750 - protein, 477 aa, Bacillus sp.
VGGGFSVGDSLHMFFVCIFETMRNNQYENTKERKVYMATTKEGVHIKGTKKSLPDGWSTYAFRYAIFPTPEQVTKLEKSFGCERKVYNEYVSGLYEYLESIGFESGFIRYKVPNYTTITAKYDYLDKSNDSFVYNDAKMRFQAAIKKYNETYAKQPIQYKKSVRKKMQTIGYVPMLKDIKGMPKFHSKKQGKLSYTTNQTNGNIKITQENGFYFFCIPKFQEGISIYLHRELPVDGIIKKATIKREGTKYVVSLSVDYFCPNEKQVELVTADEVIGLDYSQSELYVDSEGRTAQYSRYNKIIEKRQRRINKSLARKKNNAKTDETGNIVYSKNYEKRVKEYQKVTTKAKNQRKDFLHKKSNQITNDYHAIVVEDLNLSNLAQCLSLGKKLHDNGFGMFRTMLQYKSKKKGKHYIVAEKYFASSKLCSECNHKKDKLKLSERIYTCDNCSTKIDRDYNAGRNLKYYGIRILHEQSLNT

SEQ ID NO: 28751 - protein, 479 aa, unknown
  TnpB Polypeptide
LEEIVNIYSRMLGDVLPHASRNIIGNYYRLKNGKYRELRNMYPNIPFHYVHGVCQDAVERVSSLRRNRARQYSREIFDELVKHLSLGKRDLRGRRIVRHLWKKSWEIAQYQVDLEMIKGILVPRINGASLWLVDDLIWKPVNPTKININGFENIFFTSVAINTHRGLVHLDLEPSKEFYKLLARGFKPTSHAKIKLDRRNRRVIFHLSLEKEIEIYRPEIIKPVDVNENSLATLYEAFSIILETDLAKTTLGYSYRKKSIQRRNGSDGREARKAIKKLKERKKKRDYRMKTANMIVRDAMRMRGVIVIERISGDDIRVMIARYRNKQLRHRIYQSALKGELNAIIDKAREYGVPVLMVDPRNTSKICPIHKAVIEYGEDRIGVCSKGSERWHREVVVLINILSYSPEALYEGFAQKGFGVLSIDGSPVPLGSTATHEPIEIHGSLWGRWKSSDNHRDVITSLWIKKQSNPKQINIRDDQ

SEQ ID NO: 28752 - protein, 268 aa, unknown
  TnpB Polypeptide
MELGIKIANRHKDLDCKCFRIYNKNDKILCELVYEKEVIEVEKTDRIASIDIGLENLFTIAFNYNKKGISIKGNKLKAINQYFNKIKASLQSMLPNNQYISKSINQLLYKRTEQLRNYIGYYTNKLMGILRTERISKLVVGYSKGWKQEINIGSKNNQNFVSIPFRKILDILRYKLEDNGIEYKEQEESYTSKASYLDNDDIPTYKEETEEVKFSGRRIKRGIYKSKQGQIINADLNGALNILKKSGEKLIEELEYLKYNNIFTSKLV

SEQ ID NO: 28753 - protein, 386 aa, unknown
  TnpB Polypeptide
MAELVLTTGCKMAPTPDQISEIEDTLKAFADACNWINQTVPAIVRNSVELHHIVYRDVRAKFGLSANLAVRAINRVAGNRKTASQTGSPVKNFEPTSVDYDARIFTFRERDESVSLTLLRSRQRVKLVLGDHQRDRLRGVKPTSATLCKKGSEYFINIQTRSVAPAEIQTDKVLGVDLGVTDIAVTSEGQMFGGKTIKKIKKHYQSMRTVLQQEASKGTRSSRRRCRELQQRLSGKESRYQRQINHEISKAIVARAKEIPAKIALEDLSGIRDDINQKAGKTQRRRVNGWAFYQLREFLTYKAQQAGITLILVDPAYTSKTCHICGQLGIRNGKHFKCPSCNWFGDADFNGAKNIAFLGLHVGQPEGSERPSLKMVNPGLSKALSL

SEQ ID NO: 28754 - protein, 374 aa, Eubacterium sp.
MLQTTTAKFQIIVSEQDKSALDETMAVYRDACNYVSGYIFDTHDLKQASLNTHLYRPLREQFGLKSQMAQSVLKTVIARYKAVLEQEHKWIQSVFRKPCYDLVWNRDYSLNNHQFSVNTLHGRLKFDYHDEQMRQYFDVDTYKFGTAKLIHKHNRYFLHISVTREIDDCDMSDICNVVGIDRGINFVVATYDSHTHSEFVSGREIKQKRANYVKLRKELQMRHTPSARRRLKAVGQRENRWMQDINHCVSKALVENNPKHTLFVLEDLTGIRSATERVKLKHRYVSVSWAFYDLELKLTYKAERNQCAVIKVNPAYTSQACPKCGHTEKANRDKKKHVFKCKCCGYTSNDDRIGAMNLHRMGINYLVPDAVTVE

SEQ ID NO: 28755 - protein, 310 aa, Okeania sp.
MRTAYQYKLRPNKEQLATIEMWLELLRRQYNYRLGERFSWWSENRCPVNACPLVMPIPQLRDNPDYYSQKRDLVNTKDKFPEYKLIHSQVLQDCIKRVKLAFDRWFKADKSGQKLGKPRFKGKGRYRSFTYPQIKLDCIEENHINLPKIGKVKLIQHRPIPEGFIIKTVTISRKADGYYVTLSLEDKSVPALTFNVEPTLKNTLGIDMGLKEFLVTSEGESVPIPQYYRKSQKRLKTLQKRLSRKKKGSKRRLKAVKAVAKQHKKVADKRKDFHFKTANELLSKANVIAHENLNIKGLAKTHLSKSINDA

SEQ ID NO: 28756 - protein, 259 aa, Okeania sp.
LDKAWKRWLVPDKTGKRFGRPRFKKAGKLRSFCFSRVNHPKAAVKFNGKQIIISRFGAIPVIVHRHIPDGFTIKTATITKKADGYYVSFSLEDKSVPSLIPTDNIKTTVGIDVGLKEFLTTNTGETVPVPKFYRQSQSNLARKQGQADRKKIGSNNWKKAQNKIAKLHQHIARQREDFHYKTAHRLVKEYDLIAVENLNIKGLARNSKLSKSIYDVAWGTFIEKLNAVAVKRGVHVGRGEWPFARTSSQYITKLFKLWS

SEQ ID NO: 28757 - protein, 227 aa, Nonomuraea sp.
VTDRQGYRVELAPTLEQRARLAQHAGLSGRAVSSDAPSCGIDVGVKTSATIVDDDGTVPELHAPKPLKAALRKLRKAGKAVSRKHLGSSNRAKAVRRLAEVHLEVANQRADFLHKTTTMLARSKRAIAVETLNVTGMVANRSPAISDLGFGELFRRLAYKTEWYGSSVWAADRWFPSSRLCGGCGTINRELTLADRTWTCGCGLEHDRDVNAARNLLNAMNLEQEAA

SEQ ID NO: 28758 - protein, 427 aa, Nonomuraea sp.
MAVMGGQEVVKRRRGHKTRLDLSRAQSTLLDEQASAAITVWNCLHAYWTHFPGRRPSLAQADQAIRQARADLPFLAALPAQAAQAVLKTYRQAWENFFNPDHPAERPTFKSTKRARLAVDVPQVRNMRICRLSAGWGAATIPMIGRITFRWTKDLPGIGKNSPTGRITGARLVKEANGWHLVFRTETQVTAPAPHPGPSVGIDRGVNVALALSDGTTREHGPWLTSGERERLRRLEKTSARQRATRPKKTRPSHRESHTYDQIAGLRAKAKRRATDWQHQITTHLADAFGMIAVEDLKITNMLASAKGTIEAPGRNVAQKAGLNRAIAGQAWGRTVTLLEYKTRDRGGQVVRVPAPGTSQTCHRCGHRDPAARAGTVFACTSPTCGWVGHADINAAINIGNAAGPAVSGRGDLGTARSAKRQPPRAA

SEQ ID NO: 28759 - protein, 400 aa, Nonomuraea sp.
VAVRRSFKFLLRPTRGQVVALTACLADHQQLYNAALEHRRTAYRKAGVTVRYGEQSAELKHIRADDPGGQGRWSFSSQQATLRRLDKAFRAFFDRVKAGHAPGFPRFKGRGRFDTVEWPKDGDGCRWDSQPGHPAATYVRLQGVGQVRVHQHRRVLGTVKTISVKREGSRWFVVLSCDDVPAETLPATGAVAGIDVGLVHLATTSEGEHLANPRHLHTCAERLATAQRDLARTRRGSNRRRKAVARVAALHAKVRRQRLDAAHKAALALVRDYDVIVHEALKVTNMTRRAAPKPDGVGGHLPNGAAAKSGLNRSILDAGWGVFLTILSHKAESAGRELITVNPANTSRTCSRCGHCAAENRVTQAGFRCTACGHTAHADVNAAVNILRAGLALRDAARAA

SEQ ID NO: 28760 - protein, 398 aa, Nonomuraea sp.
VVVQLRYSFRLDPSPGQRIALAKAFGCARVVFNDALALRRHAHAEGLPFISDGELSKRVITHAKQHPERAWLGEVSAVVLQQALADACMAYRNFFAGISGRRKGPKAAPPRFRSRKDLRQAIRFTRNARFKVGEKLSLPKIGDVAVRWSRALPSEPSSVTVIKDAAGRYFASFVVEIAEQELPEAEAETGIDLGLGHFAVLADGRKIGSPRFLRHAEKKLRKLQKRLSRKEKGSKNRAKARLQVARQHAKVADARREFHHQASTQIIRDNQAVFVEDLAVNGLARTKLAKSVHDAGWSSFVAMLEYKAKLYGRDFARIGRFFPSSKLCSECGAIAEAMPLGVREWACVCGTVHDRDVNAAINILADGRAERLNASGGQVGPPRAVARPGERGSLPGAA

SEQ ID NO: 28761 - protein, 421 aa, Nonomuraea sp.
VLSGRRYRLDLTEEQSGFAERIGGACRSVWNTALEQRRTYRSRGRFIGYHEQARQLVEAKQDFGWLAEAPGHCLQQTLIDLDQACARHGTWKVRWKSKARNPPSFRFPEGGKITVERLNRRWARAKLPKLGWVRFRLTRPLGGKVKNATVSRDGRHWYVSFLVDDGVVTPERHADPGSAVGVDRGVVKVVTRSDGRFHHQVFAREREVEHARKLQRDVARTMRGVGPAEESRRAGGRPGAEDPQPPTGLRRQDRSCPGGGLRVDRVRGPGGQEHDRWSRAQAGSRTAGRVPCQWGGEQVRPEPRHSGQGLASDRAGHPQQGPAYGYPCDHCESGVHQSTVQRVHGGGSEVPREPSGLPVYLVRTHRARRRERCQEHPHRREGGARTSRTGCAGWGAQTTQPRGPEGEPPSNSSPGHRADGT

SEQ ID NO: 28762 - protein, 544 aa, unknown
  TnpB Polypeptide
MPERPIFTYQTRLLLDATQAQVLDDYAGLHGRAERSLFAALRAGRALNDLKREFLPRFGITARQFNAVRVGLEGKIDSIKARRPELIAEAKQRIKRAETVLGKLEVRAAGTHKLHQKKRRLACMKARCAALEADHAAGVTRLCFGSKRLFRAQFDLAANGYASHAQWQAEWRRERSHQFFVLGSQDETAGNQTCQASLREDGSLALRLRLPDTLATQPGIQTLELHGVRFAYGHDQLVAALNTSRRISTTTQAGKSTSKRVGTAISYRFVRDDQGWRVFASVEARPVEQVSRTALGAIGVDINADHLALSETDRFGNLIGAKRVDLSLYGKTQKQAKALVGDAVVAIAAQARNAGKPVVMEALDFQKKKAELEAVEPRQARMLSSFACRQITSHLKAACFRAGVEVIEVNPAYTSVIGSVNHAQRHGISVHQGAALAVARRGLGFSERPPQRPAIVPVRNGGHVTFTLPARNRAKHVWSYWADIQKKLKAAHVAHFRSGEASASPAPLFSATRTVCSHRNFVAKSHDANRSQHCSGSVMDDVPW

SEQ ID NO: 28763 - protein, 481 aa, unknown
  TnpB Polypeptide
LTLQERCQLFLRRLRILLGCGCHFDCPVVCSKRLCLDKLVQPISSESLQGDPCFQAGRNWSKLLNASLPYFLNGEVLRKCILLNTLRLTPKKQKVFDRVFVEYLRVLKETVKQLPNANSSTQLHHLTYSSIRESSFLPSDVVQEARKDVWAKRKTLKNGFKRCSIRLNKRWFRLVPSNRGNPCLKVTYSPSKAFVIPLKLDRGFQRFNSFIKDGWSYGNISLLNDGRVAMVLEKDFPEPENSRRYVVGVDVGSSMLAAVTVYDTDTSKVERQLFFGRDVANKQRRFFERRRKLQSYADKGSGKAKKYLRKLKHKQRNFVKNRSGEVAKQIVTLAKRFDASVAIEKLGIRGRKRRFSKKSNRKINLIPYGRFKEFLSANCETENVPLSVVDAYHTSMWCPHCGAVNKGHHSGNYSLYKCKLCGLTMNSDRKASLAVAVKSVLERTSQDLTKPCFVQISNTRVPVNGLVRPDADGSTFAVQHV

SEQ ID NO: 28764 - protein, 594 aa, unknown
  TnpB Polypeptide
MTQLTEQFHVPEEHHGPCDRLTTLVETHTCRLLTEEYWNDTHLDAISDHSGQSYTYIRDDDYDAFAGLDEYVYSRFKRCVYHRVTHVLDAHAEAFRAFQFVCETVEERKIRRIGWQHLRDQLFNGDSPYINWRVLESVVEQLNTFYDRHGHFPDTYAELTGTPEPNGTVPYAPDKGDYHIHELTIEDGDVVFVLNAPDSLSPDSYYDWTEHEIRFPTHARFSEMVKAGAVKAPTLHTSTHGYTLDVPVDLPEQDVETVADRVLAVDLGVKKQATAAALDAGEDGHHMQVAPPEFIDHPSKEKLFRLKADAEGINDRLAELRRQGKAHTERFDHLLAEHRQTRGTERRLRKQIQHDVANQLVWLAVEYGCDTIVFESLGQLTSSDVSGAVAWSISSWARGELLDSVEYKAELVGIEVETVNPWGTSRYCPRCGERGRTVKAPDEHTECRHGGHFHCPECGYECDRDVVGAVNVGRKHLDGFKMEEANPVAYTEAGKHASFPSPQGARSAGVQSATDKQDSASGRQTQLSQYRATPLRSDGSETVLIRKRGERETGGLQQNDGSNTGLRWPSGSITMHALARATGSSGILPNTTEN

SEQ ID NO: 28765 - protein, 416 aa, Sulfolobus sp.
MGEEVIKTVELVSLRLTAKKAEALSYVYKTYGEILKEAVNILHQKGITSWVKGIKELYKYFREKYPDLPAKYVDEAIRDAATRLKSFQKLKEKGLAYTEKPEVKQWTVSCHQKLWKLSFLGIEISTHKGWIRIPLLFHKQFYIHYNGGWTLRSTARWKIEDRKLTLYVFFRKIVEPNTNYSRVIGVDVNENNVTLFTLPDHKAITIVTNHSKVVLGYAYRRKAIQERHAHDKRSLRVALRKLREKNVKKALRDKVASIIAKIVKKENAALVLENLPKRFQDKALKKNGLKSFDSHRLMQSAIRGIQKRIVEKALEHGVKVEFVNPKNTSRTCPKCGASLTLMTGKAQRKGWQPRILKCKKCGFSHDRDVIAAWNIAKKLDVSLVPWGSKGAHDPHVEWQVATMNRKVEAQHPSLGG

SEQ ID NO: 28766 - protein, 427 aa, Sulfolobus sp.
VIPGRGWWYVMSEKVTKTVELVSLRLTAKKAEALSYVYKVYGEMVKEAVNVMYQKGTTSWLRGIKELYKYFREKYPDLPSQYVQQAIRDAASRLESFRKLKKKGLAYTEKPEVKQWTVSCGNMSWKLSFQGVEISTHKGWIRIPLLFHKQFYIHYNGGWTLRDSCRWKIEDRKLTLYVFFRKTVEPNTNYNRVIGIDVNENNVTLFTLPDHKAITLVTNHSKVVLGYAYRRKSIQERHAHDKRSLRIALRKLREKSVKKALRDKVASFVAKIVKKENAALVLEKLPKNFQDKALKKDGLKSFDAHRLKQSAIRGIQKRITEKALEYGIKVEFVNPKNTSRTCPKCGSSLNIMTNNAQRRGWQPRVLKCKKCGFTHDRDVIAAWNIAKKLDVSLMPWGSKGAHDPHVEWLVTTVNRKVEAQHPLLTVG

SEQ ID NO: 28767 - protein, 395 aa, unknown
  TnpB Polypeptide
MSRHRLVPSPAQEAVLREHCGHARYVWNLAVEQHRHWRPGRKSAPGYLEQCRQLTAARAEHPWLAAGSQMVQQQALRDFAQALANYLGGTHDRPSWRKAGRDEGFRVVAVRPGHVRRLSRRVGEVRVPKAGWVRFRWSRAVPPEVKSYRVTLDHAGRWHVAFAVIPAPIAGPGNGQTVGIDRGVAVSAALSTGEMLTAPGLSAIRSKRLRRLQRSLARAKRGSNRRAGVKLIVARLRAREADARKDWAEKASTDIAGRFDMIRVEDLRIRNMTRSAKGTAGAPGQNVRQKAGLNREIMRSGWGLLARRLEDKAPGRVEKIRPAFTSQRCSACGHVDAESRESQARFICTACGFADHADVNAARNIAAGHAVTARGGDGVARPVNREPQLLLQSAW

SEQ ID NO: 28768 - protein, 663 aa, unknown
  TnpB Polypeptide
MSAIEEKKTNPPDYFKCVKVPLKHVLKNPDVNLPKITDAVIKCNKIVINTLMFMKLYLLDYFEKNNKLPDIDKVFVNSCMKILCNESSSGRPPKKEVKDLKDKLTIFYNSDYKPLIKDINLDYIHLNTILEYLTIGIITMYENNIKLHYVEYIERYVNIVWKKKDTIIKIKEENKNEEKQKELVNEFCRQLRKIKTDILEVSTEYKSDAKYHNWIKEIKKTITPNKEKYQKDSMYYDLQCNPQDYLPCMIRIMKEVEKDKVMIYNVFPMRNDIIMKNIKLDTTTLVHLLFTQKQGNKTDYLLEGNLKKYENEIWEFFFRTERQCFKKPKYTFHHMIETDGVSCSILMLRNDLIGKRIPNIKICSNTEQYIDELTDYTIIKNKKIVAIDPGLCDILYCVDNDNKEANEFRYTQDSKRKECKIKKYAKIILEFKKEEVDGKTIIEYETKLSKLNRKTLIIEDFKEYIKKKSEINNKLYKFYEKYIFRKLKLNGYINIKKHEQKMINNFKKIFGKPEEVIICAGDFEQKQHMKFKEPIKGKGIRKIFRDNGYKLYLVDEFRTSCMCSICKDESGRCEKFQIRKNPKPYRSDNILVHGLLKCKTCFGVWNRDVNGATNIYRIAKNAINGLERPKYLCREKKVENIKIEKVVQKKAKKSVKVVALTKP

SEQ ID NO: 28769 - protein, 168 aa, Archaeoglobaceae sp.
MNFYTILTIYLACSQDFEQYAHIRRNLQRKKRLDLVKRIGCREERIVNQQLHIIANEIIAYAKQFPNPIIVMEKLDGIRENMNGSAKLNRRLHAWSFRKIQTYIEYKANLERMAVVYIEPRDTSKKCHRCGHVTQANREFRCRKCGLRYNRDLNAAINIAHALTRGMG

SEQ ID NO: 28770 - protein, 482 aa, Bifidobacterium sp.
MKYGIIMGMSQKTVIERVDVQGAHIYLGMADDGSPMYSNDGNRVMQWLCDAWRFRFNANRSNRYIINKNKEKKPLSEHPDTRTVKTMRVECPWIAAVPTYVIQSPDRIENTQWFAAIARRKTNITHHRKAGRMPSFLSRKHDDHTFACWYNNGQNALFQQVNRNHGIVTIKGQNPKDYRDHGTRFTIRIHIRVSQPIRPYTGIRVNWTKRTLVFTNTPLPIKREQTGMAVGVDVGVAHAAAQSNGMFLDLPKTKLAKIDREIRRRQRAMARKANLSGKTRRQYVRDGVSQRYARERAKVADLYAKKHRIITDCYQKYTTGLVRDFEIVCVEALQTANMTRKATPKPDPNTPGHYLSNGQSRKRGLNRSMRNNALGMLRSMLEYKTKLEDTCTLVQVNPAYTSQTCFQCKHIDPRNRESQAAFQCVNCGHEDNADTNAALNILEAGLQHLASTDGAWHGISVQDMLNTLRGQHATLPCEPQHA

SEQ ID NO: 28771 - protein, 399 aa, unknown
  TnpB Polypeptide
MVNRAFKYRIYTSEEVESFLVRICGTVRLVYNVALEQRSNHWRQFKRFAGTNISFSSQARELTAIRAEYDWVAECPIDAQQQALRDLNQAFQNFFVGRAGYPKPRRKFINDTFRIPASRVGDIEVLNRKWARVRLPKIGYVKFRYTRPVQGEVGNVTVTREANGWHIVFSCSFEHETPANDKPSVGIDRGIVNNVALSTGEMFSMPDSADLVSKHKSWQQAASRRKPRSRRQAKAKRHAARVAAKVARRRLHWQHVVTAGIARSFSTVVFENLKTRNMMASAGGTVEEPGRNVAQKRGLNRSIAGASWFQFETFQTYKSEFLGGCVVKVDPRHTSVTCAQCGSRDKGNRENQAKFLCLSCGHSDHADVNAAVNIHTAGTRPSDTCRATPGSGRELRNAA

SEQ ID NO: 28772 - protein, 430 aa, unknown
  TnpB Polypeptide
VKVTQAYRFALDPAPEQERALRSHAGAARFAWNWGLARCKERHEAEGKWYSAVDLHKLWNAEKKTEPALAWWPENSKCVYQEAFRDLDRALRDFIRSKKGQRRGKRLGFPRFKKRGKCRDSFRFTTGVIRCDCGTVTLPRLGTIRTHESARKLARRVGNGPARILSATVSRTAQRWFASFTVGVERDVPHSHARPGSAVGIDLGVKALLTGADNQGNVIAVSGPKPLRAALRKLRRASRAHSRKQPGSANRRQSAGRLGRVHARVADVRADALHKATSMLAARYETIVTEDLNVAGMTRNRRLARAVSDQGFGQARQMLGYKTTWNGGTLIVADRWFPSSKTCPGCGAAKATLPLSERTYRCGNCGLVLDRDVNAARNLLKLAASGAERVNACGGTVRPRLAGHVPVNQEPGTPHGGKTGTVPRQQGTAT

SEQ ID NO: 28773 - protein, 488 aa, unknown
  TnpB Polypeptide
MSEVKTTVRGVILQPAEEHKAFLDELMGRYCAAVRWSYKRLLDVWKVQDIRLAVQGKFTLNSRQANDAVYDAQAIIKSQKELVKLNHGNAVKKVEHTKSRYKKARSKKKKANLTRKLDKEQRRLAAWQKHIENGTTPPVVFGGKKLFLERCKGNISRAEWQGARSDRYLSRGDKTKGGNLNTRLYTIDGNIYLDIAAEPVETGKVTRYNRITVPVYLAHKTSPKTGRINGRNYRQMVLNYLKQGSAYQIEIIRENGRYYIHVTIEEETPQNYTARNGAVGIDTNPHGLGITRADYMGQYKESLWLSQGEWTCARSCRRDNLIGEAAAVVVDMAKQLNCSLAVEDINFKDDKSATAKFNRMSHSFVWSNFLEKVERRAARAGVPLVKVKPPYTSTIGTLKYQQQYGISNHQAAGYVIARRALGYNMEKVPKPLFERLIKEKENYSKLSNWKQWSAIKKAIEAAIQKPTKREMKSLVNWQHCRKQLLGTV

SEQ ID NO: 28774 - protein, 425 aa, Haloarcula sp.
MAWEVTRTVRVRLDVPDNRKSDLHATNSKFQYCANHTADWAWRYPEEDCVTSKSEAEAAIYDDLREETDYLHANLVQKAIKRATDDIDNCVDRLTEGENTSRPQYDTFSIVYDKRAASYYRDKVSLATVNGRVECEYELPYDVEGTPHGEYLLNDDYSFSTSTVHYDSEADEFYLHAAMKREIDASSPEKAEHSKVLGVDCNVDDHIAVTSTGQFVGNADYFNHTRHEFENRRASLQQTGTRSAHLTVQRIGDRFGRWSEDYLHRCSNELVEEARRHVCTHIAFEDLEQIRDRISDGKKFQQWAFRELQRQVAYKAEEDGIIVDTVEPQYTSQQCSMCGCTLEENRDGQHFECLDCSYTVNADYNAAKNVARKLALKLQRGQKSPAGGAFCQYALKSGTMTVNATDVASDTPVSAERESTDKPTA

SEQ ID NO: 28775 - protein, 390 aa, unknown
  TnpB Polypeptide
MARRAYKFRFYPTDDQKQLLARTFGCVRVVYNTILKWRQDQYKEYGKSIGFSLASAKLTEIKKDPELSWLKGVSCVPLQQCLRHQQKAFDNFFAGRAQFPKFKKKHGHQSCEFTRSAFKYRDGQLFMAKSKEPLNIRWSREVPSNPSTVTISKDRSGRYFVSLLCEFEAKPMPITPNMVGIDLGLKDLYITDKGFKSGNPRHTQRYEKKLAVLQRRLAKKKKGSNNRNKARLKVARLHAKIADCRSDATHKASRKLINENQVVCLESLKVKNMIKHPTLAKHIADANWGEFVRQLKYKADWAGREVIQIDQWFPSTKTCSCCGHVVDEMPLNQRWFSCPKCKNEIDRDTNAGRNILTAGLAGRACGATGTGKVVKPPSREGVMKQEDLFR

SEQ ID NO: 28776 - protein, 427 aa, Trichodesmium sp.
MVEKAYKFRLYPTPQQESLLRKTLGWVRLVYNKALAARTQAWYEHQERVGYKQTSAMLTNWKKQEDLDFLSEVSSVPLQQGLRHLQTAFTNFFGGQTKYPNFNKKRNGGSAEFTRSAFKWKDGQVYLAKCAEPLSIRWNRQLPLGCIPSKITVKFDPSARWFVSLRINDTKNLKLKPITRQVGIDLGINSLVTTIDREEVAYSKNIQKLHKKLRLAQKSLSRKRDTKFNNYQKARLKVVKIHALIKDSKLDYTYKLTTRLIRENQTIVVENLAAGNMVKKHKLARAISDANCGELVRQLEYKAEWYGRTLIKLDRYFPSSKCCSNCSHIIIKLPLNIRKWNCFEYRNYHDRDINPSINILATGLAVSVWVAVFIPEEKKSLKAGAMKQKTPNSNKTGIPRCLKYSSVGRMSTDGSINNKPLAKIEQF

SEQ ID NO: 28777 - protein, 397 aa, Natrinema sp.
MRQVYNHALNQFNKIPQDNGTLRQRVWQVRDNLPALKQQWTDLKQVYSTVLQKAVERIRTNINNLGKLKAKGYDVGSLNWKSPREYRSFTYRQSGFELDKKSGPRDRAILRLKKVRGETLEIPIRLHRDLPDHDAIKEVTVKKEPTGAWYASFCISTEEPEKTGPEDIDAKDTVGLDLGILNFIHDSDGRSIGRRDLSDERERLEREQRSLSRKQYESNNWEAQRRRVAEVHARMSNKKRDYKHKLAHFYATEYDAVFVENLNVKSMLENNDNARNKHEVGWSKFRAILEHHCDKHGTHYVEINPSGTTKECASCGVESEKPLWVREHSCPACGFELDRDWNAALNVQSRGLSELGVVHSEATPVETATAVDTRSVSASRVVEAGSPCLKEATPAAE

SEQ ID NO: 28778 - protein, 397 aa, unknown
  TnpB Polypeptide
MLRGKKVCLQPNKKQEEMFFVFSGTSRFAWNESLAYYERMHEETGEYARLRDLMKHLQQLKHEKEEYSWLNEVPEAITKQAMKDLLKAFKSFYDRRRTEGYDPKEPGRNRPKFKKKGKCQESFYQRTDNIHKTDDSHVKITGIRSPVKCKGLRGISLPERIQNPRISYDGKYWYLSYSYETEEEKMIPEREAIGIDLGISEYAVTSDGVHYGNINKRSSVKKLRKRLKRLQRDVSRKYEKNCTSDDKGRKRYHKTNNIRRKEKQIQLAYRRIRNIQKTYMYEVVKSVMRTKPQMIVMEDLDVKGMMQDPKIARHLQKENLSEFRRILTYKCEQKGIGLITADRWYPSSRKCSHCGSIKHDLKLSDRTYVCDRCGMIMDRDENAAVNLERYPEITAAA

SEQ ID NO: 28779 - protein, 382 aa, Escherichia sp.
MRRFAGACRFVFNRALALQNENHEAGNKYIPYGKMASWLVEWKNATETQWLKDSPSQPLQQSLKDLERAYKNFFRKRAAFPRFKKRGQNDAFRYPQGVKLDQENSRIFLPKLGWMRYRNSRQVAGVVKNVTVCQSCGKWYISIQTESEVSTPVHPSASMVGLDAGVAKLATLSDGTVFEPVNSFQKNQKTLARLQRQLSRKVKFSNNWQKQKRKIQRLHSCIANIRRDYLHKVTTTVSKNHAMIVIEDLKVSNMSKSAAGTVSQPGRNVRAKSGLNRSILDQGWYEMRRQLEYKQLWRGGQVLAVPPAYTSQRCACCGHTAKENRVSQSKFRCQVCGYTANADVNGARNILAAGHAVLACGGMVQSGRPLKQEPTEMIQATA

SEQ ID NO: 28780 - protein, 379 aa, unknown
  TnpB Polypeptide
MLRAYRFPLRPLAHQRDAFTLWLRQCCTLYNNALQHRIESWKKRGKSVTYNDQTRELTDLREEPEWRNIPAQVQRSALRRLDRAYKSFFQRCKSGEKPGFPRFRSIHRYDTFDLGTNARHIDHAPNDRGSGYIHAPKLGRVRFKQHRPIVGEVRNIEITRDVRGRWFVQILCDLGQAPPKQVVRPDRVTGIDLGLTTFGVLHDGTEIANPRFFKRSQDKLARAQRVLELKRRGSNSRRQAKRQVGRCHERIRNQRLDFHRKLAADLFRRFDLIAYEDLNVRGLAAGMLAKSVNDAGWAQFISIMCCKAESAGKYAISVDPRGTTKDCSSCGAVVPKTLSERTHRCECGLVLGRDHNAAINILARGLRAVPVETQAVASS

SEQ ID NO: 28781 - protein, 479 aa, unknown
  TnpB Polypeptide
LDKDTHNWTLWVTKIGIEMIVTRTVKSKKLNPGKYQCLEEQAKRLGQIRSEVWHCYGSISGVASKSDRTIRDQWLKEKHLFPVSANAWKETLRDTFGNIKANREAAKEKVRKVLYRQISNEKTRIEHYKELKSDNWTSNNYLRRLMRKHWKRGHNHTHNQIIVRSDSYTTFQLGGHTWIKIPSLEKGKRIAIPLNTTVEPSGTLRLILKEGEIEVHYTIDIAETKDCGVATIGLDKGYTEVFVDSDGEHHGEGLGKILSQHSDKLKKKYQARNKLKAVIDKKPHKKKNIIENNLGSKKLNRQNQKVKFQVKDKICKATHKVVDKAEVIAVEDLTAPIASRKFGKNVTRRLSAWTKGVIATALDTISRRRGSSVILVNSAYTSQMDSRHGVLLGKRSGDSFNCFDGVVLQADENAAQNVLTRLSDPEIDRWMPYQKVKSILLERTERHRLGLLNQDSSCNSQELSTESELPKNVQLCLTF

SEQ ID NO: 28782 - protein, 391 aa, Peptoclostridium sp.
VVLLKRAYKIEIKPTVEQKVKIHQTIGVCRFIYNFYIAHNKEVYEAEKLFISGMGFSKWLNNEFVPNNPNYSWIKDVSSKAVKQAIMNGDKAFTKFFKGEAGFPKFKKKNKQLVKAYFPKNNKTDWTLDRHRVKIPTLGWVRLKEFGYIPTGSKVTSGTLSKRANRYYVSILVEEYAKADDKKQPYTEGIGVDLGLKDFAVYSNGAVKKNINKTSRVRKLEKKLTREQRRLSRKYESLKKLQKIEKGEATRRNIQKQITKVQKLHQSLNNIRTDYINKAVSELIKQKPSFMTIEDLNVSGLMKNRHLAKAVQQQKFYEFRTKLTSKASIHGIEVRIVDRWYPSSKTCSACRAHNKDLKLSDRTYKCSCGLVIDRDLNASINLANAKEYKTA

SEQ ID NO: 28783 - protein, 377 aa, Actinomadura sp.
LIHAERPFRQHKRPRPPAPQAFGCARVVYNDALAARRTAHASGLPYIKAAELSAAMTRAKKTPERCWLGEVSAVVLQQSLRDLETAYRAFFDGLAGKRPRVGAPRFKSRKDRRQSIRFTANARWAITKGGKLALPKIGELKVRWSRRLPSTPSTVTVIRDAAGRYFASFVVETRDDRLPRAGAQASARLGPDVEIDLGLEHFAVTSDGRKITSPRFLRRAAKKLRRAQQSLSRKQKGSANRDKARMKVARAHAKVADARREFHHQLSSELVRENQAVYAETLCVKGLARTRLAKSVHDAGWSAFLGMLEYKAQRYGRTFTQVGRAYPSSQICSGCGYRDGPKPLHVRAWTCERCGTAHDRDVNAARNILDEGRRIIT

SEQ ID NO: 28784 - protein, 324 aa, unknown
  TnpB Polypeptide
MKRKEGRVVLESVKVALDPSPAQERLLLSHAGAARFAFNAGLAHVKADIDAGAKPEWSLYGLRRWWNASKDTLAVGENGVIWWSENSKEAYSSGLEALAKGLLNWSKSRRGARKGRKVGFPKFKAKDRATPRFAYTTGVFGLIQGDPKALKLPRIGRVHCMEDVTARVGGARVLRMTVSRRAGRWYAALTVEREDKPVTQVPKGGAVGVDLGIKTLASSRRARRRDQQGHNHDRQDVQRRVHRGPKRRGHGEEPSSCPQRERRFPRGVSPPTRLQDRENRRDTTRHRPLVPIQQDLLGLWESESQALPQRARLPLRYVWPGHGP

SEQ ID NO: 28785 - protein, 423 aa, unknown
  TnpB Polypeptide
MCKSIMGPVQRKVTYRLYPRRKQEEGLRLLLSRHQRLYNAALEQRISAYRRQGKTVSFAEQCRDLTVLRGDDPEYEEVNAQSCQVTLKRLDLAFKHFFRRVRKRKGKAGFPRFKSLRRFSGWGYKTHGDGWRLQAGEGMKHGRLRLSGVGSIRIRGTARTEGTPKTLEVMHKQGRWYASVTVVCEPKRSRVGNGAAGLDWGVETFATVANKDGTTLRIENPRHLQQARKDLTAAQRNLSRKKRGSRNRDKARRKVTALHRKVGNRRHDFLHQQSAALVTTLAVLATEDLQIANMTRSAKGTVEAPGKNVRQKAGLNRNILDTAPAAFLQMLKYKAEEAGTEWVEVPTRQVKPSQTCHGCGKQRKKPLAERQHRCECGACCSRDENAARVMLAWATGPTGREPSRCGGGALAPPVKHETPPIAA

SEQ ID NO: 28786 - protein, 493 aa, unknown
  TnpB Polypeptide
MGPTRSCAKPIALRRGPCTACRITRTRRCGRQGSSRDDEAPSCRTRQRHRPLHGFIIWRGDHMILGHVIALDPTFKQANAMARSAGCARFAYNWGLEEWRRQYKAGLKPNRGTVKKAFNAIKEAEFPWIYESPKDANQQAFTDLGAAFSSFFRWQRERQGPKVGYPTKRRKFVDDAFYVSNDRFRFHADEKRVYLPVIGSVRMHERLRLNGRILSARVYRKAARWYVAVQVDVLDACQPAAHVRPIVGVDIGLKTALVVSCGGPNDEAPEPIVGPKPLRHALGSLRRANRCLHRRTKGSNNRRKAAAKLARIHARVANVRRDFLHKVTTRLCRENQAVVIEDLHVSGMLRNHRLARAIADVGFGMFRTFMTYKAPIYRSELIVADRWFASSKRCHGCGNVKEELSLSERTYTCEACGLVIDRDANASLNLEAYPRLAGNGRKTTPMDDQPSTPWVRPRRKAVVEVGTKPCTLARAQIREQGAVREAHGKEYWR

SEQ ID NO: 28787 - protein, 346 aa, Streptomyces sp.
MLRDHCTLYNAALQERRDAYRHASKTTVRYGMQSDQLKEIRALDVDGQGRWSFSSQQATLRRLEKAFSDFFRRIKEGRKPGYPRFRSAKRFDTVDFPKDGDGCRWDSTPHEPVTRVRLKGIGHVRVHQHRAVVGRVKTISVKREGKRWYVILSVDVGRPDPLPATGSAVGIDMGINNFLADSSGAMVPNPRFGTKVREELDGAQRALSRCERDSQRRRKAAETLARLHRKVRRQRLDHAHKTALNLVRAHDFIAHEDLRILNMTKRPAPKPVPGAAGEFLPNGAAAKSGLNRAISEVGWGVFLAILAAKAEGGRTASDGGGPPQYLPAMSCVWTYRRGEPAHTVEI

SEQ ID NO: 28788 - protein, 262 aa, unknown
  TnpB Polypeptide
VRFRWSRQAPQDAKSFRVTRDRARRWHVAFAVVPQPVPAPGTGEVAGIDRGVAVSAALSTGELLHVPGLAARERRRLRRLQRKLARARRGSNRRARVRLAIARIKARQSDRRMDWAEKTSTDVAGRFDVIRVEDLKIANMTRSARGTPAEPGRNVRQKAGLNRGILASGWGLLVRRLQDKAPGRVEKVRPAYTSQCCSACGHIAAGSRESQALFRCVACGYACNADVNAARNIAAGHAVTARGGFRDTGPANREPQPVLLPA

SEQ ID NO: 28789 - protein, 560 aa, unknown
  TnpB Polypeptide
MHLTFPARIDDETCHPALVVMAGIDSAVQRKLHAALAAGKYNDGPYKRGIEEEFNLTSRQFNAMANQAKGKIKATTESLNDNIVTTKAKQNQLVKQVAELEKTITTGLDKKGRRVGKAKKTRYLFAIHGKNRKITRCEHKIIDMEARVAAPDPGICFGTRKLFLDQFKPGSDHTAWLERWHTARNAQFRLVGAIDEPTGCGSCQSVMEDDGTVTLRLRPFNSMLAPRPVTGKPAETMNRRKTITVKANDYIEIRGLAFHHGHAFIRDVMHRNQGKDKKRRTPLTWRFVNQDGTWYVHLTFDIADKTTFDGSKGAIGLDCNQDHIAATVVDQHGNFVACRRFDLMVYGASSDRAADLIGCTAKDVVAWATELGLPIVAEALDFKKKKLDMTDLSGKRKRQVSSFHYAAWGQALRSRCLRFGVAFAAVDPSYTSLIGHVKYAASMGLSVHHAAALVIARRGLCLSERIPRSAIRVADGKGHHVTLRPAVSMGSRHVWCSAWWGMPKAVKAAHAALLSEFRLRQLECLAALKSHVIAGKPEAWGIDGGIPSRSPDFRSLGGMP

SEQ ID NO: 28790 - protein, 395 aa, unknown
  TnpB Polypeptide
MLISYKYRAYPDATTEARLDTALDTCRWLYNKLLEECNTARENGSSLTMRGMQARIVTLKEENPFLKDVYSKVLQMVNYALWSNIRALSQTKKRGRKIGNLRFKSASRYRTLNYNQSGFKIDRENSRIAFSKIGTIPFTMHRPYSGKVKGILITRSGDRWYVIVQGEQEVSVSKREGRSVGIDVGLDSFAVDSDGMVIENPRFYEYSRDRIKKLQQSVARKQRFSQNWKKAKKNLEKVYDHITNQKNDFLHKLSRRYVDTYVAICVEDLNVKYLKENGTSRGLRRSIHSASWGRFFSYLSYKAASAGTNFIQIDPRDTTQMCSNCGSIVKKDLSVRVHECPYCGFVADRDYNAAVNIHRVGMEQPFEPVETMPLHHISVVQVLSMKQEAPPESAG

SEQ ID NO: 28791 - protein, 447 aa, unknown
  TnpB Polypeptide
LSALAAARGSRPARSATSATLPAPSATAARAFSRSGSASRARRSRGSGASSIIPPQGLPDESGRETGCSGELSAPGHMLTEMVPATRQRPGTVTHTDDLDPVQVKRAYKFRAYPTRPQEGRAVRLLADHCDLYNAALAERREAWRMRKVLIGYGDQSAQLREIRAADPHGQGRHSFTAQQQTLRRLGVTFGAYFKRVRAGQQAGHPRFKPYQRFDQVLFVAGDGAKWGPATGGRWAYASFQAVGRLKVNQHRAVTGRVKTVQLKRESRRWYVIEARIADLERRKARAKLGSSNRRRLRRRLAREWRKVRNQRRDFHHKTARALVDTCDALALEDLRVANMTKSAKGTVEDPGRNVRAKAGLNRLILDAGWGQFTTILTAKAASAGRRVVLVNPARTSIDCHACGASCSRPVQDTVICPACGAMDADLNGARNIATRAGLGSGQALVA

SEQ ID NO: 28792 - protein, 662 aa, Micromonospora sp.
VAGSVLTSIATCTAYRAVCGGKPGVPGVRVPVSGRVLAERVGWLADLVRGMADEVIAAHWSNAEMAELAGGVGPDGRRLPSSGWMALRRLGWCAVPSAGVVVSDRVRRIAEEEAARALRLACHRRGIVAALLATWPADPFARTDDEWSALRAALPAGTDNATIRNRTRQITGYIGVYGRFPVGLCELEGPPAAARQVSLAAADRQQVVVDRVDDRVVRVWAQLPICAAPASYRDWVWHDVDVVLPATVPAGVKVCTPTLRPGDGKVRVDLPWQTPHTRPPLDGHTRALGVDWGVNTLLTATVADLDQDGSVVVRGRPLRFDATGVSAKLVRLRRHREHLKTKADHLTRLRDGRPADAPADPALTGKLVLLEAEHSAVCARIRHLNKALAWSSARWLVDHATAVGATVIYVENLATLEAGGRSRSLNRRLSGAVRGTVFTAIAHLAAKVGIAVITVPARGTSSGCPRCGGAVKHVKTPQGRVAGYRWATCSCGMSMDRDHAAAQRIAARGLANQAKTRRDRNGNAAIRTATDTPVRHRPRRPTQAATIRPPRDRRKTVPTPKQVRPATVKTTRLLPSRRQVPAPADSPLGSAGKRPAGRTPQETNPKGPVPQVPHTVPTTAPRHPHRVRGAVLGRGFHRHVHATPVTDRNGNAGRMPDLPRIT

SEQ ID NO: 28793 - protein, 471 aa, Micromonospora sp.
MKVTRIAYSARLNPGKYAALVEQARRLGRVRSEMWQRYGSINGVGAGLRDRQVRDRWLADGTHVRFGVLANAWKETVRDAMADIAANLAAAKVEVQWAIGRRTNAGAERKRMFTTLRADQWASDPFLARQMRKHWKRGRNRTHDQIVVCADKYNTAVDGQSRLWLAVPGLEPRKMVKIPLSTAVAPTGTLRLILRGGRVEVHYQIDAAEMRSSQRPCGDATVGVDKGYTEALTDSDGQPHGVQLGVVLSSESDRLKERNRRRAKLRSIANTAALRGNHAKAHRIKVNNLGTVKRDRQAARYRARVRTEIFTAVHEVVEKAATVVAEDLTKRFAGRKTLGKNINRRLAGWTKGVTAEALRNVSERRGSALVHVNAAYTSQTCHRCGAFGRRSGDRFHCTPCGVVWQADVNAAINILHRAGDPDIALHTPHHKVKQILQDRTDRHRTRLPVQDSSPAIAERRANYPNRSAMSN

SEQ ID NO: 28794 - protein, 405 aa, Micromonospora sp.
MRGMTGVVKRAYRYRFYPTDTQAAQLLCTFGCVRLVYNKALDARTRAWATQQRRISYGQTSAMLTEWKRDSDLAFLNEVSSVPLQQALRHLQAAFTAFFDKRAKYPKFKSKKRSRASAEYTRSAFRWRDGQLTLAKMAEPLAIAWSRPLPNGAEPSTVTVSRDAAGRWHISIMVETTIETLPPTHAVVGVDVGLAALVTLSTGERVINPRHERTDRRKLAKAQRALCRKEKGSANRAKARLKIARIHARIADRRRDQLHKLTTRLVRDNQTVVIEDLSVHTMMRNHRLARVISDAAWAQLRTMLEYKTRWYGRNLVVVDRWLPSSKLCSVCGRLAGSMPLDVREWSCPCGTSHDRDINAALNILAAGLADSNACGEPVRPEPRKRRRHGPVKQELSQATAGIPAH

SEQ ID NO: 28795 - protein, 410 aa, Micromonospora sp.
VQLRYNYRVNPTPAQQEALARAFGCARVVFNDGLRARQQAHDAGGPYVSDGELSKRVITQAKQTSERAWLGEVSSVVLQQALADLNTAYRNFFASLSGKRKGRKVAPPRFRSRKDNRQAIRLTKNARFAVLDNGRLRLPKIGDVPVRWSRPLPAEPSSVTVIKDAAGRYFASFVVQTTDEPLPTVESEVGIDLGLTHFAVLSNGKRVAAPKFLRRAARKLRRLQQDLSRKQRGSANRKKAVVMVAKAHARVADTRRDWQHKLSTRIIRDNQAVYVEDLGVVGLGRTRLAKSVHDAGWDSFTAMLEYKAARLGRTFGRIDRFFPSTRMCSQCGRINDKLPLNTRAWNCPCGAAHDRDINAAMNVLAAGRADNSNDRGAQVRPPAMVAPRGEAAIHPDAACSTRSVEGISVL

SEQ ID NO: 28796 - protein, 405 aa, Micromonospora sp.
MLTGRRYLLALTSEQADYAEQVAAICRAVWNTALEQRREYQRRGVWITYVEQARQMAEAKRDPTCAWLADAPSHTLQQTLRDLERACKIHGTFSVRWRSKSRTAPSFRFPDPNQIQVRRLNRRWGEVRLPKLGPVRFRWTREIGGTIRNATLRRDGGRWYISFCIEDGVAAAAPNHKPAVGVDLGVAVAVVTSDGDRYDEQCVKPGEAKRLKRLQQGRSRSVESYGRNRRSKRRDAIGAQLLRLHARIRNRRSDFAAQTANRLVRGHGMVVIEDLRVAQMIRSHRGTSRQPGRNVRAKAGLNRAILAKGWGGFLLALQNSARYHGATVVKVHPACTSQTCNACKHVARESRKSQAVFRCVACGHQENADVNAAKNILAAGLAVTGRGDLAIGRSVKRQPPERLTA

SEQ ID NO: 28797 - protein, 653 aa, Micromonospora sp.
LTSRWTWLFSPLNSTSSASKSAHTSRMIASMRERCRSANTLCRNFVTKTKWTCIAKTQCLPVRMPPRSAINQHDTVSSVQLRYTFRVYPTPGQQIELAKAFGCARVVFNDGLRARQEAREQGLPYVSDGDLSKQVITQAKLTPEREWLGEVSAVVLQQALADLNVAYRNFFASVTGKRKGRRVAPPKFRSRKDNRQAIRFTANARFTVLDNGRLRLPKIGDLDVRWSRGLPSDPSSVTIVKDAAGRHFASFVVTTTAEALPELDSEVGIDLGLTHFAVLSDGTKVAAGEVPAPRGAQAQAAATGSDPQAAGQQQPQEGRREGRPRSCSGRRHPAGLAAQALDTDHPRKPSGVRRGPVRRRSRPDPAGEVRPRRRMVVVRRHVGVQGRPLGANLREDRPVRTDVTDVLGMRPDRRTQAAVRPVVGLPVWRGPRPGRQCGDQRVGPGTLGQLKRLWNSGKTGTCAGTAADLASRSRNPPGRRVFHAQRGGNLRPLGRRDRQTTESGSCKRSNNAYPALYATNVKPASYRSVACSGATTTSVINTQLSALTSTTTLVSVQVGRQRRRLRQHHDLLRALRHDAVRGRGGRRHGQGAQRPAPPAGQRLQRHHDAVPLGPGRGRRLPGLLPAEHPVRRAQRHRAGEDQRGHQPGGRHHP

SEQ ID NO: 28798 - protein, 380 aa, Micromonospora sp.
MSSRVVKRAYRFRFYPTDQQRELLNRTFGCVRYVYNRALAERSRAWTQEQRRVTFAETCRMLTVWKNEPDTAWLYEVSNVALQQSLQHLQQAYVNFWAKRATYPTFTSKRTSKASATFTTSGFSFRDGQITLAKTDVPLDIVWSRPLPEGAQPSTVTVSRDAANRWHISILVEETIVALPPATRAVGIDAGITSLVTLSTGEKVTNPRHEQRDRERLAVAQRRLARTAKGSNNRAKARLKVARVHARIADRRRDHLHKLSTRIIRENQTVVIEDLSVRNMVRNHSLARAISDAAWSQLRRQLEYKADWYGRTVIAIDRFYPSSKTCSACGVVVEKLPLSVRGWVCRCGATHDRDVNAAKAILAAGLAVSACGDGVRPSRV

SEQ ID NO: 28799 - protein, 173 aa, Micromonospora sp.
VKVARAHARVADTRRDWQHKLSTRIIRENQAVYVEDLCVVGLGRTRLAKSVHDAGWSSFVGMLEYKAARWGRTFGKIDRFAPTSQTCSVCGRIDGPKPLSVRSWACLCGAVHDRDVNAAINVLAQGRWDNSNACGTRVRPALVPAPRPTSRREAGIRPDAACSTRSVEGISAL

SEQ ID NO: 28800 - protein, 191 aa, unknown
  TnpB Polypeptide
VGVCQSAQSIRKQRRKHLYVKKTLQQKSTQSAKRKLKKISGKEKRFMKDVNHCITKQIANNPQHKVFVLEKLTNIRSKRKGNKLNKLLSNWSFYQFEQFLTYKANSLGKEVVYIDPHYTSQKCSKCGDTNKENRNKSQYKCKNCGYFEHADINASYNIKRNYTISIAQLESMEQALCQHAKSEQSEAFSRM

SEQ ID NO: 28801 - protein, 438 aa, unknown
  TnpB Polypeptide
MLNRKVTYRLYPNVEQEARLQETLGLHQRLYNTALEERIRVYKETGKGLSFVDQCKVLTQWRKVVPALAGLNAQSEQVTLKRLHLAFQHFFRRVKNGETPGFPRFKNIHRYPGWGYKTHGDGWKLHSSQGASPSQGANHGENCAHGKLYLQGLGHIPIRGKARTAGTPVTCEIIHKTGRWYASVTLEMENIQRACGTEMGAFDWGLKEFLTVATPQGIETVTNPRHLRNQLAELKRLGQEVARKIHMAQKLSGRQRGFPISANLRRAIQHLAKLHAKVARQRKDFMHQASARLVKRFGAIGTEALAVKNMVHNGGAHKKGLNREIHAAAPATFLKMTRTKAEEAGSWYEEAPTREIKPTQRCHACWKLPDEKKTLSNREHQCPHCGVTCGRDENAALVLLRWLEMRLAGGSGSGREPSEMWSGGSFAAMKHETPAIAL

SEQ ID NO: 28802 - protein, 291 aa, unknown
  TnpB Polypeptide
MKDYRKKNPDYEYTIRFNEREHQVNIHLCKDGERYIPQPNGNTIGIDANCKHNLFSLSNETTYDYDRKLVNDFCKLSLEIDKLKEKNKDYKVGKRKQQKLDTLKSKMIKSEQQLISNMCKMLQSQGVGHIVMEDLNNGFGKCYVKDKDNEGINYNRKVKFLGLSSLKQEVEHIARKYDIAVSTVQASYTSKMCPICGCIEDENRPNQETFECIECGYKDNADFNAAKNIRNRVLVTVLRESLLKQLGNGAFEPKKLKREKVKEVLLSFRRDLQENARSECTESRLTTFDYV

SEQ ID NO: 28803 - protein, 331 aa, Acidiferrobacter sp.
LKGRSDRFRYPQGVKLDQGNGRIFLPKLGWLRYRNSREVLGTVKNVTVSLSGGKWFISIQTERHVAEPVPPASSMVGIDRGIMRFATLSDGTFVAPLNGFKRHQDRFRKAQQSMSRKQKFGHNGKKARARVQRIHTRIGATRRDFLHKTTTATGHAAGHVSQNHAIVCLEDLPVRNMSQSAAGTTEKPGRTVRAKSGLNKSILDPGGFEFRRPLDYKLAWNGGWLVAVPPHYTSRTCPCCGHISADNRKTQARFACVECGFADNADLVGAINILSRGMHMLRDEGQDTADASAGWDTTARIACEVSGAVMPPAAGTRRSDLGAAQCRPLAP

SEQ ID NO: 28804 - protein, 336 aa, Acidiferrobacter sp.
LSERPPTRSFCSSCTIGSCEPGSISRRRWRCGVSPRPARPINATRRNGRISVPAPLSLRPAPDELQGAGPGESSDASRPDPRAVHHGHIPVRTVQRRQGPVRFGPAARRPMVPAGDGRRPRWHQNLHDRLPGRRPGRGQRRYRQRRRETFRRWRRGLSHPPPHPAPGTAEGGGAQAPRAPAQGPARKLRTLSGQEARFRKDVNHTLSKTLVAKAQDTGRGLALEDLKGIRDRTRFRKAHRARMGGWAFHQLRTFIAYKAQRGGVMLEIVDPRNTSRECAVCGYVAKTNRPSQAEFRCGVCGHTDPADVSAARNIRSRAGAAVDRPKVSEPPHTIAA

SEQ ID NO: 28805 - protein, 443 aa, Acidiferrobacter sp.
MQRLQAFKYELIPTGDEQRQMRRFAGSCRVVFNEALALQKKRYERGEKRLGYAGLCKELTAWRNGAPLPSGRTAAWLADAPVHPLQQTLKDLERAYANFFAKHADFPRFKKKGQRDRFRDPDPKQIKLDQANDRVFLPKLGWLRYRNSREVLGTVKNVTVSLSGGKWFISIQTERHVAEPVPPASSMVGIDRGIMRFATLSDGTFVAPLNGFKRHQDRFRKAQQSMSRKQKFGHNGKKARARVQRIHTRIGATRRDFLHKTTTATGHAAGHVSQNHAIVCLEDLPVRNMSQSAAGTTEKPGRTVRAKSGLNKSILDPGGFEFRRPLDYKLAWNGGWLVAVPPHYTSRTCPCCGHISADNRKTQARFACVECGFADNADLVGAINILSRGMHMLRDEGQDTADASAGWDTTARIACEVSGAVMPPAAGTRRSDLGAAQCRALAP

SEQ ID NO: 28806 - protein, 416 aa, unknown
  TnpB Polypeptide
MKRGDTVMSKNIKTVKLRCYPTDEQMDMLPIMFGHNRFIYNYMLNLQQFCYKHHKNSKTLPKHLSRFDMNKIVTRLKRKKRYSWLKQCESTSLQESCNNLDKAYERFFNKLGGFPRFKKLSYRQSYTSLCVNHNIKQLQNVVIKLPKLGYMKVQPYKIKGTIKSMTLVKTKRNQFFVNVVIQRGFKELPKTKKAIGIDLGLRNIANLSNGVKYQSLHFKALDRQIKLQQIKLSRRIINAKQQCIVDKHYKEKFNLPYYEGEQAFRNLKWFERRGVVEARQRLAKLHEKKVNKRNDYLQKLSTKLVKQYDVIVFEKLSSSNMMKNHHLARVIGEQGWRMFVTMCQYKANWYGKRVELVSPRNTTQTCANCGYVMKYNEKLTLSVEHWQCPHCHVKHDRDTNAAQNILKLGLTALNND

SEQ ID NO: 28807 - protein, 384 aa, Actinomadura sp.
VKLVVQVKLCPDETAAAALRDTLHACNRAANHASRRAFATGITSRTGLQRLVYRELKGMGLSAQPAIHAARKAAGAYATLRENLKAGNYGPEGCRRRREVEGRPVRFRKDAAQPFDDRSLSWRLDAGTVSIWTVRGRTPGIAFQCSPEQLKLLTGYRRGESDLVHRGGNWYLHATCDIPEPEINNPENGFLGTDLGIVNIATTSDGTVHAGKDLNRVRHRNRRLRKKLQSKGTKSARRRLRHLAGREARFAANTNHCVSKQIVTEAQRTCRGIALEDLGGIRCRVRLRKPQRVTLHSWSFSQLGEFIAYKARRAGVVVVHVDPRNTSRGCSACGHIDKSNRPDQATFRCTSCGFAEHADVNAARNIAARGAAGWAVSHAADDAA

SEQ ID NO: 28808 - protein, 476 aa, Micromonospora sp.
VRVTRIAYSTGLNVGKYAGLVEQARRLGRVRSEVWQRYGSIGGVGSGLKDRQVRDRWLADGTHMQFGVLANAWKETVRDAMGDIAANLASAKVEVSRAVGRRTSDPAERTRMLGVLKADRWAGDPFLARQMRKHWKRGRNRTHDQIVVRADQHNSVVDGSGRLWLAVPGLERRRMVRIPLPTTVAPTGTLRLILRGGRVEVHYQIDASQMRSSQRPCGDRTIGVDKGYTEALTDSDGGHHGTRLGQLLTAESDRLTERNHRRAKLRSIANNAAMRGDHAKAHRIRAHNLGTVKRDRQAARHRATVRTEIFTGVHRVVDKAATVIAEDLTRSFAGRKRLGKNVNRRLAAWTKGVTAEALANVSERRGSALVHVNAAYTSQTCHRCGRLGRRNGDRLHCTSCGVVWQADVNAAINILQRAGDPDIALHTPHRAVRQILQDRTDRHRTRLPVQDSSPAIAERRAKHPNRSATSNSRKQV

SEQ ID NO: 28809 - protein, 411 aa, unknown
  TnpB Polypeptide
MKIIRSTKCSLKFVTENKINQLEEILSEYGKVVNTFIDYFWNNSNKMSKANLLKPIVDIPDTWLSARLRKVAAREALDMISSVKEVFSSNKEQLNLSIQSIQSKINSLKKDSDTKQNRKKINNLYCKLKKLNNRYSMMQPHKPKHKGNRMNVSCTIAELQLSKNAKFDAWLHLASIGNKVIIDLPIQYHKHFNELNSLGKRLNSYIITKDYVQFCFGIETGKKKNVNVLVGVDTGINALASLSTGEQLGKDIKDCIDRVKRCKVGSKGRKRASNALRQRICEVAKSVVNKADLLVVEKLKNMNNNSKLKGRLSKNIRSSIGNWNYRFWLDRLEQQSQINRVSFRTVLPYYTSQKCNQCGHTSRTNRLGEIFRCQECGYSGNADVFAARNILERFVTGKYGSCYKHLTSNFL

SEQ ID NO: 28810 - protein, 396 aa, unknown
  TnpB Polypeptide
MRLVERHIVKDNRFEDICFKPGLLYNYVLYNIRQGIFSGNYLKEFDLSNKLCKENQFDFRNLPNHVSQQVIKQVFKNIKSWIKLKKDFEKNPSKYGNHRPHLPSYKQGKKQNMVVFTNCNCRVKGDNCIYFVKDIIKPIKTNVKKDELKQVRIIPQATCYVVEVVYERKETDLSLDKDNFLSIDLGLNNLCSCISNVETNSFIINGRVMKSVNQWYNKKKAKLMSFVGNKGTSNRIRKITLFRNCWIEDKLHKISRYIVDFCKSNNIGTIIIGLNKEWKNEINIGKRNNQHFVSIPHSKLIDKIVYKANLLGIEVITHEESYTSKIDHLAFEPLKKQESYLGKRKKRGLFQSSVGKLINADINGAIGIARKVVGDSFIGKIIDSGFVFNPVRINIL

SEQ ID NO: 28811 - protein, 379 aa, unknown
  TnpB Polypeptide
MISYKYNIYHSKKTKYLDKMLRECCFVWNHALALQRRYHKLFGKYISIGKMKKYFAKRIKRNLLHSQTTQEILERLDESYNRFFKKLAKRPPKFKRADCFNSFVFKQGGFTLNGNCLTINKGKKRFRFSYSRPYEGNVKQIRIVRETCSRFSLIIVTDHNLINSYRKTHDGASIGLDFGLKTYLTKSDGNKIGSPLFFKQYQNKIRKLNKRFSNAKKKSNNRRRRLFELQQAYRKINDLRSDFQWGLAHDLCKQYDYIFIEDLNIGGMKRLWGKKVSDLSHSSFIDKLMYVASKYGVIVHKIDKWYPSSKTCECGCINKGLSLRDRTWACPACGAINDRDVLAARNILRKGISELESMGNSSGRNTGVPYVCIQESHLL

SEQ ID NO: 28812 - protein, 378 aa, unknown
  TnpB Polypeptide
VKTFSIKLYKSKKNWKLYDQITLAGEIYNHCIALHKRYYRLYKKSLNVYALINHITKLKKMPRYKHWCQLGSQAIQDVAERIDKSYKLFFRNQKHGIKFGTPHFKKRINYKSFTLKQTGYKLLDDNRIKIGNKIYKYFKSQKIEGNIKTLTVKRDKLGDIYIYAITDAENLKVAPRTGEIVGCDFGLKTFLTVSYGKDIVSPLFFHQNSNAVRKANRNLSKKQRLSNNRRKARKNLERLHKRIANQRSDFHWKLANELTDKYDFMFFETLNIKTMQMLWGRKISDLSFSAFLLKLKYLASVKGKTVFCIGRFVPSSKTCSVCGYIYKDLELKEREWRCPECNTLHDRDRNASYNILRVGASTLGLGDVSPLPTMAISA

SEQ ID NO: 28813 - protein, 319 aa, Okeania sp.
MKSRFKYRIYPTSGQKYRLAKLFGCVRVVWNDSLACCQEKYKLGQKKPTNSELQKLFITQAKKTEDREWLSEVSNIPLQQSLNDLNQAYQNFFKSTKGQHKGRTIKPPKFKTRKSKQTARFRKGGFKVGQHKVYLAKIGKLKIVWSRQLPATPSSVTVIKDSANRYFLSFVVEIQPETLPETDNSVGIDLGIKTFATFSDGTKVDAPKPLKKRIKKYRKLSKSLSKKTTGTNRYEKARLRVAKFHAKLKDTRTDFLHKLSTEIINENQVIVLEDLNVSGMMKNRKLSRTISDLGWRTFRTFLEGKAEKYGRDFRIISRP

SEQ ID NO: 28814 - protein, 426 aa, Okeania sp.
MRTAYQYKLRPNSDQIATIEMWLELLRRQYNYRLGERFSWWSENLCPVNACPLVMPIPQLRDNPDYYSQKKDLVNTKDKFQEYKLIHSQVLQDCIKRVKLAFDRWFKADKNGQKLGKPRFKGKGRYRSFTYPQTKQDCIEENQINLPKIGKVKLIKHRPIPEGFIIKTVTISRKADGYYATLSLEDRSVPALTTKVESTLKNTLGIDMGLKEFLVTSEGESVPIPQYYRSSQKRLKTLQKRLPRKKKGSKRWLKAVKAVAKQHKKADATPRRRQSQGNAHQAVADKRKDFYFKTANELLLKAEVIAHENLNIKGLAKTRLSKSINDAGWGQFLNILTVKAGNAGQKTIGVNPKNTSQDCSNCGEKVPKELNIRTHSCPHCCIVIDRDLNAAINIKNRAVGHSVLKARGARRNTGAGKREAHIVAPA

SEQ ID NO: 28815 - protein, 274 aa, Okeania sp.
MQINWGLWLTRNILNHNFNNPSGKLKFPTAIDLHKLLVAMVKPKNYWYYEVSKCAPQYALKYLSEAWKRCFTKVSGQPKFKKKGRDDSFTLDGSISVRFNHIKLPRIGWVKTYEILPDNVIPKSVTISRKADRWFISFKVEKATIITEKSADVVGVDLGVKTLATLSTGEIFEGAKSYKKLESKLSRLQYLNRHKTKFSNNWKKAQLKIAQLHNTIANIRKDTLHKLTTYLAKNHSQIVIEDLNVSGMMAEPKLAKAVADMGFYEFRRQLDYKC

SEQ ID NO: 28816 - protein, 185 aa, Thiothrix sp.
MIISHKIRLNPNHKQATYLVKAAGTARFAYNWALAEWQIQYAAWKNDNSQPKPNQMSLRRQLNAIKREQFPWMLEVTKNAPQMAIIQLGAAFKNFFAGRAQYPQFKKKGKSRDSFTLTNDQFAIDASRIRIPNLGVVRMRETLRFSGKILSATISRTADQWFASITVGTRKTTITSRLPKTKVIP

SEQ ID NO: 28817 - protein, 387 aa, Escherichia sp.
VKRLQAFKFQLRPGGQQECEMRRFAGACRFVFNRALARQNENHEAGNKYIPYGKMASWLVEWKNATETQWLKDSPSQPLQQSLKDLERAYKNFFRKRAAFPRFKKRGQNDAFRYPQGVKLDQENSRIFLPKLGWMRYRNSRQVTGVVKNVTVSQSSGKWYISIQTESEVSTPVHPSASMVGLDAGVAKLATLSDGTVFEPVNSLQKNQKKLARLQRQLSRKVKFSNNWQKQKCKIQRLHSRIANIRRDYLHKVTTTVSKNHAMIVIEDLKVSNMSKSAAGTVSQPGRNVRAKSGLNRSILDQGWYEMRRQLEYKQLWRGGQVFAVPPAYTSQRCACCGHTAKENRLSQSKFRCQVCGYTANADVNGARNILAAGHAVLACGGCQQTG

SEQ ID NO: 28818 - protein, 416 aa, unknown
  TnpB Polypeptide
MLIRKAYKFRLKSHPALEQKLFRQAGCCRWVWNQVWHMNQRRLADRQPLIRYQEAAFWLKLWKRSDDYGFLREVHSQPLQQVLKDLDRTYRDGFDKNQPLKRLPRKKRKYRDVAFRYPQGVKLDNRRVYLPKIGWVGFFKSREIQGKAKNATLSYRAGHWSVSIQVEMPVPKPVHSATTDAGIDLGVASFAALSNGVTYAPINAYREHQDQLARVQRRLSRKVKFSCNWLKQKRRIQRLHYKIACCRQDFLHKTSTVICENQAMIFVEDLKVRNLSRSAAGTLDAPGRNVRAKAGLNKSILDQGWSEFVRQLDYKSQWRGGMVVKVPAHHTSQSCSECGHVHPDNRKSQAVFHCQACGHLENADTNAAKNIRARGHRVLACGGAVQSDRPVKQEPVGCREALPPTASSEAAGIPPL

SEQ ID NO: 28819 - protein, 189 aa, PCC sp.
MRHDQAVKVRLDPTVEQKKNLVQHFDCSCWWWNYALHLCIEAYKTTGKGLTVVALNKFLLKWLSEHYSQVLQATTQNPVTAYKNFFAGRAKYPRFNQYPQSVKVIDGVLKFPGHVGIVKAKIHRPIQEIIRTVTASMTLSGLQGDNPVASSDGKIAGINLGLRNFAIVALTTIKIGNQNAIGLGNQDCC

SEQ ID NO: 28820 - protein, 294 aa, PCC sp.
  misc_feature (79)..(79): Xaa can be any naturally occurring amino acid
  misc_feature (210)..(210): Xaa can be any naturally occurring amino acid
  misc_feature (246)..(246): Xaa can be any naturally occurring amino acid
MLVFEAKLEGEKHQYEKLDEAIPTARFVRNCCIKYWIENKAIGRYELSAYCKVLTDEFSWANKLNSMARQAWAERAWSXIARFDDNCKKKAKKKGFPRFKKHQTHGCVEYKTCGWKLSEDRRTITFTDGFKAGSFKMWAPRNLHFYQLEQIKRVRVVGRADRYYVQFCINQEGVERREPTGKTIGIDAGLNHFYTDSNGQTVENPRHLRXSEKALKRLSKRLSRTQKGSKNTVKATNRLSRKHLKXSRQRKDFAMKLARCPVQSNDLVAYEDLQVQNMVRNKKLAKSISDAAWS

SEQ ID NO: 28821 - protein, 496 aa, PCC sp.
VALRRATFRLYPTKKVDNLLHYHRKLHKELYNAAVSNRITSYKKFGKSVSYFDQQNCLPDFKEVWTEYKQINSQSLQATLKRVDLAFQRFFKGLGGYPKFKSIRRYSGWSYPSFTGWKCHSTGDNGYLELAKIGSIQMRGKARLWGHPKALDIVHRNGKWYASIVLDVDDELLRNSRKTDNGVVAIDLGCNDAIAWTNGEENGLIPAPRFFRNAEKKIKQLSKAKRRKRSPNYKKKQKASRRWKKVQQQISKVYRKVANQRQNWVHQITTRIISGNSTVVTEQLEVKNMSAKAKKGKRKKQKTGLNKSILDVGMGMIKQSLKAKLDDVSGVFSEAPTKKIKPSQTCPKCGHQEKKTLDQRLHICSNCNYTQQRDIASCEVMLLWHSNQLPGFGTNLVGADDSSSASRTRKTVGSMKKLGQRKRQKSQATLGDVETPGEGVVARGSSFYTHAWRVEKFQLFDEHQIILIPSVGLAFCKVYSDTALMNLYGFFSFYFY

SEQ ID NO: 28822 - protein, 255 aa, PCC sp.
  misc_feature (119)..(119): Xaa can be any naturally occurring amino acid
MWAPRNLHFYQLEQIKRVRVVGRADRYYVQFCINQEGVERREPTGKTIGIDAGLNHFYTDSNGQTVENPRHLRKSEKALKRLSKRLSRTQKGSKNTVKATNRLSRKHLKVSRQRKDFAXKLARCPVQSNDLVAYEDLQVQNMVRNKKLAKSISDAAWSVFRQWLEYFGKVFGVLTIAVPPHYTSINCSKCGGIVKKSLSTRTHKCHHCGLVLNILELALRTVGHTGTHASGDIDLCIGEETPQCKPSRGKRKPKK

SEQ ID NO: 28823 - protein, 419 aa, Actinobacteria sp.
MLKRFRYRAYLTRPDQEAALNRTFGCARVVYNDVIHAREEAHKAGLPFPKTGDLSKQLITLAKLSPERAWLSEVSAVVLQQALADADRAYRNFFASVSGKRKGARVGKPRFRSRRDSRQSVRFTRNARFKVRQVNTDKARLYLPGIGQLALAYSRPLPSEPSSVTLIREPDGHLYVSFVVDVPQTSPLPETGRHAALDLGLTDYAAVVATDGTRSKVENPRVLRNAEKKLRKAQQSLSRKEKGSKNRAKARAHVARAHRKVRQTRLDHAHKLSLTLVRENQTISVEQLNVKGLARSGASGRQGRGLRKSVHDAAWGQFLRVLTEKADWHGRTVIALNPAYTSQCCSVCGVLDGPKPLSVREWECDGCGARLDRDWNAAVNLLVAAGHAETGNACGGDIRLVLARADSGEAGTTPLTDAA

SEQ ID NO: 28824 - protein, 413 aa, Scytonema sp.
MATKRITFRLYPSKSQASKMHYWRRLHKDLYNACVEHRKTSYKKFGKSVDYFDQQNRLPEFKECWGEYKELGSHALQDTVKRVDFAFKRFFKLKSGYPKFKSSRHYKGWTYPCGAGWKACTNGKNGYLKISNLGNIKMRGQARDWGKPKTCTICFSQGKWYASITVDCVPTRPQTSIGAVGLDFGIYHAIADSNGEVVENPRFVKVAQTKINQIAKTSRRKRPSNFKKKVKASRRWKKANKAVAKIQSKVARQRQDWQHKVSTQIVSCNSLVATEKLNLKGMTRKSKGKRKRQKSGLNRSLLDVGIGNLKDLIKYKVTEAGGFYIEVPTIKVKPSQTCPNCGHQKKKTLAQRTHHCEKCDYKCDRDVAAAMVMLSYARGMERASTGLDESTPTWCGSFKQVAQRKSQKHVAQS

SEQ ID NO: 28825 - protein, 494 aa, Bacillus sp.
MARKNTPNYTIEFALRIPVWQEHRLRKKFKIARMVYNSCLGEALKRHKAVKADKQYRTLLKVLKSKERDKQLADIRLAHGFSEYGLHHFVKSVQQKFKENIGSFEAQKLATRAFQTVEKLHYGKAKRVHFKAFDDDISVENKSNTTGLRYADGHILWGDKPTKKNPKPKNWLCMAIAPKSGDEYAYLALMNRTKYVRILKRKVRDKERYFVQLIQEGYPPTKRNHKIADDDTKRVGIDIGSSTIAISSENSVELRELAPECNADEKELRCIQRKMDRSKRATNPDHFNDNGTVKKGKLIWNYSNRYKKLRRKRKERYRKIATQRKMSHEKLANDILALGSDVRVETMRFHSLQKRAKKTTRNKRNGKMNQKKRFGKSIANHAPAMLLTIVDRKLGYQGRSIKKIDTFSIKASQFNHLTGEYHKKQLSDRWNDFGECRIQRDLYSAFLIGNTNESLNSIDMDLCKAGWDRFVELHNREIARLKQSSSKLLSWFVA

SEQ ID NO: 28826 - protein, 484 aa, unknown
  TnpB Polypeptide
VKTTVRGVILQLNETQKLFFDNLMVRYCAAVRWSFKRLLDGWKVQDIRISVQAKFSLNSRQANDAVYDAQVTIKSQYELVKLHYENAKAKVELRAKRIAKTKLPAKIAKLQKRLEKEQRKLTKWQHYVECNTFPPVVFGGKKLFLERCKGNITREEWQEARSYRYLSRGDKTKGGNLNTRLYQLDGHIYLDIAAEPVQTGKSVRYNRITVPIYLAHKPSKKTGKINGINYRQMILDYLKTGNAYQIEILRRDGKYYIHVTVNEETVGPYNLRGVVGVDTNPGGLGVALADYLGQYRDSQWIDRGEWTYARSNRRTNLIGEEAKKLVALAKETGYALAVENLKFKNHKSVTAKFNRMSHGFVWSKFLEYLDRCAAREEVPVIRVKPAFTSVIGILKYRHMYDISNHESAGYVIARRGLGFNHEKIPKVLLDKLIKKKTKFKQMTNWQQWSTVQKAVLAKIKKLTKRKVKSLGSLQVHRKNVLGIG

SEQ ID NO: 28827 - protein, 361 aa, Paenibacillus sp.
LKNKRQEGENMQTVTIQIRIFPSNPSILVDMGNEYIRTVNRLAEQAEASGTFPKLTSKTVQANLPSAVKNQAIRDAKSIFQKSIKEKKRPILKRRVYYVNNQNYSIGENTVSFPFCMDGKVQRLRTPALIADREKNMLQSSKLGLLRVVQKSNKWFVQISLERPTEQVTGGATMGIDLGLKVPAVVVTSNGKTKFVGNGRKNKFIRRKYNANRRKLEKLKKLSAIRKQCHKESRYIKDQNHKISRQIINMAKRENVSVIKLEKLSGIRQTTRTSRKNAKNLHSWSFYQLQQFIAYKAALAGIKVVEVHPAYTSQTCPSCGERNKAKDRTYHCSCGYRAHRDRVGAINIMCQPVADGDSLSA

SEQ ID NO: 28828 - protein, 367 aa, unknown
  TnpB Polypeptide
LNIACRFRIYPTEEQKILLGKTFGCCRFLYNQMLNDKIREYEKTKKMLKNTPAMYKKEYPFLKEIDSLALANVQLHLEKAYKNFFRNPKIGFPRFKSKHHSKNSYTTNVVNGNILVESKRIRLPKLKWIAMKKHREPAEGLRLKSVTVSMEPSGKYFASLFYEGYSCENQAAEPDYSTAKILGIDYAMQGMAVFSEKVETEEAGFFRKNEKRLAREQRKLSRCVRGSHNYELQKKKVARCHEKIRNQRRDHLHKLSRKIADGYDAVAVEDIDMKAMGQCLHFGKSVQDNGYGMFREMLDYKLAWKGKKMIKVDRFFPSSKKCCKCGRIKKELKLSERVYHCACGNKMDRDRNAAINIREEARRMLTA

SEQ ID NO: 28829 - protein, 394 aa, Mycolicibacterium sp.
MSRFRLLPTPEEEQGLLAHCRDARYVWNLAVEQQLHWQRGRSAPNYGEQCAQLTEARAEYAWLRAGSQTVQQQALRDFAQSMQNFFNRTHRRPTWRKAGVHEGFRQVAVKPRHVERLNRHFGRVWVPKVGWVRFRLSRLVPDGVKSYRITRDRARRWHIAFAHIPDPITGPSDRSVVGIDRGVAVSAALSTGELLHVPSLTTGERKRLRILQRRLARAKRGSRRREKTKRAIAKLRARERDRRRDWVEKTTTDVARRFDLIRVEDLDIRAMTRTARGTADQSGVGVAQKRGLNRAISRSGWGMLVRRLQHKACGRVELIPAPYTSQRCSACGHIAPGNRKSQAVFECIACTAGRCNADVNAARNIAAGRVVTARGDLAAGRSANREPQLSTPAA

SEQ ID NO: 28830 - protein, 308 aa, Halostagnicola sp.
VAFRISAKPYKHVKGVLEGDDANLDILKTALTSDVCKIGTTEALFHNDNPELHVNVTNTEQTVRNKQNSRTVVGVDVNEDNVALTVLSEDGVEDTLVIDFPEIKFERHRYFTMRKRVQNAGKDSTHDTLEGREERFVRDRLHKVSRHIVEWSRQFETACIVFEDLKEMCDSIDYGTRMNRRLHHLPFRALQFYTSYKAAFEGIPTAWIDPAYTSQRCPMCGHTARANRNKKRFKCRSCGHQDHSDRGASVNIAVKGIEKHQDWNVPALNSLPQVRTVRRQASGAVDAPTVTHDTATGYHTDGLEGVSD

SEQ ID NO: 28831 - protein, 398 aa, Micromonospora sp.
VKRAYKFRFYPTAQQAELLSRTFGCVRKVYNLALHARTEAWYQRQERVNYNATSAMLTAWKKTEELAFLNEVSSVPLQQTLRHLQSAFANFWDKRARYPRFKSKRRSRASAEFTPSAFRWRDGQLTLAKMTDPLAIVWSRSLPEGQSPSTVTVSRDSAGRWFVSLLCEDQIETLPAAESAVGIDAGLEHLLTLSTGEKIANPRHERADRTRLARAQRELARKEKGSHNRAKARLKVARVHARIGDRRRDHLHKLTTRLVRENQTLVIEDLTVRNMVRNHRLARAINDAAWHQFRELLTYKCAWYGRNLTVIDRWYPSSKVCSTCAAVARNMPLKVRAWTCRCGTTHDRDVNAARNILAAGLAAAACGAGVRPQREPSRTRRSAMKQETPGATQGTRAL

SEQ ID NO: 28832 - protein, 284 aa, Cyanobacteria sp.
MRHVAQVRIYPNSDQQTSLAKAFGCVRWLWNNSLAENNRVYKETGFGLSRKPLNSRLPSLKKEYPWLAETYSQVYQASMLNLSRAFINFFEGRARFPRFKSKHGKQSLQYPQNVKLGDHSLYFPKIGWVVAKIHRTFEGKLKTVTVSKNKRGHYYASLLFDDGKPEPQISTNGKAVSIDLGVKEFAITSDGSKFPNPKHLPKHEVNLKRKQKNLSRKKKGSNRRQKSRQKLARAHEKVSNARQDFHHKLSRKLVDENQVIIAENLNVKGMLRNHKLAKSIADCG

SEQ ID NO: 28833 - protein, 427 aa, Okeania sp.
MVEKAYKFRFYPTPEQENLLRRTLGCVRLIYNKALAARTQAWYERQERVGYAQTSAMLTNWKKQQDLKFLTEVSCVPLQQGLRHLQTAFTNFFSGRAKYPNFKKKRNGGSCDFTKSAFKWKDGQVYLAKCSEPLPIRWSRQLPKGCTPTTITVKLDPSGRWSVSLRVNDTRKLSLKPVKKQVGIDLGISSLLTTSDGEKIANPKNFKKLHKKLRLAQKSLTRKTKGSHNYQKARLKVARIHAKIKDSRLDYTHKLTYVANPTAPLQLIRENQMIVVEDLAIKNMVKNHKLARAISDANWGELVRQLEYKAKWYGRELVKIDRYFPSSKRCSNCGQIVEKLSLNIREWDCPDCGTHHDSLRLTGGYRDINASINILRMGTRGVRQTQAVRPRDDASRKGMLTKRGNAHQEGCGRSSVSLWSDRKTGGE

SEQ ID NO: 28834 - protein, 470 aa, Streptomyces sp.
VKVTRIACSKNLNAHKYGQLAEQARRLGQVRSLAWRKYGALAGVGVSDRTIRDQWMKDGTAETFGVLATDWKETLRDAVADIKANREAAKALVRQTIRRRTTDEAERKRLFTALKRDQWVDDPYLSRLMRKHWKHGQNRTANQIVVRSDLYRTFTVTEGGDVWLAVPSLVRRQLIAIPLNTTVAPTGTLRLILRDGRVEVHYQIDGSSLKSSQRSCGTAKIGVDKGYSEVLTDSKSNHHGQELGGLLRTESDFHKAKNARRAKIQAVAEKARAVGNSAKADRITRNNLGTKKRNRRRRAFEACVRSVTFTAARAVIDKAKHVVAEDLTRSFPAGKKLGKNTNRRLAAWNKGVTAEALHSVSERRGSALTLVNAAYTSQVAPCCRILGTRKGDRLHCTQCGAVWQADHAGAINVLERDGDPDITLHTPHPRVKQIIQERADRRRTRLPVQDSSTPVRRAKYPSQATKLRQQ

SEQ ID NO: 28835 - protein, 411 aa, unknown
  TnpB Polypeptide
MKITRSTKCSLKFATKQKQKELQKVLSEYGKVCNIFINHFWNNGLVPKAELLKPIVDIPETWLSARLRKVAAREALDMVKSVQEVLESNKKQLQLSITSIESKLKTLEPNTRKNRGKINNLYCALRDKKNKIGMVQPHKPKHKGERMSVSCTIAELQPSKDTREFDSWLHLTSIGNKIRLDLPIKYHKHFRELNTKGQRLNAYIITKDYVQFCFERETGPKKEVEILVGIDTGINALASLSTGEQLGLDIKAGIARVKRCKWGSKGHKRASSSLKQRICETAKEAVNKADLVVVEQLKNLCNNTKLKGRLSKSIRSSIGSWNYSYWLKRLEMCCEENRVSFRTVSPRYTSQKCFKCGYTSRTNRNGEKFRCQSCNHTGNADINAALNILERFVTGPYGACYKPLVPQLSHL

SEQ ID NO: 28836 - protein, 170 aa, unknown
  TnpB Polypeptide
LGRRLSKKKKGSQNRRKAKVKLARVYERLANSRLDFLHKTSLALVRKYSVISLENLNVKDMVQEKYGKQINDAGWGMLASMLCYKAGSAGCRVVFVNPEGTTQQCSRCGSTVRKSLKDRVHVCPVCGLVIDRDLNAAHNILNRSTVGHTGFEACEVGAEALTVKQEAHTH

SEQ ID NO: 28837 - protein, 397 aa, Kamptonema sp.
MEQVLTLVVKLQADEKQQQLLSQTATAFADACTWINTEVNPKLTNRNSIQAVCYHEVKAKFGLSANHVVRASARVAANRLSAKHKGRKVRGFKPTSFECDARTFRFIEEGWLISISTVGKRTKLALLVSTYHRGKLKDKNPTSAQIGQHRDGNWYAHIQIKDDAPKPVKTDKVIGVDFGRRDIAATSTGQSWSGKKIQNKRDRFSHVRASLQKKASQGTRSTRPRCRQILKRLSGRERRFQSWLNYNISKAIIDKAKHQQALVAIEDLTGIRERTNEKPRSKTKRRRSNSWAFDRLQSFLEYKGIKEGVEVIAIPPAYTSQTCHKCKHLGIRGGKSFRCTNPRCQDQGDADVNASLVIALWGCSFNQPGGSQLLSCTITSGLLKASTLIGEVVYSIS

SEQ ID NO: 28838 - protein, 312 aa, unknown
  TnpB Polypeptide
LKEEATATKAYKAPIEAPKDLIEAYFEAKKKALREVLNHVTHSENGKAHLSFKAGDRRRLRNNLLEGWKYSRHYVDSAINSAIGLVKGWIKLYNRGKAKSRPRITGKTVYIKSTLFTYRDGKLKISIEPNKRYLEVDLTRYDYLPEDFDSIGGLLLTENGLIIDFKRKPRSVEPRGWASFDVNLTNVTALINGRIVRYDLRQLYHVHRVYEEKRRRIQKLSKRKPRTAERLMRKYSRRERDRDRDFMHKLTARIAGELEELRSGAILEDLKGVKARVLNGGKGINRRISKWNARTFQLMLGYKLGWAACEVR

SEQ ID NO: 28839 - protein, 389 aa, Mycobacterium sp.
LLPTAGQAVVLTEHCRHARYVWNLAVEQQLHWRPGRRPPGYNEQCAQLTAARAEYSWLAAGSQTVQQQALRDFAQAMRNFFAGTHRRPRWRKADVHEGFRQVGVKAQHVERLNRRFARVWVPKVGWVRFRLSRPVPHGVKSYRITRDRAGRWHVAFAHIPDPVRGPGDGSVVGIDRGVTVSAALSTGELLHAPGLSRGETRRLKVLQRRLARARRGSNRRARTKRAIATLKARDSNRRKDWLEKTTTDIAHRFDTIRLEALDVRALTCSARGTIEKPGQRVAQKRGLNRGISRSGWGRLAARLQHKASGRVELVPAAYTSQRCSACGHLAPENRKSQAVFACEACDAGPCNADVNAARNIAAGRAVTAREDLGIGRSTNREPQLSSPAA

SEQ ID NO: 28840 - protein, 460 aa, Micromonosporaceae sp.
VRLRYNYRVYPTPGQQEALARAFGCARVVFNDGLRARQAAREQGLPYISDGDLSKRVITEAKKTPEREWLSEVSSVVLQQALADLNTAYRNFFASLSGKRKGRKVAPPRFRSRKDNRQAIRFTANAQFRVLGNGRLRLPKIGDVVARWSRALPAEPSSVTIVKDAAGRYFASFVVATTDEPLPTVDAEVGIDLGLTHFAVLSNGRKVTTPKFLRRAARKLRRLQQDLSRKQRASNNRTKAAVKVAKAHARVADTRRDWQHKLSTKIIRDSQAVYVEDLCVAGLGRTWLAKSVHDAGWASFIAMLEYKAARAGRTFGKISRFTPTSQMCSKCRRIDGPKPLNVRTWTCPCGAVHDRDVNAAINILAAGRAERLNACGAQVRPAPVPAPRREAGIHPGATRGTRAARRESPSIRAGRTSTVGVQPQPPRPVPQGPVLTRDPVVAAIGSRPRPGRVPADQRGG

SEQ ID NO: 28841 - protein, 207 aa, unknown
  TnpB Polypeptide
VENIQQVRTVWNGDEWELHLVCKKEIPVEDAPGDKMAGIDLGISNYLAIDYEDGPSELYPGNVLKEDKHYFTRDEYQTEGENGPSKRALKARRKLSRRKDHFLHTLSKHIVQRCVEEGVAEIAVGDLSDIREDENGASRNWGQLGNKKLHGWEFDRFARLLEYKAEEHGILVDRVDEENTSKTCSCCGQIRDANRVVCTSASPVKRR

SEQ ID NO: 28842 - protein, 364 aa, unknown
  TnpB Polypeptide
MNELDLINKMNRGISYIGIAIAVIAFFFTLPFLIKDMNLITGVSGLYFYLNITVTRTLAYIFIILGIVTVIASFMPFFYNNVKFSSFDAKNNAYFFSAVSVYIAILVFSSVIIEVFDPSVAVSPVTYMPLGEQNFIYLMSAVFQVLIFEFIPITILIAILLLATRKFKLSSFLNPYGYIKGYIAIFMILPAAVSVLITNYNLYDSILIYLSTLALSFIYIRFGMLRSVLASFISSFIEFALTAFAHNVIISSIVSTFIFIWAFAGLYTVTFYLVDRNRKASKKTQDSDTEKTGTPDAAERIQQRIKTPPDELWIRSACPNCGNVEYRIGPDMSLECSKCGQKLDRDYTGPYNIIISNAIGRRQP

SEQ ID NO: 28843 - protein, 164 aa, unknown
  TnpB Polypeptide
MHHTIDNTRKDFHFKQAHALCDVADMVFMEDLDYRTMAKGMFGKHMLDAGFGQFRNLVKYVSWKRGKFFAEVDARGTSQECPECGGEVKKDLSVRVHSCPHCSYTTDRDVASGQVIRNRGIALISTPGHGGIESACADDLPGAGVTQSRQVSKSRRGTTRKSQK

SEQ ID NO: 28844 - protein, 254 aa, unknown
  TnpB Polypeptide
MLTMNYRYRIYPDATQQDTLFGWMEVSRNVYNYALREIKDWFNSRKCLVDRCSIVREHILPADLKFPNEVNQLNALPDAKRVFPRLAEPPSQVLQQTIKQLHRALENFRERRFGFPRFKKFGQLKSLLFPQFKESLVTGLHLRLPKIGAIPINLHRPIPAGFVVKQVRIIKKADKWYASINIQCDVAVPDPMPHGYPIGIDTGLSKFLATSDGVLVKPPKFFKSLQSELKLPFGFASSLRRETLLQDWTHCNAG

SEQ ID NO: 28845 - protein, 395 aa, unknown
  TnpB Polypeptide
MSGEMKRATKIRIYPTVEQAEFLNAQFGAVRFAYNKALSIKNHYYRKKGKSLSPTKDIKPLLAIAKKSRKYAWLKQYDSIALQQSIINLNKAFDNFFNSNLKANKPCFKSKHERQSSYHCTSIKVGENCIKIPKLKPIKARLHRDLIGKVSSITISRTQTGKHFASILCDDGINEINQIQVIDANKVLGLDLGLTHFAIDSQGNKEANPRFLKRAANNLRRKQKALSRKKKGSKSRNKARLLVAKCHEKTANSRSDFQHKLSRNIIDENQAIIVETLKVKNMLKNRKLAKHISDVSWSDFVIKLEYKAKEQSKHVVKISQWFASSKTCHCCDHKVDEMKLDVRNWVCPLCNTEHDRDINAAINIKERGIVDLKAAGLTVSANGGPCKSSQVLAAA

SEQ ID NO: 28846 - protein, 391 aa, Marinobacter sp.
VDVAFKTQLLPNNKQRTYFAKASGISRFTWNWALAEWDRQYAIHKDGSGDRPSGMALKRQFNALKKSEFPWVYEVTKYASQQPFISLQRAFSDWMKDLKSSKPKHLKKRRPRFKKKGKAVDSFYIGGDQVKVEGCRVKVPNLGWVRMAEPVKYGGHINSMTISRQADKWFVSFSMKVEVCSLPSKSQARCGVDLGIKALATISQGDVREWKSPKPLQQALRKLARYQRRLVKKVKGSAGYRKLKTRIARLHKRIADIRANTLHQLTHYLTSKFAEVVIEDLNVKGMMANGKLARHIADIGLFEFRRQMTYKMEWRGGVLTVADRWYPSSKRCSACGNHKTDLALADRVYHCQSCGHRECRDYNASKNLEHYNTARSAGIYATGDDGSAQAA

SEQ ID NO: 28847 - protein, 465 aa, Lentzea sp.
MVHRQFGHRARLALDTARRTMLDEQAHAARALWNLLHDWWTMQARDRRTLAAADAAIRQARKDIDWLTVLPAQAAQAVLKTYFQSWMNCWEGRAAAPTFKSRLRSSLVVDVPQGRDLKVIRVHRRWGMVNIPKAGRVRFRWTRELPVGKHTDDNNRVTGARLVKDALGWHIAFRVTATTPEPVAHTGPEVGIDVGVTVPLALSDGNHQDHGRPARAEHNRSDRDKWLTTPEKRRLLRLEQRAAHRKTHRMPGERTSKRLRVTYDQIRRLRATATRRVVDWQHHTTTTLATHYGTIVVEQLQIPNMVKSARGTIEQPGTHVAQKSGLNRAISQEAWGRTITMLAYKTARNGGQLIKVPAPGTSQRCSVCAIITPAAAKTKPRSSAKTRTADGRATPTTTPPATSCTYTGPAMRWSRLPEGQSSGAHTASSRPPQGRAESPTFTYGESFKPASAPSQEVFRSSCRRP

SEQ ID NO: 28848 - protein, 424 aa, unknown
  TnpB Polypeptide
MDQSARSERNMLISMSMSETKEKRKTQSCKVITVKIQSNKLNQRQKEQLKMLFVEAKWIRNEMIAFGKDNPIFDYKCGDFIQVMNKDGNLELREKKFISAQQTQSVIDEVKDNIRVLARIREKGKKIGSLKFTSEVNSINLKQFGATYKIKSETKMKIQGVSGDVRVKGSHQLDPDCDCANAKLISRPDGYYVAITTYVHKSKVKDQYEPGTSIGLDMGIKNNITLSNGKKINVYVEETERLKTLQRELSRRKKSSNNRNKTIKKIRKEYQQISNVKNDIANKIVSELKQSEHIYFQDENIKGWKNKKSLARGSKKIQHSVLGRVKMKLKSCERATMLDQFIPTTQTCICGCKNKHNLSQRIYECACGYSCDRDVHSANMMILFGKNLIGTEHTEFTPVENLIPTALTGRKSESMKQEAAGSLA

SEQ ID NO: 28849 - protein, 360 aa, Thermoanaerobacter sp.
MEQVITLKLKLYRPTQAKREMYQLMADRTTEFANNYLKLDKKDRPRTSKEAKEYSDPLPSAVLCQAVRDIKSKPKARRFKRLWPAFNNQNFRVEREYTVDGGAVYKVSFPTLERRVGVPIVVTPYHKKYLDLLLAGKVKQGVARLVKCGKYWYIHLNLTVPVERVQKPEKVMGVDLGLVDLLVASAGGQTLFFPGGGLVYIRRHYVDLRKKLQKAGAYKALKELGDKEHRWVKDVNHKASRVLVNFAVAHGVTKIRMEDLTGARWTKAQGKEQRKDHGRSLHYWPYYQLRQFIEYKAALAGIQVELVSPDLTTLTCSRCGETVKSRPKSRWFRCPRCKRIKHIDVNAADNIAQAVSGLAS

SEQ ID NO: 28850 - protein, 351 aa, unknown
  TnpB Polypeptide
MIVRILKLKLTKTQETQLNQWLWNLTGVYNWAIKKIEHDAQDKIYHSDLDFANLTANHSRRMEIPSHTLRGILSQAYNAWQRCFKKLAKKPHLKGRRNKLNSIPFPDPFKSPKDSRIGILGLGKVRYYKQELPEAKIKCGRIVKRASGWYLCLWLDTEHKFPVKQTDKAVGIDPGFDTLLTLSDGTKIENPRELRKGTRRLAQAQRSGKKKLVARIQERQANRRRDRNHKISRMLVENYKTIFYSDDNFKAMAKRFGKSVSEAALGNLIGMMTYKGRIGGRKVKPINSFRTTMTCSTCGALTGPTGLAGLKVRQWECSVCGTVHDRDTNSAVVVLNAGLGTSHEGIKRKVA

SEQ ID NO: 28851 - protein, 424 aa, Bacillus sp.
MKRLTMYVTQSNQIRGLSKEQFKQLKEMCHYAKNLYNVGLYNVRQHYFTEKSFLKYESNYHVSKTNENYKLLQAGVSQQILKVVDRSFKSFFNLMKKAKKGEYRFRDIKIPKYLKKDGLFTLIFSTNAMAIKDGYFRVPVSNLYKKLNSEYKDILIPFPSRLEGKKMKEVRIVPRNNGQFFNIQYVYEQPYETTELDVDKALAIDIGLNNLASCVDTDGASFLVDGKRLKSINRLYNKKKARLQSVAMKQGMKYTKQIGSITLKRNKQVNDYMKKSARIIINYCLKNKIGNLVVGYNDDFKRNINIGKKNNQQFTQISFGHLREQLLHLCERYGIEYVEQEESYTSKASFFDNDHLPKWKPADEEKHIFSGKRVKRGLYRTSTGYELNADVNGALNILRKSNLMDCKILQARGCLAHPLRIRVV

SEQ ID NO: 28852 - protein, 443 aa, unknown
  TnpB Polypeptide
LFDWLAAQPPLWNQLNYRRRQAYFSDDGDVWSAEYTDLYDEYAPLIGKATCQQIARKNSEAWRSHFQLLDQYHDDSNPAVTEKPSPPGYWGNRDEGYELHGFVRNDLYTFDWDKNKSTLEFGVGEVLEDRYDFEHNERITLEVRGNPQWDGDDSRLELIYEEHADQLRVQHPVRIQPDNLQEQRQDAFTHTLDPENTTQAAAIDVGANNTLAVVTEGGETAVYHARPDFNRFQSYSERIATLQSELPENKYTSHRIKRLYDERSRKRNHNRDAAVKHVGEWLLERNVDTVYVGDLTDVLEAHWSADVNEKTHAFWSHRQLLDRIQLTLGDIGIAVKEVTEADSSSTCPECGSRDVTRIRDSFRCHDCRLDAHSDVAGAWNILEQEVGPMARPAALSAERGRDAPSDGAYWQWNEHEWIPAKFGEQSCSVDQPSLSEPVSSQPG

SEQ ID NO: 28853 - protein, 494 aa, Nocardiopsis sp.
MYDHHRVVGRGAWSFRARVNAPSPVAGPGGSRPSVCRPGGGSVPAHLEHHPGDTVGDARLLFVSRFRLYPTSAQQQQMLQHCAHARYVWNLALEVTNTYRKGGARTARPPRFAALCRMLTQARRTDTSDLDAESAAEFAWVASGNTDVQQQALKDFDQAISNFLGGSHGYPKWRKKHRNEGFRVIGTGRVPAYTATGEPLLNAKGKQVMHRKALVQKLNRKWGQVKVPGCGWVKFRLTRRELPDAKSLRITYRDGLWHVAFATLPDPVPEPGDGSVVGVDRGVAITAALSDGRMLNCPQPSTKEKARRRKHERRAARAPKNSPAKAAEYAKVARLKAKEVARRKDWVEKTSTMLARSFDTVRFEDLKVKNMTASAKGTAEQPGSRVRQKSGLNRAILAQGWGMLRQRTGHKAPGRVQDVPARNTSLRCSDCQWIDKNSRQNQARFVCTRCGFSCNTDLNASNNVAAGQDASPAPLGVCAGGVIPRPRSSAREPQ

SEQ ID NO: 28854 - protein, 353 aa, unknown
  TnpB Polypeptide
VFLNDLNGSKQEVLKSFLYRCHDIMQYFVDLFWQRRDFRGKLADLPTVHRAVKRFSITTRLSQAIAKQGAEIVAGGHKRSKKRRPRLQRHVVTLFYHFVSVEPFRGEGFDWAVRFTSSGAPKGLVVPFSSTKPLNEKLADSWSLRQTIRLGMRKGRLFIDLLLKKKRPKPKQEGRIVGMDSNYKNGVVFSDSQVVGENIYQRIQGFKKRQKNTHAEIKSMLGHALKSVDWSSIQVLSIEDLKRVKHGKRGTFSRVFNRRLSHWLYRTLVQFLERKCEEEGIQLVVKDPFKTSQFCSACNRWDRRNRKGERFKCVHCGYQQNADHNAAHNLELLGVAGVYGLRSYLSSKRQTFG

SEQ ID NO: 28855 - protein, 362 aa, Desulfobacterium sp.
VNISLAHKIELKPANIQKGYFVRACGTARFVWNWGLAEWNRQYKTGSKPSGLGLKKKFNAIKKEEFPWVFEVLRDANSQPFSNLQKAFTNFFKGTSKPPQFKKKGIGDSFYIANDKFKVEGKKIRIPKLGWVKMTECLGYSGKILSATVSRTADKWFVSICVKMDITPTTCENQAVVGVDLGVKTLATLSNGEMIEGPKALRKMQKKLKRLQQSLSRKKKGSKNREKQKRKVARLHHQIACIRLDALHKLTSKLIRKYSVIVIEDLNVRGMMSNHKLAKAISDMGFHEFRRQLDYKSSIAGVHVIVADRWFPSSKRCSCCGEKHSKLKLSDRIFVCPTCSFKMDRDLNAAKNLEMYPELIAA

SEQ ID NO: 28856 - protein, 403 aa, Methanoculleus sp.
MQSVTKLRLVASPDERQTLFATMERYNAACNTVSPIAASVRQFSNIGLQKRLYRHVRETFGLSAQMAQLAIRKVAGSYRSTREAIKEQNKVLAALGKPLKSLTELSFREHGAICYDARVLSLGRSRVSIWTLDGRIKLRYRKPDHFPAVATVKQTDLVYRDGAFWLYATVETPDIEPAEPSGYLGVDLGVVKNATTSDGVTFSSDATEKVRQRYGRLKGVLQKVGTRSAKRKLQKISGREHRFKTNTNHVISKRIVCAAQGTKRGIALEDLKGILLRTTVTKGQRERHHKWAFHQLRSFIEYKARRAGVQVQVIDGAYTSQQCSACGSIHPDNRQTQAAFRCLACGHTENADLNAARNIAARAAVNRPIAICSPDTGGEVESQACKEHGATYGIMPPTSVGGS

SEQ ID NO: 28857 - protein, 406 aa, Lachnospiraceae sp.
MIIEQVEIHNISCNHKYYKECDRLCFLSKNLYNTTLYAVRQYYFKTGKYLNYNQVNKEFTHQNQTDYRALPAKVSKWVQKLVEQDFKSFFALLKKKQQGKYENPVKIPKYADKVKGRKKLHYEKGAISFVKEGYLKLSQTEIEIKTNLSKDSIRYVEIVPDLRGFQIILGYQKECKVKQENGRYASIDLGLNNLATVTSNVIKPFIINGKPCKSINQYANKKIATLKSLLPQEKYSSKQIKKTFIKRNNKIKDYLHKASTYVVNQLVSNDINTLVLGYNKEWKQDISIGKRNNQNFVEIPFYRFKEMLLYKCQLHGITLIEQEESYTSKCSFIDKEEIKKHKRYQGKRIERGLYQTKEGKVIHADVNGSLNIMRKYLEKNVAWNNQIWLNLVEVCSMPNIQVITCV

SEQ ID NO: 28858 - protein, 369 aa, unknown
  TnpB Polypeptide
MHYAYRYRLHPTESQQEKLDQHRDTCRQLYNHALTEFDHIPESAGTLNQRVRQVRDQLPDLTDWWDTLNDLYSTVAQATVMRIEDSVKALSQLTENGYTVGSLNWKSPREYRSFTYVQSGFEFDNKNGQTVLSLSKLVDVPISYHREIPEDVTVKEVSIKKERTGEWYASFAVEGKAEPAKPANPDRCVGIDVGILKYAHDTDGRAVGSLNLRDERERLKREQRSLSRKQQGSNNWEKHRLRVAECHQQLRRKRHDFLHTLSKYYATEYDLVAVEDLDVKGMMESAGNSQNTASAAWETFTTLLEYKCTREGTHFAEVGPAGTTKECASCGVESDKPLWVREQSCPACGFEMDRDANAALNSLSRGFEK

SEQ ID NO: 28859 - protein, 351 aa, unknown
  TnpB Polypeptide
  misc_feature (351)..(351): Xaa can be any naturally occurring amino acid
VVEQLHNHYDTHGNFPDSYTDLVATPEPNGTLPYAPDTGDYHIHEVTINGGRLEVTLNAPGTLNTDSTSDWSDHEIRFPVHSRFAEMLTHRSMGAPTLHQSAHGYTLDVPVEIPEHEYKRSDNRVLSVDLGVKNQATAVVVDRDDGQIAPPGILDHQSTQKLFRLTTEAENINDRLAALRRDGKAHTERFSHLHSEYQKLRQKETRLRKQIQHDVANQLVWLALQYECETIAFESLGQIESPDMDGTLAHSISTWARGNLLDLVAYKTELVGVETTTVNPWGTSRYCPRCGECGEIIKAPDDHTECHHGGHFHCESCGYECDRDVVGAINVGRKYLSDSMMEEANPVAYMX

SEQ ID NO: 28860 - protein, 451 aa, unknown
  TnpB Polypeptide
MKRTNTFSVRPLTDDDEQVLRNVLDASASLWNEVNYQRLMRYNGKDGFEDEDVWDADTGHLEGKYKGVLGGSTAQQVIAKNSEAWRGFFRTKKAYHDESNTSVTEHPEPPGFRGNKDDGRVLKSVIRKDAYSVEWGSRSRLEILVGADLRNKHNSPKSRLRLEIVGEPNWPDYEDQSRLDLWYDETNYTFRASQPVTVSDDARETPLADETAALDIGVNNLVACTTTTGEQYLYEGRLLFERFRETTREIARLQSKLEEDQYSSKRIRRLYRKRTCRRDHAQEALCRELLERLYAEGVDTVYIGDLTDVLDAHWSAETNAKTHNFWAFKKFSKRLACTAEEYGISVGVQSEAWTSSECPQCGSTDRTTRHQDTLTCPCGFEGHADLTASETFLKRHTQTEVRPMARPVRFEWDDHEWSESSHSPTRESPKEQRTDQSTVHRDGKVASGETA

SEQ ID NO: 28861 - protein, 568 aa, unknown
  TnpB Polypeptide
MQLTEQFHIPAQYHDACDRLTQLVSKHSQRLLEEEYWSDSHIGGIDSHSGTSYTYIRDDQYDCFENVDAYLYSRFKRCVYQRITSILQSHSDERRAFRFVVETVPEQKIESVGWGELRNRLFNEDSPYVQWGILESVVEQLNNYFDVHGRFPECYTELVSCPEPNGTLPYSADAGDYQIHELSDKDGTLVFTMNAPDSLDTDSSHDWTDHEIEFSCHSRFAELSRCGELGAPTLHKSEHGYTLDLPVSVPEIETETADDRVLSVDLGVTKQVTAVVIDDTEGQVAPPQFINHESKQKLFRLATEADGINDRLGNLRRNGKSHTDRFAHLYNEYHHLRQKEKRLREQIQHDAANQLIWLAAKHGCETIVFESLGQIEAPDTSGALARSISTWARGSLLNKTEYKAELVDRETTTVNPWGTSRHCPRCGERGKTVKAPDDHTECRHGGHFHCPNCKYECDRDVVGAVNVGRKHLSTSKMEEAKPVAYTETGNHASFPSSPRDARSTSVQSTASQETASGRQTRLTQDCSAACRSESETGGLQQNHGGNTDRQLSSRSVIQSVLANTPDSA

SEQ ID NO: 28862 - protein, 418 aa, unknown
  TnpB Polypeptide
MRYTYRYQLNPTDSQREQLDLYRDTCRQLYNHALKEFNEIPKSAGTLNQRVRQVRDQIPDLKDWWDDLNDLYSTVTQAAVMRIEHSIKALSELQNQGYKVGSLNWKAPQDFRSFTYVQKGFEFDSKDGHTVLSLKKLADIPVVKHREIPDTETIKQITIKKEPTGEWFACVTVDGKETPEKPENPDRCVGIDLGILKYAHDTDGRTIGSLDLSQERERLQREQRKLSRKEHGSHNWEQQRQKVAECHQQIKRKRHDFLHKLSNYYATEYDFVAVEELNIKSLLESSGNSQNTASAAWDTFTTLLKYKCKREGTHFVEVDPAGTTKECASCGVATDKPLWVREHSCPACGFEMDRDANAAINILSRGFDKLGVVHSEATPVETALPMFAPDSESGADTKRVIETGSPTLKERTASAVSE

SEQ ID NO: 28863 - protein, 382 aa, Actinocrispum sp.
VKLVVQVRLLPDAAQAAALASTLRSCNEAANWVSQVAFERRTFHEYALRKHTYGNLKDRGLGAQAAQHVIKKVVNAYTSFRASFCAGEKDSRNSERRAKAEAVPVTFRVTAAHPFDDRCLSWQHDRSTVSIWTVNGRLKHVRYAGHPNQVEVLRRYRRGETDLVCRDGMWLLLTTCEVPEADQVSPTDWIGVDRGIVHIATTSDGHDHQGRRLLRYRRWAARKRAELQAKGTRSAARRLKRRTRREARHASHVNHKVSKEIVAVAQRTVRGIALEELRGIRDRVRLPRDQRATLSGWSFHHLGHLITYKARRAGVPVILVSAHYTSQMCPRCGHTARNNRPARGDFCCRRCGLAGPADHVAAVNVRNRARRAWVFANTPAPT

SEQ ID NO: 28864 - protein, 399 aa, Singulisphaera sp.
MQTGVLKLKLRSLNNNKATRLLSLSEIFTVCVRFHWGRIETLKTTNTTVIHRDCYREARELFHLPASTIQQARDKAVAAYRAHLERKKRDRRSNPPTFRRTLPLRLAAENLRIFPDKSVVRITTPDGFLWLPVLIPSCFAERVKLPHGVSELVRKGDDWFLMLAVKSPDVPVPDRERPHFGLDLGLAQLAVLAGPGVAKFFDGKPLRYTRSRYFRYRQALQAKRKVGMVKRSKGREYLWATNHNHKVSREIVDTVAKASGILHVENLTGIRERCKGTAKINRMLSGWTFAQLLQFITYKAAACGVTVIAEDPRHTSQRCSRCGHTERGNRTKQAAFACKACGYRLNADLNAARNLAARGACPSGVGGVTPPGRSGAESGEPKVARLSRHRGNRNLASSS

SEQ ID NO: 28865 - protein, 398 aa, Singulisphaera sp.
MSKFRKVYRFRMKPTKAQAHALNRMAGARRWVWNWGLARKREHYKEFGKTLAYHALAAELTVLKTKPETAWLKEADSQAMQQTLKDLDRSFVNFFDRRSRFPTFKNRKRDRARFRIPQRVKVVDGKVVIPKIGPVRIYQSQPVDEPTKSATFRRSADGKWYVSLTAEFEMPDLPLVPPCPERTVGIDLGLIDFATLSDGSEPIPAPKFFRKAQKKLRKAQRTVSRRKPGSKRKTKARIQVARIHRKTANQRNDFLHKLSTELIGKHDGLCIEDLSVKGLAKTKLAKSVNDAAWGEFRRQLEYKCLWNRKHLVVIDRWFPSSKMCNACSALNVRLTLSDREWDCDCGAHHKRDLLAACNIRDEGLRMLAAGQAESQNARRTSVRPHFEAVGVEPRIPRL

SEQ ID NO: 28866 - protein, 397 aa, unknown
  TnpB Polypeptide
MQRAILLQPDATKHKTEVLKEFNGRAISLANFLLANRKSKRLMDLHDEMYSVCKKNTPFNSQVICDIERNVVRSKGKEIKAITVKFNVPRNCKTFSTKSNFFIGFGLYPKKRIAVPIKQNRNYRRFQDLIEDGWICKTFGLTSNLQIVAYLSKEKEIKQRRNILGIDVNAKHFAISVVSPDGKVLYQTYFGKHIWVKRKKIMKRRAKLQSVGSEKKLKRIKDYERNFVRTNLGQVIKEIIRIAKRFDADISIERLKKFKPTGKRFNRTVMRIPFYKFKQILEQRCFDNNILLNSVDNWHTSKWCSRCGAVGKGHDANYSLFKCKCGQIVNSDRKASLAIAVKSLLVRTEHISNQNNAFFQFTNRQVPVNGLLRSDETLSGAVHNAQSLGMPTRFRGG

SEQ ID NO: 28867 - protein, 440 aa, Actinomadura sp.
MVTQAYRFALDPTPGQERVLRSHAGAARFAWNWGLAACRDRYDAESRWWSGAELHKLWNRAKKIDPSLGWWGENSKCVYQEAFRDLDRALREFVRSRKGLRKGRRLGFPRFKKHGRCRDSFRFSTGATRCSGRTVTLPRLGTIATHESTRKLARRLENGTARILSATVSRTAHRWYVSFTVQVDRSVTERHVRPGSAVGVDLGVKTLLIAVDDEGAVLEVDGPKALRAGLRRLQRLSKAHSRKQHGSANRTKAAQRLARRHARIADIRADALHKATTHLAAWYETVVVEDLNVTGMVANRRLARAVADQGFGAVRRMLEYKTVWRGGRLLVADRWFPSSKTCSGCGRRKPSLSLSERTFRCEACGLALGRDVNAAINLRDLAASGAERPNACGGDVRPGPAGQPPAKQEPGTASAGETGTAAAQATATRTVNAHIHSHYG

SEQ ID NO: 28868 - protein, 403 aa, Salmonella sp.
MKRLQAFKFQLRPNGQQERNMRRFAGACRFVFNRALARQNENHEAGNKYIPYGKMAPWLVEWKNATETQWLKDAPSQPLQQSLKDLERAYKNFFQKRAAFPRFKKRGQNDAFRYPQGVKLDQENSRIFLPKLGWIRYRNSRQVTGIVKNVTVSQSCGKWYISIQTESEVSTPVHPSTSMVGLDAGVAKLATLSDGTVFEPVNSFKTNQKKLARLQHEMSRKVKFSNNWQKQKHKIQRLHSRIANIRRDYLHKVTTTVSKNHAMIVIEDLKVSNMSKSAAGTVSQPGRNVRAKSGLNRSILDQGWYEMRRQLEYKQLWRGGQVLAVPPAYTSQRCACCGHTAKENRLSQSKFVCQACGYTANADVNGARNILAAGHAALACGGMVQSGRPLKQEPDAEQSVVTH

SEQ ID NO: 28869 - protein, 439 aa, unknown
  TnpB Polypeptide
MSISITHRIELKPNNKQKTYFRKAFGCARLAWNWGLAEWQRQYKEGGKPSAFSIKNQFNAIKGEQYPFVYEVTKYASQQPFINLEKAFKKFFKEHTGYPRFKRKKDNEGSFYIGGDQCKLSFLNTNSKAFKKMSYNEKMKHQYLKVPNLGCVRMTECVRFNGKINGVVISQEGGRFYASFSMGISENEYKRTHPHSIEEKHGAVGIDLGIKNAMVLSNGVTICNPKPLAKFQRTITRLSRQLDKRVHARTKQERLKGVAKSNNYRKMSVRLAKAHARVANIRRDYLHKVTTALTCTYSEVVMEDLNTRGMMKNHKLAKAVADVSFGKVKELLKYKAAYNDSKIVTADRFYASSQLCSTCGYQNEAVKNLSVRRWICPQCGAVHDRDHNATKNLLSLVDHNSVGTDYPEFTPADLTALLSTLMRCRIATSKVEPGRQQKL

SEQ ID NO: 28870 - protein, 388 aa, unknown
  TnpB Polypeptide
MLINKAYEFRIYPTKEQTALLAVHFGQARFVYNFFLRKRIDFYAANAGSEKQGLNYYDTSKMLTELKKQTDTAWLQESNAQVLQQSLRHLDAAYNNFFNKHAQFPSFKKKQARQSLTVPQAFKFDPIQGTLTIPKITPFKIIVHREVEGRIKRVTIKKTPSGKYFASLLCEVEKKVNLKNSGPQIGIDLGLKSFLVTSTGESVQPPKFLRASENKLKFFQRRLSRKMKGSVNRDKARRKVALIHEKISNQRSDFLHKLSHRLVSENQAIFAEDLNVKGMTANHRLAKSIMDAGWSGLIHQIEYKSKWNGVYFGQIDRFFPSSKRCHDCGWINDNLTLKDREWTCQGCGRIVDRDINAAQNILLFGAKQIGLERPESTLSEKRRIKALR

SEQ ID NO: 28871 - protein, 430 aa, Shigella sp.
  misc_feature (73)..(73): Xaa can be any naturally occurring amino acid
VEDVNIGFCQRLNSTPRNKRLRQLIPRTQNQSRPASIHLPLPEMPPPPRRAHAHAHYAAPDTNCRQWYSTAPXGNKYIPYGKMASWLVEWKNATETQWLKDAPSQPLQQSLKDLERAYKNFFQNRAAFPRFKKRGQNDVFRYPQGVKLDQENSRIFLPKLGWMRYRNSRQVTGVVKNVTVSQSCGKWYISIQTESEVSTPVHPSASMVGLDAGVAKLATLSDGTVFEPVNSFQKNQKKLARLQRQLSRKVKFSNNWQKQKRKIQRLHSCIANIRRDYLHKVTTTVSKNHAMIVIEDLKVSNMSKSAAGTVSLPGRNVRAKSGLNRSILDQGWYEMRRQLAYKQLWRGGQVLAVPPAYTSQRCACCGHTAKENRLSQSKFRCQVCGYTVNADVNGARNILAAGHAVLACGEMVQSGRPLKQEPTEMIQATA

SEQ ID NO: 28872 - protein, 405 aa, unknown
  TnpB Polypeptide
MRGKTTLARVVPRGEYMLTLKAQGKLVDGSLEELREELYITRRTTQYIIDALWELDKLPTLNQCHQMFYKLLRKQGFRAHQCKQMYKYALSIVKSAKKNNGKKPKLRKLSVRLDRYDAKVDLENQLVVVRLRNREFRIKLLHRRDYIRKFLRRKWYEAIISIDRQGRIWVSISFRWEYKPYSPRNIISLDINLKKIVVYNSKSTRRVYTRFTEALYLKHLAEDVQKRHSYAWRRNEKWLNIIRALHRKSRNVVIDWVRKFAKYIVLKARRTKSVIVLEDLEKLWFNASRKSSSLADRLSRFAYRKLQLAIISKAIEYNVPMIFVNPWSTSTTCPRCGSKLSYNHRLAMCRNCRFIADRDTVGAINIYLKAIKTIALRPGSWGTYPMTNETRLMGRHLKYEPMTII

SEQ ID NO: 28873 - protein, 531 aa, unknown
  TnpB Polypeptide
MAKSKKRKDSSFQTEQTKSVFLYGKPNKEKLHCLQKMEVSFVMLVNRNIRLIHERQDFFLQVVKNDKKNSALRTFEKSIRPKGYNSAFCQAAFDYAVTHLSNRLNDIRLDMYGDCQTIFTKSKVLFALSIMEHTQEQMLLQMESLQNSLKKKNAFYQECIDTLHAMTEDEFRYQMSVFQDTYASYSLEYQVPEVRHASIPLDSRLMKLEKSKQIEAPYVIHITNPFERGKRLTVPLNTSKHALHKIKSNRMAATVLFSIYKGNIRVGWSYQHKLTQPETIHTTGVDVGITDAFCTSDGRHIGSMKDVINFYHKEVEPSFAELSSLRNKKRKICYYLRHHTLPEDVRRSLIQKVNRLEQMIRTAEAPYRKKRHYYAMLDHEIRVAVKTYMGSLTQDTLTVLEKLDIKEFQKSRKANAEFSMFARGKLQKALMDALNWQGFDFVEVVPDYTSQVCPVCGGLDSENRDGKTFTCKCCGYQDDADHVGALNIQSRATDSEILELSEHYRYAKKTLQRKLKTLLMNRHQEYIQQHC

SEQ ID NO: 28874 - protein, 373 aa, unknown
  TnpB Polypeptide
VLKSYRYRLFPTKSQVRILERQLELCRQVYNDTLAYRKNAWEKEQRQVNRFGTQNRLPQLKVDHPEYKEVHSLTLQNVVLRVELAFKAFFRRVQAGENPGYPRFKGKGRYDSMTYPQSGFGLDSGKLHLSKIGDIKVKLHRPIEGKIKTCTIRRMPTGKWFACFSVDMGDVQLPPWKDGSVVGIDVGLESFATLSNGEKIANPRFFREEEKELARVQRKLSNAPKGTPERKKALKVVELVHERIADRRNDFANKISRQLVDRYGVIVFEDLDIKNMLKNHCLAKSISDVAWNMLVKSTESKAAYAGSKVVLVDPRNTSQMCSRCGLIVKKDLSERVHSCSECGLSMDRDLNAAVNILRLGMQSLRKSDRSPAR

SEQ ID NO: 28875 - protein, 402 aa, unknown
  TnpB Polypeptide
MIKNRNYKFRLYPNSDQEYRLQNNLAVCRWLYNKFVEQAQKSFLSRNDMNYILTELKQSEPWLYNYYSKMLQMVSTQLEGSEKALIELNKKGHKTGTIKFARYNEYRTFTYNQSGYKLEKHGDQDLLYLSKIGYVEIRKHREILDNAIIKQIVITKSKSGKWHACITCDIVESLFNIPKISFTKSVGIDVGIKSFVYDSDGCQTPNPLNLKKMLKPLARIQRKISRRKKGSNNRLKAILHLQRIHERIANRRKDFQHKLSTIYAQNNDVVFVEKLEKLNMVKNHKLARSIMDSSWGTFLQKLEYKCKLLVEVPSRNTTIDCSRCGNKVPKSLAMRIHRCDKCNLVLDRDHNASINILKKGLKIFNLSAKADYHRLPQELREVTPVEISMRSMKQEEATGLVR

SEQ ID NO: 28876 - protein, 344 aa, Gammaproteobacteria sp.
VKSLSGLLNQQGRAVNYVWNYCNDTQKHALKWNKRWPSGFDLNVLTTGCAKELGLHSGTVNAVCEQYAKSRSQHRRPYLRYRGKKSLAWVPLKGRDLKREGEAFRFAGRTFRVFYSRPLPDGKIKDGTNFSRDRRGHWFLNVVVELADTPVRPLKRSVGIDLGLKEFATLSTGEKIENPCRYRGLEKRLGKAQRARKRRLAASIQAKIAQCRGDFLHKLSHRIVREFDYIAVGNVNAAGLARTRMAKSVLDASWSSFRAMLAYKAVKHGARYEEVDERFSSQVCSSCGSLPNSRPNGIADLGIRQWICSDCGYVHDRDVNSALNILARSGHRTPVEGITGLQAA

SEQ ID NO: 28877 - protein, 444 aa, Halomonas sp.
MPSKMIRTDKWPLQATLQQRELMQDARDEYRAFCRAPSVVVLNNWATLQQAPSFSAAVERLIHPTKKNPSPRHHYFAQRFYKFPSYLRRAAIEFVKGQVSSYLTRYREWQSGCRSRRDAKPPRFNAVAGCYPVMYRGQLVKFDADFTTASLKLWDGKEWLWHNVAIKAVRQRHLLGIVKSPALVFNRHCHLAVPVEITPERLSDQQRVCAVDVGINTLATASIVSSNGTVAARRFFHPAADMDRRDKRAAMIRGKARKTGKLSKGFGRTWYRKVQRINENMAQQTSRQLVDYALAEGADVIVLEDLKGWRPKAGKQRSGLRQRFHQWLHRRLATLIEHKMEEAGGKVVYVYARGTSSWAFDGSGRVKRHAKQYELATFASGKQYNADLGASYNMGARYWAWKHKLTRRKDGQESGGKRSPGSPRMPVTLSTLWRSDEAPNQCAA

SEQ ID NO: 28878 - protein, 526 aa, unknown
  TnpB Polypeptide
MGVRVAKNQTYRAFVARPNHVLSLDGELLDDTPVLSSLVSEVRDVSSYATYIVRNDEALGGELARVTATAPAEAGRQAGVTMPDFLVSGRTGRSRKERLVQYNVVASYRSYQERVNAASGESSKYVSQGWKRTVDASAPSYGEDYVNLGAVDRQYAAIENDPFADGEIVLRMVIQGQWHRLIFDFDNKRFREGKVTLPVIKVEYGQPVFVFTVMTDNPVVQFSGDYTIGVDVGINNYVTVVVRNTKTGRIVHETTLSQRVHSLWNSVRASEVQVRALRRKAATLLHDRQERMSALDEAQLHREAASRKKRELAILAAQEIANLSHTWGNAVVAVEDLSWIRNTMQNGRWNRGVLVQWLTHYVSQNGGWVVAVNPAQTSQKCHSCGQQVTHPTHEVSVCAEHGAMDRDVNAAANIAARGVPRVIKARATRAKNRKLGPQVPLKTPPTRASLRYPGRDRTKSTPTPKRKNLCRASREVILPVCPARAQAYGLEARVLADQCARSALGTNTAALKQGNTTYKSRLCCLI

SEQ ID NO: 28879 - protein, 380 aa, Richelia sp.
MAAQSAQQTLKEVQETISSFNKLVNLFFNGEVGKPKLPRYRKSGGLNTVTFPLQALTYKNGCVYPSISKLSKSDVIGEIKLEIPDFVDFNLVKEVRIRPLRGEFWIDWICDDGKTELESNPKLDYSHYLAIDHGVKNWVSAVTTKGRSFVVDANPLKKVLDNYRDRTASIKKYKPDRYWDEQLDKLTAKRNLVVRDSVNKMARFIINRCLKDGIGNLVFGWNEGNKQRINNGTKNNYNTVSMPTKRLIERLQELCKEYGIKFHVTSEEYTSKASFIDRDCLPQYGVKPKDWKPSGKRTTRDLYRSKEGKVINADLNAAGNILRKVIHKSEILPKIWIKRYLSKIDGALTNPAKYDVFRNLKKCFTTLLCSTSLDCGTTSA

SEQ ID NO: 28880 - protein, 447 aa, unknown
  TnpB Polypeptide
MKQLNEGDYELFWDDSCERIGSHLLSHIQIDSAALETISSHAVENSWFITERKFHQNNNPNLQSYTSSLVECEDLEDTQIKSRKIRIYPTQQQKILFKQWFGVARKFYNETLTIYKNGSDKVWHKVYQDIAEQNKEHDYIKAVPCQIKNRAVYDYRKALSINKMKAKRSGKPFEMKFKSKKNPKQSCYIPKAAIKSSGIYHTIAGKLKMTERSWFENEDIKACRLTLEFGKWFIVIPKEIKITPIENQEGVVAIDPGVRTFATYFSTEGYFGKLGQGAFDRILKLNLKIDKLISKLSKETNKNKKSNLKRSIFNIRFKIKNLIDELHWKIIKFFTSRFKVIIFPPFNVSEMVKKSKRKLPKKVVRSMNCFRFYEFKERLKLKCKENGVTFVESSEAFTSKTNSFTGELIENLGSKEKFMFNNISIDRDINGARNILIRAMRDASAYC

SEQ ID NO: 28881 - protein, 490 aa, unknown
  TnpB Polypeptide
MRESTTPSFCLTLKLLPNKDDKAELKKRFRVGAHLYNICVKEALKRLNKLLKDIEFQTLIKKTKKTDDDKKKLEALREKYDLVGRYSLESYLNRGRQKFEKHIDSDTCAKIAQTVWCSVEAFLFKNGEHVHFKRFNCFTSMECKTNKSGILFRNGSVKWKELSIPVRVKNKDFYAKQCIQNNRVKYCRIKRRWHKHEWRYYVDLVMEGLPPMKERKIGKGRVGIDIGTSTIAVVSEANMVFKELNDGIESIDAEIRRLNRQLDRQRRANNPNDYNPNGTIKRDTKTFHKVWKKSKRQRLTENKIREHYAKRSAKLSQFQDDLANKIVAMGDEIIIETMNFHALQKRAKKTEKSKKTGRNKRKKRFGKSISIHSPFSLIQKIKTRLAYHKGNLVEVDTYKMKASQANHITGEYMSSDLKNRWKELVPGTFVQRDLYSAFLLFNAKNKEEIDFELCEQTFDNFFDGHNRLIDELRKQKKEGKCFLLAWVFNL

SEQ ID NO: 28882 - protein, 288 aa, unknown
  TnpB Polypeptide
LLARARGHEPVRVDLPGSICGKKFVEARLVYNRKKSHYEWHFVVDDGIEPKMKVEGSIVAVDLGEIHPATITDGRTALVIAARELRSTGQGLAKKIASLDSRMAKCKRGSRMYRKLSKAKSKARRNTSAKQKDMLHKVSRAVVEYGVSANAKEISIGDVRDVGDEVNLGKRTNQKISLWPHGKLVDYIKYKSLMLGITISITNEAYTTQTCPCCGEKKKPSGRTYTCKNCGVVGHRDVVGACNILSRRLYGELSRVKVSTTKYRHPYKTGKRRHADAMQIARANEKPR

SEQ ID NO: 28883 - protein, 523 aa, Streptomyces sp.
VLELVGRHLGRHQRADLARRVEIGKVPVKDNQRAERKRELTKVSSSRMAGAMTRASEDQYQLSLRCLYDEASSLRRAIRTITKRLAAPCGGHKGKVHGYRDQDERFGKQRRLQVLTARLAIIEQKIAAGRPSIVVGGRRMAKARHNLKDAQLTEQQWRERWDAARLFLTADGESGAPFGNYTICVDPNDGSVTIVLPEPLRYLANMPRGRHKLACTVTFTHRRQEWLDRVTTNRAVRYDITYLPQNGRWYLDASWSGDKAVLPSPEEIRAFGERLVGVDLNADHVAAYVLDPHGNPVGEPVTIPLDLTGPASQRDGQLREAISRLLDLAREHQCAGIAVENLGFTDARSTGRETMGRGRRGKSFRRTVAGIPTARFRERLRGMAFHAGMVVIAVDPAYTSIWGERYWKAPLQQQNSKTTVTRHHGAAVAIGRRGLGYRVRRRPGVTPAHQRMSAGRATGQAVFVPRPRGTASPPRTASAPERGGKTRLCRGDQLALFPDPEDRSWGQPANRVCIVSASTGQQR

SEQ ID NO: 28884 - protein, 397 aa, unknown
  TnpB Polypeptide
MISYKFGLYPNQEQEKRLLEVLDRCRFVYNQMLEGLNKQEGKPNRLELQNSIPELKEKHPELEEVYSKVLQYESYRLFSNLRGLARLKKNGKKVGKLRFKSKGWFKTFTYNQSGFKIIETGKRHDLLHLSKIGDIKIRMHRTVEGKKIKQVTIKRYCSGKWYALICCEQTIPVKKGVEKKVVGIDMGIIHYVTDICGRQIENPLYLNKYFKNLRKIQRKLSKKKKGSNNYQKQKIRVAKMYERIKNQRDDFLHKLSRFYVQNYDFIAVEKLNVNGLIRISYNARNMMDSSWKRFTQFLSYKAERAGKTVLEADPGGTSQECYKCGKEVKKSLAVRTHKCPYCGLEIGRDYNSAFVVLKRGLEEVLGQGLSEFTPGETEPLPREISASSVVEPGNSPR

SEQ ID NO: 28885 - protein, 362 aa, Nonomuraea sp.
VRLVVRVKLLPTPVQAAALEATLRVSNRAANLVAKIAFEHRCFRHYDLRKLTYDQIKTAFGLAAQAAQHVIKKVSDAYRTLHANLAQPYDDRCLSWQHQERTVSIWTTGGRLKGVAFTGSAPHLALLAGHRRGKSDLAYREGMWFLHTTVEVADVPITRPDGFLGIDLGIVNIATTSTGIRHSGKHLNAARRRHRELRRRRKESRFAANVNHTIAKQIVTEAERTGRGIALEALGGIRERVRLRKPQRVTLHTWSFHQLGSFISYKAARSGVAVIHVDPAHTSQQCSRCGHVDRRNRPDQATFRCTSCGFAEHADVNAARNIASRGVAGWAVSHRCLTRPEPSRPSTTRSRKLGLLRAEKLT

SEQ ID NO: 28886 - protein, 403 aa, Phormidium sp.
MLKATKVRIYPTAEQVSQLSKDFGATRWLWNQSLSLMSQTYKETGKGVSAYDMKKRIPALKQEFEWLKETYSQCLQQAVLHLSQAFINFFEGRAKYPTFKSKFARQSVQYPQNVKMLDGVAIKFPGNLGTVRAKLHRALPTGAIKTVTVSKTPDERYYASLLIDDGKAMPESSSDGKAVGLDLGLIDFVVTSDGSKFHNPKHLQKHAKNLKRKQQKLSRKQKGSKTRCKARRLVAKVHSKIARVREDFLHKLSRKLVNENQVVVVENLAVKNMVKNHTLAKAISDAGWGKFCTMLKYKAEFDGKTYLEIDRFFPSSHLCSNTLLSLPKLALSVRSFLCPHCGQRHDRDVNAAINIKNEGLRLLALGISATANRGSVNPKGAGRKKAMHSEVASVEVGSPRSIA

SEQ ID NO: 28887 - protein, 157 aa, Paraburkholderia sp.
LSGREKPARLPVAIHARIANRRKDFLHQLSTRLVRGYGAIFVGNVNAQTLARAQHGKSVLDAGWSFFRTMLQYKCDDAGVWFDEVDEAFSSQTCSCCGSRTGPKGVAGLGIREWTCVACDRTHDRDRNAARNILAVGRDRLAGGIPALSAHCAAAVD

SEQ ID NO: 28888 - protein, 392 aa, unknown
  TnpB Polypeptide
MLKGFKTELRIAEKHINKIHQSIGICRFLYNSYLAKNQELYNLYKEGKIDKTQYFMSANDFDKYINNEVKIIDEFKWINNCGSKARKKAIVNAEMAYKRFFKGQSKFPRFKKKKNQDVKIYFPKNNTTDWTVERHKIKIPTLGFVQIKEKGYIPTNVKVVSGTVSMKSGRYYVSVLCDVIDNNNYSNVSNEGIGIDLGIKDLAIVSNIDEPFKNINKTDDVRKLKKKLKRLQRQASRKYEMNKDGKKFIKTKNILKLEDQIRTIHQKLSNIRLNYAHQITHTLVKSKPEYIAIEDLNVRGMMKNRHLSKAIAEQSFHEFRRQLTYKCLWNNVELRVVDRWFPSSKTCSECGAIDKDLKLSDREYICKECGIILDRDKNASINLKNAKIFKVV

SEQ ID NO: 28889 - protein, 499 aa, Gammaproteobacteria sp.
MPTTQFPLCKFTQLEVVYQFDFAPPDPTSTLAHHIRACISIQSQSPICGIMRSMQVHRATTFVACPDAAQNLRLFRLAGACRFIWNTLLAQNRFLHAGWRISANEKPSTAYEALTKELTQLRRKNDWLSQMPVAVLRSACKRLSLAWAAKLKRDAGFPKMKARHRATPGFDIVDNVRVESGRLWLGREAGWLRLNRRGENLYANWMPVKATLTHQRHSGAWQVTVTYRGEVALSPDDGTAVAVDRNVGQAVTSERLLYRLPDERLDRLTRKQKRWQSRAARQKGARKGEKCSNSRRRTLRRISQISRRKANIRRNWAHHVTADLAAHHHAVVMEDLNTRGMTRSVKGTKEKPGRRVKAKQGLNREILASAWGELERMAGYKSGRLVLVPAHHTSQTCRNCGFVAKESRKGRRYRCVSCGMEAHADLNAAMNILGRAVKLGLVNPPPTSLGGVRRVEPDTARDALFGRGRIVRLAAPRGGKRIRGGPEPPEPSSVSDAVA

SEQ ID NO: 28890 - protein, 459 aa, Streptosporangium sp.
VKTVQAYRFALDLTPGQERNVLAHAGAARLAHNWALARVKAVMDQRAAERTYGVTDERLTPAFSWSLPTLRKMWNAAKAQVAPWWAECSKEAFNTGLDALARALKNWVDFRTGKRKGRPVGFPRFKSRRRVTPSVRFTTGAIRVEPDRMHVVLPRLGRLKLHESARKLARRLDNGTARTMSATVRRDGGRWYVSFTVEVDRAERVPARPGSVVGVDVGIRHLAVLSTGERVDNPRHLTAAQTRLRQLGRSLSRKIGPDRRIGQRPSKRWERAAARLGRAHARVAALRRDGLHKLTTRLTREHGTIVVEDLNVPGMLANRRLARHIADAGFAEIRRQLAYKTSWNGGRLLVAERWYPSSKTCSGCGAVKAKLALSEREYHCEVCGLVMDRDRNAAANLAALAAEFDTAGSGPVAARGADRKTRLGGQVAVKREPGTTPVGQTGTVPPQVGTTDHVLAKAH

SEQ ID NO: 28891 - protein, 249 aa, Anaerolineales sp.
LILFRDQCYLPATCDVAESEPIQSEGVLGVDLGVVNLAVDSDGTMYSGKPINNVRFRHRRLRAKLQKKASRSAKRLLKKLSGKEARFAKNVNHTISKQVITLRVAQGTRRAIALENLSGIRQRVTVRRDQRAGLHTRSGSFFQLRAFLQYKAQLAGVTVIPIDPRNTSRTCPQCGCVDKRNRPSQSQFSCVPCGYSGFADHIAARNIASRAAVNPPNVAHAEAKAVAVFVAPTELRSSAVTSHPLQAGV

SEQ ID NO: 28892 - protein, 239 aa, unknown
  TnpB Polypeptide
VKYQLEFVKIRQSMEVGKIHNVTIEHTPTGKYFAVLNVEFEPQPRPNNGGCIGIDVGIKEFYSDSNGNVVLNPRYLEKSMHKLIREQRKLSRKEKGSNNHNKERIRVAKIYEKVTNQRNDFLQKQSTMLVRENQTICIEDLKVKGMIQNHKLARSIASVSWAKFFAMLEYKAGWYGNEVHRVPTMYPSSQTCSCCGYKNPLVKNLAVRIWECPDCHTIHNRDTNASINILKKGLQMQSA

SEQ ID NO: 28893 - protein, 463 aa, unknown
  TnpB Polypeptide
VYRTVPVKSTFYDEENAFWVFQCEQANNLTNCAIYYAKKKHYDWLREQVEAYTTYWRSDTLRFGWKTYKCAVRYPEIDKALNMSPHYKAMAAQSAQQTLKSVGESLKSYNQLVGKYYKGEVDRPRLPRYRKKGGLAAVTFPRQALTYKQGLFWPSISKESKPELLCDITLSPPDFIDPDWVKEVTIRPYLGQLWIDWVIDDGKQPIDTNPNLDYSQAWSFDHGGDNWLTGVSTHGKSLILDGRKLKSMNQGYARLVAKYKAGKPEFYWDANLDKVQRKRNNQMRDAVNKAARFIVNRCLSERIGNIVIGWNERQKNSINIGRRGNQNFVVIPTKRLIERLKQMCPEYGIKLTVTEESYTSKASYLDEDPLPKHGEKPSGWQPSGKRVRRGLYRTKKGYLVNADSNGAANIARKVAKQLDLDLTKMGRGALTLPHRYDIFKSLKKSYRISSETARENRCGVTIL

SEQ ID NO: 28894 - protein, 407 aa, Tolypothrix sp.
MQLVEKHVINRQHKFWKKCDYLALQSKHLYNAANYIQRQYFFETKKYYNSIDIYHQTKNLEAYRYVPTKVSKQIVRKVSEAWSCWLAALKDWSKYPEKYLGKPKMPGYKHKERGRNIVVYPRDAISKPALKKRIIKLSQTDIEFPTQANNVDQVRIVPKLNHYVIEVVYTVEDTAKSDGKYIAGVDLGLNNLMAITSNQSGVKPLLVNGRPLKSLNQFFNKRVAASQSIEAWRQVKELNSKRDRRIDNYLHTVSRRVIDWCQLNGIGQLIIGNNQGWKQDINIGKKNNQEFTKIPHAKLISMLTYKAQLVGIEVTITEESYTSKASALDSDELPKYGDKKEHKPVFSGKRVKRGLYKTDTGRTINADTNGSLNIARKVIPNFMDGIVGLPFIPVVLGLWTKITNVIV

SEQ ID NO: 28895 - protein, 403 aa, Tolypothrix sp.
MLVFEAKLEGLNEQYRKLDEAIRTARFVRNSCLRYWIENRGIGRYDLSKFCAVLAANTEFPWVSKLNSMARQASAERAWSAIAQFFDNCKKSKPGKKGFPKFKKEQTHGSVEYKTCGWRLSEDRRYITFSDGFKAGTFKLWGTRDLHFYQLKQFKRVRVVRRADGYYAQFCIAQERIEKREPTGKTIGIDVGLNHFYTDSNGETVANPRHLRKSEKSLKRLQRRLSKSKKGSNNRVKFRNKLARKHLKVSRQRKDFAVKTAKCVVKSNDLVAYEDLMVRNMVKNHAIAKSISDASWSLFREWVEYFGKVFGVVTVAVPPHFTSQNCSNCREVVKKSLSTRTHVCPRCGLTLDRDWNAARNILEIGLRTVGHTGTLIASGDIDLCMGGEIPPSKSGRGKRKPKE

SEQ ID NO: 28896 - protein, 580 aa, Kitasatospora sp.
MKTRSPSFSLAARARATRSGSEAAGRSPGHSTPRSLFGSASRPSSSRASGEGVGSTPCVSVVVVTGGCPPGAAGSFSTSLLVYLTLSMITGCRQPDDGRPVDVTRASSTHVPTVDPRVGALPQTCPARERGGPPPAVRHNVRACNFGTTSGCIRPQVSGWRWRARSGAHAWCSTTVCGPGRRPVRQGCPTSGTRDLQKRVITMAKRSPERAWLSEVSSVVLVQSLRDLHTAFRNFFASAAGGRKGPKVEPPRFKSKRDGRQSIRLTANGFRLRESGRLYVAKVGDLEVRWSRRLPAPPTSVTVTKDAVGRYWASFVVEALPEILPETGVEVGIDLGLTHFAVLSDGRKLDSPRFLRRAEKKLKRLQKELGRCEERSKNRAKARRRVARQHAKVADRRRDWHHQESTRIIRDSQAVYVEDLAVSALGRGWLAASVHDAGWSRFVAMLEYKAAKHGRHFARIGRFEPTSQVCSACGVKDGPKPLEVRRWTCGACGVVHDRDVNAARNILAAGRADRQNACGARVGPVSVPAPRREAGTPLSRSADRDRNPGPSGPGGRQENRSPGWMLPAREPAVPPVGWGA

SEQ ID NO: 28897 - protein, 440 aa, Dictyobacter sp.
MKTMLTAKIKLNTTPEQFAALRATQLAYRDALNAVSQYAFAHGKMSNAVRLQDGTYDEIRARFHLPSQMACSVPRQVGATYKALWTKVKQNAAARKAGHTKKRYKGLDQPPKFVSPTLTYQNRKDYTFKKDQHVSILTLAGRVIVAYTGYATHVAFIQRGAEIGAAKLWYDKQKKTFYLLVSLEIKTADPTPDTHTGIAGVDVGVRYLAVTSDMKGACTFYSGKQMVPKANHYARLRKRLQKKGTRSATRRLVAMSGRERRLKLDTNHRVSKRIVTAHPHSLIGLENLADIREQTRRRKGKKASKKQRKANHAYSKWSFAELQSMIAYKALSHGSMAIKVDAHYTSQACPMCGHTTPDNRPKQGLLFVCQNCTYTLHADLVGARNVTMRTLLARQDWTSTGLLSLTPDGSSDEVKAARLQKYAELRWSLDPSPVSLGRGI

SEQ ID NO: 28898 - protein, 498 aa, Dictyobacter sp.
MAKATTTIKQVLNYQPAHVAWFAVNQVLFNQVAAFYFDVIQAHINVLDHSSKEALTILEQLTHTTKSNPTPVMPLSDMAEDVPAYFRRAAIHAALGCAHAFYAHLEKWRQRKEKARTQGKKFYERPPVPPRSWNKAVTLYQGMWKERTSSSLMIKVWTGTCWSWIKVRITGRALPAGRELGSPQLVQKGKQWWLHTPVEKLFQSPGNIEKQVTTNPGTKICAVDLNINEHIAVCTIQTVEGTILATKFIGGGNEISGFRKCQLGRIARNRSQTGIIAEGEQDNVDLWKKIRQVDEQAAHLISARIVQFARQHEATIVVFEHLGNLRPARGKYSRRGNTKRAYWMKGRIFTYAKYKAYTMGMVTSRVSPRNTSRECACCRSLIARYDTGKPAEGYTPGAPLAFCFQCGMKGNADRNASLVIGQRLRARYHPKEKPQALRRVSKDTGVALSQDAKCEEGPSILLAGHGESNEHGTAQDGVFRMDEHASDIPHQLRFPFEL

SEQ ID NO: 28899 - protein, 427 aa, Dictyobacter sp.
MQLVEKHVIKKTDPRFAALDRAAFASKNLYNAALYEIRQHFIFTGKYVNYNAIDKIMQKHEAYRALPTKVPQQVLKLLDKNWTSFFAALRAYKDDPSRFLGRPKLPGYKDKQAGRNVLVYTIQALSQPALRQGIIKPSQLGIEVRTRQRNVDQVRIVPTRSGCYVVEVVYTQVEEQKALDPSLVAAVDIGVNNLVALTSNKPGFVPRLVNGRSIKSVNQRYNKQAANMRRKMSHNHHTSQTLERVSAKRTRRIDHCMHTVSRCIIDVLVIEQIATLVIGKNPGWKQESTMSKKNNQHFVQLPHARFIDMLTYKATLVGIAVMVQEESYTSKASFLDLDTIPVYGKTGEEKPVFSGKRIARGLYKAKSGRAFNADVNGSYNILRKALPDAFSNGIKDVNKTLVVLPASLVVHPVRIVIPSKLKMSRKR

SEQ ID NO: 28900 - protein, 414 aa, Mycobacterium sp.
  misc_feature (312)..(401): Xaa can be any naturally occurring amino acid
MPKFEVPDGWTVQAFRFTLDPTEDQAKALARHFGARRKAYNWTVATLKADIQAWHASGTVTAKPSLRVLRKRWNTVKDDVCVNTETGVAWWPECSKEAYADGIAGAVEAYWNWQTSRAGKRAGKRVGFPRFKRKGRDQDRVSFTTGAMRVEPDRRHLTLPVIGTVRTHENTRRIERLIKAGRARVLAISVRRNGTRLDASVRVLVQRPQQPKVVHPGSRVGVDVGVRRLATVATADGTAIEQVENPRPLGAALRELRHVCRARSRCTKGSRRYRERTTQISRLHRRVNDVRTHHLHVLTTRLAQTHGRIVVXXXXXXXXXXXXXXXXXXXXXXXXXXXXXXXXXXXXXXXXXXXXXXXXXXXXXXXXXXXXXXXXXXXXXXXXXXXXXXXXXXXXXXXXXXRPSWGRRQAWSRP

SEQ ID NO: 28901 - protein, 400 aa, Lactococcus sp.
MQKLKAFKLRLYPNASQREQIDTTINHSRYVWNEMLEMQKARYKNNKKAKFINAFGMDKILMVLKQEYKWLNEADSTALQETNHQLADAYKRFFKKLGGQPQFKSRKFARKSYTTKMGMSLIDDKHIKLAKLGAVYFKAKAIPNGKIKRVIVRISPTGKYYAMVLAETEIKPYDTTGKSVGVDLGLADLAIQSDEYKLPNIRFDKQLAKKKLYWEVRLARRRNRAIQVIHNTQKLTGQELTLDDFRNYARAKHMVAKYSEKIANQRLDYLHKYTTQLVKDYDMIAIEKLKSSNMMKNHKLARAIANASWYKLSEMLAYKTEWYGKTLIKIDPSYTTQVDYETQTVIKHDLSVRNYTNSFGHLIDRDINAAKNILEWALNPEKHTAILEQISRNKTRVTKA

SEQ ID NO: 28902 - protein, 445 aa, Acidimicrobiaceae sp.
  misc_feature (59)..(59): Xaa can be any naturally occurring amino acid
  misc_feature (419)..(419): Xaa can be any naturally occurring amino acid
VASGLSITTPSVIEGARVWSSTTSVSPHDMSHVASMVRVWLLHQRQHQARTADSCSRAXVTFQFALDPNLEQRVLLAKCAGARRYTVNHHLARVKANLEARSSERDDLTDEGTPRQPSTPSLSWTAFSFINEFNAWKNGQSDDSLVNEDGTRGLAWRHELPGDVFECASVDAARALENFSASRRGERSGTPAGFPRFQAKGKVAPRFRLRNRATPGRAPSSQPIRFSDPSHLRLPKFGPLKLFGPTRKVRRMIDAGRFHVYSATLTQRAGRWTVSLTGVAAELHQAERSRTKRHAIPVGVDRGIISLCVAADANGVSIESFEGVTTLKQAHASLNAANQALARTTPGSKGRQRAKSRLAKRHRKVANTRRHLVHQASKALVERCQVLVIEDLNVAGMVRNRRLAKSVSDAAMGELSRQXLSELQDVFRLRRGQKGPRPVDADLLM

SEQ ID NO: 28903 - protein, 392 aa, unknown
  TnpB Polypeptide
MSKKHQRAYKYRWYPTNEQKRILDRTFGCCRFVYNWALRERTDAFFKRGERLYYEGLAQQLTELKKQDTYAWLNDVASVALQQSLRHLDKGCKNFFEGRAEYPTFKKKGNQQSATYVGTAFTLKGTSLIPARMSTPLDIHWSRPLPGGCTPSSITITKDEAKRYFVSILVEEDIKPLPVVKKMIGLDLGLKSMVITSDGHTYGNPKFFAQDEKKLARLQRKQAKKKKGAKNRDKARLKVARCHKKIADRRRDYQHKLSTHIIRENQVVCVESLQVKNRVKNHKLAKAIQDVGWSELVRQLEYKANWYGRTLVKIDKFYPSSKRCNDCGHILDTLTLDIRSWTCPECGVFHDRDINAAKNVLAAGLVVSACGDRVRPRAAKANRGNGQRSRKA

SEQ ID NO: 28904 - protein, 561 aa, Firmicutes sp.
VSKRKLVITITGEFFPETFPAFRSPRWSRGEEDPLATEMRLFCACERWAYQRLAEGMGRDDIKKAGQVLFGLNSRYADDACLRAQTLRESQRERLNQDIQETTKKLHRARRRLGWSMRKLVAAQARGAVRAVLAEMELAVKGRQARVAAIERELQVLQEHRRQKTLPKVVFGGRWLWRRVCKGRASREEWHAARKGHLYARGDESKGGNPNMKLWWDGEGFRLAVTLSHLSVQKGVDRLGRPVMSQAPRAEGRVWLPEKHREEVRVWLSLGLPYSVLLKRDVGGRYRVHVTLDYGVVPEARWRSGYLAVDTNPDGVALCHVGPGGQPERWPEGFEIPVPAGLDKYEGEFQVRVDPAGFAYIHLPDLADASGDRRTYLLGVLAKAVVAAARAVGKPLALEDLDLGKDRLGTNRRFNRMASNFPYGKMGQALWRRAAKERVPCRLVPPAHTSTIGHWKYQRQYGVTVHEAAALVIGRRAMGLREQIPRALQRRLAELRRQLAQTGHPHVPKEGNGMTRRARAILRRLGKRRIRLYNGLSRSRRTGEVSGGTSRGWPWRFGDPV

SEQ ID NO: 28905 - protein, 409 aa, Actinomadura sp.
LLNRRHHLDEAGLTVEEWRERWEAGRSFLAADGESGKRLGNETIRLTPEGEVSIRLPSPLAELANAPHGRYVLTARATFAHRGTEWADRVEADRAVAYRIHHDVDRGRWYLTASWQRRPVPPLPLEAARARGIIGVDTNADHFAAWHLDASGNPVADPKRFDYDLTGSASHRDAQVRHAITRLLHWAASRDVAAIAIEDLNFDTDKTREKHGRRKKFRQLISGFPTGRLKARLTSMAAEHGLAIVAVDPAYTSRWGAQHWREPMCTPAREVSRHDAASIAVGRRALGHPIRRRTAPPPHDRSDRAGHRTVQAEPDTPGREEPRRPGPERAHDARPRTRTHRTRATSASSTVRDARSARRWVQDPLLDTVQERFRSVAGNQSQRGGSIPMSWFAAIRRSSLISSRRMSAR

SEQ ID NO: 28906 - protein, 498 aa, Halophilic sp.
MYYAYKYRLKPSDAHREELDCHRDICRQLYNHTLYRLNEYRDEHGELPSMTILRSELPDLKKWWDALSDVYSKVLQTVVERLFDNLKGLSKLKENGYGVGQLKWKRPREFRSFTYSQSGFKLDKKGGQTVLSLSKLADIPIRLHRAIPDDATLKQVTVKKESTGEWFATFAVEMDYEPPEPPETPDKCVGIDVGILRYAHDTDGTAVGSLDLSAERERLECEQRKLSRKQHGSNNYEKQRRRVAECHADLRRKRRDFLHKLSNYYAREYDLVTVEDLNVKGMLESPSNSRNTASAAWRTFLSLLEYKCEREGTHFVAVNPSGTTKECASCGVKTDKPLWVREHSCPACGFEADRDVNAVARLRLAGSQKSEISGNGVEHPFSRYQAVRSGTLRRNACGDCAPCGYACICKARRGSRKPHPQGANRVSGERVGWGSSLPSATDARRRHLAPSVRRPGGAGGKWTARCPSSLRVRRRRRPGASRKSRCSTRSAVLSVVGR

SEQ ID NO: 28907 - protein, 367 aa, unknown
  TnpB Polypeptide
METTYCYRIYPNKKQIELIQKTFGCCRFVYNYFLNRRINAYQENNETIGYYQCCKELTILKQEYEWLKEPDKCALQNSLKFLDWAYQNYWKLHYGFPKFKSKKNNYKSYRTQFMNTTTGGNIKVLHKYIQLPKLGYVKTLDKRLPKGRILNATISQERSGHYYVVICCTDVNFEQLPKTHKNIGIDLGIINFATLSNGIKIDNPRFYEKSEKRVIKLQKELSRKTIGSSNYNKARIKVAKLYQHITSQRKDFLHKLTHELVTNYDTICIEDLDVSEMKESHSKAKNKHVGDVSFYEFRRQLEYKCDWYGKELRIIDRYYPSSQICHKCGNRDGKKSLDIRKWTCPNCNMELDRDINAAINILNAGLI

SEQ ID NO: 28908 - protein, 527 aa, Gemmatimonadales sp.
VTTAHRPTVSCECSGSSSCESCGWIRLSGCSPVPNIVAVAHSPNHTIRMQRLQAFKYELMPTGGQQRDMRRFAGSCRYVFNKALALQKERYEQGEKKLGYAGLCKLLTGWRNGPQTPWLKDAPTHPLQQALKDLERAYTSFFARRADFPRFKKKGQGDSFRYPDPKQIKLDQAGCRIFLPKLGWLRYRNSRDVLGAIRQITVSGSGGKWFISIQTEREVAQPIPNGGTVGVDMGIARFATLSDGSYLEPLNSFKRHEARLRKAQQAMSRKTRFSNNWKKAKARVQRIHSRIGNARRDYLHKATTTISQNHAMVCIEDLQVRNMSRSAAGTADAPGRNVRAKSGLNKSILDQGWFEFRRQLDYKLAWNGGHLITVPPQNTSKTCPCCGHVSKDNRQTQARFECVECGFEENADLVGAINILRAGHARCACEVSGAVRSPAAGAHRSDSSRLDAGLGAVGIPRLQAGEDVNVGSGISPDLLTPACGQPSAGRSRARREKPRHTAGGEFHPALRTAPTARPAHRDSSMGR

SEQ ID NO: 28909 - protein, 399 aa, Gemmatimonadales sp.
MQRLQAFKYELMPTGGQQRDMRRFAGSCRYVFNKALALQKERYEQGEKKLGYAGLCKLLTGWRNGPQTPWLKDAPTHPLQQALKDLERAYTSFFARRADFPRFKKKGQGDSFRYPDPKQIKLDQAGCRIFLPKLGWLRYRNSRDVLGAIRQITVSGSGGKWFISIQTEREVAQPIPNGGTVGVDMGIARFATLSDGSYLEPLNSFKRHEARLRKAQQAMSRKTRFSNNWKKAKARVQRIHSRIGNARRDYLHKATTTISQNHAMVCIEDLQVRNMSRSAAGTADAPGRNVRAKSGLNKSILDQGWFEFRRQLDYKLAWNGGHLITVPPQNTSKTCPCCGHVSKDNRQTQARFECVECGFEENADLVGAINILRAGHARCACEVSGAVRSPAAGAHRSDS

SEQ ID NO: 28910 - protein, 326 aa, Oscillochloris sp.
MGDQDFSPVRRSQTCYANVRETFDVAAQMAVRCISKVADAYKLDTKRLRIFAPLGAIAYDARILSFNRTKQEISIWTLDERQSIPFVCGDRQRALLHAQRGETDLALVNGEWYLFAVCEVETPEPIDVEGVLGIDMGVTNIAVDSDGEIHPGTAIKNIRYRHRSLRNKLQRKRTHGSRRRLRKLAGQEYRFATWVNHNLSKRIVAKAEGTKRAIAVEDLTHIRTRVTARRSQRATLHSWAFAQLRDFITYKAQLRGVPVHAIDPRNTSRTCPSCSCTDKRNRTTQASFVCISCGFAGPADVIAAGNIASRARVSAPYYPDADSSAD

SEQ ID NO: 28911 - protein, 588 aa, unknown
  TnpB Polypeptide
MNTLILKKQKISYKLPLKLLGFGIKKVKYVLLELYPDREDIISRIYKTLVVGILLTRRKKKYVTVEFLPQSKWMTLVDKQIFLNINSLITSWLQMSVQGLIGKEKVLKPFWSKQCTETSQKLWLPIKTDCVDSHLNFWNGSSIKTELNSWFSMKKMENHVIKNSQTIFSPLFTSIPVEKWEEDVIRTMKIRLYPTPEQKKIMKNWMNTRRYVYNKVLGQIKKGNEKINFFDLRNKYVTSKDNPNVENWETETPKDIRAGAVNDVIKNYKTSFSLLKNRQISGFNMSFQSKKKKEPSIEIPLSSIKATKVVVERTQKEIDSAKLKISDDKNVSKTKVKITKKDGGIFIYKELMKTKIKISKRQLHNDIIIDSDCRLQLSNNKWFLLAPIKTKEDKVDQKDEYCALDPGVRSFQTIYSEKSVEQIKINKETIKNYQVKLDHFKSLRDKKLIRKSSFKRKERRIYNKINNLIDELHHKTINYLTKQYKYIIIPSFESQDMVKSSKNRFLNRNLLQLKHYKFQQRLKSKCDIRGCHMEICTEEFTSKTCGRCGILNDVKDKDVYTCSNCKLVIDRDVNGARNIFIKVLNQRK

SEQ ID NO: 28912 - protein, 381 aa, unknown
  TnpB Polypeptide
MFRTIKIRLQRTADLVQTVAVFNQACQRVLDWGYENKHYNKTQLHRATYKGIREEFPSLPSALVQTARDQASDMLKRDRFEHMIRKKPFSSIRYDKRTLSVFLESGYCTISTVFGRMRYQFILADCYRQYQSWKVQNAQLVLGRDACFLNVQVEGEAPPFNGGDKRLGIDLGINNIAVCSDNSFFNSKHLKNVKGRYQHLKAELQSKGTRSARRKLKNISGRERRFVRDLNHCVANEIVNKPFDVFVFEDLTSIRGPKRNKAFNRKLGNWSFRQLRQFVEYKAEALGKKVLVIDPYYTSQTCSKCGHVSSNNRKGRRFTCVQCGFTLDADLNASRNIASFSTRVGGRLHVSEPNVADDEAEGRKAVEAESSCKPTNLFVGG

SEQ ID NO: 28913 - protein, 464 aa, unknown
  TnpB Polypeptide
VFLVNYHIIFCPKRRRRILVGRLKERLESIIGQVADEHGWDVVALGVMSDHLHLFISVDPNCSPNSVVKAFKGRSSRFLREECPELMKMSSLWPAPTSSLPPEMLRQRPSRGTSKNRPRSDHMLLTFNLKHGRDFSGELAKARQVALFAVQNRGKNPSSKDVKNIGLPSAIANQVLRKYGRSETLKVVRHVKLTVPGQGVKHNVEQRELYVPCLKLLLDVRHLPNFKKVNQVEVGNEYAHVSVTIDEVPLRQVEHWMGIDLNSTSHIAVVGNPSTGKVQKYGKEAPHIHKKYGKMRRHLYILGHPRVAKKKLKRKEKHKVKDLNHKISREIVNEAAQQACGIKMEKLSDIRKTARQSMSSRESLHSWSFYQLQSMIEYKAKLLGIPVVYVDPAYTSQQCSRCGLLGTRKGKDFSCPHCGHVDHADANASFNIALRPSLEESVGRLHQDRDWCKGRIDTPQEAPS

SEQ ID NO: 28914 - protein, 187 aa, Clostridioides sp.
LGIKEFCISSCGEFIENPKYFKKSLNKLAKLQRELSRKTIGSLNRNKARLKVARLQEHIANQRNDFLQKLSTKLIKENDIICIEDLQVKNMIKNRKLSRLISDVSWSEFIHQLKYKANWYGRQIVKVGKFFASSQICNKCGYKNEEVKDLNIREWICPSCNETHDRDINASINILKEGLRLITIQNK

SEQ ID NO: 28915 - protein, 549 aa, unknown
  TnpB Polypeptide
MFRAINLKIEHAEIINELEHIHNIFLQEYNAIIQNNIQLSDFTEDEYAHETRGKFEQKLGLLLNKNYLNWNLENRSKYFRMFALHLRQDFKSLKYKQDISALLAQYEFKFNNEQKTELRNQLRELNLYPTQQEIKNICRSGIVTQIPVERHSIPLDFNLGQDKQTIIQLDKNKPKYELRLNGIWFKLDLTQQIPEYIKNKNITKYCKPKFVKNEDGNWFVIIAVKIKRIKTKLDDSLICGVDIGVKNAYNAIVLQENKNFNEPCDSLEQQGKDSHESNELQDSNELQEQSSNELKIKTLPFTCSKETKEINEQLCKVKNNLTNVCKRLRVYSNIIKNNYSPAFTEQIKIKHEILSTEKKRLLNKRKELNKRKSYLAARDLIKQLLFYKVKTVHLELLNWVNHTGGGWDFSQQQDIFTNKCEEYGIKVVKVNAARTSSQNPFSPVKKYGDKLFNRNVRFKNKKYQIDRDVLASINIALRQPKKDKIDIGTIDAKRYVNPNKNRRYFGVITSHVSSVNNKNNKTVNMKNKHKTCKITNNNKVKYKTMTQSL

SEQ ID NO: 28916 - protein, 416 aa, unknown
  TnpB Polypeptide
MYLTIKQQVKRLSKEDYLIMKELCHTAKNLANEAIYNVRQYYFTEGEFLKYEKNYTLLKNSPNYKALNSNMAQQILKEVDGSFKSFFGLLKLAKKGKYAFKDCKLPHYLPKDGYATLVIGFVRLNGNKLILPYSNSFKKTHKPVEITIPPVLLDKKVKEIRIIPKTKARFFEIQYTYEAECIQRNLDKNNALALDLGINNLVTAVSNSGKTFIIDGRKLKSINQWFNKENARLQSIKDKQNFGRKPTNRQKAIARDRNNKVNDYMSKVARKVINYCINNDIGILVVGYNETFQRGSHMGKQNNQNFVNIPYGLLRSKFEYLCELNGILFVKQEESYTSKSSFLDKDAIPVYNADNPKEYRFSGNRIHRGLYKTSDGRTFNADVNGALNILRKSSVVDMNILYGRGEVDTPIRIRIA

SEQ ID NO: 28917 - protein, 365 aa, unknown
  TnpB Polypeptide
MLKALRYRLYPTKAQASQLAWTLETCRQVYNSLVNDRKFQYEVSGKAPSWMEQKRSITAWKPNHPELSDVYSQVLQDVSKRVDLAFQAFFRRVKDGETPGDPRIKGDGYDSFTYPQSGFGFQQGKLRLSKIGDVVIRLHRPIDGTIKTCTVRRINSKWFVCFSVEYEAELLPPSAEEVGIDVGLKTFASLSSGENIENPGFFRKEEKALAKAQRKLAKQKRGSRERKKARKVVSRIHERVRNRRHDFVHQTARRLVNRYGIIAVEKLNIKGMVKNHCLAKSISDASWSMFRSVLTNKAESAGRLVVAVNPAYTSQMCSGCGDIQKKSLSVRTHRCLSCGLVLDRDTNAAVNIKALGQYSLATLIA

SEQ ID NO: 28918 - protein, 226 aa, unknown
  TnpB Polypeptide
VEDRADRATVSHKGRIWYLHLIVTKDVPDSDSDTRIGIDSGIVRIATTSTGKVFKGGIIKHIRERRFKQRRDLQSARHKSRNQRRLLQRLAGKEKRSVEWLLWNVANGIVDEAFKVSAGTVAVEDLKGIRARIKVAKKQRLIHHGWPFSLLFLKLTHVASKQGIKVEPVDARNTSKTCHKCGHCDRANRKSQTVFVCVRCGHKSNADFNASLNVRDRRVPFTDASP

SEQ ID NO: 28919 - protein, 321 aa, unknown
  TnpB Polypeptide
MFKAKHSDNSGIKIPQTNKHIKWTDRHIQIPKLGKVKWVYHRRIKGRVLSITIKRDVDHWYVSVLADQGKINQNTSFNENDCIGIDSGLKDFAITSDGEVFETPKFFRKKQKKLARIQRIHSRRKKQSKNRDKQRIKLAKLHRKIRFQRSDLHHKISYVITKHNKVVFVEDLNVRGMIKNHKLAKAIQDQGWSQFNNYMKYKLDWKGDLLYKINRWAPSTKTCSCCGSIKSMTLDQRVYVCSECGHVMDRDLNAAINIKTFGINEINRAGTVQIHACGATTNGGASSDVSSYVASENGEAGINSLVGGILSLASSGSPRIG

SEQ ID NO: 28920 - protein, 362 aa, unknown
  TnpB Polypeptide
MIRAYKFRLYPSKLQDTEMRRHLWLSKNLWNELLAHAKQVYEATKKFPKKTDLQSMVKGKGMYSQTQQCVSHRVFESIKRVFTLKKKGISCGFPRFKSFDRMKSLQYPQSGFKLGAKLKVTPFGEISIKQHRDIKGEVKTLSLKREGTGKWYAIFTAEEEVTPKKNRGKQVGIDLGLKSFATLSNGEVIQNPRHLRQHEDKLAFLQRNLSRCEKGSKNRYKVKHKVAVLHERVADTRRDFLHKLSTTLTSHYSKIVMEDLAPKQMSEKNFGKSIHDAGWGMFSNMIRYKAESAGCEAVFVDPKNTTKECSKCGTLSKKHLWDRIHDCPSCGYSADRDLNAAQVILKRATLGHSGCNACGVGA

SEQ ID NO: 28921 - protein, 388 aa, Acidilobales sp.
MTTGDEGFLTLSIGMRVSPEPVVIELLHRYRDALNYAINRIIDNNLRTLKQAHNFLYKDLVERFNLPSRIALDCYRDALANANAWRNNPKRGKRPAVKKLSMLLHPELSYRIKDDYVEIIGGIRLRIVGLDRRYDDYKNREARLVYRREIMILWISKKIPKPKKYTPIDVIGVDINEQKIVYGDEIINIEKDTAIDKAYRYIRLAEDLQKKYSSSKYLAWRRRRGILRRIRSYHEKAKNILNDWTRKISLEIIRLAKELRYAISREDLTNLIRLLRELPKDHRRKLIIMGYSRIERWIDWQAEKNGVPYVKVDPNGTSSECPKCDYKGLEEVGYRRLRCPRCGFEADRDVIGKLNVRKKGLRKLGIKFSGGALTPLTAPQMTDVAPNR

SEQ ID NO: 28922 - protein, 366 aa, unknown
  TnpB Polypeptide
VDQETNKFLRYNYLAKEFLQTDQPDFRALPSPTSQQILMVFDQNIRSFFKLIRKWKSNKKSLSGCPHPPDYKHKIKGRNVVIFTNQQVRLIDGYIHLPKKVDLAPIRTRVKEKIKQVRIVPKTSCYVIEVVYERQEKEYIQNDNYLSIDLGVNNLSACYDSNNQSSFIINGRPLKSINQYFNKKKGEIQSNLEKNHKKKTSKKLNNFTLKRNNKIKDYLHKSSRTIVDYCIKNNISNVVIGLNKEWKQGSNIGKKNNQNFMQIPFDNLIKMITYKGQLEGIKVVTHEESYTSKCSVLDLEMLCHHNEYLGKRTKRGLFLSRDGIRINADLNGAINILRKETGDKLLNVKTLTSRGQAVWPVKVNLN

SEQ ID NO: 28923 - protein, 366 aa, unknown; identical to SEQ ID NO: 28922
  TnpB Polypeptide

SEQ ID NO: 28924 - protein, 413 aa, unknown
  TnpB Polypeptide
LFQVLTLLSLPCYESGILKLIAQVKLVVTPEQSQALLETLEAANALCNELSAWARQNKVFGKYAIQTARYHQVRSESGLTAQVVIRCIAKVANAYKTAFALHKEHVKRTERINKNRSAKNVPPKDLPVKDLPVMEACAFRAHGSIAYDDRILNWYIAKSEVSIWTVGGRLKLPLVCGEFQKKLLPSQQGESDLVYRSGKWFLLAVCEVEDPPLKEVDGFLGVDLGRVQLASDSEGNSYTGADCMALRRRVRKHRTSLQKKGTKNARRRLQTQSRRQSRYSQWLNHNIAKRIVQSASDSCKAISLENLEGIRERASAVRRELRWQIGKRWQIGNWSFAQLQNYIGYKAKAVGIPTVFVPAPYTSQTCSVCLHCERANRKSQSDFHCQQCGFQTNADFNASRNIARLGMEARAAL

SEQ ID NO: 28925 - protein, 399 aa, Chloroflexi sp.
MGYRTVRMDWMPKTQSEWRTFSLARKEAARLWGDLVERHHRIRRLNWKWPSKQRWEKWAKGKYPHLHSQSVQQIIGEFCEAVNSTRQLRKNGHPEAKYPWKKPKFRDIVYTNQGAIVRDGKLVLPNGSAGKLRIPVPVDLPGRLMEARLCMGKVLLVCQIPDEPCPQQTVIGVDLGVNTLIAATDGEAAVLISGRAVKATLQWRNKNLASIQQTQSGKTTGSSRWRKLQRRKAKLLNKAANRVRDLTHKATRKVAEAFPGATCHVGKPFNDAAQKIGRRQAQTVSSASNAKMIAQLDYKTSGAIQEDEHYTSQTCPVCGERNKGQRVYRCRKCGTVAPRDVIGSTNILCIGRHGQLVPGRSVPIAIRWIHPTKYPGRTPGSSGGHPACSSARTRREAQA

SEQ ID NO: 28926 - protein, 446 aa, Moorea sp.
MKVLEFKVKGNKTQYAAIDEAIRTGQFVRNKCIRYWIDNNGIGQKELYRHNTWLRAEYPFVKDLNSHACQASVERAYSSIARFYDKCKKKVPGKKGYPKFKKFSRSVEYKTSGWKLSPDTKSIDFLDKKGIGKLRLKGTWELWRYDSAKPTLREQKLIKRVRLVRRADGYYVQFCIKVDEKESLEPNHTNIGLDVGLKEFYTDSKGGVEPNPRFYRKGEKRLKFYQRRVSRKNKGSSNRKKAVNKLGRTHLKISRQREEHAKRLVRSYRKIVEPYYKRFNPFMQSRTPIKAPLSKVSSPARCVIHSNDVVAYEDLRVRNLVKNHCLAKSINDAGWYQFRKWLEYFGQKFGRQTIAVNPAYTSQNCSSCCEVVKKSLSTRTHTCKCGCVLDRDHNAAINILKRALGTVGHTGTWIIDPNALGEDASTSSDSGLEKQVTSLIKESPFF

SEQ ID NO: 28927 - protein, 376 aa, Peribacillus sp.
MLLAKKVRLKPTKAQEQQLWKSVGTARWTYNWTLNRQQENYKQGGTFISNNDLRKEITQLKQTEEFKWLSDVSNNVAKQAVKDACDAYKKFFKGLSKKPKFKSRKKSKLSFYNDTNKLKVKENLVLIEKVGWVRTREQIPMNMKYTNPRISFDNKYWYISVGIEQEFKQGELSDKIIGIDLGIKELAVYSDGQMIKKVQNINKTHVVRKMEKRLRRLQRQVSRKYEMNKEESRFVKTSNLIKIEKQIQHLHRRLTNIRTNHIHQATHAIAIIKPSKVVMEDLNVSRMMKNRHLSKALANQKLSEFIRQMEYKCKKYGIEFIQVDRFYPSSKTCSSCGIMKKDLKLSDRIYSCECGLVIDRDVNASLNLANFGKRTA

SEQ ID NO: 28928 - protein, 412 aa, unknown
  TnpB Polypeptide
MNKAFKFRLYPTKEQEKTLFFTLNRCRELYNAALSERKDSYRYTGRGVTYYEQKRDLPEIKNIREEYNTIHSQVLQDVFARLEKGMKAFFRRMKAGEKPGFPRFQGRNRYTSFTYTQMGTDKKGYSIGPSIREKRVHLPKIGAIKLKLHRPMQGTPKTCTIKYEVGQWYATFSCEIPDEQVVPTLPYTDEAIGVDLGLLHFATLSTGDTIENPRYYRRAHADLKRKQRKLSRCKPRSHRREKARRQVAKAHRKIKNQRHDFLHKQSRQLVNTYEMIVFEDLQVATISRAPKPKQDENGKFLPNGASKKAGLNKSILDAGWGHFVSLCQSKAEYAGCVTVLTVNPYKTSQVCSTCGREGEHKELSERTHTCVSCGVVLDRDHNAALNILRLGRSPQMPLVRAWQGPSVEAPAS

SEQ ID NO: 28929 - protein, 550 aa, unknown
  TnpB Polypeptide
MGLSIASSKNFSEEKAHKLYITLECMLEFEKEEEKEKVLALMRRFSSATRYAYKRLLEGVPDKEIEKRVQEKHKLNARYVKDAVLIAKQVLKSCIQRGQNPKKLVFGSRELFEKLKKKHLTGKRREKLRQRWEERRYYHLYSRGEKSKNGNLNLRFVWEDSLKLRINLGNGEYVWAKVIRNAKRHKDKWIDFTWKLLEAKRLGEWFAYNVRLKVRNGKFYAQVSWEEKTVEPVITKACGVMGIDINAYPFHLALAYVSTDGNLEKFERIDLREMEGKTQNQREHIAWRIARQVVERALENGKAIVVEDLQKVPKGRRGDGLAKLRRKLHRWAYRSVLEKIEVYARRMGVQLIKVNPAYTSVIGKLKYSPMLGIDKDVAGAYVIARRRLGFEEKLPKNYRELLKDKEFLAYAIAKVDERINKLKSELKKEKNEYKKNALKKRVKRLRKYLELLLSYTRDSGKSEPATQQAVNRWRKPMRGRAKSLQKSWRVLSVALAALLATTCLEWCRDHSPLKRVLISRDWVRVAGKGSPSLPGQGTAAQNKCSFIHFG

SEQ ID NO: 28930 - protein, 402 aa, unknown
  TnpB Polypeptide
MLLTKKNKIKIKKNDIESLKYQSNLCRLLYNAALEQRIMAWEMQKKSINVYEQKRELPQLKEEMPEYKKVYNKYLSETLFRLDEAFKGFYQRCKKNDEAKKGFPRFRGKHYFFTLTCPAMYVKKIDDKTLQLPQKIIIKTYEAIPDNFKEIHIVKQKNDWYITFAVNIEEQSQIKPKEVLGIDLGLKKLVTAINTSNKKIEYNHIKPGRKELNRLDNLRSKRDKCIKFSRRWKYLTKRLKDELSEWRNRCIDWLHKVSYQVIKKTEGIIVIGKLLQNTLLKDNRHLNRYIQNEWRLGKFKEFLKYKCKKFGRQLEEINEAYTTQDCFQCGNREKKSLSQRTHKCECGFTYDRDINSALNILKRFLLGLSHQERNKLNLSDFWLDVLGSPRNLNIDMNTFVYI

SEQ ID NO: 28931 - protein, 391 aa, unknown
  TnpB Polypeptide
MDRTLRVCLQPTPEQAALLAETTRQFTAVFNAVCALGYARGEKNGVRLHHATYKPLKGDYPALVSDHHIQARVKATEAVKSALALAKKGRTVSAPRSRSCPPRYNVHTYTVDWAAGTVRLSTTGGRITVPFVVPAYATGMVGGKVRTADLLHRDGKWFLHIVVDLPAPDVAPTDDVIGVDLGIAQPAVTSDNRFLGKRAWRNTESRYFKQRRALQARGSKSARRHLRTVRGKQARFRRDCDHVLSKRIVQGTTPGATIVVENLTNIRARVKTRQGKQARRIHGWSFAQLRSFIEYKAAGRGCTVAGIDPRHTSQTCNACGHVARNNRRSRSLFCCRQCGYTAHADHNASVNIAAKYRASIGLSLASGRSVNPPTVSASGTLPEAPGTSSRL

SEQ ID NO: 28932 - protein, 403 aa, Trichormus sp.
MVVLEFKAKGKTTQYAAINEAIKTAQFVRNKCIRFWMDNRSVGQKDLYRYNTALRAEYSFVKDLNSHACQIGVERAYSSIARFYDNCKKGISGKKGYPKFKKNNRSVEYKTSGWKLSQTRKQITFTDKKGIGKLNLKGTWDLNFYQLEQIKRLRLVRRADGYYVQFLVSVDNKVETQPTGKTIALDVGLKEFYTDSNGHSEPNPRFYRTGETRLKFRQRCVARKHKGSINRQKAINKLGRVHLKISRQREEHAKRVARCVIQSHDLVAYEDLRIKNLVKNHCLAKSINDAGWYQFRKWLEYFGVKFGRITVAVNPAYTSQECSNCGAVVKKSLSTRTHVCECGFVLDRDWNAAINILKLALSTVGHTGTWVIDPNASGDSTSTHAGEILYEQVGSMNEESSPL

SEQ ID NO: 28933 - protein, 394 aa, Limnoraphis sp.
MIVYEFKAKGKAYQYKAIDEAIQTSQFVRNSCLRYWMDNRGLGRKELYRYNTELRAMYPFVRDLNSHACQASVERCWSAIARFFDNCKKNIPGRKSYPKFKKNSRSAEYKQSGWRLLDPKHIEFIDKKGIGKLKLIGTWDLAFYPAEQIKRVRLVRKADGYYIQFCIQVDVKIKIQPTGKTIGLDVGLKEFYTDSNGNTELNPRFYRKNEKQLKLYQRRVSRKNIGSANRLKAIKRLGKAHLKISRQRVEHAKRLARCVIQSNDLVAYEDLRIKNLVKNHCLAKSINDAGWYQFRKWLEYFGSKFGRVTVAVNPAYTSQTCSNCGAIVKKSLSTRTHICQCGCELDRDHNAAINILNSALSTLGHSGTWILDPHASGDFTSTVIGEILPQQVES

SEQ ID NO: 28934 - protein, 343 aa, Streptomyces sp.
MARTLGGGALVCQADGESGKRYGNETIRISPDGEVSIKLPAPLRYLANAPHGRYVLACRVAFAHQGEERADRVAANRAIAYRIHLDTGRERWYVTAAWQIPPTRHRVGGSRARPRRDRRGHERRPPGAWRLDIHGNPTGNPRRFFYDLTGTAQHRDAQVRHALTRLLHWARTCGVKAIAVEDLDFSAEKTREKHGRHGRFRQLISGTPTGKLRARLSSMAGQTGVAVIAVDPAYTSRRGAQHWQKPLTTPTRTTTRHDAAAVAIGRRAQAYPIRRRTAPPPHDRSDRAGHRTVQAGPGVPGGEGTRPRVPGPRTRSVPPGRGANAGNQNAQHRPGRSAEHETW

SEQ ID NO: 28935 - protein, 424 aa, Acrocarpospora sp.
VRLRYNYRLYPDASQSQALARLFGCVRVVWNDALAMRKAARKAGLPWIGGGDLQKICVTAAKRTPEREWLGAVSPVPLQQSLRDLDVAYRNFFDSVSGKRKGRRMGLPVFKSRRDRRQSARFTRTAFRLPGDGSLYLAKIGSIEVRWSRELPAVPSSVTVIVDAAGRYFASFVIEVDDAGQVLPEAEAEIGIDLGLTHYAVLSDGTKIANPRWLRRREKRLARLQRALSRKQKGSKNREKARIAVARQHAKVADARRDFLHQTSTAIIRENQTVVIEDLAVRGLARGRLAKSVNDASWGAFRTLLGGKAARYGRAVITVGRWFPSSQLCPCCGWRNGTVPLGVRAWDCPSCGEHHDRDIAAALNILAEGLRLREQAETLAREGQDKDMVAAGLADTENDCGGRVRPGEAIPTLAPPATYGAHAA

SEQ ID NO: 28936 - protein, 382 aa, unknown
  TnpB Polypeptide
METQRALTVLLPNDEDIRRTVLAFQQVQQELSAPCFNAGQPLGPLALQRACYHQVKGMLNAQMTISAIRLTAGAYASALSNKKPAKRPFAFRHARALFLIGKRGRDADFRADGTLSLWTVAGRKRVSYTIPDYFHPMLVSATELDSLTVIERKGKLVGRLTVTLEVPTPTAVHPVGIDLNETNALVAVDPDGHTLFPSGKAIKVKNRRTFKTRNRLKRKLAAKKAEHRSTRSVRRTLKRLGRQQSNRTTTFAKQVAKTLVKWAPANAALVFEDLHIPQPAKGTIKGKSVRRRLSEWQRGAIRRAVEGKAQLAGLAIAEVNPAYTSQNCSRCGLRGKRKRHVFTCPSCGVTLHADVNAAVNIRNRFTAFRGSGLMSSSPEAQS

SEQ ID NO: 28937 - protein, 377 aa, Nanoarchaeota sp.
VTFINGKALNIIMKAIATIKLKLPNNNVFLETMKQYSYSANKVIDFGWNIKTYSKRELHDLTYHKIREETQLPAQLVCSSRDRAFEVLKACKFQKSKPIMKEYLTIRYDSRSFSFRSNKNNYYISLTTINGRIKFPVEIPECYWKYLDYKVCSADLILDKKERLFLNIVMSRSIKILNSNNIVGVDLGINNIAVTSQKQFFNSSQIKLKKLKFKHLKAKLQAKGTKSAKKLLKKISGREKRFMTWVNHNISKSIINKVEEGTIVLEELKGIRKSKVRKKQRFWLHSWSFYQLQRFIEYKAVRGGIKIIKVNPRNTSKICNSCGNLGSRCKSFFTCSHCGYSLNADLNASFNLAKHTSISDCVSAEVIPPFLTCDTKA

SEQ ID NO: 28938 - protein, 384 aa, Halomonas sp.
MNTVQRAYKYRFYPTPEQAERLARTFGCARYVYNHFLKVRTDAWYETQKRVGYNDTAKQLTALKKQPETLWLQEVSNVCLQQSLRNLDTAFKNFFQGRAKYPTFKKKHARQSVRYTTSGFSYRDGKIKLAKHKEPLTIRWSRRFTGTPSSVTVSKDSAERYHVSILVEEDVAALPFSKQETGIDLGLTHAVITSGGKKVNSHHYFKQSEKTLARAQRHLSRKQKGSANRAKAKLKVARIHARIADQRLDFAHKLTTQLIHENQVVAAESLQVKNLLKNRSLAKAISNVGWHQITTMLAYKAQWYGRSFVQIDKFYPSSKRCHACGHLADAMPLSVRQWDCPACGTRHDRDVNAAKNILKAGKAILAGADKLREHENTTAGHAEG

SEQ ID NO: 28939 - protein, 505 aa, unknown
  TnpB Polypeptide
MLRRSVAVELETTKELNKLLYSVESAYLSIVREVVEYAVENNVTSANKLQRLFYSKYRLEYPSLNSQLIIQAIRQASQIAKSFVKRRKKGLVSKTYPEVKTVSIRFTEMAWSYEQFIKSIAPVRLSLSLLVGRRFEVWLRLHKRFWLYWWRVLSGEAELASTLMIKRKLNKWYAIFVFKLKPKEEEPKSVISFDINENTVAVGRVDLPSTVSKVVNWNRQYMVPELYTIKTDFGRLARRYEMIRNAIIEKLKPEFALLNGKYVNVTNTREYRKRAKHLRERGRKVGRVRQIANELTKTPAIIITEELGENPQESMIEDVMKDELRHRIKQTPFKAVEKAVEDKALERGSKIFRVSSYRNSRVCPIHFTKLKMADDWHILKCPLGHYVDRDHASVMNMAWKLTPEAWTKAFWWNLRKKIDWGEHEGKSNPLIPHEIVILLQHIMENAKASLEQSPAMLARGKPMNHHQMQNEGGGEGKRPERLWCHHPGGPTNPHSRGLRPISSSL

SEQ ID NO: 28940 - protein, 402 aa, Escherichia sp.
VKRLQAFKFQLRPGDQQECEMRRFAGACRFVFNRALALQNENHEAGNKYIPYGKMASWLVEWKNATETQWLKDSPSQPLQQSLKDLERAYKNFFRKRAAFPRFKKRGQNDAFRYPQGVKLDQENSRIFLPKLGWMRYRNSRQVTGVVKNVTVSQSCGKWYISIQTESEVSTPVHPSASMVGLDAGVAKLATLSDGTVFEPVNSFQKNQKTPARLQRQLSRKVKFSNNWQKQKRKIQRLHSCIANIRRDYLHKVTTTVSKNHAMIVIEDLKVSNMSKSAAGTVSQPGRNVRAKSGLNRSILDQGWYEMRRQLEYKQLWSGGQVLAVPPAYTSQRCACCGHTAKENRLSQSKFRCQVCGYTANADVNGARNILAAGHAVLACGGMVQSGRPLKQEPTEMIQATA

SEQ ID NO: 28941 - protein, 222 aa, Pantoea sp.
MAKSKAPLDVRWSRELPSAPSSVTLSRDAAGRYFVSCLCEFEPVSLPITASTVGIDVGLKDSFVTDTGFKTGNPRHTTKYAKRLALLQRRLSKKQKGSKNRARVARTHAKIADCRMDNLHKLSRKLINENQVVCVESLKVKNIIRNPTLSKAIADAGWGEFVRQLDYKGEWSGRAVVAIDPFFPSSKRCSGCGYTMPKMALNVRSWICPECGANPDRAVNAA

SEQ ID NO: 28942 - protein, 383 aa, Blautia sp.
MRLFCSEKQILAETEKLYCEAVAFYYELLKDRNELWTENLLTIQGQLEKLTVPGKDGRVPEYLPPGGKLLVYFRRSAMNKASMAVKTAAASGCFPQKIEANITFFKGMYRDFTSTSVVLKLWNGKKWIWTECGLTGRSFPANSALLSPTLVHEGKWLMLHVPVKQENSDARTAKERMKEGCRVCGVRFTNTDSFAVCSVLDERSRPVSVKNCHGGNAYRHHCKTLLKKIEASKVFTDKDNVDQPNKKYYMRYKHLNEHYAHQVSREILDFCKENQAGIIVLPEYDEDFSRMTMYRSGNDSPLHLSTKIRNYLKYKAWAEGILVLELRADGTEKYCSICGSPGKKQSKLFICQNGHQINHFLNGSRNLACKCQQSFQKRSGSKS

SEQ ID NO: 28943 - protein, 391 aa, unknown
  TnpB Polypeptide
VKVRYTFRFYPSTRQKRALGKTFGCVRYVYNRALRLRKDSFSRDKTRVTYCQTSAALTKWKQEPGCSWLREPSCVPLQQCLRHLQTAYRNFFEKRSDYPRFKSKHGEQSAEFTRRAFGWDGSQRSLSLAKIGRLRIRWSRQFASEPSTVTITKDCAGRYFASLCLDETVAALPATGLGVGIDLGINRLATLSNGERIANARHLEGRLGKLARLQRVLARRTRGSGRWKRQRQRVARLHARIADSRRDHLAKLTTDLVRRFDVLCIEDLDVRGLMGRRRLARSISDVGFSEFRRMLTYKCSWYGRQLRLVDRFFPSSRRCSKCGHVIEDLPLSLRTWTCPGCAACHDRDENAARNLLAAGHAVTARGGRARPRATTVARGGARRNVNQPALP

SEQ ID NO: 28944 - protein, 206 aa, Cyanobacterium sp.
LSHFYTDSNGQKIDNPRHLRRSEKQLKRLQRQVSKKKKGSNSRKKAIKKLGRKHLLVSRQRKDWLVKLARCVVSSNDVVAYEKLTVKNMVKNHCLAKSINSASWRTFFDWLEYYGKVMGKIVYGVNPQYTSQECPNCKAIVKKTLSQRTHICKCGCVMDRDEAGAINILAKALRELSRGGHSQTSSLELVNANGHINLCQKERKFS

SEQ ID NO: 28945 - protein, 435 aa, unknown
  TnpB Polypeptide
MTRKQLMISMSDLPYHLGLKMRIYPSSQQKKIIAINCGVSRSVYNKLIAINSELMQLRKTGIYIKTIAERIETLELRKKNLSKYYSYMSVKEVDSLTIAQAKLNYNAAWSMFKKIHSSGVPKYHKKGVSDSYQTSCIYTTDNKKKGNCTPFTGSVRFLDTKHVQLPKLGRIRISGSSYQKILAHNPNFRIGTATIKCDASGYYLSLQIGDVVPFVNLKPKAGKVTGIDLNTDNFLTDSYGNVVDNPRYYRKSLKRLKKLQRQMARRQVRAKKEGRKLAESRNYQKSRLQAARLHQHVKNQRENFLQKLSTAYINNHDVVVLEDLRGKNLMKNHALAMSIADVGWSNFQKMLEYKAGLYGKKYIEVDKCNTTQRCSNCGSIMGHNGYPKLTLKDREWNCPICKVHHIRDYNAALNILEKGIAKLEEEEKTIIPYKN

SEQ ID NO: 28946 - protein, 442 aa, unknown
  TnpB Polypeptide
MKQHQRYPRHGTPQRITTAVTHIRLIEVNPGKLATLDNLAQVYLSLCQQYVTLFCTEEPPNKFHPPLFPTPLSERWHRVAIQQAAGIAQSWHTNRANAYQDYLDDLLDDHEQQADSTLNPQAEEPVWKEWDVPTLRQTCIQANVNVVALEPAQDSPFDYWLKISTLDFRKQLLVPVKLADYHRQTLKGKTINTSVTLNKRGTGWWLTLSYDQVVPIQTEPSAPVVGVDVGIANFMTTSTGKHYGTFHGKLRERQKRDREKRRRKAKLRTCLEKKGVEKLPSTTSRSGQRLIRHVRQEINRAVNQCFAEHEGAQIAYEQLSVATMKHKARAMNACMRASNLAHIPKQIAWNAAKRGIQATRVKSAYSSQECSVCHYPDRANRPDQQTFCCQVCGYSTHADLNAATNVARRVGDTALEVCKDKTAVKALLLERHQAWKTQHGWS

SEQ ID NO: 28947 - protein, 534 aa, unknown
  TnpB Polypeptide
VKKRRRLVKKSKTSTFLLELPLVVDSGQAKRLRAHFEAARCLYNALLDEALKRLHQMRSDPRWQIARTLPKIQKQERREAFTQLRQQYSFSEYALHSFAKHANCTWIADHIDSMMAQTLATRAYQAVNRICLGKAKRVRFKSKGRGLDSVENKQNKSGLRFLLQRPEEGNEGYVLWNKDHLSALIDWNDPVVKHGLGQRVKYARVLRRKASSPRAQGADCEGDRYFVQLILEGIPYKKSKRMVGTDTIGLDLGPSTVAFVPREQEAQLVPFCEDLKPDIRAKRRLERKLDRQRRANNPQNYDEKGRIKKRGTHRRTWHNSKGYLATRRRLAYQERKLAAHRKSLHGRLVHQIISIGHHIHTEKISYKGWQKRYGKSVALHAPGMFIRMLGRTVASTGGTLHEVSTQKTKLSQYCHGCGKYEKKPLSQRWHRCTCGIGPVQRDLYSAFLIAHLETETTIPSIAHDAWEGAELRLRAAMEVLHQRAKEGQSLPGSVGISRAGACLPKSLANAHLELVYRRGRLEALRQEQGHTATR

SEQ ID NO: 28948 - protein, 393 aa, Acetivibrio sp.
MIKTIRVMLLPNNKQKTKLFQYANIARFAYNWALGREKENYKNGGKFISDGDLRKEFTQLKKTDEYSWLNNVSNNVTKQAIKDACEAYRDFFKGYTKFPRFKSKKHSVPKFYQDNVKIQFTDTHVKVEGFATSKKKNKQKLNWIRLAEHSRIPAENVKYMNPRIKYDGINWYITVGIEYEDSITLPSNEGVGIDLGIKALAICSDEHKYQNINKTQRIKKLEKRKRRLQRSISRKYENNKKGVSYCKTSNIIKRENELLKLNHRLANIRQNYLHQTTTEIVKTKPSYIVLEDLNVKGMMKNKHLSKAVQQQGFYEFRRQIEYKSAWNNIPVIIADRFFPSSKLCSCCGAIKKDLKLSDRIYKCECGNVIDRDYQAALNLKSYGEMVLKQQSVA

SEQ ID NO: 28949 - protein, 344 aa, Asgard sp.
MREKEEYLKFKNLAGSQTPQQLLRMVEATWEGYKEAKKDWRINPEKYLGKPKIPGYLSKNGRFIVVWSKQRVRIRKGAIRIVERLMKEGFPAIHIKKLPVTEANIAIVRLKPFFDKFKLEFVYEKEVPAIKIKEVQKILGLDLGINNLVATSDGLLIKGGVVKSINQFFNKQKAKIQALLSKQGLKTSERKQQLMRWRYNQLHDLFHKTSRAIIQHCLENNISPLVIGRNKNWKQNIRMGRKTNQKFTNVPFHKLIKMMQYKAEEQGIEVTLITEEYTSQTCSSCGYRSRSNHKYRGLFVCKKCKLVINADVNAARNIAKKAFPESILGIGDSGCVAQPTKLAL

SEQ ID NO: 28950 - protein, 387 aa, unknown
  TnpB Polypeptide
MRKLQKSFKTEINPTDEQKLKIRRTIGTCRYVYNFYLDQNRKRYEKGEKFMSGKSFSVWLNNEYLPQNPEYAWIKEVSSKSVKRSLENACTAFSRFFKGQSHFPRYKKKNKSNIKMYFVKNNRTDCFCERHRVNIPTLGWVRIKEKGYLPTTKDGYVIKSGTVSIRAGRYYVSVLVEIPDPLKAESRNEGIGIDLGIKSFAVLSDGTVYQNINKSAKIKKLEKQLRREQRSLSCRYENLKKGVSTQRANIQKQKLKVQRLYQRIDNIRTDYIKKTIAGIVKTKPSFVTIEDLNVKGMMKNRHLSKATALQKFYEFRTRLQGKCAEKGIELRIADRWYPSSRLCHNCGQIRKDLKLSNRVYQCSCGYCEDRDLNAALNLRDVKTYQSA

SEQ ID NO: 28951 - protein, 376 aa, Salmonella sp.
MKRAYKYRFYPTPEQAAFLAQTFGCVRFVHNSILRWRTDAYYERKEKIGYLQANARLTALKKESEHAWLNDVSCVPLQQSLRHQQTAFANFFAGRAKYPTFKSKRHKQAAEFTASAFKYRDGKLYMAKNKIPLDVCWSRPLPSVPSTVTESRDAAGRYFVSCFCESEPASLPITSSMVGIDVGLKDLFVTDTGFRSGNPRHTAKYAARLALLQRRLSKKAKGSKNRAKARLKVARLHAKIADCRQDALHKATRELINDNQVVCVESLKVKNMIRNPSLSKATADAGWSEFVRQLRYKGEWGGRSVVAIDQCFPSSKCCSCCGITMKKMPLDVRKWQYPECGTDHDRDVNAARNIKAAGLAVLAHGEPVNPESQHAA

SEQ ID NO: 28952 - protein, 295 aa, unknown
  TnpB Polypeptide
VKDLCLAYKKFFDKKAGFPKHKSRKSNISFYVNYESMKKTQNGVQCEKLGNIKTAEPLPELLIEEKHYLNPHISYDGKYWYISFSRKIEIHKTEHNNTTVGIDLGIKNLVTCSNEKVYKNINKTKRVRKLKKKLKRLQKKVSKKYLINKDGKKFIKTKNIIKLERKIKLINRTLTNIRVNHTHQVTTEIVKTKPSKIIMETLRVTNMLKNKHLSKAISEQSFYRFISFIEYKCKLYGIELERVPTLYPSSKKCSHCGAIKKDLRLSDRTYHCECCGLSIDRDYNASLNLANYKIS

SEQ ID NO: 28953 - protein, 449 aa, unknown
  TnpB Polypeptide
MLLAHRIRLDPSLDQRDYFTRAAGTARRVWNWALAEWQRQVALGLRPNAMALKKRFNSIKYSDPDWLDEHGQPWLRAIHRDAHAQPFANLARAWTRYVEQRRAGQPAHPPRFKKKGRCRDSFYLANDKFRMEGLAVVLPKIGRVLLREPLRWAGKIMGASVSRQADHWYLSVQVEVSEQLAMRSRTGDAMIGIDLGVTAAATLSSGERILAPRPLKAALRRLRIRTRRQSRKLKAAKQVSGITGPMPKGTRLPVSKNRTKGALSLARLHERIAQVRADFTHKLTTRLCRENQTVVIEDLNVHGMLANHKLARAIADVGFHAIRRQLQYKSARYGTRIVLADRWYPSSKLCSGCGVRNGELTLGERVWTCAACGIRHDRDVNAAVNLQRLATGALAARTALPEASQAVTPGTAAGTVPAAGGKATPVRHEHGQQDGSGQEEYAAYVCARF

SEQ ID NO: 28954 - protein, 426 aa, unknown
  TnpB Polypeptide
MDDDAPRRTVPIKLDIPEQRRGDLHQTKKQFLHCANYTSKWAWRYDDLCITSKAKAENALYSELREETDLTANLVQKGIRRAIEAVDAGVEKLKQGEKTSQPEFDSWSVVYDKRSASFNDDHATLSTPSGRVKAEYVLPPEHKRQEMPFGRYYESKEWDASSATLQYDEQDDTFYLHVTLKNSEYTVDGPERQEANHDDDGAKNGVVLGVDLNVTGAFAVTSTGEYIGSADYLNHKRDQYEHRRGRLQQTGTRSAHLTIQSIGSRFSDWSLDWLHNRANELIDEAQTAEVDVDGIIFENLGHIRENIANGSKFQQWAYAKFVELVEYKIESTELFVDTVNPAYTSQRCSHCGFTHEDNREDKKFVCQDCEYETNADYNAAKNIANRYCGYIHRGQKSRDGWATSQLALKSGTLNVNGNYTPAELLG

SEQ ID NO: 28955 - protein, 413 aa, unknown
  TnpB Polypeptide
LRTKLIIILDNFSIPVKIRIFALMFRAYKYRLYPTNSQKELIHKHCGSVRFLYNLALETKTTAYLGNKVNLSRYDLQKQLVDLKKELPWLNETNSQSLQSALINLDEAYNKFFKGAGFPKFKKKTNGGSFAVPQNVIVENDLLIIPKFKEGIKMSLHRPTKGIIKSATISVTPTGKYFVSILCDTKEELPTKAPIKESTTIGVDLGIKDFCITSEGEVFENPKYLRKAQSKLKYVQRKYSKYKGKRTKKKLAKLHEDVVNKRKDFLHKVSTKLISENQTIAIETLAVKNMVKNHNLAQAISDVSWSTFVTMLEYKADWYGKNILRIGQFAPSSKTCSNCGAINKELQLKDREWTCSNCSSVLDRDVNAAINIKSFALKNNLSGEHTLKNQDELLTLVKVLTPEAQPIGYAVGG

SEQ ID NO: 28956 - protein, 332 aa, unknown
  TnpB Polypeptide
MKITKTARLKITSHTNIFKDTLDIYNKALSFFIDVCFNEYHNLLDKSSKDKMNYIESITHLTAKNPNIKYDFSKDFYKYPSYLRRATIMEAIGICDSHFSRLELYNIEKNKALSTNKKFHKKAPSLNFAPKSFPVFYKENMWNKINDGVGKIKIFKNNDWVWQEIKYFAKDLLSAKIYRFSTYKELNPSLIFKGKKYFLHIPYQKEVKLNESSLNQRIVISVDLGLNNSAVCSCLNHNGTVLDRLFINQSKEKDLFKKAINKLSKAKRLSGISNLKLNYWRKINNLQNYIIQNTVDNIVDFALKNNATHAAIIKAKGKMKIFLNKAGLFSAA

SEQ ID NO: 28957 - protein, 393 aa, Streptomyces sp.
VKRAFKYRFHPTEAQTAELSRTFGCVRKVYNMALAARTEAWARQERVNYNQTSAMLTAWKKTEELAFLSHVSSVPLQQCLRHLQAAFTNFFAKRAKYPRFKSRKKSRRSAEYTTSGFRFRDGKLTLAKMTEPLDIVWSRPLPVDAKPSTVTFSQDAAGRWFVSLLVEDPSVVPLSATSQAVGVDVGLDHLLTQSTGEKITNPRYERRDRVRLARAQRELSRKAKGSNNQAKARRKVAKVHARIADRRRDHLHKLTTRLVRENQTIVIEDLTVPTMVRNRNLARAISDADWAEFRSLLEYKAAWYGREVIAMDRFFPSSRLCSACGTLARSMPLHVRTWTCDSCGTTHDRDVNAAKNLLAAGLAVTVCGAGVRPQRSTPGGRSAMKQKPSQREP

SEQ ID NO: 28958 - protein, 356 aa, unknown
  TnpB Polypeptide
VYNRFLAEWNKAYEKTGKGLSYTKCANQLPTLKQELPWLAEVASQVLQQSLKNLDTAFKNFFRGTGKHPRFKSKHRKQSVTYPQGFKVNGSSVKLPKLGEVKAKVHRQIKGKVKSVTVSMTSSGKYFASLRIELLGELPEQSTKGKVIGIDLGLDALIVTSDGEKIKPALFYRKYEKKLAKYQKRLSRKTKGSANRNKARLKVAKIHGKIANCRLDSHHKLSRKIVNENQVLVFENLNIKGLTRNHCLAKSINDAAWGMLQTLTEYKAKEQGKVVEFADRFFPSSKTCNHCGYRMKSMPLKIRTWECPNCGTLHDRDINAARNLRDYFLAPGSGVLACGDDVRPKPEPISGRGNCQ

SEQ ID NO: 28959 - protein, 284 aa, Raoultella sp.
VRWSRELPSAPSTVTISKDAAGRYFVSCLCESEPVSLPIAASTVGIDVGLKDLFVTDTGFKQSNPRYTAKYAARLALLQRRLSKKARGSKNRARARLKVARLYAKIADCRLDALHKATRKLINDNQVVCVESLKVNNMLRNPSLSKAIADASWSEFVRQLRYKGEWAGRSVVAIDPYFPSSKRCSCCGFTMQKMPLDVRKWHCPECGADHDRDINAARNIKAAGLAVLACGESVNPKTLSAAQVRLRETRIPFLQGGECQNRVLRSRVVSADNVPSGRTTAPRP

SEQ ID NO: 28960 - protein, 398 aa, Planomonospora sp.
MPRYRLSPTPAQEAALAEHCAHARFVWNLAVEQHAHWKPGRKSAPGFAEQCRQLTEARAAFGWLAAGSIIVQQQALKDFAQAMANFFGGTHRKPTWRRRGRNEGFRIVAVKADQVRRLSRNTGEVKIPKVGWVRFRWSRAVPGGVKSFRISRDAAGRWHVAFAAVPKPVPALATGEAVGVDRGVAASAALSTGELLTAPGLREPEARRLLRLERKLARARRGSHRRAKVKVALAKLKARESDRRKDWVEKTSTDLARRFDVIAVEDLKIRNMTRSAKGTVEQPGTNVRQKAGLNRAILAAGWGRLVTRLEDKAPGRVVKINPAYTSQTCNACGHRAPDNRESQAVFRCVACGHRADADVNAACNLRDTAVGRTVAARGGSPLGGPVNREPQRDLLLVG

SEQ ID NO: 28961 - protein, 374 aa, Pyrobaculum sp.
MKSYRTLVLKYPLEKLPPEAVAQLLKIQQEFRRWAEEWAKSGGKTPTPEQRPLKYFAEKFLHAAKALEWLRGHVIKRGFKPPLVFNAQLRLDNERDVSRGVFVDLPRREVRVRKWGGGTIVLPLSRKNVKWIEERVREGAALVFAAAWVGRSRRNGAVALYVALTFRREVEQMTPKRLLVLDLNALHNGVAYAVVEEDRVLERSVLRPHIYKIIRLQREAARLDSLCAEREEGAVCSRAASAKSRLRRLPRQWEDGTAKKIAQLAMQYKAAIVADVPDDKSIRQLKESNYAAEKKIFLDFGRLRKRVKGLAGWHGVAYREERLYSTVCPDCGAKMEEEPDRRVKCQCGFEAHRDEVPALWAQKRFHELITPSFS

SEQ ID NO: 28962 - protein, 454 aa, Pyrobaculum sp.
MKSYRTLVLKYPLEKLPPEAVAQLLKIQQEFRRWAEEWAKSGGKTPTPEQRPLKYFAEKFLHAAKALEWLRGHVIKRGFKPPLVFNAQLRLDNERDVSRGVFVDLPRREVRVRKWGGGTIVLPLSRKNVKWIEERVREGAALVFAAAWVGRSRRNGAVALYVALTFRREVEQMTPKRLLVLDLNALHNGVAYAVVEEDRVLERSVLRPHIYKIIRLQREAARLDSLCAEREEGAVCSRAASAKSRLRRLPRQWEDGTAKKIAQLAMQYKAAIVADVPDDKSIRQLKESNYAAEKKIFLDFGRLRKRVKGLAGWHGVAYREERLYSTVCPDCGAKMEEEPDRRVKCQCGFEAHRDEVPALWAQKRFHELITPSFSNHICPAFAVAEFIQNTLVTKTHEERTPRRARGPARRTPPLALLNATPPAKEGGRPQPRRGPGSRKGASTSLSTTRQAAGP

SEQ ID NO: 28963 - protein, 279 aa, unknown
  TnpB Polypeptide
MATGRYGDWTIWRHKLMIPTLKQVRLKEFGYLPVGAKVTNGTVSYVAGRFYVSVVVDIDEKSKYNKDLEASYHTVTDGVGIDLGVKDLAIVSDGKVFKNINKSSKVKLLERRLRREQRCLSRKYEFIKKEGGKTATASANIEKQKLKVQMLYQRITKIREDYENKTVHEIVKQKPRFITVEDLNVKGMMKNRHLAKAIAAQRFNHLLAKLKRKAEIIGIELREVDRFYPSSKSCHSCGHIHKGLKLKDRVYVCPKCGYTADRDYNASLNLRDAKEYRIA

SEQ ID NO: 28964 - protein, 276 aa, unknown
  TnpB Polypeptide
MKERLIEAKIVDFGKLKEIYSDIVYYIQYTKALERTGAKEKPNPPPSLRGLSLLYSKLRIGPLKVVNTGNLFKLEKVDAKVSSDQGGQPAYAIVDFSDGIKVYLAYVTEDPIVGVDLGIRHLFTVVAILDGGKVFRTKYIGNGSLIETFTKYMGEGQGLSYIAEIRSKVRGAVKELADFMEEVSPKVVALEDLRYYEARIGKGLRLVEDLLEKEFIERGIRFKRLDPHNTSRICSRCGYKKGEILGSIFVCPACGYKVDRDFNAAYNLAMKCYYTC

SEQ ID NO: 28965 - protein, 411 aa, unknown
  TnpB Polypeptide
VKKETQVTVVGKVFKPNKNKVLALNTCLEEYFRAVKWYLSFNSTSKTFLHKNGYEKAKQLFNLNTALIQTARDKAVEILKSFNEKKKEGKAKSERPKLNRVSIRFDKRCYSFAKTTNVLTPYWLTLSLNRRTRISLPIKFGGRQQKFIEEALKGEWQFCTVEMVKRDGEWYAHFVLKKEVELIDEPETFIGVDLGEWNVAVAVAVSKYNPSKPLKGQFWSGAKIRYVRGKYSHIRRNLQRKKRLDLVKRIGSKEGMIVNQILHTIAKEVVEYAKQFSKPIIIMERLNGIREEMNSSAKLNRRLHAWSFRKLQQYIEYKANLEGIPVVYVNPKNTSKRCHRCGHVARKVEGREFKCLKCGLVYNRDLNSAINIAHALTRGVGWGSCEPPELPHEAFAVKAGGTGEAPSVRAG

SEQ ID NO: 28966 - protein, 363 aa, unknown
  TnpB Polypeptide
LSLVKDSWQFEDIAASDSKRIDAAKKIFNNELKTRPEFQWISKYPSTVYQSAFQDLKDAFSRWRKGQNDLPVFKSKKDKQSFTVYKTAGIYPEKGKPALPFTNRQVLYPGKKITIPGLGEFRLKEQIPFICSAQTFTISREADKWYVSFVIDAQKVPPLFHEVVEPIGIDLGVKTFATLSDGQTYDAPKPMKKAKTKLGLIQWRNRRKQLGNRKKGIRASKNAHKYYRKLAKHHARIANQRRDFLQKTTTEISVKYAHIRIEDLNVKGMMANHKLAAALADVGFYEFRRQLEYKSPMYGTKVELVDRWFPSSKTCNKCHHIQPMPLAERIFVCGECNYTVARDLGAAINLKNAPDEVLRQAMP

SEQ ID NO: 28967 - protein, 282 aa, Symploca sp.
LVDNESIYSSTTAVIVLSLKQFKQHHFVGNKIKLSKIGDIKVIVHRPIPEGFIIKTVSVTRKADGYYVTLSLDDQKVPTRKPDFNANNIVGIDVGLIDFYVASDNTRIAAPKHLRKAQRKLKSAQRKVSRRKKGSLRRRKAIKKLGIRHNKVADARRNFHFKTAKKLLIKYDVIAVEKLNVKGLARTRLAKSIYDAGWSQFINILSFKAENAGLKVIAVSPNGTSKECSSCGHKVEKFLSQRMHNCPVCKTSLCRDLNAAINIKNRGTHGLKAQLMSSMKSH

SEQ ID NO: 28968 - protein, 372 aa, unknown
  TnpB Polypeptide
MERAHTIRLNPTPEQEQYFRQAAGNARFAWNWAVGIVREARKAGEKLPLVGDLKAEFNRVKREQFPFMLETTKCAPEQAFADLKQALANYFNDIKKRKNGKRRKDGKWVGFPKFKSRKRGYGSFYLANDKFTVDGHWIRIPKLGWVNMTEPLRFDGKIMSARISERAGYWFVSIQVQLPEPKRQIPERVIGVDLGVKTLAVDSDGDVFENQKHLAAAQKKLRRLNRWLARKQKGSKNWHTAKRNLARLHLRIAHLRADATHKLTTRLATKASIIALETLNVAGMLKNRKLARAIADASFSEMVRQLGYKAQQVVRVDPFYPSSKTCNACGHINAALTLADRVWVCPACGTVLDRDINAARNIRDEGLRFVSA

SEQ ID NO: 28969 - protein, 399 aa, unknown
  TnpB Polypeptide
MYLIMQLTKTIILKLDSLDNDLAELLKAFSQGMNYASQFVFDIGRPVGSGQIQKTTYRHLRNNLNLKSQMACNVARQVSGAYKTLQSQIDKKESEWQRLDFDPTSATFSFERDFTLSRDTLSITTLAGRKRYKLQNYEYAKRYLDGSWKYLASKLCLHKDGAYFFHLVCEKDIPDKNIVDATTFMGVDVGINCLAVASTTDKECKFFAGGEIKNHRNIRSKERRRLQKAGGRYLGTRSSMRTLRKIAGRETRFMTAMNHNVSRKLIQFAMQNEVSVIGMEDLTGIRKRTECKVSKEFRYEHSSWAFRQLQGFVEYKAKEAGIAVIYVNPEFTSQTCPRCNHISRNNRKGISFRCEKCGYETHADRVGAMNIEHRTRDLRYILESQGGLVSPPNATRLFT

SEQ ID NO: 28970 - protein, 419 aa, Aphanocapsa sp.
MLTMNYRYRIYPSAVQQATLFEWMETCRKAYNYALREIKDWCHSRKCRIDRCSIEQEYILPADWKFPSEVQQLNALPQAKQAFPRLGEAPSQVLQQAIKQLHKAWEGFQGRGFGFPRFKKYGQFKSLLFPQFKDNPITAAYLKLPKMELIPINLHRPIPDDCVVKQVRILKKADRWYALLNIQWDVNVPDPLPHGHPIGVDVGLAKFLATSDGVLVKPPKFFKQMPSKLKLLQRRLSRKQKRSRNYEKQRLKVARMHHTIENTRKDFHFKQAHALCDAGDMVFMEDLDFRVMAKGFLGKQMLDGGFGQFRSILQYVCWKRDKFFRVVDARGTSRICPECGAMVKKELSKRMYRCPECGYTTDRDVAIGQVLRNRGLALISTPGLGGIESVCAVGLPRIGATQSRSEAKPRKGTTRKSQE

SEQ ID NO: 28971 - protein, 398 aa, unknown
  TnpB Polypeptide
LYLIESHIIKNNNNLNDICVKTKNLYNKANYIIRQEFINHGNYITVYDMYTIMKDHVEYKDLLSRIARPTLRILNANWKSFFNAMKEWKKNPNRFTGKPNLPKYLPKNSKFTAILVDNAVKTKNLEKEGYIELYKTGIKLPFQNKSKKIIEVQVKPLKTKKYKINIVYKYDEKPLKLDNSKYCSVDLGVNNLMAITSNEKVVKPIIINGRPLKSINQYYNKKLSKLQSKLPKKTFISKRLYLLTEKRNNKINNYLHNASKYLVDFCLKNDLNTIIIGYNKSWKQNVNMGKKNNQNFVQIPFYKLIQMIEYKALKEGLNVKLNEESFTSKCSFIDGEELKKHKEYCGKRVSRGMFKSKENILINADLNASYNILKKVVPEFKWDRGCAVHPELITIGSN

SEQ ID NO: 28972 - protein, 501 aa, Streptomyces sp.
VVYNDALRARETARAAGEAFPKTGDLSRLLITQAKLTEQRAWLGEVSAVVLQQSLRDLDAAYRNFFDGLKGKRPRMGAPRFKSRKDNRQAVRFTANARWKITAGGDLSLPKIGDVRVKWSRSLPSVPSTVTVIKDAAGRYFASFVVETEPVTSAESDRAVGIDLGLGHFAVLSDGTKIDAPRFLRRAEKKLKRAQQALSRKAKGSNNRKKARLKVARAHAQVADARREFHHQLSTRLIRDNQAVAVEDLAVKGLARTRLAKSVHDAGWSAFVTMLEYKAAKFGRGFHRVGRFEPTSQVCSRCGVKDGPKPLHIRVWECRACGAVLDRDINAAVNVAKAAGLAVSACRAAFAWNDTGYDATRTLGAAARHLAGGGSGTHPGRTDGTVRSLLAFFDTQHLAPTFGAEPWQQPQASELAARLDRFHTAWEAGRERAALRELRPYARLLAAAPERIRAGVADRGFVADSAPWLDALSLWGRAFEHGVLDTFIAEAAEGAGVTKTA

SEQ ID NO: 28973 - protein, 439 aa, unknown
  TnpB Polypeptide
LKTIKIPYTCFNNLSNIIRQYSCVLRYSYNRFLENKSEKEIRLLIKSLNGLNLLNSWLIQCAIRDAKAVYARFGGKKVVFGGKLNLIKYLKKKINKTEYSLKRLLPVNIQGEELQKGNRMFKLDILCNNKIVFKLNKNCHIDLLLPKLRKNIKSDLLKLEQINKCIDSKKGHTYTIRFNDKYLFITFKQFESSNKLVLNNKRYIGIDLNPDTIGISIMEDRKVIECREWSLKEIFNKIFSEKLDSSSDRMKLYQNKLKFETFEIAKSIDKLARHYQCKSVFIEDLSFKGSSGIKKSNRKNKNLWKRELFRLNLQKRLGMSGIDLFEVNPAYSSFIGNMQYDWTDAINASIEIGRRGYLYRIKKIKDSFYPTVWLKRSIQHQWKEMGIDLLNTWKDLFLIAKNSKLKYRVSLQDAINNHHCNVFQQNSHHKSNVLNYQFL

SEQ ID NO: 28974 - protein, 439 aa, unknown; identical to SEQ ID NO: 28973
  TnpB Polypeptide

SEQ ID NO: 28975 - protein, 468 aa, Natrialba sp.
VSDRPQRTNEYIAEATTERYRQCVFEWLAAHAPLWNQITYRRRQAYFAEDGDVWNAEYTDLYDQYAPILGKATCQQVARKNSEAWRSHFHLLEKYHDDSDPTVTEKPSPPGYWGNRDDGYELHGLVRNDLYDLDWGEDRSTLEFGVGDVLEEKYDFGYQERVTLEVRGNPQWDGDDSRLELVYDEAANTLRVKHPVRIRPDNLREQRLDAFTHTLDSENTTYTAAIDVGANNTLAIVTSTGETTVYHARPEFERYQALSALIAELQSDLPDDQYTSKRIQRVYDQRGEIRDHSRDAAVKHAADWLLERNVDTVYVGDLTDVLDTHWSAEVNEKTHAFWSHRQLIDRIELTLGDVGISVTQVSERDSSSECPECGSDDVVRDGDEFRCHDCELDAHSDVAGAWNLLQTEIGPMARPAALSAERDGDAPLGREGAYWEWNGHDWTPARFGNQSSPLDQTSVGEPASSQPG

SEQ ID NO: 28976 - protein, 413 aa, Natrialba sp.
MEYSHRHRAYPTETVAEGLEHHLDVHRQLYNHVLWDYENSPEDDKLSEYDQNNKLPEWKRKWPVFSELHSKAAQATVARFHRYLSNLRKKKEKGYKVGRLKRQAPTEYRSVTYSQSGFDLNEKRGHDKYAYVHFSKIGWVKIRYSRPIPDHATIKEVTFKKETTGEWFVSFGLETDDTNLPEKPDVDSLNTSNSVGIDLGILNYIHTSDGKTVDWLDLKDEYERLRREQRKLSRKQKGSNNYEKHRREVAKVKRHIRRKVLDYQHKITTWLVREYDAVFVEDLNVQSMLQGDGNSRNKQDAAWRQFITLLEYKADLHGTHVVQVKERGTTKECASCGVETAKPIWVREHSCPSCGFETDRDANAAMNVLKRGFSELGLGWPEDTPVETVTATDTADFQRVSASHVIETGSLPS

SEQ ID NO: 28977 - protein, 435 aa, Chloroflexi sp.
MKQTIMAKLKLHTTPEQFTALRRTQLAYRDALNYVSRHAFEHGKISNQVRLQKETYAEIRAVYTLPAQMACNVPRQVGATYKTLWKKVKQNAAQRLAGKTKKRYKGLDKAPKYISPTLTYNFTYDYSFKQKQQVSVLTLDGRVIVPYTGYHKHTALLQHGATIGAAKLWYDKPHKQFYLLVSLELEVADPTPQDHSMVVGVDVGTRYLAVTATTTGKTSFHSGKAVRATANHYARLRKRLQRKGTRSATRRLIAISGRERRLKLQTNHRIAKRIIAQHPHSIIGLENLTDIREHTKRRTGKKASQKQRQANAASSTWAFAELHGFVAYKAVLAGSLTVKVDAHFTSQACPKCGFTSQANRPKKGLLFVCQSCHYTLHADLVGARNVALRTLLIRQDWMSTGQLSVAPDVSNDEAKAARLRKYAELRWSSEASPCL

SEQ ID NO: 28978 - protein, 675 aa, Microcystis sp.
  misc_feature (343)..(674): Xaa can be any naturally occurring amino acid
MLVVEAKLKNGTPEQYQKLDEAIRTSQFVRNSCVRYWMDNQGTTRNDLQKLCAVLANNKETPWVNKLNSQARQSAADRAWQSITRFYHNCHAKIPGKKGFPRFKKHSRSVEYKLTGYKLSDNRRKIRFTDGFKAGEFDLWCSQKTLVYYSEQQIRRVRVVRRADGYYCQFLIDVERQEYHKPTGQITGIDLGLKEFYTDAQGNTVENPRYLSKSEKRLKKAQRRLSKRFCKGNKQSKNYHKQRIKVARLHLKVSRQRKNKAIKDALALVQSNDLVVYEALKVRNLVKNRKLAKSISDASWYQFTEWLNYFAKIYRIVCVAVPPHFTSQDCSVCGTRVQKTWLXXXXXXXXXXXXXXXXXXXXXXXXXXXXXXXXXXXXXXXXXXXXXXXXXXXXXXXXXXXXXXXXXXXXXXXXXXXXXXXXXXXXXXXXXXXXXXXXXXXXXXXXXXXXXXXXXXXXXXXXXXXXXXXXXXXXXXXXXXXXXXXXXXXXXXXXXXXXXXXXXXXXXXXXXXXXXXXXXXXXXXXXXXXXXXXXXXXXXXXXXXXXXXXXXXXXXXXXXXXXXXXXXXXXXXXXXXXXXXXXXXXXXXXXXXXXXXXXXXXXXXXXXXXXXXXXXXXXXXXXXXXXXXXXXXXXXXXXXXXXXXXXXXXXXXXXXXXXXXXXXXXXXXXXXXXXH

SEQ ID NO: 28979 - protein, 372 aa, Clostridioides sp.
VVVVEKAYKFRMYPNKKQQELINKTFGCCRFVYNKYLAKRIDVYKNNKETFTYKQCSSDLNNLKKELKWLKEPDKFSLQNALKDLDNAYKKFFKEKVGFPKFKSKKINRFSYKTNFTNGNIMYCGQHIKLPKLGMVKIRDKQVPKGRILNATISKEPSGRYYVSLCCTDVDIEAFENTNNHIGLDLGIKEFCISSCGEFIENPKYLKKSLNKLAKLQRELSRKTIGSLNRNKARLKVARLQEHIANQRNDFLQKLSTKLIKENDIICIEDLQVKNMIKNRRLSRLISDVSWSEFVRQLEYKANWYGRKIVKVGKFFASSQICNKCGYKNEEVKDLNIREWICPSCNETHNRDINASINILKEGLRLITIQNK

SEQ ID NO: 28980 - protein, 391 aa, Lactobacillus sp.
MKGVEKLLKTQVIKLKVNQTMQKHLDALCDYRRYCWNKGLETWQAMYEAHTLNKQDNPRPNERRVRNELVADKADWQYDLSARCLQLAVKDLANAWQNFFDKAQPDWGMPKFKSKKAPRQGFKTDRAKVVNGKLRLDKPRSVSKEEWFDLGSYESLKMTEVKVVSVFKKNGAYYAALPYEEKITSKTKTQQATAIDVNVGHFNYPGGQINVLPARLQKLYQRIKHYQRVLARKRTVNGKRAMQSNNYVKTRAKLQRDYRKVANIQHDLLQKFTTKLIDKYDQIVIEDLAVKEMMMSHVASKGMQRSLFSMFRQILTYKCEWYGKELILAPQTYPSTQRCANCGYIKQGEEKITLQGNQKHGTKHHEYVCYECCYRNDRDENAVLNLLALAK

SEQ ID NO: 28981 - protein, 513 aa, Paraburkholderia sp.
MVFDRLVHDADGGQRRGDVALSVSLADVQALLLTDDCKRRFGALSKSRHALADMARIRRDRCVEWGERTCVLKMPWVRWCHTERHYYAPMRRIQAFKFELMPTGEQQRAMRRFAGSCRFVYNQALALHKERYAQGAKKLGYAALCRELTAWRHSPETQWLSETHSQVLQQTLKDLERAYINFFEKRAAFPRFKKKGQHDRFRYPQGVKLDQAGSRILLPKLGWLRYRSSRKVLGEVRNATVSYSAGKWYVSIQTEREVEQPIPQATSAVGIDMGIVRFATFSDGTFLAPLNSFRKHETALRKAQRAMSRKTKFSSNWKKAKARVQRIHTRIGNARRDYLHKATATISKNHALVCVEDLRVRNMVRSAVGTPEAPGQRVRAKSGLNKRILDQGWYEFRRQLQYKLAWNGGWLVAVPPQHTSRTCPCCGHASAENRRTQAKFACVACGYEGHADVVGAINVLRRGEALFSSEGQDDARFAHVPRGNVLRGKVSGAARPPAVGTHRSGSSVVHPQA

SEQ ID NO: 28982 - protein, 398 aa, Cyanobacterium sp.
MLVIETKLYGNSSQYQKIEEMIRTASFVRNSCIRYWMDNQKVGQYDLSRLCKELAQEFEWAKKLNSMARQASSERAWVSIKRFYDNCKNPSVKKKGFPKFKKGRSVEYKTSGWQLSEDRKSINFRDGFKAGWFKMRGGLDLNYYQLTQIKRVRVIRRADGYYAQFCIDQERIEDIKPSGNAIGLDVGLSHFYTNSNGNKIDNPRYLRKSEKQLKRLQRQLSKKKKGSNTRKKASNKLGRKHLKVSRQRKDWLIKLARCVVKSNDLIAYEKLTVKNMVKNHCLAKSINDASWGTFFDWLEYYGKVMGKVVYAVSPQYTSQECPNCQTVVKKTLSQRTHVCQCGCILDRDEAAAINILAKALRELSRDGQSPTSSLELVNANGHINLCQLSESLSDKLGG

SEQ ID NO: 28983 - protein, 187 aa, Mastigocladus sp.
VITDANQRQNFVHQETTRIISGNSTVVTEKLEVKKMSAKAKKGKRKKQKAGLNKSILDVGMGMIRDALKAKLSDIRGLFVEVPTRKVKPSQTCPNCGHQEKKELCQRTHVCNNCGYTQQRDIASAEVMLLWHSNNLQGLGTSLLDVDDSSSTSRTLKEAGSMKQLGRVKRQKSQLTDGDVETPSSTK

SEQ ID NO: 28984 - protein, 856 aa, Halobacteriales sp.
MWYDYRFRAYPDRTGATAEVERHIDIHRQAYNHTRYEYQTLDTDEDNIGSAYQHQKRLTEWKDEWPVFSEVHSKALQKTVERFYDNLSNLSEKKQNGHKVGWLKWKSPREYQSVTYSQSGFELKNTSGRTATLWLSKIGDIPVRYHRPIPDNATIKEITLKKETTGEWHVTFGLEVEDAALPEKIDVDDLDAEDCVGIDLGVQNYIYTSDGESVDWLDLTDGYERLRREQRSLSRKEHGSNNWEKQRQEVAKVKRRIKRKVEDFQHKLTTWLVKEYDAVFVEDLNVAGMLQSEGNARNKQDAAWRGFIEMLEYKGELYGTHVVQVNPTGTTKKCAECGVETDKPLWVREHSCPSCGFEADRDANASYNVLSRGLQEVGLGQAEVTPVETAAAVEADGGRSSSVPASRVIETGSLGACPRGGSLQHVLRRQLGVEPEDVLDLRVVHVLEGVTGDGAEVDLVGAIEDAERPHPLVEVRQRQVLRDAVAATALDREVDDLVGDARGEHLRHGDLDAGVGLVEFAGGVADAGTGHVKAGLGLGDALAERLLLGQVRAEPRPLADVRLRDLQGALGHPREPHAVGEAAATESHLRDTEPAVLRPDGVLDRDANVAVLHLGVAARVLEQVAPEVVDVAHEFDAVRVRRDEDDGGALVRVGVHVGAGHHQQEVGIVAVRAPPLVAVDDPLVAVLVSGRPEHLRVRAGTLHRLGHRERRLHLAGDQRAEPPLLLLLGPDHLEGVHVPLLRGVRADGLRTDERSAHLLEGGQHVAEVQALTAELLGHLGREQVAFLRLLPEVGQYVVADVVAGAERLALARDDDLVHERLDAARHLPRLLGVVILHVPHLGGLGLKLLAEIPGNS

SEQ ID NO: 28985 - protein, 533 aa, Agathobaculum sp.
MFMKEVQRMARQCKSIEEKHRFVLTLPLYCEKWQRDRMDTIFKVANAMKNNLIAFEKRQLHNFVRRKDYRELQKALAAAYKAKDEERITKLCEQRSPLIADAGFTSSAFERRINKYRLHYKSKGKTSCVVPSHVAQKLAASVWDMFEDFFYGSGKAVSFSKWTEFATISGKNAGAGIIYHKGDSYVRINGMKLQILWNKHDRYGYETEAMKRELRFCNITRRWYANGWKYFVQFVLVGVPPTKITPETGEELHPLGKGRVGHDIGTQTLASVGDKNAQLVELASGIQKIEDQLCRINRAMDRSRKATNPQMFDARGRVIPKDKLPQECLTCYGARRWNKSKRYLRLESERRALYRQQADMRLQKHRELANQLLAFGDEHYIEEMRFRALAKKAKEAKQNKDGKNISRKRFGKSIANKAPAMMVNILTSKVEQAGGTFQKVDTFKMKASQYNHLTQTYTKKALSKRWNVMPDGKRIQRDLYSAFLIKNVNKSLTKPDNRRCKPGYPAFVKLHDKEIERLSSMFTPISMGIRHAS

SEQ ID NO: 28986 - protein, 378 aa, unknown
  TnpB Polypeptide
MRHTPALKTYKYRIYPTDAQILFFNKTFGCCRLVWNKMLDEKLRTYERKKRLQRITLSKYKEEFPFLKEVDELALCNIQPQLDKTFKDHFRNRRRFKLPKFKKKKGKQSYTTCNVYNSIRVDFEKGLLYLPKPREGIKIELDRKFDGEIKYVTISKTKDGEYYAYILVETENPKNKFVEPRSRACGIASGLEYFATITNDFGSYKIKNPKYLRREEKRLRRLQRDFSRKQKGSKNQEKAKLRLAKHHTYITNARNDFLHKLSKAIIDENQVVVIEDIHAKGLLKSRLSKSVADNEWSTFVSYLKHKAERYGRTFMQVDQILPSSKICLCCGYKNENLILYERVWCCPTCGAIHDRDVNASIKLYLVGLERHERAVSGE

SEQ ID NO: 28987 - protein, 402 aa, unknown
  TnpB Polypeptide
MQGKLPIKAYKYRIYPTDAQVVFFAKTFGCCRFVWNKMLEEKLQAYKKKERIPQPTPAKYKKEFPFLKEVDCFALVAVQNHLEDAFHNHFKNRKLFKLPKFKKKREKQSYTTYNTNNSIRVDFEKSLLYLPKLRKGVKIELHRRFDGKIKSVTVSRTHDGKYYASILVETDNPRNNVVESKSKACGIDLGLEHFVTVTNDFGSYKVEHPKYLRRGEERLKRLQKSFSRKQKGSKNSEKARLRLARQHAYISNARNDFLHKLSKAIIDENQVVVVEDINVKGLLKTRLAKSISDSGWSKFLSYLKYKAEWYGRTFIQVDCFYPSSKLCHRCGYKNEDLALHDRTWCCPACGETHDRDVNASINLYFVGLGRHEGMQALVDDRSPNGLPQKPSCDETGSSTTYG

SEQ ID NO: 28988 - protein, 428 aa, unknown
  TnpB Polypeptide
VGDEWQSLNTIRDNKTVVTETLRTFKYRLYPNEEQETAMDSQLRTLCSLYNLLRSEKREKHSSLNSLRKLALEHRGNVHSQAAQNVASRVNSAFKNYFEGRAKFPKPKKEEKYKSMTYPQSGFRLEGKIVKRGKRTELVGKLYISKVGHVRIFLHRPLEGKVKTLTVKREADGWHACFSCEADEPQKKPLWQIPIERVAGGDLGLKKFLTLADGSSVDAPQFLRRMENKIKRLQKAFSKAKKDSRNRQRLGIRLARLHLHVARQRSNEQNQVIALLYANADVLGLEKLQVENMLKNHCLAKNIADAAWSQFVGKAEFKSRVLGKYFIPVDPWGTSQFCWRCLSWAPKQLGDRTHVCPVCGEALPRDQNSAKLVETLVLSYAHGRWVNTPVEQKPLPSLRGQVSVVKREAPTLRPGRTSHCEMNYVCLW

SEQ ID NO: 28989 - protein, 518 aa, unknown
  TnpB Polypeptide
MVGNVDMDSTKSFIGTVKVPVHYLTTKKKISILDRVTARQTYAVRLWCEIIRNNKLKSVSDCSPFEPTVEDQTELTAGFVQQARDKALWMWRSYGQQHEKWKWMLNKAKVGSKWHQKLLKREPSPPCTSKRSLLEKISTRFDRRTGQVQKANLALADGVIHVSTLKKGETIDVLLNPSEYHENLLDAGQIKGFEIVKRNGWYYVHVTCVFEVQTRPVQRFVGVDLGICRSASTVSINPADPKPQDFHIFKDGKRRRLQELNDRVSHLKRLEKWAALKKLRNKRRNVAEDYDWKLAKNVAKSCADAYVFLGDPEYIRYHHFKGNGDRTSRKLLQHWSFNRQTRCIQHECAKLGVLSEALNEWGTSSRCHRCGAKVERPKRSRVVCHECGLQDDAERNSCVNIAWRGMSRLGIKSPADLTILNGAGATVELARTRDDSAEKVDEPRSPTLLGRGSSQKTSVNTSVSSSKSLYLMCVYLLVKEHVKTNGKAREANQKNGRFCKGKNDWRSHGTRLASRLSS

SEQ ID NO: 28990 - protein, 396 aa, unknown
  TnpB Polypeptide
MFKAYKYRIYPTKDQKVLLDKHFGACRFIYNLALETKQSAYIGNKITLSAFDLMKQMTELKQDLSWLKEVNAQALQNSIVNMDKAYTQFFKGSAKYPNFKKKNGKQSFGCPQSTIVDFDHNKIYIINFREGIKCIFSRKFKGDIKTTTITKVPSGKYFVSILVENKIELPKKKPIKESTSIGLDLGIKSFIVTSDGLKVDNPKYLKNNIFRLKKLQRKLSKKQKGSKNRLKAKHNVALLHEKITNQRKDFLHKLSSKLISENQTICIEDLNVSGMIKNHNLAQSIADSSWGMFIQFLKYKSEWYGKNILTIGRFDPSSKMCSNCGTVNKELTLDQREWTCSNCNTEHDRDHNAAKNIKTFALKKVRGGTPNLKPVENMRVRNSMKQEYLIEGSNID

SEQ ID NO: 28991 - protein, 410 aa, unknown
  TnpB Polypeptide
LEYRFPEWFITTEKLFNEVTAFYFGIIKERAQILELTNKKALTKLERLTHSTKDNPAPPFPLKWDIPAMFRRACINTAIGAARSFFSKLKKWKDAKAKAEAKEKKLKYRPPVPPREWQRNTLFYAGQYKGYTGKSIMLKLFDGNTWRWVKYHLTGRRVQDGWKIGCPHAVIKKNRLELHFPVEKEKPVVKAVAEQVKDPSLKICAVGLNISGRPAVCGIFKSDGTQVATRFIRGGDSLSGRRKRLLGIIATKLSLTGSLNKDEQDNKALRNRIHNIDDNEAHRVSRRILDFALEHGAGIIVFEYLNNFKPEQGKFSRRASSKRSYWLWGRISHYTKYKAWEYGIIISRVNPGNTGRLCADCGAEIARQGDNKEHYRPVAPLFTCKCGKKGSVALNAVRNIGKRFFLRYAV

SEQ ID NO: 28992 - protein, 275 aa, Butyrivibrio sp.
MKECAPTLQKRGKQWFLDFAFEQETKLVATKVMDQVILAVDLGINSSCTCSVMRSDGTVLGRRFLHLPREYDCLEHKIGHIKRAQRHGSYSTPNLWAYARGVNDDIAVKTANFIIEHALLYDVDCIVFEHLDLGKKKRGSHKQKLSLWKARYVQQMVTHKAHANCIHISTINARGTSFLAYDGSGRVLRGHDSERCNSYSVCEFSNGKIYNCDLNATYNIGARYFVRELLKSLPARERQRIEAKVPGCAKISTCTLATLISLNGELCSAERSIAV

SEQ ID NO: 28993 - protein, 325 aa, unknown
  TnpB Polypeptide
MPPVREVILKQRRYDELIEPGKDGIERELAEVRSATKLTKPDYHLRVHGHQVGAESLNKFSREGNTASVWSIDGRLRSGFVCHNPRYLPHIKGEADLVYRKGKFFLFQTVEIPEENIKDVEEFIGVDFGVNNIATLSDGIQYNSKQLDKVRNRYSRTRQSLQSKGTSGGRKCLKRLKGREARFATVTNHAIAKQVVEKAKSLNMGIALEDLTGIRERTKVRKVQRRKHHSWAFAQLRFFLQYKARLAGIPFVMVNPRYTSQTCNICKMIGHRKGPSFSCPNCGNISDSDVNAAKNIAQLGIAVTDPERGSMICSIPLMPCQLAAG

SEQ ID NO: 28994 - protein, 407 aa, unknown
  TnpB Polypeptide
VQLVEQTIINQNDPRYAAIDAAAFASKHLWNAANYLVRQSFIHEHVYLDNVKVYHLIKNHEAYKALPAKVSNQVLIQLHKAWVAFFEAMEAWREDPSKFLGRPKLPGYKDKAKGRNLLVYEKGALSKRALKRGKLAPSGLSIEVPTAQEAVKQARIVPRSRFYVVEVIYEKAIEQAEVNPEYYAGIDIGMHILAALTSNKPGFQSVLVNGRPLKSINQFYNKRRAQLQKKLGKTGTTKRMERLTTKRNRRINHYMHSASRYIIDLLVKEGIGTLVIGKNDAWKQEANMGKRNNQNFVSIPHARFIAMLTYKAQLVGIRVQVTEESYTSKASFLDLDPLPVRNPDDNAKHTFSGKRVRRGLYRASGGRYIHADCNGSGNIIRKVAPDAFGPKGVEDFAVHPVRITLTK

SEQ ID NO: 28995 - protein, 254 aa, Lentzea sp.
VSIWTTAGRVKGIGFTGSPDQLTTVRERRRGESDLVCDNGMWFLLATCEIPERERFEPVDWIGVDRGIVNLATTSDGHNFQGRRLSRYRRWHARKRAELNSRNTKSAKRRLKRRAKKESRHATCVNHKISKEIVAVAERTGRGVAIEELGGIRERVRLNRRQRATLSSWPFHRLGAFMAYKARRAGVPFQAVDARHTSQMCPRCRHTAKNNRPTRDVFLCRRCGLAGPADVVAAVNVRTRARSAWVFATMPAPL

SEQ ID NO: 28996 - protein, 372 aa, Nonomuraea sp.
MAQIVKRAYKYRFYPTLQQAEELARTFGRVRLVYNKALEERTRAYTLQGRRVSYAESSVESSAALTAWKRSGEYDFLSEVSSVPLRQALRHLQAAFANFFAKRAKYPTFKSRKRSRASAGYTRSAFRWRDGALTLAKMDAPLAIAWSRHLPEGAEPSTVTVSKDAAGRWFVSLLVEEEISPLPPVADNVGIDAGITALATLSTGERIVNPRHERRDRRKPAKAQRALARKEKGSANRAKARLQVARAHVRITDRRRDHLHKVTTRLVHENQVIAVEDLTVRNMVKNHSLARAVSDASWREMRSMLEYKAAWYGRTLVAVDRWFPSGKLCSACGALQDTMPLHARAWQCACGAAHDRDVNAAKNVLAAGPAES

SEQ ID NO: 28997 - protein, 384 aa, unknown
  TnpB Polypeptide
MHRAFKFRLFTNSNQERELGVMLETHRRLYNLCLEQRRDLYRQHGHSVRYIDQSAEFKDLRSDNAYFARINFSSAQATMRRLDKSFVAFFRRVKAGQTPGYPRFKASDRFDSIEFPNYGDGIRLNGNRLRVQHVGVIRCKVHRPVEGAVKTATLKREGGKWFVILSCDLGDIWVEPSTLPAVGIDVGLENFLTTSDGEVVENPRFLKKELPALRRAQRAVSRKKKGGANRRKAVKGVRVIHAHVANQRREHHHKTALNLIRCYGLIAVESLNILGMVRNHRLSQAIADAAWGGFLTVLGHKAERAGVTVMAVNAWGTSQECSGCGEDVHKELRVRQHVCPHCGLSLHRDENAARNILTRALQARMGPVGVNGESPVAQEAVCFS

SEQ ID NO: 28998 - protein, 394 aa, unknown
  TnpB Polypeptide
MIRTCKVKLGRAPKQEAKLTYVLGLCCDLYNAALQQRRDAWAKQKVSLSYYAQTKELTQLRADDEEYRRLPAQMTRMTSLYRVDRAFQGFCGRCRRGENPGFPRFRSRDRFSTLMFSTQDWRIKGKSLILKNDADPIVLQMRNTIHHEGQIKGLRVVRSATRWWAHFLVDVGPTPAVKKSDHGVGIDVGLRTFATLSDGNVVEHPRFLKQSLEQLKSVQQELSRKKRGSKNRAKAKLVVARVHEKIANRRRDFVHQTVSSLVKKYDGFALEKLDVCAMTSTERKVEGLDKKQSRGLRRGIMDSGWSLFGAHLASKAEEAGLPVVHVDPKGTSQRCSACGTIVRKTLRDRVHECFACGLVLDRDENAARNIYDLGLRSASGSAATASCAEGAEVL

SEQ ID NO: 28999 - protein, 353 aa, Actinobacteria sp.
VRLSVAGGQPELWLRLGREIPYPTGQLRSVTLVCEAGRLFLDVTSAVPVAVHDIDPGRVAGVDVGIIHPFAAASGDAALFVSGRAIRAEERLHLADTKARASHMGRKAPRRGQRGSRRWRKLRAAQRRAETKHRRRVRLAHHQAAKSVVTWALERRVGTLAIGDLAGITTRSLGRHQNLRLRQWRRTHLVGAMRDKAQAAGIQVFKVDERATSSTCPQCGSRTTKPRGRNFACPSCGHQEHRDIVGARNIAAHSGGTTRTPVRVTHRRAGHVPARRDRRRHLWDQRRSSPAPGRPVTTGESLTGEPNRSPRFGDGSRPYRWSPGEDHASSLTTSATPARRCTRAMPRVVPRCR

SEQ ID NO: 29000 - protein, 373 aa, Deinococcus sp.
MITIECKVYGSVQQFSRVDEAIRTVQFIRNKCLRLWMDHQDSETGIGRNELARHTAELAQSYGFVRHLNSSARQASAERTWTAISRFYQSRKANSPIRYPRFQKDNRSMEYRKSGWKLEARHSRITFTDGCGIGTLRLRGGHNLTLLQPDYINRVRLLRRADGYYLQLLVKRDAPQPLPPAHRQVGLDVGLRHFLVDSEGQAVANPRHHKRSLDRLKRKQRQLARMKKGSQNRKKAAQKLSRLYLKTSRQRKDFVVKTARCVVKSNDLIAVEQLQVRNLLKNHRLARSIQDVGWRQFMQWLSYFARKMGRTMVFVPAKHTTSLCSGCGALVPKSLRERVHRCSCGLVMDRDHNAARNILKFALHTVGHTEIQA

SEQ ID NO: 29001 - protein, 445 aa, Lactobacillus sp.
MKRTSSLKYHFGIKLRFYPSDKQKKMIKQNYDAQRFVYNQYVGAGRLIYHIKNVSKVAQLNSSMPFMMRSMTKYEVDQAQTLLETQELIAKHRNIRDKYEFLRAKEIDSLAIANAIQNYRKAWKSYHQIGYGIPTFHKKRSDWSYQTNCTYQGTKEAYLDNGSVRFIDSKHIKLPKLGNVRISGLCPIIKDRLLNHVATRISTVSSKKTADDQFYLSMQLGSDISFTKKYAKTQSQIGIDLNLDNFLTTSNGAMVANPRFYRKSQRRLVQAQRVLSRRQRRAKKEGRSLREAKNYQKQRLVVAKLHDKIRRQRQDFLHVLSTVLIKNHDLVVAEELRSKNLLKNHALSQSISDAGWRTFLTMLEYKADLYGKEFIMIDPKYTTQRCHHCGSIMGQNGYDKLTLKDREWTCPVCHKEHIRDWNAAVNILEKGQGIWSNHTRKKKAA

SEQ ID NO: 29002 - protein, 355 aa, unknown
  TnpB Polypeptide
VNTINTKEGDNLKITMQIKLQPTKEEMALLDFTMQEYISLVNDILDYAIASDIMPKLTSKTMIAPLPSALKAQCYVDAKSIYNKTLKYKSRLPALKKPVAIWNNQNYTISDGYVAFPLFVNNKVTKTKIAAIVPRRVLDIAATHKLGTLRITKKSDKYIAQIAYEIAESAVKTDGNVMGIDLGIKCPAVAVTSSGKTKFYGNGRQNKQKRRKFAAKRKKLGKAKKLKAIKKSRNKEQRWMTDQDHKISRAIVNNAVANGVKIIKLEKLSGIRQSARTSRKNNHSLHNWSFYRLAKFIEYKAALAGIEVVYVNPAYTSQTCPCCGKRNHANDRNYVCSCGYHTHRDRLGAVNILTA

SEQ ID NO: 29003 - protein, 386 aa, unknown
  TnpB Polypeptide
MFPRAYNVRLYPNKQQEVLLGKTFGCCRKVYNCMLEVRKKSYEATGKQCRSKPTDFYGEFPFLKEVDSNALTAEVLTLNTAFKNFFERKDDGVGFPQFKAKHRDKDSYTSYRTKDNIRVEGRKLRLPKVGFVPFRNYEEIDWSVMDIKHVTVSRSRAGKYYASILVEETVPKALPTTNSEIGIDLGLKEFCVTSDGESVANPRFLKESETRIADLQRAFSKKQKGSKRREALRVRIAREHEKVANRRKDFLDKLSTRLLRENQTVAVEDLDVREVAEGDHAKSEHDTAWRMFLNKLQYKAEWYGRTIVRVGRWFPSSQLCHCCEFKNTLTKDLNVRSWTCPQCGTSHDRDVNAAINILTEGKRLFAAGTAVKGAGNIDTQREAQRL

SEQ ID NO: 29004 - protein, 458 aa, unknown
  TnpB Polypeptide
MGFVCPVDADSHNIASTGHYLYMIVRSTRHTLKFANTGKKEAISMLLAEWRRVMQLFCDDIWSNGYTWLEDDGIHEFNPDKYKYELPKYLDYNRFKVDTWLSARMLSSLVTQLSGQLRAICSKNAARLDVFDKEAGKGRYLEHLWETIESKKPSRPDLSDAGIEISSKCAEFSPTPNGEFYGFLRIKSTGLPIFSVPVCQQKHLSKYTDGTWTRCNGYLIDEYGVQLRWEKDVHIKTDGIKVGADQGLLTCVSLSDGQTTTDMLVKAPKKNEPDRVIKVNLDTITDKLARKQKGSKAFGRAQTERKNYINYAVKRLDFSNIKEIGLEKITNINYGRNTSRKMKHWSNPEIVTRLAQVAEEFGVRINLQSNAYRSQRCSGCGHVLKKARKGKLYICPICGLVMDADINAAKNHAIDLPAIPHSNEFSRLAKTEGFFWLPNGLFKMDGSELRVPDTSKSQ

SEQ ID NO: 29005 - protein, 216 aa, Nostoc sp.
ISLEDTTVPSIKPDFNPDLITGIDLGLKEFLTTSDGNVVPIPQHYRKSQKRLRVIQKRISRRKKGSNRRKKAIKQVAKQHKKVADKRKDFHFKTASNLLNKYDVVVHEDLNVKGLSRSMLARSVHDAGWSSFLSILTTKAENAGLLVIAVNPSGTSQDCSRCGVKVPKKLHERWHDCPNCKCSLDRDHNAALNIKNRADGHAVLKAQRLLSNSRIG

SEQ ID NO: 29006 - protein, 411 aa, Planktothrix sp.
MKARYRYRCYPTPSQKLALAKLFGCVRVVWNDTLAFCISEYKGGKKKPKNAELQKQFITQAKKLEEREWLSEVSAIPLQQSLNNLEQAYQNFFNSCKGTRKGQRVKPPKFKKRKSQQSAHFTKLGFSFKSEKVYLAKIGKIDVVWSRQLPSEPSSVTIIKDSADRYFLSFVVEIQPEILPQSENSVGIDLGITTFATLSNGQKIKAPKPLKQRIKELRKFSKKLSRRTKGSKRYEKARKRLAKLHAKVSDTRTDFLHKLSTQIVRENQTIVLEDLNVSGMVKNRKLSRAISDLGWRSFRTFLEAKSEKYGRDFRVIDRWEPTSKTCSCCGFKIGKLDLSVRDWICLNCGTSHDRDVNAAINIKACTEQGRSVAGGLSETLNGRGEKVRLSKESTSRRSVNPPAFQQLSPEP

SEQ ID NO: 29007 - protein, 487 aa, Bifidobacterium sp.
MSQKVRINGVRHSGASVFLGVDHCGNPCWTRNPERVMVWLCDGWRTKFNQRREQRTRSIPVKNEAGDIIDWIKEPLGGPDVPGLLSDREARLQCSWMTAVPSSILATTNRVEGTEWFTGLKRKKTAGGRVPGFKSRHRGLGFVCWYHPSGNSYNAVFHKTGRRSGVVVITGMNPTRWVKPGEKAHWRIAIHVRVGQSIRPYTSIHVDWTHKSLVFTNMPLPLPRVGNGMVGLDRGCAHALASSDGTFMDMPKPSKAELKRLKYLQRRMTRQDRINEARGGRTAKFASKRRQKTLSQFNALQGRIVRRRNDWIEKTTTRLAQENILVAMEDLDVRAMTRKPKPKPDPAKPGQYLHNGAKAKAGLDRSILSNCWGRVMIRLQDKMDANGGRLVIVPAAYTSQTCHKCGHVAKENRESQAVFHCVKCGYEANADVNAAENILSRALSQTGGGTASDVEEPRWRTDEASTPSFPQAGSSFGVRSVKGIPRL

SEQ ID NO: 29008 - protein, 516 aa, Bifidobacterium sp.
MSQKVRIDGVKHVGASVFLGVDHCGNPCWTRNPERVMVWLCDGWRTRFNQRREQRPHNVPVKDDATGEVVDWLKEPLGGPNVAELLPDKEARLRCSWMAAVPSPILASTNKVESSEWFAGLKRKKTAGGRVPGFKSRHRGLGFVCWRNASKTGNALFHQTGRKSGVVVITGMNPTRWRKPGERLHWRIVIHVRVSQPIRPYTSVHVNWTHKSLTFTNMPLPLPRIGDGVIGIDRGCVHTLASSDGIFMDMPKPSKAELKRLKYLQRKMARQDRVNEARGGRTAKFASKRRQKTLSQFNALQGRIVRHRNDWIEKTTTRLARENILVAMEDLDVQAMTRRPKPRPDPAKPGQYLHNGAKAKAGLNRSILGNNWSRLMTRLKDKMDANGGNLVIVPAAYTSQTCHKCGHVAKENRDSQAVFRCVECGYMANADINAAMNILSRALDKTGGGTASDVEEPRWRSREASTPSFPQAGSSFGVRLVKGIPRLQPWGGCQGTAGNREWNPVARRIRVRVERA

SEQ ID NO: 29009 - protein, 596 aa, unknown
  TnpB Polypeptide
MYQVKLQSKLLDALITRSEHGLILVRLMLLDLKIIPKDFMISHHSFQTSLIALKILTLKNKSVIVESLPNIKKMILKDKLILCKKNTQMLLLSKILVLVLTGNVKVLSPCYNKLKITKWEKLLLHIEIDFADSLSNCLNKYSDYTKLNSWFSIREKPNKLVNQNYAKTFYQLCKFMHVEKWVKEDIQRLTNDLKNMKQINKIAKCRKILIKPTKLQIKQLNNFINDCRYTYNKGIELFNSDNSIYSFFNLRNYLVTKKTKKELKHIVNIPDEIFNTPKHMRSEEIKVLATNIKSAFSNLKNKNITHFKMRFKSKKTSPKILNCEHHASSIKILNDKQYLKLTNIQNPILINTKELINLENDFKIQCSKNNKWYLLVTYYDDIKENKQYNICALDPGLRKFMTGIDINANKFKIGDGIMQILSKLKIKISNLQSSLHKLNNKRKNLNSKKLYNKWNKCKQMLITSREKFKFKIKELHYQTCNYLCKKYDVIILPNFGVKEMIAKSSKWLRKSILQLSFCEFKERLKNKCKEYNKTFILTEEPYSSKTCSLCENYNFNISKEEQITCNFCKKNYNRDENGALNILKNTLNGVFKSKII

SEQ ID NO: 29010 - protein, 348 aa, unknown
  TnpB Polypeptide
MILTYKIKHGQNYSHELMLAKKVADFALVHKKISSKDVKHIGLKSVISNQILRKYSKNKKLKRINKVKLTIPNQGIRIKQDKIYCSCLKLLMPITFKNDFEKINQIELGETFAYISVSYKEPKLIKPRTFIGVDRNTTHHVLVASNLKTGKILKLGKQCNHIHNKYKAIRKNLQKKGKLKKVKSIKNRESRIVKDINHKISKKLVCYAKESKAGIVLEDLKQIRKTAKTRRKQRYSLNSWSFYQLQMMIEYKSKKLGIPVFYVEPQYTSQRCSRCGHIERANRIGNLFHCKQCEIVEDSGVNAGFNIAHLHQQGIPRFNKERDLLKGNTDIPKEALFNPKTTLEPNAF

SEQ ID NO: 29011 - protein, 430 aa, Okeania sp.
MAKIVEMYLTQKNKIRNLSIQEFKALRQLCRLSKNMYNVALYSVRQFYFAEGGYLRYESNYHHCKDNENYQLLQTDIAQQTLKVVDRSFRSFFNLIKAANERLYRFEQIRMPRYLNKEGYFPLIIPRIIVKDGYFKIPMSRKFKAEYGSVKIPFPERLIDKNLKEVRVIPRYDARFFEVEFITEVEPQPAKKTDKALAIDLGLNNLATCVSNTGSSFILDGRKLKSINQWYNKENARLQSLKDKQGIKGLTKKQVNITVNRNNKVRDYLNKAVRYLINWCSQNQISTIVVGVNPGMKKDINLGKKTNQKFVQISHYSLRLKLKAMCERYGLTYLEQEESYTSKASFLDRDNIPVYHAHNSIEYSFSGKRIKRGLYKTKQNKLINADCNGAANIGLKSKLNGFTPDRLEASLAMPLRVKFDVDLSRQIYSA

SEQ ID NO: 29012 - protein, 628 aa, unknown
  TnpB Polypeptide
VAKTQTLSFPIRLPNAMQAEALRLLDASSIAINEIITDLWPQLDLFVADRSGPAWKQVERHLLRRSGHGNRQERCEMEQAGRLLRAQATRKQVFHTVLPLLSDGLIRAAQGEQPAKKDHREIKEQVRTLRAHMQDAGEDADAFMAMTNVLEQACNRYLQTDEFPTTYEELQSAPLLSVGQLTFAGDDGMRAGQTYRARIEMSYCCDIQTRQEQCRASLWLKLRSPDALGKWAWGAWSEEIPLPPTVFTYLWQEEAATQAPTLREIRSDDGSRVVVLDLLLEVPAKYVSPLEQETRVLGFDWGVRSLITASILEMGDADEPYRQVSRPVFLDTGGIDGRQARLRREIDRLKACRDRYAQLVKQALTAKDQHEIPLPAHFPGWQKRVSEYEARIKACWKTYERRNRELAHLASNLLILLALLSDCRLICGENLTTLKTEGRGRGVRGRFRNWRNNTTVRGELWRTLKYKCHLLGIRARQVEPRGTTHTCPHCHQPAKTFTSSAPSDRKKARSWGPWLCCSNPDCLWNGARDYAASINIARLGMAFLITYHETQRYVAYRMADSSVKPALYSSAGAMLLLPSQGITPRPHEGKHIYYAGWSYSTSLRTSRPQNLLAVLSTSQLRKYVLQRA

SEQ ID NO: 29013 - protein, 371 aa, unknown
  TnpB Polypeptide
MSKKTFRFQLYPTAAQRDVLDGQLRICCELYNAALQERREAWRMARVSVRFAAQSAQLPAIKVERPDVAAVYSQVLQDVLHRVDKAFSAFFGRVRRGKKAGFPRFRASRRFDSLTYPQLGFAVVGRHLNLSKVGAVKIKLHRPIEGTVKTLTVKREAGKWVASFSVEVEPAPLPASVESIGVDVGLTHFATLSDGTQIANPRHARRAEAQMRRAQRRIARRRRGSAGRREAVRLLQVAQARVRHQRADVHHKLSRRLVDRYGFIAVEDLNIKGLASGMLAKSVHDASWSSFIEKLAYKAASAGRVLVKVDPRGTSQTCPCGAPVPKTLSQRWHQCSACGLSLGRDHVSAQLVLSRGLRDQDSTWASTPCVS

SEQ ID NO: 29014 - protein, 520 aa, unknown
  TnpB Polypeptide
VARQTSSSFVTEVPLVTSSSDLAVLASRLEAGRQLYNATLSEAVKRLSLLRNSNLFTEAKSVPKSQKTARKEAFQKAKTAVRYTDFDLQAFANQTAMKSVWIKKHLDAQAIQKVATRAFKAIERMLFGNALKVRFKGKGQFASVEGKTNKQGIRWTGQGVEWLGLKLAAMITNDPVIQHGLTAKVKYVRLVRRVLNQKTYWFAQLVCEGAAYQKQQNSLGVGLVGIDLGVSTVAIVGDEETIWTPFAEELTRNQKQIRRIQRKMDRQRCAGNPDNFNPSGTAIKGKKRWNNSKRYKQTAAKKRELERKQAAHRKSSHGKLVNRTLKLGKNILAEKVSVKGWQKLFGRSIGFKAPSSFQSELKRKAENAGGSVLLFSTRKTALSQTCLCGQREKKPLSQRVHDCECLLGESSPSNTSRSTCGLRMQRDILSAYLSRYVDPSTELLSIELARDSWLGMEQSLLEGWQHGSNQSVRTEASPKSPSDGSERISNNLIGVGESEGESLDEIRTTELEPPRLQAWG

SEQ ID NO: 29015 - protein, 684 aa, unknown
  TnpB Polypeptide
MAKILNYKYEIFPTKPQREQLYKILRQTRLQWNRAVTIRKKLKRALSSGQFEYVIKTCLSAGRSNTQGNRRKAIARFGSNFPELSFDQAASLYDIRNLIGNVLGEIDARCLDLAFFTEAIRSKHREELTARNKAKQEGKGKLPPLRTYWQLLRSINEYSGYSAKKFIDNSFEPSKDMALGSVRARVSGYSTSRWDTAIKPTNQQRAYGAKGEPQYKRRGESFTDQTQNTSVSDLVRERRRGRGNQVKINALHKGNEWVNAAYHRPIPEDGNIKQLTVLERCGHFFAVFSVEVPEHTWAIVPMNAGWYAGIDPGAKTALTIGLLNTKTNETRHVAIHYGPIEKNMGKLQKLSEELSCKKGPRCKRTAEEIEEALSAFSRKRSIQRLSEEDRETVIVREKCRLERTMIFQETSKRWTKKVREVKQVQYTIANQRADVLHKTSRALAEGCDLIGIGHWEPMREVSYRTKHKELKKKVQAGIPGAKEDLEELEQAKTKQGPKGVTKQRRGGRDRSIATLRSLVEEKAQRAGTVVLPDVNEAYSTQACCNCGSLSGPTGVQNLDIREWKCEDCGTNHMRDLNSAFNILKKTICEYKATAQVAASETERMATRTESQGAMAQSGSFTAPGFHATETFGRGGSLFYGHAEAVQPFLWEGEIPRSLKSLYEMGFAGALSQKSLYESDLNSPP

SEQ ID NO: 29016 - protein, 358 aa, Nanoarchaeota sp.
MKVRATAKIKISTEVEIIKTLKVYHKALQFCVDQAWKRKIKNNIKLHPFVYKKLKSKGLQSQLCIACIKQACGIVKRAKTKPIIQRASIRYNFPRSVSMKNNLLSISTIKGRIKIPFSIPDCYRKYLNWNIRESLLRIDKRGRCFFLFTFSKDVNAKSSNFHKGVLGIDIGVNNIAVTSDRQFFGKNIKQLRIKKEKLVSELQAKGTKSAKRKLIRLSGRWKLFMTWTNHNISKKIVSKSKGIIVMEDLTHIRRNAKYIKWVHKWAFRQLQSFIEYKALRKGIRIVYVNPYKTSKECSVCHNELTSRHSGFFQCLVCRHSLNSDLNASYNIAQRYKRTMCLGAVTHPNVSNNEAETSF

SEQ ID NO: 29017 - protein, 394 aa, unknown
  TnpB Polypeptide
MRSFRYRLRPTRAQTVVLDRTLTTCRHTYNDALAERITAYKNNGTSLSKYDQHKGLTNHKTEYQQLVYVQVLREVLNRLDQAYANFFRRVKAKRDGKKIKAGFPRFKSERRFNSFCYTQLGFRLADNNKRVCLSKIGAIRLVYHRPVEGIIKTCRVLRDVDQWFVIFVCDTESKLVAKSAKPTVGVDVGIKSLAVLSTGEAIDNPRHWKNAATNLAKQQRRLARKKRGSKNRRKQVVRVARCSRKIRRQRDDFLHKLSRRLVSDFGCVVFEKLNIAGMMRNHCLAKHIGDAAWGKLIQFTTYKAANAGAEVSLVSPNGTSQMCSGCGAKVPKALAERTHRCKCGLTMGRDHNAAINIKARGGTPRSYACGDSTTTREYCALGQVESRKQEIHHG

SEQ ID NO: 29018 - protein, 392 aa, Bacterium sp.
MNGVNLLSNYEYCFVMLKTFRYRLYPTKAQQTKINSTLESLRWVYNETLAVRKNSWEQEHKSISLFKTNKLLTCWKKEHLELNSIFSQVLQDAQVRVDLAFKSFFRRVKAGQQEAGFPRFKGHGRYDSLTYTQFGFKLKGNILSLAKIGDIKIKLHRPVEGKMRRVTVRKASTGKMYVSFIVEVENKPLSFKDGAVVGVDVGLESFATLSNGEKIPNPRFFRNEEAELAKAQRKMSAEKKGSIVWRRRLGVVQRVHERIGNKRNNFVHQESRKLVDRFGVIAFENLNVKGMMQNGNLAKSIGDAGWSMFVNTARYKAEEAGSKIVLVNPNGTSQICSRCGLVVKKDLSERTHRCECGLEIDRDLNAAINILRLGLQSLGLNTVEAHDLQSWE

SEQ ID NO: 29019 - protein, 413 aa, Moorea sp.
MEFKAVLKKPQEWAINEAIRTARFVRNKVLRYWMDNRGVGKKELYRYNTQLRDEFEFVKNLNSHACQASVENVERAIKRFFDNCKKKVPGKKGYPKFKKHSRSVEYKQSGWKLSPDKKSIKFTDKKGIGKVKLKGTWDLWCFDQKLIKRVRVVQRADGYYVQFCVKIDNSEQLEATGYTIGLDVGLKDFYTDSDGYSEPNPRFYRKGEKRLKFHQRRVSRKKKGSTNRKKAINRLGRTHLKISRQREEHAKILARCVIRSNDLVAYEDLRVKNLVKNHCLAKSINDAGWYKFREWLEHFGTKFGRITVAVNPAYTSQNCSSCGEVVKKSLSTRTHVCKCGCQLDRDHNAAINILTRALGTVGHTGTYQNARGDSTSTLLGSDLVEQVGSLNRESPGISAMGSVKLVYISFVQK

SEQ ID NO: 29020 - protein, 264 aa, Moorea sp.
MIVREAKLLNGSKVQYQALDEAIKTAQFIRNKAVRLWRDEPNVNKARLSLLCKELARAFPFAKKLNSMARQAASERAWNSVSSFYRRCREGAKKKGYPQFKKHSRNGFADAARTVEYKTSGWKLSEDCLTINFTDGFKAGKFSLFCNHETREDLFRLKINRVRVVRRADGYYAQFCFDANRSEPGNYTGNVVGIDLGLKYFYKDQNDNAAIYPKYLRRAEKRIKKLQRRLSRKFVKGKKPQSNNYHKARIRLGKAHLLALACRR

SEQ ID NO: 29021 - protein, 514 aa, Moorea sp.
MMPKKVGVAKKISTQVVPIIGMTKSVELELLSTMKKLGVVRSESYNKLGSISHWGLDWKKAYPEVRNFRKPESLGLPSKLMEWTVSDVAKAITAQQAACTDAITKKLYKRFPGKKNQRARKELCKQLKTLAFLDNPLLHRLVRKEFQRGRSSVNNQIVYQQGGYSCKRLSRHTYQLELAGLKRGKRNRIIVKSNRKIKGQIRLIYNKLLQRFEIHFLVDHGKVEISSEGRSIGVDKGYTEALYDSDGQAHGKNLGKLATRKSDRICAKNRNRGKLWAIHRKLEKIDPVKSARILKNNLSRKTENRRYRKNQSEITAIIGAASKSLFDGESLLVFSEDLTQPIKNKRQSKAMSRKLNSWMKGEMRDSLEKWANWTGSVVKEVQPSYTSQVDSRNGTLLGKRTGDNFTGFDGVVLQADYNAAKNVLARGTDKGITRYMNKTEVQAVLLRRTARFLKGMGLSLIDAVELGWLDCKHELCSGFQATPGRDARNAQIDQIDKWEAQLRLPYNHFSLGQQ

SEQ ID NO: 29022 - protein, 621 aa, unknown
  TnpB Polypeptide
MVKKKKENFTSFRSNDKSAYKTFKIPLKTILRDRATIQPVLNDLVFDINDLVIHSYQLIRLYVLHCYHHQEPLPEINDTFILYCIKVLGTRDNRGRQSANATLLETLQEFYDTEYQPLLNHEKTDLKNTTFLLPYVATQIHTCLSNNLQEHFLQHFLRFINKTTHEITEDKAVLHTFKHKLCLMEETDTMFDDWKTTHLPHILPTNIKKNIHYDVKVRSFVYLPGMLYMNSILEKQEQKLFQPLPLRTNIVPKHILLDTASIVSLFCPENDKEGNKIKKSELLKHIKDSQHDVWDNLLNLQHKIFKNPHYQFHYQIQTDGISCSLLFIRKDLKDKKWGSKVPTLPDQEFHNIEDLSQEQLNVLKPRNMVGCDPGKRNLVYMVDETGKKLQYTAPQRKRESKQKCNQRILLVEKKKHGITEKETHLSLQNSKSVRIDNYKIYLVEKTKLNQETTEFYKREVWRKMKFRAYSYGKKSIDTFLNKIKKTFGENLLIGYGNWSRSTQMKHFMPTINKGLRKLIHKKYDTITINECNTSKKCCGCHNNLSYYKNKENKEVFRLLMCSNCVSCENKHTVFRTRDVNSAVNIRHITRCWVEKQFRPPVFQISSFTTSGKKEVEKVRPS

SEQ ID NO: 29023 - protein, 393 aa, Virgibacillus sp.
MEQTKTIKNKILSHGSTAFEPTLLVYRDALGFIVEVIEKEYSLLEGLLTKELTPAVEKFIHRTKNNPTSKYNFTSNFYKFPSYLRRSAISKGFGIVKSYRSNLQNWEDEKSKALAEGKFFKKKSPVLRVEHDAFPVLYKGNMFNRLSTDQAEVKIYKNNDWVWETITFNDKNLKNRGIMDWKENNPTLVKVGKKYFINFSYTKEIKLRKTKIIDQIIVSVDLGLTNSAVCSAMYSDGTVIGRKFINQPIEKDRMNTIIGKLKKAQRNSGTIEAPNYWKKINGLQNHIKVNTASEIIKFAETHNADVIVFEYLGKMHVPKGIFGAKKLRYKLHHWCKLEIQSKVEEMAHYRQMRIRRVNPKNTSKLAFDGSGEVKRIIKKTSLHLKVARPITQT

SEQ ID NO: 29024 - protein, 371 aa, Virgibacillus sp.
MTKQNKAYKFRLLPTEKQALLIRQTFGCVRFTYNKMLTERKEFYETYKENKAKLQKEKFPTPAKYKQEFPFLKEVDSLALANAQLNLKKAYKNFFAGRAGFPTFKSGKSKQSYTTNVVNGNIAILDGHIKLPKLKRVKLNLHRVIPAEHIIKSCTLSMTKTGKYYISILTEYRKEIPLVMITNVVGLDFAMNGLYVESEQGEKANYPRFYRQKLDKLAKEQRVLARKQRGSTRFEKQRLKLAKLQEKTANQRRNFLHYQSKDLADTFDAVVIEDLNMKGMAQAFHFGKSVHDNGWGMFILFLTYKLKEQGKQLVKIDRWFPSTEKCSCCGKVKEMPFSERMYQCSCGYIADRDDNAAINIKKEGIRLLALS

SEQ ID NO: 29025 - protein, 454 aa, Virgibacillus sp.
MEKTKTIKNKILSHGTISFEPTLIIYRNALKFIVEVIDEEWILVEGLSTKEVTRVVEKLIHRTKDNPSPEYDFTSTFYKFPSYLRRSAISKAFGIVTSYRSNLKNWQSDKLKALSDGKAFTKKPPVLSMEHDAFPVFYKGNMFNRISSNRAEIKLFINNDWVWHTITFNDKNLKNRGILDWKENNPTLIKVGKKYFINFSCTKKVKVNKTKINEQTIIAVDLGLTNSAVCSAMRSNGTVIGRKFINQPIEKDRMNTIIGKLKKAQRSSGKIEAPNFWRRINGLQNYIKVNTASEIIKFAEEYNASVVVFEYLGKMRVPKDIFGAKRIRHKLHHWCKLGIQSKVEEMAHYRGMRIRRVNPKYTSALAFDGSGKVKRNTKKDLATFQNGKVYHADLSASYNIGARYFIKEILKPFSEKKRLAIQAKVPELLARTRLTLASLISLHQALRTNGAKPA

SEQ ID NO: 29026 - protein, 568 aa, Virgibacillus sp.
MGIKAYFSNRIYKNTILDENVDAIGHALFVFNRAKQFAFSTATKEKRSGLKKRDKSLHLTVKNRFSLDDYYTNSAVQEAKAKEKSLDELKKLYMKNKETQIKSIKNKIKKDKSKLTSLKKIKKTFIKGKASFPKNSRMEKLGNYFVVQFKNKTDLYYHTYQFEHTYLDTEIKRLHTRIGFLNFKLNKYEDSLESLKTKIPSVVFGSKKQFQAQYTVDTYIDNHKLWQKTWEENRYRKMVISGRKDSGCGNFVFNYDGTNKVLRFKTPKGVLVEIENLYFPYGQEKVESRILAQTKCKNKKKYGKPVAWAIEDYGEYYLFKTMFDEESKAYVNHSKTDGAIGIDCNVDHFAVSNVNSNGQLLGSWSLKFDLKGKTSGQTTKIIEAEAIEVVNIATRTNKPIVVEKLNTTSSKLSNPYGNKKATRMMSAFAYKKMLSAIKSRAEKENIAVFEVNPAYTSQIGKMKYMKRLGISIHEAASFVIARRAMGFKEKLPPVLGTLLPEKIAGAHHGVHWKYISNALKGIHTNSYYHSNFFNVDRFRSRNELFASGALTDLEIKGLLKLKNGKTVS

SEQ ID NO: 29027 - protein, 454 aa, Virgibacillus sp.
MEQTKTIKNKILSHGSTAFEPTLLVYRHALGFIVEVIEKEYSLLGGLLTKELTPAVEKFIHRTKNNPTPKYNFTSNFYKFPSYLRRSAISKGFGIVKSYRSNLQNWEDEKSKAHAEGKVFKKKPPVLRVEHDAFPVLYKGNMFNRLSTDQAEIKIHKNNDWVWEIITFNDKNLKNRGIMDWKENNPTLVKIGKKCFINFSYTKEIKLKKTKIIDQIIVSVDLGLTNSAVCSAMYSDGTVIGRKFINQPIEKDRMNTLVGKLKKAQRNSGFIEAPNYWKKINGLQNHIKVNTASEIIKFAETYDADVIVFEYLGKMHIPKGIFGAKKLRHKLHHWCKLGVQSKVEEMAHYRGMRLRRVNPKYTSSLAFDGSGEVKRNTKKDLATFQNGKVYHADLSASYNIGARYFIREILKPFSEKKRLAIQAKVPELLARTRLTLASLISLHQALRTNGAKPA

SEQ ID NO: 29028 - protein, 374 aa, Virgibacillus sp.
MMKLTITAKIKILPTELDKEKLLDTIRAVRKGLNFASKKAFRHDCFTSIKLHKLTYNLLRSDYRLKSQMANSVARTVCAKYKSMQSNDVENTLAKFKKPEYDLVWNRDYSLKSEYFSVNTLFGRIKVPYVTKKMEHFFDGSWKFGTSKLVQKKGKYFLHIPMTKELKESEQFNTSDVLHIVGIDLGINFVATVFDDAGKTTFFSGKQIKQKRAHYKLLRKQLQQRQTPSARRRLKAIGQRENCWMTDVNHVVSKALVTNYGQNTLYTLEDLQNVRKATEKVCKRKRYVSVSWAFDQLREFLTYKAQMTKSKVILVNPKYTSQDCPKCEHRAKNNRNKKTHQFCCKKCAYRSNDDRVAAMNLYNKGIKYLSRVSA

SEQ ID NO: 29029 - protein, 413 aa, Halostagnicola sp.
MDITLRFRAYLLDDVAREAWRHIDILRQIRNHAVRDYYDADYNDKPSDYDQHKKFSDWKQQWPVFSDPSAHAAQQAISQIHDDLDGLKEKRDNGYDVGRLQWQGNGEFRSISYNQSSRFNVDHNTGDDRFVRLRLEKLGWLKVRSNRRVPTAEDINEVILKKQATGEWFVSLVVDDTVPAREKPSLTEIEPEDCIGVDVGITSYIHTSANLTVDTLDLSDEYDRYAREQRDLARKQHGSSNWEKQRRKVAKAKRKIKRKVEDFQHKLTTWLVRTYDVVAVEDLDVKPMLEGSHSAKNKQDAAWARFRELLEYKADVHGTHVMSVEPEGTTKECASCGVETDKPLWVREHSCPVCGHTEDRDLNAAKNILNRGLRQLGAGRSESTPVQTALPTFTPQREAVDAKRVVEAGSPEA

SEQ ID NO: 29030 - protein, 218 aa, Halostagnicola sp.
MEYSHRCHAYPSDEVAMAAEHHMDVHRQLYNHVRWDYTTSPDDEKPSEYQQNNKLPEWKRRWPVFAELHSKAAQATVARFHDNLSNLRKKKEKGYNVGWIKRQSPAEFRSITYNQSGFDLDNKRGRDGFAYVRFSKIGWVKIRYHRSIAENSTIKEVTLKKEVTGEWFVSFSLETDDEHVPEKPDVDSLDARNSVGIDLGILNVRLAGLRRIEMRTRR

SEQ ID NO: 29031 - protein, 413 aa, unknown
  TnpB Polypeptide
MRGKTTHAYWVVPRGEYMLTLKARGELVEGSLEELREELYLTRRAIQYVIDCLWELDKLPSINQLHQMFYKVLREQGFRAHQCKQTYKYALSIVKSAKRNNGKKPVLRKLSARLDKYDARVDLEKQLVMVKLRNKVFKIKLLHHRSYVEKFVGKKWYEVTVSIDRSGRIWIAIPFRWEYKPYKPKRLISIDINLKKVVVYNGKRIRRIDTRFMEALSLKIHAERIQKKHPRMWRYNERILDRIRSLHRRSRNIVVDWYRKFAKYIVLKTKRTRSAIVLEDLEKLWFNSSRKSSNLADKLSRFAYRKLQLAIMTKAIEYNVPIIFVNPKDTSTTCPRCGAKLTYNHRLAICPRCGFIADRDTIGAMNIYLRALRGMQGSQGSPLSAPAMKDETRQSGRTKDEPMTTHIHSYKII

SEQ ID NO: 29032 - protein, 252 aa, Hydrococcus sp.
MLFYQRNRQSYQRGDVSVEYGCQQNLISPDKDLRGILEFLCSEASKLINCGVYYSRQIYFKTGKIPNRAELHRVLGTDNQNIHYKAFYSDTAQQILTSVAESFKSYLGLLKGIKKGTVTQRSKLPKYRQGGMALVTFTGRSVKLKNGMLRFPLGSKVKAWFGLDSFNLPMPSNVDYKSIREYRILPRNGCFYLELVYQAESIQTELNANSALMLDHGVDNWLTCVSNINTGFIVDGKHLNQSTSGTTNRLRG

SEQ ID NO: 29033 - protein, 374 aa, unknown
  TnpB Polypeptide
MEYSYKFRIYPNAAQENLIQRTFGCCRFVFNYFLAERMEQYKQTGHAPTRFQQDKALTALKKELTWLKEVDSTALRASLYDLDIAYQNFFRRIKQGRKSGYPRFKNKHDRRRSYKSKYANDNIKVLEKGVQLPKLGEVECRVSKPVKGRILSATISQNPSGKYFVSLCCTDVEIEPLPSAGAVVGLDMGLKAFAIASNSAKYPNHKYFAESQKKLAKLQRKLSRKSKDSNRWEKVRVKVARLQEHIANQRNDTLHKLSTNLIQQYDLIAIENLSPSKMVKNHKLARSILDVSWGEFRRQLEYKAGWYGKQVVAVDRFFPSSQLCSACGAQWPGTKDLSVREWTCPVCGAVHDRDVNAAKNILNEGLRLLASYIR

SEQ ID NO: 29034 - protein, 254 aa, Haloarcula sp.
MSTRQRIQYVVGVDINENRVALAPMNWESGNVQDSLVLEYLDAKRRRHECFTKRRWIQEAGQTAFKTVVGQEKRDSVHDQLHKMSRDVVRWVSQFENQAIVFGDPKDMRDLINYGTRMNRHLHSVPFAKLRDLITYKMARDGVSSDDVDPEYTSQRCPRTACLYTERGNRREKRFKCRDRGFQNLIQNPITDNYYRRVLQTKFTLKQAKIIVAAGGGSGVQRTVWGRHLRRQVLAPDQSMRLGWSRERLSGAST

SEQ ID NO: 29035 - protein, 410 aa, Bifidobacterium sp.
VYEAVKVALDPTPRQERLLEGHAGAARFAYNTMLSHIQSQLARGEKADWTMYAQRRWWNEWKNEIAPWWAEYSKEAYNSAFESLAAALRSFLDSKTGRRKGGRMGWPRFKSKRRSMLRFAYTTGSFGLIDNDPKALKLPRIGRVHCMENIARRVGAAKVVRMSVGRRAGRWYASLTVEREDKPVPCPPKGGSVGVDLGVKTLAALSDGTVFDNPRLLKRAHRKLGKAQKTLSRRNEGSNRWKEAELHLQRVHTHIASQRRDGLNKLTTMLTKTYSHISIEDLNVSGMVRNHSLVQAISDCGFRELRRQLEYKTARTGAKLHVVNRWYPSSKTCSNCGTVKAKLSLNERTYVCDACGLGIDRDLNAAININVAGSAPETLNARGGDARHGRHAPAAQTPVKREPSNARQGV

SEQ ID NO: 29036 - protein, 448 aa, unknown
  TnpB Polypeptide
MYYYCANICKKSTYLYNRANYILRQYATAVRDFENLKPLTANQMEIYKNVRSTTDNTKHEPKNKWLTYGILDFYLKQTKDINYYSMYSQSNQQILKLLLRNYKAFFNSLKAYKVNKDVFTGRPKMPGYKKEGSYTTAILTNQICKIVDGRYLKVPGYKYKLNLGEIGQNTFLKEVRIKHSADVFIVDVVLETDTPAAVYKVHPELSDEQLAKKFKTCTNSHKYKVIGIDSGLNNFCAVTNNFGDRPFLINGRTIKSVNNYYNKRLAKLKSQATLCNNKEYTRRINRLTYKRNYMIKDKLHKISKYIAEYAKNNNVDVVILGHNIFQKQNINTGAANNQSIVQIPYCVFAGMLQYKLEAYGIRLVLTEESYTSKADFKAEDKLPVFNANSAKSYTFSGKRIKRGLYRYNDGSIGNADINGAANIIRKVFPNIKGWDKGVVDIPYAVTVA

SEQ ID NO: 29037 - protein, 375 aa, Clostridiales sp.
VNKAYKYRLYPNEEQAVLINKTFGCVRFIYNQMLSNRIEIYQKYKDDKQALKEQKYRLPADYKKEYPWLKEVDSLALANAQLNLNQAYQNFYRDKSVGFPKFKSKHHSRKAYTTNNQKGTIRLIDSKTIRLPKLGNVLIKLHRAIPDDCIIKSVTISRTPTGKYDISILVEYTVETPKVNPTIDSVMGLDYSSGSLYVDHMGNQPDYPRYYREAEAILKKEQRKLSKRKKGGKNREKQRQKVAKLHEKVANQRKDFLHKLSRQITNAYDAVAIEDINMRNIAQLLHLAKSTNDNGYGKLKSFLGYKLEEQGKHLVVINKWYPSSKTCYHCKHRNADLTLADRVWTCPNCGHLLDRDINAANNIKYEACKMLRLIA

SEQ ID NO: 29038 - protein, 403 aa, Brasilonema sp.
MIVLEFKAKGRTTQYSAIDEAIKTAQFVRNKCIRFWMDNRGVGQKDLYRHNTALRAEYPFVKDLNSHACQSAVERAYSSIARFYDNCRKSIPGKKGYPQFKKNCRSVEYKTSGWSLSETRKQITFTDKKGIGKLKLKGTWDLNFYQLDQIKRVRLVKKSDGYYVQFLVRSENKVDTQPTGRTIGLDVGLKEFYTDSNGHSEPNPKFYRTGEKRLKFRQRRVSRKKKGSANRLSAINKLGRVHLKISRQREEHAKRVARCVIQSNDLVAYEDLRIKNLVKNHCLAKSINDAGWYQFRKWLEYLGVKFGRVTVAVNPAYTSQECSKCGTHVKKSLSMRTHVCQCGFVLDRDYNAALNILNRALSTTGHVGTWILDPNASGDLASTVLGANLSQQVESVNEESPHL

SEQ ID NO: 29039 - protein, 365 aa, unknown
  TnpB Polypeptide
MAQQILKEVDGSFKSFFGLLKLAKKGKYAFKDCRLPNYLPKDGYTTLVIGFVRLNGNKLILPYSNAYKKTHKCVEITIPPILLDKKVKEIRIIPKANARFFEIQYTYEAECIQRNLNINNALAIDLGINNLVTAVSSNGKTFIIDGKRLKSINQWYNKKNAHLQSVKDKQNIGKRPTNKQKANTRNRNNKINDYMNKTARTIIDYCINNDIGTLVVGYNETFQKNSNIGQANNQTFVNIPYGQLRFKLEYLCEINGIVFVKQEESYTSKADCTAGDLIPVYGKEKTHLVFSGRRIERGLYLCKAGYCINADCNGAANILRKAFPHAWDKCKDFQFLSTPASVGFKSLNPSSIPNRQKQRAANKKK

SEQ ID NO: 29040 - protein, 348 aa, unknown
  TnpB Polypeptide
LAGDHPVRFTNRGWQVDHSPDRTHEFCWRVPQAGRGTSFWIPLRINPDQRELWDRLYDGDVTVGEFRLRQHRSSWTLHVTVEYEIEQPETPDDPTPVGFDVGESSLLVGCAVEQGAPVNPLFVDGGRARHLRKEMHTTLKHLQEREAAGWRIDERFSHYQHALTDIVEKASRGAVEYARQFEDPVIVLEDLTYIRESLDCGKWMNRRLHSWAFARLQGRTEDKALDAGIPVEYVNAAYTSQTCHACGHVGDRDGDEFRCTNEGCWVTEYHADLNAAVNIAGRLDPWGESLPLKPAGDDFPRDGSACDSTTGHRESSRGPRQMTLSAYSSETSSRSETSLVGSPAVHGG

SEQ ID NO: 29041 - protein, 347 aa, unknown
  TnpB Polypeptide
MIQTYKLKHEQDFSKELKLAEKIAWIGFHTGTISSRDVKHIGLKSIISNQILKKYSRNKKLKSVRSVKLAIPSQGIKIKNDKIYIPCLKLSLEIWFDRNFEKINQIELGKEYAYISVSYQAKELIKPETFIGIDRNTTHHTLVASNLNGKVLKLGKPCNHIHKKYKAIRGNLQRKGKYKKLKSIKNRESKIIKNINHQISRKLIDYAIQVKGGLVLENLKDIRRTTKTRRNQRYSLNSWSFYQLGQMIEYKAKKLGIPIFYVEPQYTSQRCSCCGHIEKANRILNLFQCKQCGKVEDSGVNAGFNLAEMQHKGILQFSKDRDLLKGSTDTPKEAMLESEATSEPNAL

SEQ ID NO: 29042 - protein, 406 aa, Micromonospora sp.
VWAVVRAVKRAFRYRFYPTDTQAAELARTFGCIRKVYNLALAARTEAWVSRQERVTYTATSAMLTRWKKTEDLAYLNEVSSVPLQQTLRHLQTAFTNFFAKRSRYPTFKSKKKSRRSAEYTHSAFRWRDGSLTLAKMTEPLAIVWSRPLPEGASPSTVTVSQDPAGRWFVSLLCVDVIPDAPATTAVGVGVDAGLDSLLTLSTGEKITNPRYERADRARLARAQRDLARKEKGSANRAKARLKVARVYARIADRRRDHLHRLTTRLVRDSQTIVIEDLSVRNMIRNHTLARAISDAGWRQFRAMLEYKANWYGRHLITVDRWYPSSKLCSTCGALAETMPLDVRSWTCRCGVVHDRDVNAARNLLAAGLAVTACGAGVSPQRETSRTGRPAVKQETSGVTQGIPFL

SEQ ID NO: 29043 - protein, 339 aa, Micromonospora sp.
LGAGGQFRAAGVIAKQHRLRRHGERLHAKADHYQRLIGVNERPQLVGKQAVLRDEIRHVSERRANLNAALAWAAARWAVDQAIAAGASVIYVEDLRSMEAKGMGATMNTRLSQQVRGQITDRIWHLAAETGIAVVIVPARNTSKHCPQCLTPLQHRKAPDKPTVAGWKWAICPNTGACGWQGDRDNGAWRRIAARGLTHQAKTLTDKTSGQMVIRAVVDKLEATAVITPTTKASRVDRSKTGPTRHQPPRPAPRRRRAPSPTRPPGRAGKRPEGHAPTDRTRLPRAAHRHQGVNTTSTPTAGHRPRGAALGAGFHLHAHASPPRWKTIPEAQSDSGSLS

SEQ ID NO: 29044 - protein, 365 aa, Micromonospora sp.
LAARTEAWTVRQERITYNATSAMLTAWKKADELAFLNEVSSVPLQQTLRHLQVALTNFFARRARYPTFKSKKKSRRSAEYTTSAFRWRDGQLTLAKMAEPLNIVWSRPLPEGATPSTVTVSQDAAGRWFVSLLCEDVIPAAAAVNTAVGVDAGLESLLTLSTGEKIVNPRHERADRARLARAQRDLFRKEKGSANRAKARLKVARVYARIADRRRDYLHKLSTRLVRDNQTIVIEDLSLRNMVKNHTLARAISDAAWRQFRAMLEYKADWYGREVIAADRWFPSSKLCSACGTLAENLPLTVRSWTCRCGAVHDRDVNAARNLSAAGLAVSACGAGVRPQRESSRTRRPAVKQETQGRPREPTPI

SEQ ID NO: 29045 - protein, 130 aa, Micromonospora sp.
VARIHARIADRRRDHLHKLTTRLVRENQTVVIEDLSVRNMLRNRRLARVISDAAWSQFRTMLEYKARWYGREVIPVDRWYPSSKTCFTCGQVNNTLALNDRVWTCLGCGAEHDRDINAAKNILAAGLVER

SEQ ID NO: 29046 - protein, 408 aa, Planosporangium sp.
LRYNFRVYPTPGQQQALARAFGCARVVFNDGLRARQTARDNGLPYVPDAELSRQVITAAKATPQRAWLGEVSSVVLQQALADLNVAYRNFFASITGKRKGRRVAPPRFRSRKDNRQTIRFTRNSRFVALDNGRLRLPKIGDVEVRWSRQLPSDPSSVTIIRDAAGRYFASFVVQTTDEPLPETDSEVGIDLGLTHFAVLSDGTKVAAPKFLRRAARKLRRLQQDLARKQRGSNNRKKAVVKVARAHAKVADTRRDWQHKLSTAIIRDNQAVYVEDLCVAGLGRTRLAKSVHDAGWASFVGMLEYKAARYGRTFAKIDRFTPTSQTCSACGRLDGPKPLNVRSWTCPCGTEHDRDVNAAINVLAQGRWDNSNDRGAHVRPALVPAARREAVIHPGAARSARSAERISVL

SEQ ID NO: 29047 - protein, 385 aa, Meiothermus sp.
MRRAFKYRLYPTKPQLRDLDRTLMLCRRLYNAALQERRDAYRKAGKTVGFYEQKKWLPEIRADLPEYKGVHSQVLQNVIERVDLAFQGFFRRVKNGETPGYPRFKGRERYDSFTFPQAGTTGVKLQEGGKRVLLHGIGSVKVKLHRPLEGKLKTATVKREGEHGYIVFTCQVDLQPLPENQDAVGIDLGTNPHFLVTSEGEMVQAPRYFQEAQAQLARAQRALARKKRGSHRRKQARRRVAKLHRKIANQRKDFHHKLARHLVDRYGTIVHEDLNVLALSRSYTAKGIHDAGWGQFLAILAYKAEEAGRRVVGVDSKYTSQDCPVCGHREKRPLWVREFTCPACGASLHRDVAAAINILARSGRVPDRRWARTEPAGMGAALAAP

SEQ ID NO: 29048 - protein, 386 aa, Desulfosporosinus sp.
VELSGDLFSDTLRNKKQGGEHLQITIKIKLQLTSEQRQLLSETTKEYIRLVNQVVSDFISADAHLKYSSKDVVAILPSAVKNQAIREAKSVFTKYKKTVKANAKLKPEEQKEIKVPILKKAVAIWNNQNYAIKGNIFSFPVIIDGKSQRLEIEAILTNYQQERLIGKLGSLRITQKSGNYMAQIAVEAAKQLNIADKVMGVDLGLKVPAVTTTESGKTKFFGNGRQNKFIKRKHRSVRRKLGKLKKLKAIRKRHDKEQRWMKDTDHKVSRQIVNFAKENNVEVIRLEKLSGIRQTARTSRKNEKNLHTWSFYRLASFIEYKAFLAGIRVEYGNPKYTSQTCPSCGKRNHAKDRTYQCECGFKAHRDRVGAINIISATVVAGNRLSA

SEQ ID NO: 29049 - protein, 494 aa, unknown
  TnpB Polypeptide
MVKAIKVMLIPNNVQQTKLFQYAGASRFAYNWALAREKETYEKGGKFISDSELRKEFTRLRHSEEYAWLLNISNNVTKQAIKDACTAYQNFFKGLQKFPRFKSRKRSMPKFYQDNVKIQFSNTHVKFEGFSSSRKANKQKRNWVRLAEHGRIPTDAKYMNPRISFDGLNWWISVCVEFPDCRETLNDDGVGIDLGIKDLAICSDGTKYKNINKSQKVKKLEKQKRRLQRSISRSYEKNKKGESYCKTNNVIKKEKLLLKRNHRLTNIRKNYLNQTISEIVNRKPRFICIEDLNVSGMMKNRHLSKAVQEQGFFGFRKQLENKCSDKGIQLIVADRFYPSSKLCSCCGNIKKDLKLSDRVYRCECGNMIDRDFQASINLKGYVMRNQGVIYRFVIPIAEVPHIDEANLRTILQNTVIAQLNHYGIVGLSSVYQDSTTVQYSVYIDKITYFEDEHIIAIDVLYVCTQNDLLYLQNAVKRDTVNAVNIERTVYDEDI

SEQ ID NO: 29050 - protein, 281 aa, unknown
  TnpB Polypeptide
LWHGNKEHAGYPKFKSKHDNHKSYTTNFTNGNITVDFEGNRVKLPKLKDVKAKLHRNFSGQIKSATISQVPSGKYYVSVLVETEHVELPHTTQNTGIDLGIKDLCITSGGKKYENPKIIRKNEKKLEKLQRQLAHKEKKSQNYYKTKKKIALCHEKITNTRKDYLHKISHEIISENQVIVSENLQIKNMVKNHHLAKSISDVSWYELTRQLEYKAKWNGREYVKIDTFYASSQLCSVCGYQNTETKNLTVREWICPVCGTNHDRDINAAKNILEEGLRQIA

SEQ ID NO: 29051 - protein, 385 aa, Proteus sp.
MKRLQAFKFQLRPNGQQEREMRRFAGACRFVFNRALARQNEEHEAGNKYIPYTKMASWLIEWKSDTETQWLKEAPSQPLQQSLKDLERAYKNFFQKRTAFPRFKKRGKNDAFRYPQGVKLDQSNSRISLPKLGWMRYRNSREVVGEVRNVTVSQSCGKWYVSIQTEYEATEPQHESTSIVGLDAGVTKLATLSDGTVYPPVSSFKVNQRKLARLQRKLSRKIKFSANWQKQKRKIQRLHSHIANIRKDYLHKVTSEISKNHAMIVIEDLKVSNMSKSAKGTTERHGRNVKAKSGLNRSILEQGWYEMRRQLEYKQLWRGGQVLAIPPAYTSQKCACCGHTAKENRQSQSQFECLECGYTANADINGARNILAAGHAVLACGGRVQ

SEQ ID NO: 29052 - protein, 264 aa, Proteus sp.
MRYRNSREVVGEVRNVTVSQSCGKWYVSIQTEYEATEPPHESTSIVGLDAGVTKLATLSDGTVYPPVSSFKVNQRKLARLQRKLSRKIKFSTNWQKQKRKIQRLHSHIANIRKDYLHKVTSEISKNHAMIVIEDLKVSNMSKSAKGTTERHGRNVKAKSGLNRSILEQGWYEMRRQLEYKQLWRGGQVLAILPAYTSQKCACCDHTAKENRQSQSQFECLECGYTANADINGARNILAAGHAELACGGRVQSDRPSKQEPAEVI

SEQ ID NO: 29053 - protein, 402 aa, Proteus sp.
MKRLQAFKFQLRPNGQQEREMRRFAGACRFVFNRALARQNEEHEAGNKYIPYTKMASWLIEWKSDTETQWLKEAPSQPLQQSLKDLERAYKNFFQKRTAFPRFKKRSKNDAFRYPQGVKLDQSNSRISLPKLGWMRYRNSREVVGEVRNVTVSQSCGKWYVSIQTEYEATEPQPESTSIVGLDAGVTKLATLSDGTVYPPVSSFKVNQRKLARLQRKLSRKITFSANWQKQKRKIQRLHTHIANIRKDYLHKVTSEISKNHAMIVIEDLKVSNMSKSAKGTTERPGRNVKAKSGLNRAILEQGWYEMRRQLEYKQLWRGGQVLAIPPAYTSQKCACCGHTAKENRQSQSQFECLECGYTANADINGARNILAAGHAVLACGGRVQSGRPSKQEPAEVIQTSV

SEQ ID NO: 29054 - protein, 375 aa, unknown
  TnpB Polypeptide
MTNIAIKYRIYPTAEQAVLFARTFGCCRKVYNLMLSDKIEGYKVSGKFPAVTPAKYKKDYPFLKEVDSLALANVQLHLQSAFRNRFSKTRKNKNGFPKFKSAKHSRKSYTTNNQKGTVAVSTGGIKLPKTGVVKAVIHRKPDADWKIKSATVSQDSDGKYYVSVLFEYDVPVINYTADITNAVGLDYASDGLYMDSSGNKAMVHKYYRESHKKLAKEQRKLSRKTGFRKKENKSNNYLRQLKRVNRIHRHIANQRLDSLHKKSTEIANRYDVVCIEDLNMKAIGNKGFGNGKATFDNGYGMFISMLEYKLKLRGKYLVRIDKWFPSSQICNCCGSIKKLSLKDRVYRCDCGYTGDRDHNAAINILNEGLRILQVS

SEQ ID NO: 29055 - protein, 445 aa, Mycobacterium sp.
VRARGRPSTGRSPAPPLDWPPRRSSRRRSPRHSPPRAPRGQRSAKPTAGRPPRGGETSSSPRPGREWCARRSTAVRRRWRYGTCASALLRREIRAIMPGRNAEPDMCRCALSVVVGGRGYLSGVSRFRLVPTPAQEVVLLEHCRHAQFVWNLAVEQQQMWQPGRRAPGYREQSAQLTDIRAEYDWLAAGSQTVQQQALRDFRQAMQNFLAGTHGRPSWRKAGVHEGFRQVGLKPCHIEKLNRHCARVWVPKVGWVRFRFTRAVPDGVKSYRITRDRAGRWHIAFAHIPCPIPGPRDGSVVGVDRGVAVSAALSTGELLHAPSLTPGEQIRLRRLHQRLARARRGSHRRQRTKLAIGRLRAREADRRRDWVEKATTDLARRFDTIRVESLDVRAMTRSARGTFDQPGVRVAQKRGLNRAISRQGWGRLVARLDHKATGRVQRVPAA

SEQ ID NO: 29056 - protein, 393 aa, unknown
  TnpB Polypeptide
MGYRTIEIRWMPDSPARWAAYTAARVEAARLWGDLVARHHRIRRMNWRWPSKARFQQWAKRRYPGLSAQSVQQIIGEFIEAVDATRQLRKNGHDEARYPWKRPRYRDVVYTNQDARITGARLVLPNGTSGHLRVPLPKDRPLPGRLMEVRLCLGRVLLVCEVPDEPRHQKTVVGVDLGVNTLIAATDGKKAVLISGREAKATVQWRNKRLASAVSKQSSLVKGSSRWRRLQRRKKRLLDKARRRMNDLVHKATRRIAQEFPGATCYVGEPFNDAAQKMRPRQAQQVSQVAHRKATSHLDYKTSGAIQIDEAYSSQTCPRCGTRNKCRRVYRCRQCGIVAPRDVVGATNILCVGQQGAMRIGQSLATEVVYARPVKVFRREPDSTSGHLAGSSV

SEQ ID NO: 29057 - protein, 418 aa, Streptomyces sp.
MQLRYAFRLYPESGQRTALARAFECARVVFNDAVRAREQARRAREPFPTAAVLSQQLITQAKNTSERSWLGEVSAVVLQQSLRDAEAAYKSFFASLKGERKGKKVGAPRFKSRKDRRQAIRFTANARWKITGNGRLSLPKIGEIKVKWSRELPVTPSSVTVIRDAAGRYFASFVIDTDPGTDQTRWDEPEPDAAIGIDLGLTLPQTPSGGTPIAVLSDGTKIEPPRFLRRAEKKLKKAQRELSRKQKGSRNREKARLKVARAHAQVADARKEFHHQLSTRLIRENQAVAVEDLAVCGLARSRLAKSVHDAGWSQFVAMLDYKAQRYGRTFVKVGRFEPTSQVCSACGHRDGPKPLGVREWTCPSCGTRHDRDHNAAKNVKAAAGLAASACGAPVRPEPVLAQRDETGSHGIPPETCAA

SEQ ID NO: 29058 - protein, 405 aa, unknown
  TnpB Polypeptide
MAYRFRGYPTEEQESVLKQNIGAGRFIWNRMLSDYNILWKEMGISYQITPADYKDVSGLEWLKDIDSSGLANVQLHLERARRDYFSGEKGKPHFKKKHVCVDSYTTNCTNNNIRIESGGIRLPKIKNPVKLSMHRPIVDGGKLKNVTVTHEPDGKWYFSIAFEYTAEEAEPSSGLQKFFATGDISAICGIGLDMSVPFLYVDSSGRKPSYTLNGREVRFIKQYRKLEKRIAKEQRRRSHMVKDSNNYNKQSEKIARLHAKAKHRRDDFLHQIAVRLVRTYDMIAIEDLDVAAMKKGLKLGKYVSDIGWGKFIQILEELCNKFGKLLIRVDKWYPSSKTCHHCGYVKSDLELNDRVYVCPKCGRVMDRDENAAINILKESYRILNDNKIRPSVEGYIKPSLISTIA

SEQ ID NO: 29059 - protein, 182 aa, Thaumarchaeota sp.
MEIDFVGRLRWYGKKGRLEIYYDEAKNAWYASIPVDVGVEITKKGNKSKHIVHGERKSIQVESPKGNKMASIDLGINVLASVIVEDGTWLLYKGVRAKEDYFYFEKKIAEVQSLADKTKNMGEYKAHEELLREKKRLHGKLKRRLRHLYRNLASHLVKELHKQGVSTIYVGYPFEIAQEKVR

SEQ ID NO: 29060 - protein, 367 aa, unknown
  TnpB Polypeptide
VFNFFLARKVDVYKSTGKGLTYNQTSAELTQLKKDAQYSWLREVNAVALQQSLRDLDRAYQNFFRKEKGAGFPKFKNKHGKQSFRLNNQVVRFDWDKSRITLPKIGAVRMVNHCPVGGRVLSVTVSKAKSGKYFVSIAVEQGIEDLEKREAEVGIDVGLKSFLVTSDGLKVDPPKYLVVSERRLKRLQRELSRRQKGGKNREKARRRVAILHEKIAAQRANFLHQLSTQLTKRHSLIVLEDLNVRGMMVNHHLAKAIGDASWSEFGRQLAYKGGWYGCEMTRIGRFEPSSKTCSVCGWVKQDLTLADREWICPECGSHHDRDINAAINILKFCRGRVVPRTSACRDHPVTESLKQEWICVEPIMVQS

SEQ ID NO: 29061 - protein, 367 aa, unknown; identical to SEQ ID NO: 29060
  TnpB Polypeptide

SEQ ID NO: 29062 - protein, 374 aa, unknown
  TnpB Polypeptide
LDLTITAKIQIYPDNKQIEVLNNTMIQVNKALNYISDYVFTNNCLNQNTINKDTYYYLRDTYNLKSQMAQSVMKTVIAKYKTCKSLNHEFALINFKNLEYDLVYNRDYSIAAGIFSINSLEGRLKIPFETNGMNKYFDGSYKFGTAKLIYKFNKYFLHIPMIKNFEQTTIDKIDKIVGIDLGINFLATTYDSYGKTNFCPGRPIKSIRGKYKILRKQLQEVNTKSSKRKIKTVGQRENRYISDINHSITKALIDKYGENTLFVIEDLTNIRNATERVRIKDRYTYVSWSFYQFRQYLEYKAQTNKCMVIAVNPKYTSQQCPKCGHIEKSNRNKSKHIFCCKNCSYKSNDDRIGAMNLYRKGIEYIESICKETIE

SEQ ID NO: 29063 - protein, 379 aa, unknown
  TnpB Polypeptide
MIKSIKVRLEPNNKQDTKLFKFAGTSRFIYNWTLDRQQKNYKAGNKFISDCELRKELTQLKKTDEFKWLNDISCDVPKQAVKDACNTYKRFFKGLCGYPKFKSRKKSIPSFYQDNCRIIIFESCVHLTNIGKIKLSESNKLPIGNSTKKEISVSNPRIVHDGLHWYISVGIDTEIKENNYNDTIGIDLGIKDTAILSDGTVIKNINKSKKIKKLQKRKIKLKRKISKKYEMNKKGICYIKTSNIHKLEKKVKKLSAKIVNIRKDFIHKATTKITKTKISKIVVEDLNISGMMKNHKLAKAIQEQSLYEFKRQLTYKCKLNNIELIEADRWFPSSKTCSKCGYKKDKLSLSERIFKCECCEYEIDRDLNAAINLKNYKVS

SEQ ID NO: 29064 - protein, 505 aa, unknown
  TnpB Polypeptide
MRYTTFRFALAPTPLQAAMLARHAGASRFAYNQCLQLVIDALEAKRADSHVRVPWSKFDLINGFNAWKHSQAAGRVFVAASDGTVTEQVTGLAWRHAVSAQVFEEAAVDLGRAIAAYRDGKTGMRKDRRVGFPKVKRKGRCRDSFRLRNKRSRGGRLAIRIGEGHPRCVILPKIGAVRVHDNTRRLRRLLRPVKHRDPGTGQLRVAPRAKVLFATISRHGCRWFVSLNVQAPDFHSDRRHRPGLAEQPARFVGVDRGLAAFAVAAAADRTEVGRYHSPKPLQHRLASLRRRSRAVVRTQPGSRNRAIAIRRLSRRHARIVNVRRNFLHKVSSQLVQTHDRLCLEDLAVANLMNNRSLARAIADASWAEFARQLHYKAAWFGAELAVANRWFPSSKTCSRCGMVNPQLSLADRVFACDACGLITDRDRNAAANLAAWAETADAVGAQAPDRQAGGRVINALGGEGAGHRHGDGETVPVELGTDAHAIVARAEDTREGCCRTASLVR

SEQ ID NO: 29065 - protein, 440 aa, Streptomyces sp.
VTSEVDLVRWQFGHRARLVLTPVQVRLVFGQAHAARTLWNLMHDWWTMLRKDQRTLAAADVAIRQARKEIDWLAVLPAQAAQGVLKTYFQAWKNCWEGRADGPNFKARFRTVMSVDIPQGRDLQIKRVHRRWGMVNIPKVGRVRFRWTKDLPVGKKANAENRITGARLIKDVLGWHIAFRVQVVESKPEPHTGPEVGIDCGVNIPLALSDENHQNHGRPARLPDGTSDRDKWLNPDEKARLLRLERRAAHRNSFRKSGQQTSNRLKRTYDQIASLRARAKRRATDWQHQTTTELARRYGTIVVEQLDITNMVKSAKGTIEEPGKNVAQKSGLNRSISQEAWGRTVTMLAYKTARHGGTLYKVPAPGTSQRCSACGFTTPGSREDQATFVCKNPDCGWAANADSNAARNILHLYRIGLVAIPAAGRAVVRRALRVKPATAR

SEQ ID NO: 29066 - protein, 218 aa, unknown
  TnpB Polypeptide
MEPSGKYFANLLYEGYSCENQAAEPDYSTAKILGIDYAMQGMAVFSEKVETEEAGFFRKNEKRLAREQRKLSRCVRGSHNYELQKKKVARCHEKIRNQRRDHLHKLSRKIADGYDAAAVEDIDMKAMGQCLHFGKSVQDNGYGLFREMLDYKLAWKGKKMVKVDRFFPSSKKCCKCGRIKKELKLSERVYHCVCGNKMDRDRNAAINIREEARRMLTA

SEQ ID NO: 29067 - protein, 147 aa, unknown
  TnpB Polypeptide
MQKGSNNRNKQRLKVAKLHEKVSNQRKDFLHKRSRQITNAYDGVCIEDLDMKAMSRSLNLGKSVSDNGWGMFTIFLKYKLEEQGKKLMKVGRFFVSSQTCSVCGYKNVKTKNLALREWDCPQCGNHHDRDVNAAINIRNGGMRLVNA

SEQ ID NO: 29068 - protein, 367 aa, unknown
  TnpB Polypeptide
LNIAYRFRIYPTEEQKILLGKTFGCCRFLYNQMLNDKIREYEKTKKMLKNTPAMYKKEYPFLKEVDSLALANVQLHLEKAYKNFFRDPKIGFPRFKSKHHSKNSYTTNMVNGNILVESKRIRLPKLKWIAMKKHREPAEGLCLKSVTVSMEPSGKYFASLLYEGYSCENQAAGPDYSTAKILGIDYAMQGMAVFSEKVETEEAGFFRKNEKRLAREQRKLSRCVRGSHNYELQKKKVARCHEKIRNQRRDHLHKLSRKIADGYDAAAVEDIDMKAMGQCLHFGKSVQDNGYGMFREMLDYKLAWKGKKMVKVDRFFPSSKKCCKCGRVKKELKLSERVYHCVCGNEMDRDRNAAINIREEARRMLTA

SEQ ID NO: 29069 - protein, 365 aa, Halorubrum sp.
MLEVHRTHQAKILNHGQVVESLDRHGWSASKLWNVANYYSREVWDETGEIPDHGDLKDELKTHNKYKGLHSQSSQRVLEELAEAFNSWYGSDDDRDNPPGYRKENYYDQQGRRVHEEHPRSTVTWKQKGIRHDSKNDRVRLSKGRNHKEYPRAREYILVEYETTPGVTVENLQQVRAVHDNSNGQWELHLVCKDEVETPDAPGTETAGIDLGICNFATVAYSTEEADLYPGNRLKQDGYYFPKEIAKCDDSGGEEATRLHAKWSERRTHFFHSLAKHIVQRCVENQVGRINVGDLGGIREDEDGSSKNWGRHGNLDLYGWAFDRFTDLLEYKAKVEGIKVVEVSERDTSKTCCHSSLVKPHTSVV

SEQ ID NO: 29070 - protein, 273 aa, Halorubrum sp.
MVTMTVTAKFHNPSLSRRKEWQRATRLYRDTKQFCIDGWENGDFGKSVTTATIDNDLYSAIQNQAIREAKSDHKKDGEVRYRESQPFAINNQNWELDTTENGTVVVGFPCVSRWWYTPIEVYDDIADPVERLVEGDADKTRLQIYRRGDDWYCTFNVEYDTDTSGETPIGVDIGEQHIFAVTAYGEDESMLVSGAEAKYVRRKYRSLRDSLSEAGALRARNRVGDKEQRRIKDLNHKLSRRLITFADQFENPVIRIEDLEGIRGDSSWSGVHS

SEQ ID NO: 29071 - protein, 415 aa, unknown
  TnpB Polypeptide
MKRYRTFKVEIDPTDEQKQQIARFQGICRFVYNLYLHENQERWEAEKKLAEASGRKPHSTLMKPAEFYTWLKQDYIPASGKIWINDCPSKAVRQSINDANEAYRKFFKKQSGFPKFKKKGSNEAMVYFCRNSLSQPVRSTRWYVQVPKLGRVHLKEKGRIPTYVPNEVEIVKGWIGQKNGRWYMSVYVEYEVDSVPSYRKDSDGIGIDLGIKELAVLSNKEVFANINKKRPMKRKLRKLKHLSRIYSRKLKAYRARKKKDPDNRPTRSNLNKAQKRLQAVQQKMNNTRNTYRRQTVARIMDLYPSYITMEDLNIAGMMKNRKLAHAISQMQWYAFRTDVQFQCAKRGIEFRLADRRYPSSKTCHQCGHVHKDLKLSDRTFVCPDCGYTEDRDLNAAQNLRDTAAYTVLDLQTTMF

SEQ ID NO: 29072 - protein, 396 aa, unknown
  TnpB Polypeptide
MIRSSKLSTKFSNKEKKQNLILFIEEYKKVTQFFIDLLWEKDDVPKLLPKKVTSQVETWLSARAVQCAAKQSSGIIRGTKKKNKERQYVYEQLLKQKLFKKARKLKNFINKNDKPNIKYLNPELDSRFVSFDFENETSFDIWLTFSSLGNKLKIEIPLKKTKHFNSLNGKVKTGIRLNAKHVTFMFESEVEKKTTGETIGLDIGINVVATTSNGQFKEEDGHGWTFNKIIQRLNKKVKGSKGYNKVQSQRTSFINWNINNLNFDNVKTLKLEKIKNVRKGKRTSNFLNRWTYAEIKSKLELTCEKLGVQVVYVSPTYTSQRCSSCGWVRRGNRKGQEFRCNQCSNAMNADLNAARNIVTNLRPIGTKERLLQNNRTGFYWKEVEQERMVPVTLELA

SEQ ID NO: 29073 - protein, 463 aa, unknown
  TnpB Polypeptide
MKANRVEQHIIKKNNPYWKIVDNLCFKSKNIYNYANYIIRQIFIITNLLKDNKEITQEQSDFLKWVNDNVDEYNKNKLKNLDMKQSKGRNLDKQFKLFKHFDKDNRMCNYNFLDYITKRSKPFIDLGSNSSQQTLKVLDKDWKSFFVGIKGWSKNPEKYLGRPKLPNYKHKEKGRKELILTNVQSKIIDGYLFFSFHPLKPLNNTFKTNVTGKLMQTRFIPKGDTYVMEIVYEIDIPEQMSYNVNIIGIDIGVDNLATVGNNIRLKPFIINGKPLKSINQFYNKEKSNSQSHLKLKYDRNWSNKLQQLTNKRNNKITDYIHKSSKYIVDWCIKNKIDTVIVGKNKNWKQESSMSKKVNQNFVGIPHGLFIEKIKYKCENVGINFIEIEESYTSGTSFLDGEMPSKENYNKSRRKFRGLFESNGGEFINADLNGAYQIIKKVFPNAFADGIEGVGLHPVRVNII

SEQ ID NO: 29074 - protein, 367 aa, Butyrivibrio sp.
MLKGMEFRIYPNRIQETIIQKTFGCSRVVYNSGLALRIEEYKNGNSIGYKETSSMLTSMKKTEEYSWLKEVDSIALQQSLRDLDKAYKNFFAKRASFPKFKSKHSHNKNYRTQNVGGNISVAGKYIKLPKLGYVKSKISMPVNGKINNATIKQTPSGKYFCVLNVEVPDVFYSNDGCMIGLDVGIKTFYTDSNNNILTNPKNLIKSEKKLAKEQRKLSRMVKGSSNWNRQRIKVARIHEKISNQRNDFLHKESAKLVKENQIICIEDLNVKGMVRNHKLAKAISDVSWSKFFDMLEYKSAFYGTEIIKVPRFYPSSQICGCCGYKNPNIKNLSIREWECPVCGTYHDRDGNAAKNILKMGLSLRVTA

SEQ ID NO: 29075 - protein, 184 aa, Okeania sp.
LPVDVPKHLTSENQGRVVALDPGVRNFLKLFSENSFGWIGSGDIGKIQRLCYYLDDLISRLTLAKSKTKQRMKKAANRLRSKIRNLVDELHHKAALFLVKNFDVILLPTFEVSQMTTKSSRKLRSKSVRQMLNWAHYRFELFLKHKAAEYNKIVLDVCEAYTSKTVSWTGEILNNLGGKKVINR

SEQ ID NO: 29076 - protein, 332 aa, Bacillus sp.
MEVNQMIINKAFKFRIYPNQAQAILINKTIGCSRFVFNHFLSLWDHAYKETGKGLTYGTCSAKLPAMKKEFVCLKEVDSIAIQSSIRNLADAYTRFFKKQNSAPRFKSKKNNVQSYITKQTNENIAIVGNKIKLPKLGLVRFAKSREITGRIVNATVRRNPSGRYFVSLLVETEVQELPKTSSYIGMDVGLKEFAILSDGTTYKNPKFFRSLEEKLAKAQRVLSRRMKGSSRWNKQRVKVARIHEYISNARKDYLDKISTEIIKNHDVIGIEDLQVSNMLKNRKLAKAISEVSWSQFRTMLEYKAKWYGKQVIVVSKTFASNRKDCGVSLIN

SEQ ID NO: 29077 - protein, 362 aa, Halanaerobium sp.
MQLTYVLELLKPTKRKENIFLNNIAEVVKNRQAIAIKLKAGKTELSSADFKNINLPSAVKNQNIREVKALHKLFLKSGSDKDNIEFKANQPICYNNQNYKIDHHIISIPLYTTKCQRFAFPVKQTERFEKLQQHINSGCKLGKASLFYKRGKWYFAVTIRIAAKKTSTSNLMGIDIGLRQLAVASVKNPQGKEINRQFHNGKQAGFIRKKYRMLRRKLGQSKKVKAIKNINDKEQRWMTDLNHKISRQLINFAVQKKVGTIIMENLENIRNTANSLNRADRNIHSWTFYQLQQFIEYKAELAGIKVEYINPKYTSQSCSRCAKVKKSNRKANLYSCECGNHIHSDLNASRNIANKYLEQQSA

SEQ ID NO: 29078 - protein, 367 aa, Coprococcus sp.
MLKAYKYRIYPTNEQKEQIAKTFGCCRFVYNRTLAYRKEAYEKEKKNVNKTNCNNYCNQVLKKEYGWLKEVDKFALTNAIYNMDAAYQKFFKEHTGYPKFKSKHDGHKSYTTNFTNGNITADFDGGKVKLPKLKEVKAKLQRNFIGQIKSATVSQMPSGKYYVSILVETEHVELTHTDQNTGIDLGIKDLCITSKGKKYENPKNIRKYEKKLAKLQRQLAHKKKRSQNYNKIKKKIALCHEKITNSRKDYLHKISHEIISENQVIVSENLQIQNMVKDHHLAKAISDVSWYELTRQLEYKAKWNGRKYIKIDTFYASSQLCSVCGYKNTEIKDLSIREWSCPVCGAKHDRDINAAKNILAEGLRQIA

SEQ ID NO: 29079 - protein, 189 aa, Okeania sp.
VSFNSETSFIIDGKHLKSVNQWYNKQVARMKEEKPQGFWSRTLAHVTEKRNRQIRDGVNKAARIVINHCLVNGIGTIVFGWNKGQKNESNMGAKNNQKFVQIPTAKLKERIAQLCNDYGIKFVETEELLTSQSSFLDNDELPKYGEKPDGWQPSGKRIKRGLYRSADNWLVNADCNGSANIRKNCKGNA

SEQ ID NO: 29080 - protein, 211 aa, Okeania sp.
IKLFGCQQVLIKADKNTSAIIEYLCHESNNLYNCCVYYGRQIWFKTGKIVTGFDLTKQMKSNPHFQAGYASSMQQTCLNVGESFRSFKQLLRKYIKGELNQKPNTPKYRKSGGLFTVTYPKKWLKLRDGKIRFPLGNRVKVWFGLTEFFLDFPINLKWELIKEIRIVPRNGYFYAEFVYQKMLEFPENQVLDFSKVLGIDHGLNNWLTCEL

SEQ ID NO: 29081 - protein, 406 aa, unknown
  TnpB Polypeptide
VPSIRLSRRKLDVFKELEALYKQILVELVDYALKNKIDSFTRLKKDKYHELRVRYPRLPSHYIHTACQDAATRIKSFLKLKKTGLAETEKPVVKSISIWLDDHLWKRVGYTLILVSTHKGYIPVELQPHKLYWKYINTGWTLRTQPRIKVDYKHRRLLVYFVFEKEVGVNTANAEEVISVDVNENNVTVKASSRVYILETGIKNITIGYARYREALQSIKGNKCISRALHGREWKRKRDIRLKIANIIANTAKNLNAVVVVENLPRKCSDNMIRNVEDPVLRHRIYQAGFRSMIRVIEEKCLEKAVPVVKIDPRNTSSTCPLCNSKLMRGNAPRRLKCPNCGFEAGRDVVAVLNLEEKYLALKGPVPLAPMPSEPTLEVAVLPVKEWARRKSLDAMRDHKPIQTSI

SEQ ID NO: 29082 - protein, 421 aa, unknown
  TnpB Polypeptide
MVIVHRGYKTELKLNNQQRSLCYKYAGCARFAFNWGLKRKIEEYSKTGKSPSAIDLHRELVKLKQNEFQWMYSVSKCAPQEALRNLDIAFKNFFRRVKNGESPGFPCLKSRKKGIGSFRLTGVIRVFEDSIQLPRLGRLRLKERNYLPPESDHVHILSVTISEKAGRWFVSLQVQEEINPIKNTGPMVGVDVGIKWLATLSNGTTYDNPRALARYERKLRRIQRTLPRKCKNSQNRAKARLRFQRLHARIANIRKNALHRVTSKLAKTKSVIVIESLHVNGMRKNHSLAKAVSDVSFAEFRRQLEYKTQWYGSRLVVAPQFFPSSRRCSQCGFIKTELSAKHNYHCKVCGLRIDRDLNASINLLFVAVGFTETQNACYEAGGDSPLGQCPSMMQEPNRELMISHKIRKTELILSSTLLTHG

SEQ ID NO: 29083 - protein, 262 aa, unknown
  TnpB Polypeptide
LEQLPPNCECANATLLHQHGDYYVAITTYTSREHRSAMVAPAQSIGIDFGIKNQLSLSNGIRIRYTVPVTRRIKQLCKKLSRKQYRSKNWWKMLYKLLKAYAKTTNIKRDIRNKLIHFLATNFQVVCYQNENLGAWRYLWGRRMLSTSLGGIIRMLEVKVQTPVEIDRFFPSTKTCSRCGHQRLISLEERTYVCHHCGLVIDRDYNSSCVIEKEGNSILGRGPTEVTPAETNTSTLALEYLNKIAYVEASMVAETGSLTALA

SEQ ID NO: 29084 - protein, 158 aa, Actinobacteria sp.
VCHRGRQRACARSEAAGRDLNRHRKHHRDLRKKLQRKGTKSARRLLKKRNRREQRHVSNTNHVIAKTIVTEAERTSAGIALEDLGGIRQRVRLRKSQRVMLHSWAFAQLGEFIAYKARRQGVPVVHVEPAYTSQTCCECGYVDKKNRVDQALFICRSK

SEQ ID NO: 29085 - protein, 497 aa, Actinobacteria sp.
MKRFRPQSGFVVQAFRFALDPNAAQETALRSHCGGARAAYNWAVGWVSASWWQRRAEETYGIGEGELTQWRPWSLPALRKEFNAVKRTDPRFAGWWEDNSKEAYSTGLANAAAAFDNYATSKQGKRRGKKVGMPRFKSKRKARLSCRFTTGTIRVEPGGRHVTLPRLGTIRVHEPTAKLLGPLRAGRARILSATVRHERGRWFVSFQVETAREIRRVTRPDVAVGIDLGVKTLAVLADSTGEIRTIANPRHLDTALRHLRRASHVASRRRGPDRRTGQKPSKRWEKANTRRNKVHHRVANLRTDALHKLTTAVTAEFGTVVVEDLNVAGMLRNRRLARRIADAGFGEIRSQLTYKTRRNGCRVVAADRWFPSSKTCSGCGAVKAKLPLHVRTYECDACGLVIDRDDNAARNLAALAATTAPTGTGVAGDQDTAKVSKPRGADHKTRTTRPRRTTGTGRAGGATLPHQRQTEARDRTQAQAPRLRWCDGPSRPKCPDC

SEQ ID NO: 29086 - protein, 228 aa, Vibrio sp.
VTKADRYIKRLQRKLARQQKGSNRRSKTKHRIATNHAKKANIRNDFAHKTSRSLVDSKAKVIVFEALKTSRMTRKPKAKQDEQGRYLSNKAKQKAGLNKSILNVGWHMIETYSKYKAYQAGKAVFKIPAPYTSQECATCGHTHPDNRKNQAVFKCVNCGHADNADRNASLVIKKRAINLILDTGTVLSDDGVLRTKSDSGRGGNRKTGRAKSSTSSVQRSVKKEKLAA

SEQ ID NO: 29087 - protein, 356 aa, Vibrio sp.
LPYVERKAIGKLLPNSASLNKQLPTWKKQDNRQWLGQAFAQCLQQRQRDLVSAIGEWIKGKRGFPVFRTRKLAHHSTMRFPNPKLQIAIERNHIKLPNGLGMVKYRNSRDVVGELRNATVSLNAVGEWHVSIMCLLDVELPEHVQGEMTGIDMGIAKNMTLSTDCCGDEGVFEGVHSFRAHQEKLAVEQRKLSRKVLGSENWKKQKQKVSKLHQRIANIRSDYQHKATSEISKNHAMVICEALKVANMSKSAKGDSENHGKNVAAKSGLNKSILDQGWHELRRQLEYKMKWKGGVYGEVNPRNSSRECAECGHIEKDNRKTQAEFICQSCGHSDNADKNAARVILMRYLRELELAA

SEQ ID NO: 29088 - protein, 221 aa, Clostridium sp.
VSVIIDTEITPQKNTYQGIGIDLGIKDFAICSNLDKTYKNINKTQRVKKLEKKLLRKQRKLSRKYESLKLRNKKEKGKATRQNIQKQIVKVQILHQRLTNIRTDYINKVVSSVVRNKPQYITIEDLNLTGLMKNKHLSKAVVQQKFYEFRNKLTNKCHALGIELRIVDRFYPSSKLCHSCGFIKKDLKLKDRIYRCSYGYVEDRDYNASLNLRDAKIYKIA

SEQ ID NO: 29089 - protein, 467 aa, Sulfobacillus sp.
MPFPVGCETFLSISSRNTTSHFRNGTMIGIMSIFCSRLIPIPNSPSLSMLIKVHHQDSSKRNFRSYESLFGKSISGHGVSVCLRQEARRLRPSKGPSKTRESENVSVLRFLLEPTQEQEQKLFYTFYLCRKLYNQALEERITSYREKGISIGYTDQQNRLPAWKREHPEYKGVHSQVLQNVLQRLDQAFVNFFEKRARFPKFKNKFMFRSITYPQARASYFHENQVYLPKIGWVRMMAHLPFDPASVKMVNVKFHDGQWYVNLTYVTEAAVPLTEIQNAVGIDLGLLSLIATSDGEFFENPQWLQKSEKRLKRKQRQFSRKQKGSKNRERAKDELQGIHDHVANQRKDHLHKVSRSLVDRYDLICMEDLPVKGMMKNHRLAKSIANAGWGRLTAYIEYKVKFAGKMVIKVPPHHTSQLCSSGCGTMVKKDLSVRIHQCPTCGLEIDRDVNAAINILHRGLEILQQVS

SEQ ID NO: 29090 - protein, 516 aa, unknown
  TnpB Polypeptide
MSVRKPSGITLKGLNISKGAGKLVRRKVDVRTVCIALEVDADASEKMHQTRRLYGQACNLLVPIVVSDTDRKKRLWQRYNLHKAAYPMVRTKMSVLGAQLACNVMRSVSSMYQSWISNHPNFSKDKKMVLPSISFRNPVVHLDKNTIRFFNNYTEASVYTVNGRVGVRLRPGKFQLSQLAGFLAEELAGTSKENRIYRLGECNLVWKCGIKGTPSRWELHIAIEKKLKEVSLDNLSLNQVMGVDVGENNAAALSTGRIFKAGKMKDDRDKYLSSRARFQRNGSRSARQALRKASGREKRHVEQINDEISKSIIEDAAERNIRLIVLEDLTDIRERIKAGLKVRARLHRWPFRELQQKIVDKACRAGIEVIFVDPRYTSQTCPHCNAIGTRQKHRFVCKNCGYRAHSDLNGGRNRECQDFCVWGGYSRGSPTRLPFVFEMQYARPDAIAGAKVEGPARSAGGSSLAPAIARREAAGALAYSMTPVNRSPNSRANWGMAAAHLGVARFQEAVKFMMAR

SEQ ID NO: 29091 - protein, 339 aa, Lactobacillus sp.
AKWLNTDSRLDTNMPSMAIRNYQASWNMWRKVNSAGTPKPKRKDQYRFSYQTKNSYPAKSRQAGEDIFNGAKVKVTDNHHIQIPKVGRLKASANNIKHLPHEKGVRIGVTTIKQEPNGAWYVSFQIKADHPLKQALPKTGSEIGIDLNLSNFLTDDQGHQVPNPRYYRKMLTKLAKQDRKVARRRRRAKKEHRRLLDSRNYQKARRQRANLHSHIAHQRNDFLHRTSTVLIQNHDLIVSEELRGKNMLKNHALAMSISDVGWRTFISQLEYKAELYGRTYITVHPAYTTKRCHCCQAINQQVKLGQEEWRCPNCHVFHVRDHNAAINIKNKGLALLQEA

SEQ ID NO: 29092 - protein, 437 aa, unknown
  TnpB Polypeptide
MELTQKLPIFPTISQEEILWILSEKCRLIYNFALAERKENWKQNKDKPKKEWNYIKYVDQQNQLPHIKEKYPEYKWVYSKVLQMTLKKLDASYKSFRALRNNGDEKAGPPKFKIKKYFTTLCYNQSGFKINDSTITFSHKHPSKEDISFKIPKEHVPREKLKQVEIFLDSRKRWFISITYEIETPEHVDNGLYQVFDLGVSQTAGVNIHGKTVLFTHRRADLYWKMKIEEVQGKRDHCKKGSHKWKWYDQKLKQMKRKQANQLKDFQHWFSKQIVENTKANTIIIGDLNVKKMAKKKKGTGNAKKTKAQKTLNHSVHNTGFMSRFAEFLTYKSEKIGKRVIRIGEEKTTKTCCKCGESSKRALYEKVITCDCGNQIDRDLNSSFNIMIKFLEMKKAGVFDFLLHQPSMTEESFLLNNEWNGFLRQTDLLDLTIEVYS

SEQ ID NO: 29093 - protein, 476 aa, Rhizobium sp.
MNVQRKDTMSSRAIILQMPPADCYNHRMPNRAYKYRIYADPQTAEFFARCCGVVRLVYNIALEQRSSFWRQFRKAEGKTISYPSQARELTAIRAEVLWVAECPIDAQQQALRDLDQAFRNFFAGRAGYPKPRRKFVNDALRFPSSRVGAIAVLNAKWARVRLPKIGDVKFRYTRPIRGAVGNVTVVRAANGWHIVFSCAFEHETPANDNPPVGIDRGIVNTFALSTGEMHAMPPSNLDDRHKQWQRTAARRKSRSKRQAKARRHAARIAAKAARQRLHWQHVTTTRIARRFGTAVLEDLKIRNMSASAKGTVEEPGRNVAQKAGLNRSILAAAWYRFELLLTYKLAFLGGTVVKVDPRYTSVTCSKCGSRDKANRENQAKFLCLSCGTRRPRRRQRGGQHTPGGNTAIGGVGDFRREPRTRKGGLKPPLKIPSFGGEDVKSPSIWRCFRAPPDRGEGGEEILHRQLGVRRSGRRAA

SEQ ID NO: 29094 - protein, 402 aa, Escherichia sp.
VKRLQAFKFQLRPGGQQEREMRRFAGACRFVFNRALARQNENHEAGNKYIPYGKMASWLVEWKNATETQWLKDAPSQPLQQSLKDLERAYKNFFQNRAAFPRFKKRGQNDVFRYPQGVKLDQENSRIFLPKLGWMRYRNSRQVTGVVKNVTVSQSCGKWYISIQTESEVSTPVHPSASMVGLDAGVAKLATLSDGTVFEPVNSFQKNQKKLARLQRQLSRKVKFSNNWQKQKRKIQRLHSCIANIRRDYLHKVRTTVSKNHAMIVIEDLKVSNMSKSAAGTVSQPGRNVRAKSGLNRSILDQGWYEMRRQLEYKQLWRGGQVLAVPPAYTNQRCACCGHTAKENRLSQSKFRCQVCGYTANADVNGARNILAAGHAVLACGEMVQSGRPLKQEPTEMIQATA

SEQ ID NO: 29095 - protein, 488 aa, unknown
  TnpB Polypeptide
LTTTYRVKAYLSKCGHLLLDQRLEEQRQLYNAALEERLTAWRMARTSLGRTHQSKELTAIRAAMPEYGETHRRISVGTLDRLDRAYQRYTQSLAELGRVRSGSMEGPPRLVRWDAKDRQWRPLCGQPRFKSGERFRTLECHAGAERFLRISQSARKGYLRVKGLPRLEFRWDERLPMIVHGTPTQPLYVKITRTARRVTISMSYAIGEAPEKPATGPVNPVGLHPGVTQRMTVTSDGSPILLERRRRDLATKARLQRKQDRQRRKAIRSGIATWERTATGRYRFVWRRIDGSDAGSARYGQGYRKTRRQAARLDQAEQETNIGLLHEVSSQLVREHDAIFIEAPGIRDMTRSAAGDLESPGEGVNRQRQLNRSVLEQTWGRFAEMLEYKAERAGIPFVRVPSPYMSQTCGQCGVVDPASRRSRDHFHCVSCGFDVDAEDNAAHNVLAQGLTMLGPGAGGTPPRRRPPRLPTGGVPPVAAENPVATGFT

SEQ ID NO: 29096 - protein, 542 aa, unknown
  TnpB Polypeptide
VYVTVEGFVDIGYIAGVECIFGGALAKNQTYKAFVARPTHILDLNGELLDGAHVLASLVSEVRDISSYATYVVRNDEALGDELERVAVAQPTTAGRRAGVTMPDFLVSGKSGRSRKEMLVQHRVVTECRSYQERVKAANGESSKYVSQGWKRTVDASAPGYGEDYVNLGAVDRCYAAIGNNLFLDGEIVLKMVIQGAWCRLIFDFDNARFTEGEVALPVIKVEDGQPVFIFAVVTDNPVVQFSGGYVIGVDVGINNYATVVVRSVATGRIVYETTLSQRVHSLWNSVQASEQQVRDLKVKAAALLRDRQERMAALDEARFHREAASRKKRELAILAAQEMAYLSHMWGNAVVAVEDLSWVVNTMQHGRWNRGALVRWLAHYVSQNGGWVVAVNPAHTSQRCNACGAKASHPTHELSVCAEHGTMDRDVNAAANIAARAAPRVEEARKTRAKNRKLRPQAALKTPVARRSLKYPGGDRTKNKPTPKRKNRPRVVREVILPLRPARVTVTRVLAGCDAQGATGTCQVAIKQGNMTDEWRLCSLI

SEQ ID NO: 29097 - protein, 399 aa, unknown
  TnpB Polypeptide
MTKSYKLKVFANKKKIKELNKLVAFWRDQVNHKIKLFWSFENVKSSYPPQQYCCGGKLVGDASVKSWRIVKGAKATEQKEKPYFEGKEIDLDQICIYIIPEFKTKLFDIWFKVISLTPRKRLVLPCKRTKIFNEAVKKGRLKKSFKLLKINGNYYIECYVEFPEVKKKNNNIVGIDVGLNKAIVTSDGKILGKELKDLRIRTKWRSYKRKLSPVKQWLNHYAKKLTQLYPNSDFAVEKLLFKGKKGSSKKFRRNNNNWPYMWLAKKLSELGHLKGFEVIKVNPYGTSIKCPLCGAADKANRHGELFQCVSCGHTGDADMVGAVNIKLRAERVAREHYVPLTSLGTLGTGTFVSKRDLIFTGENIISAYKSPTASLISSHTLQPTLCPSHCLSPRVRLLH

SEQ ID NO: 29098 - protein, 394 aa, Weissella sp.
MQQAFRFRLYPNQEQMNKLRQNIGGARFMWNALVADEMVQYKADQETPLPDGKRHPRLTYTQIKKLQGNEWLAGVDSLALANVSQQYRTARKHFFDWLKKHNGPRVGMPKFHKKWSAKWSYSTNNQPTNADIHHGSVRLDENNKHVVLPKIGSVRVKAHRQLIDNWHISTATITEEKSGKWYITLLVEIGDVAAWDKTGSIIGIDLGLSRFLTASDGEIIERVRFIRNGERKLTKAQRKLSRQREVAKKLSKSLAQSKNYQKQRIVVARLYEKIKNQRTDFLNKVSTQLVKNHDVIGYENLSSRNMQQNHKLAKAIADVGWYSFVLKLQYKANWYGKQTIGVAPAYITQTDYETGEVVKKPLDVRKYVNSLGHAIDRDLNASLNIRDKALATLQ

SEQ ID NO: 29099 - protein, 326 aa, Cuspidothrix sp.
VLHKAVQVRIYPSKEQETQLAQAFGCARWWWNYALNKSIETYKETGKGLSRAALNAFLPLLKKAEDTIWLGDCYSQVLQAATLNLTTAYKNFFDKRAGFPKFKSKHGKQSIQYPQNVKVVDGNVKLPGNIGIVKAKIHRPIEGKIKTVTISKTPSGKYFASIPTEVEGVSTLPNTRKNQTISQGKIYGIDLGLKHFAVVTDGEKVSKYDNPKHLAKSDAGWGTFTNFLAYKLERKGGKLVEIDRWFPSSQLCSNCFYQIGDMPLDVREWTCPHCGTHHDRDGNAAINIRTEGIRMLALSEVEGIKAEGSAVWCCRRGDKTKTWAKV

SEQ ID NO: 29100 - protein, 319 aa, Beggiatoa sp.
MPENILIFLGCLMSLSVPLSKHLLRQGSAFKRFFNRQCKYPKFKKKGVRDSFYLSNDQIKVAENRIRLPKLGWVKLTESLRFSGKILSATVSRTANKWFVSISVQLEKSPVFVSENQTDVVGVDLGVKSLATLSNGETIEGRKPLKKLSSRLARLLRKQASLTKGSKRNDRQKLKISKLHYRIRCIRQDSLHKLTHHLCQDFKVICLEDFPGKGMLKNHKLAKAISEIMGFYEFKRQIEYKAILFGNWISTVSKWFPSSKTCSNCGSKKDKLKLSERFYHCEACGMKIDRDLNAAINIEREGIRLMRQSTLNVKAYAWG

SEQ ID NO: 29101 - protein, 387 aa, unknown
  TnpB Polypeptide
MSIRTIALTLAPTDAQRAAFERLRRAFVDACNHTSEVAWDTRTFNMVRLRSLVYRDIRAAHGLMAQHACNAVSVVAQAYKKDKVTKRTFKPKGAVVLDTPRLYRVEGNHVAITTLDGRVRVKLNIGGIQREQLRTALKLGEADLLCDHKGRWRLMVTARYPDPPTIDTEGVIGVDLGRTDIAVTSDGDTFSGQQVAAVRDRYARTRAMIQRNASKGTRSSRRRGRAVLARLSGREHRFQRTVNHTISRRIVDTAAESKRAIAVEDLTGIRERTNKHPRSKEERRRSNSWAFYQLRAFLAYKCRAAGVPFVLVNPAFTSQMCHCCLHIGERSGKRFACLNLDCLWCGDADYNGARNIALLGRPLDAPHGSRLCCSYQPGRRALEIPRL

SEQ ID NO: 29102 - protein, 403 aa, Streptomyces sp.
LGFGLFIEVTQINDMITPVKIVVPVKLMPEADQAAALSATVRTVNDLACWVSEVAFANDVPREYELRKHTYAHLKEQGLGAQAAQHVIKKVRDAYTTLHANIRAGNLGKSGSKRRLRAESKPIMFRPESAQPYDDRCLSWQMDAQTVSIWTTAGRIKNVRFACSTHALKTLREYRKGESDLIERDGAFYLIATCEIPEAEQYEPDHFIGVDLGIVNIATTSTGYQAAGRQLNRYRKRQLALRAKLQKKRTKSAKRRLKERSRREQRHVKNTNHIIAKTIVTEAERTFAGLCLEELKGIRQRVRLRKPQRVALHSWAFAQLGEFIVYKARRAGVPVVYVDPAYSSRECAHCGHVDRLNRTSQATFVCRSCGVVAHADRNASHVLARRGENVWTAGRESRVPATP

SEQ ID NO: 29103 - protein, 402 aa, unknown
  TnpB Polypeptide
VDVRGFRYKLSPTPAQEALFRQFSGVCRLVYNLALEQRSTWGRAHKLGYVRQAADLTLLRAEFDFVRAVYVSCQQQALRDLDQACANFFAGRARYPTPRRKGVNDAFRFPGREVEAKRLNAKWGAVRLPKIGWVKFRDTRPLGGKVLSATVSKDALGWHVSFACEVERAACEPLTASVGIDRGVAVTLALSTGETFAMPTTLAALDARHRKAQRILARRKKGSNRRRRQLVRCARLAAKRARIRRDFHHKAALSIARRFGTVVVEDLPVRAMTASAKGTVEEPGRMVRQKAGLNRAILNAGWADFARILAYKLEQRGGQLVSVSAAHTSQTCSECDVIDKRSRESQAKFACVECGHQDNADINAAKNIRRRNTALLDVEGLRRRPDEASTSGDLHSLEIPVL

SEQ ID NO: 29104 - protein, 473 aa, unknown
  TnpB Polypeptide
MKAKTASYVVQYELLTTTRDRKSLEKKFNSAKSIYNACLNECLKRLDRLKKNEEYNSLLKEKSSKKRNIRLKEIELSLNYSEYDMHKYVKGIRKLYSKHIGSLEAQKLATRSFQTVEKLHYHIADKVNFKNRYSDMSVENKCNNSGLRLKDNIVIWNDLRLRIIEKRNDIYNVQSRNDRTKYIRILKKKIRRKTRYFVQLIKEGVPPKKRHFGKETVGLDIGTSSVAIVSDSCVKLEKLSNTKNEYKKLKRLDRKLERSKRINNPENYNDDKTSKKGKRKWIYSNRYLKLKQKRKDLYRKIADKRKEYQEILANKIISLGVDIKVETMRFNALQKRAKNTTINKKNGKINKKKRFGKSLSNNSSSQLLTIIDRKLHYVNCYLKKIDTFEVKASQFNHKAKVCVKKKLSQRWNVIDNIKIQRDLYSAFLIQNVCDDLKSVDTDLCDEKYDKFVNLHDIEINRLKETKEMRWLIA

SEQ ID NO: 29105 - protein, 290 aa, unknown
  TnpB Polypeptide
MYDRFFKGLGSYPKFKSKKYNKLSYTTKFSQNSIQIFEGYIKLPKLGLVKYRDNSFIENKITRVIISKTKTGKYFASVTYEKEEKPLEKTGSSIGIDLGLKDFCIFSTGEKIKNPKHYTSLQDKLIREQRKLSRMQRLALDKNRKLKDCKNYQKQRIKVARVHEKIANKRKDFLQKLSTGIVKNHDIICLENLNVKGMLKNKKLAKSISDVSWHEFIRQLTYKCKWYGKDLITIDRWFSSSKTCHVCGYKKNDLQLKDRSWICPICGTYHDRDINAAINILNEGLRLLSA

SEQ ID NO: 29106 - protein, 416 aa, unknown
  TnpB Polypeptide
VQYTAYKYRIYPTKEQKILLAKSFGCARFVYNRGLAIKTALYQNKEKGISVFNLMKEMAKWKDCEETKWLSEVNSLALQASLVNLDKAYTNFFKKRAAFPKFKSKFDNNQSFCNPQSTTVDFEENRVFIPKFKDGIEVVLHREFEGKIKSSTVSRTPSGKHFISILVETDAENPKIKKPKQEKTLGIDLGIKDFATFSDGTVISNPRHLSKKMKALKRQQRKLSRKKKGSKNRAKQRIKVARLHEKVANARKDFLHKVTHGIVENQDYSSVAIEDLNVAEMLKKGKKNKLSRSISDASWGMFRTFLTYKCERQGKNLLVIGRFEPSSKLCPCGHLNSSLTLKDREWDCPNCKQHHNRDLLAAKNIKHFAFCKQNTSKDKILVGQELSEPVSRKTNKTPLETRVSGSLKKEASMALA

SEQ ID NO: 29107 - protein, 347 aa, unknown
  TnpB Polypeptide
LNAQSSQKVIEELSDAFQSWFDLRHKDETANPPGYRKHGNERPRSTVTFKADGFKHDPENNRVRLSKGSNLKEHFSDFILCEYQTRPDVDLSEVSKVQNVRAVWNGDEWELHFFCKVSLEMNDSAGDGVAGIDLGIKNIATIAFPDEYVLYPGNSLKQDKHYFKRAEYDTEGENGPSEKSRWARRKLTEREAHFYHVLSDTIITECVERGVGTLAVSWPENVRESDWGKTGNKKLHTWAFDRIYQYLKYKGEERGLEVLKENEWDTSKTCSKCGDDTKSNRVERGLYVCSSCELVANADCNGAENMRQKITPSPHGKDRSNGCVAQPSTYLFDRESGMFRTREQAVS

SEQ ID NO: 29108 - protein, 385 aa, Micromonospora sp.
MRSHRGWAECSKEAFNTGLDALARALKNWSDSRKGARKGRAVGFPRFKSRRRSTPTVRFTTGVMRIEADRRHVVLPRLGALRLHESARKLARRLEAGTARIMSATVRREGGRWFVSFTCEVERAVRAPARPGSMVGVDLGVKHLAVLSTGERVANPRHLVVAARRMRRLARAVSRCVTPDRRVRRVGSNRWARAQQELSRAHARVVGLRRDGLHQFTTRLTREHGTVVVEDLNVAGMLRNRRLARHVADASFAEVRRQLTYKSEWNGGRLVTAGRWCPSSKTCSGCGAVKTKLTLAERTYTCTACGLSLDRDLNAALNLAALAREVTDDRSGRESLNGRGADQKTRSRGQVAVKRLPGTARAGQAGTVPPQGGTTAQRSLLSTRR

SEQ ID NO: 29109 - protein, 409 aa, unknown
  TnpB Polypeptide
MLRGKKIRLLPTPEQEILFWKSAGTSRWAYNYFLARNEEQYKTYLANGRKGKKSISEGVIRKEINNQLKPTTHQWLKEVGSNVMKQAVKEADRAMKKFLSGAAGRPKFKTKRRTTPRFYVNYESLTRKNGGFHGEKIGFVRTVEPLPKIPKGCHYSNPWISFDGKYWYIGFGYEVPDRLNVELTGDSIGIDLGVKELAVCYAFGERKKTVFKNINKTKEVHRLEKKLRREQRRQSRKFTANIDHYETVQRNEKKPGRRPIWKRPIRECRNIERQRQRIILLHRRLKNIRENHIHQTTAAIVKTKPSRIVMEDLNVKGMMKNRYLAKEIASEKFYEFRRQMEYKCEPYGIQLVFADRFYPSSKTCSHCGHIKKDLKLNNRTYICPACGHVIDRDLNAAINLAKYFKSEIA

SEQ ID NO: 29110 - protein, 374 aa, unknown
  TnpB Polypeptide
MEYSYKFRLYPNTEQQTLIQKTFGCARFVYNHFLAQRIAEYKATGKAPTRFQQDKMLTALKKELLWLKEVDSIPLQAELQNLDAAYQGFFRRVKKGKKPGYPRFKSKRGKRKSYKTKQHVSNGKPTIYVDSNHIRLPKLGLVKYRVSKEVKGRILSATVSQTPSGKYFVVIGCTDVDIEPLPSTGAVVGLDMGLKSFAITSDGVEYPNHKFLTKSLRKLARLQRQLSRKSKGSKRREKSRVKVARLQEHVANQRQDTLHKLSTQIVRDYDLIAIEDLAPKNMVKNHSLARSIADVSWGKFRRQLEYKAQWYGKVVVTVDRFFPSSQLCSSCGAQWAGTKDLSVRDWTCPACGKHHDRDVNAAKNILNEGLRLLA

SEQ ID NO: 29111 - protein, 317 aa, Erwinia sp.
MIAIKRLQAFKFQSRPNGQQERDMRRFAGACCFVFNRALDLQNKNPESGGKFIPYTKMTSWLIDWKASPETQWLKASPSQPLRQSLKELERGYKNFFQKRAAFPRFKKRGQNDAFRYPQGVKLDKANSRISLPRLGWIRYRNSREVIGEVKNVTVSQSCGKWYVSIQTEYEVAYPVHNAELMVGLDAGITKLATLSDGTIYQPVSSFKSGQRKLVMLQRQLSRKVKFSANGQKQKQKIRRHHLHVANIRRDYLHEVTSEISKNHAMIVIEDLKVSNMSKSAKGTAEQHGRNVKAKSGLNRSILDQGWYEMRRQLEYK

SEQ ID NO: 29112 - protein, 299 aa, Erwinia sp.
VPLQQAIRHQQTAFANFFAGRAKYPTFKSKRHKQAATFMNSAFKYKDSCLYMAKSKTPLDVRWSRPLPSVPSSITISKDAVGRYFVSCLCEFEPVSLPISAKTVGIDVGLKDLFVTDTGFKTGNPRHTAKYAKRLALLQRRLSKKQKGSRNRAKARLKVARLHAKIADCRMDNLHKLSRKLINENQVVCVESLKVKNMIRNPKLSKAITDASWGEFVRQLEYKGEWAGRSVVAIDQFFPSSKRCSCCGYTISKMALNVRSWICPECGANHDRDVNAAKNIKAVGLTALAHGATVNPKAS

SEQ ID NO: 29113 - protein, 174 aa, Eubacterium sp.
RRLGRQLKREQRCLSRKYEDLAKHKKIMKGEATRQNIHKQVLKVQKIHHRIDNIRTDYINKTIAEIVKAKPSYITIEDLNVKEMMKNRHLSKAVASQKFYEFRTKLEAKCREIGKELRVVDRWYPSSKLCHECGRVKKDLRLSDRIYKCSCGYTEDRDLNAALNLRDALTYKMA

SEQ ID NO: 29114 - protein, 405 aa, Streptomyces sp.
MQLRYSFRLYPNGPQRSALARAFGCARVVYNDALRARETARAAGLPFVTSAELSKQVTAAKQTEERAWLSEVSAVVLQQSLRDLDTAYRNFFDSLKGKRPRMGVPRFKSRKDNRHTVRFTANARWKITAGGDLSLPKIGDVRVRWSRALPSVPSTVTVVKDAAGRYFASFVVETGTDETLPETTPVVGIDLGLTHFAILSDGTKIDSPRFLLRAEKKLKKAQRDLSRKAKGSNNRAKARVKVARAHARTADARREFHHQLSTKIIRENQAVAVEDLAVKGLARTRLAKSVHDAGWSAFTTMLEYKAARYGRTFHRIGRFEPTSQVCSVCGVKDGPKPLNVRTWTCGACGAVLDRDINAAVNVAKAAGLAVSACGAQVRPGLVPAQREETGTHRDGQTTMVGIPAP

SEQ ID NO: 29115 - protein, 337 aa, Streptomyces sp.
MFLSADGESGKRFGNETIRINDTGQVSIKLPAELTHLANAPHGRYVLEAAVSFTHRGAEWLDRITANRAVAYRLHHDVDRGRWYVTASWQRTPAPTPPLEAALATGMVGVDMNDDHLAAWQLDPNGNPTGDPQRIFYDLSGNATHRDAQIRHALTRLLHFTKRCGAAAIGIEDLDLADSKTREKHGRNKRFRRLVSRFPTAKLRARLVSMAAEQGVAIVAVDPAYTSRWGAQHWQKTLATPCRKPSRHDAAGIAIGRRALGYPIRRRTAPPPQHQSDTAGHRIAQTAPDSLRREGNRPPATDRAPRGPSPSGTRKRRPSASNTVRDARSDPGLTPAH

SEQ ID NO: 29116 - protein, 243 aa, Ornithinibacillus sp.
MDKASKYYLPSYENISKPRKGNGQLFFKNGKWCFSFAITFELKNEVSSEEKEVGVDRGLKYIAVAGDKEVGKYIHFSGKHIGHIRRKYSRLRRIFMKNKNMKALKRLENKEQRIIQYWNHVISKEIVRFAKKQGASIIKIEDLKSIRSMKKFWKRSDRNINSWAFFDLEEKLTYKAQLAELEVVKVNPFKTSQECSNCGNVVKKNRRGSLYTCSCGYKKDADVNASFVISTRPSNEEKAITAT

SEQ ID NO: 29117 - protein, 196 aa, unknown
  TnpB Polypeptide
MGIDLGLKDLAIVSNGKTYKNINKSARVKKLEKKLCREQRCLSRKYENLKKGESTQKNIQKQKLKVQRLHHKIDNIRTDYINKSIAGIVKAKPSYITIEDLNVSGMMKNRHLSKAVASQKFYEFRTKLKAKCDENGIELRVVDRWYPSSKICHCCGAVKKDLKLSDRIYRCDCGYVEDRDFNAALNLRDALTYEVA

SEQ ID NO: 29118 - protein, 349 aa, unknown
  TnpB Polypeptide
  misc_feature (286)..(322): Xaa can be any naturally occurring amino acid
MLKAYKYRLYPNKEQKRKLNETLWLCSTVYNRCLAERRDAWKNEQRSLTAYDQIKQLPIWKKEDLRLNQVYSQVLQDVVRRVDKAFQAFFRRVKAGEKPGYPRFKSARRYDSFTYPQSGFQLQNGRLQLTKIGSVKIKLHRPLQGKVKTLTIHRQADGWYACFSVEVDPAVLPPSNKAVGVDLGLESFAITSDGEFFPSVRYLRKSERNLKRLQRMVSRRQMGSSRRQKAVRQLAKAHVHVANQRRDMAHKVTRSLVNRYGLIAIEDLNVKGMLKNHHLAKSISDXXXXXXXXXXXXXXXXXXXXXXXXXXXXXXXXXXXXXWHKCPHCGTSLHRDVNAAINILHRAVA

SEQ ID NO: 29119 - protein, 461 aa, unknown
  TnpB Polypeptide
  misc_feature (226)..(259): Xaa can be any naturally occurring amino acid
LKHIQQNDPELYAAITAELARQRENLELIASENFTSLAVMEAQGSILTNKYAEGYAYRWSKKTGHINYKLYGRYYGGCEYIDDVERLAVERAKELFGAYHANVQPHSGSQANMAAYFSLVKPGDTVLSLELDHGGHLTHGHKLSFSGKLYNIVHYNVNRETQQLDYDEIEALAKQHKPQMILTGASAYPRKIDFKRFREIADMVGAKLMVDMAHIAGLVAAGLHEXXXXXXXXXXXXXXXXXXXXXXXXXXXXXXXXXXGWYACFSVEVDPAVLPPSNKAVGVDLGLESFAITSDGEFFPSAKYLRKSERKLKQLHRMVSRRQNGSHRRQKAVRQLAKAHAHVANQRRDMAHKIARSLVNRYGLIAVEDLNVKGMLKNHHLAKSISDAGWNLFVTILKAKAAEAGRQVVEVDPRNTSQICSGCGCIVEKPLSQRWHKCPHCGTSLHRDVNAAINILHRAVA

SEQ ID NO: 29120 - protein, 255 aa, unknown
  TnpB Polypeptide
GVRRSLGWVPINTGAASWKNGQVYHSGHYFKVWDSYGLSQYKFRSASFNEDARGRWYFNVVVDAPAQESTGTGAVGIDLGCKETAVTSDGHRVVGRRYRELEAKLGIAQRARNKDRVRNLHAKIKNRRHNDLHQFSRQLVNNNALIVVGDVSSNKLVKTTMAKSVLDAGWGQLKTMLEYKCDHAGIVFMEVNEAYTTQTCSCCGQRSANSPKGRAGLGIREWSCGCGATNDRDVNAARNILALGHERLAVGIPVL

SEQ ID NO: 29121 - protein, 233 aa, unknown
  TnpB Polypeptide
REVEGRILNATIRRNPSGKYFVSILVETEVQELPKTDSAVGIDVGLKEFAILSDGTIYSNPKFFRRLEEKLAKAQRILSRRKKGGSNWNKQRIKVARIHEKITNARNDYLHKISTYIVKNHDIIGMEDLSVSNMLKNNNLAKAISEVSWSQFKTMLEYKAKWYGKQVVTVSKNFPSSQLCSCCGYKNKDVKNLALREWACPNCGTHHDRDLNASINLRNEALRLTAGTAGIAY

SEQ ID NO: 29122 - protein, 179 aa, unknown
  TnpB Polypeptide
LGLKEFAILSDGTKVENPKWLRKTEKRIKKIQRDLSRKQRGSKNYEKTRIKLAKLHEKIANQRKDFLHQLSSKIIHENQVIVLEDLKVKNMQQNHYLAKAIGEVSWAEFRRMLEYKAKWYGREIIIAPTKYASSQICSECGYKNTDVKNLALREWKCPNCGAIHDRDVNAAKNLLKLAM

SEQ ID NO: 29123 - protein, 402 aa, unknown
  TnpB Polypeptide
  misc_feature (200)..(233): Xaa can be any naturally occurring amino acid
MLKAYKYRLYPNKEQERKLNETLWLCSLVYNRCLAERREAWKNERRSLTAYDQIKQLPAWKKEDPRLNQVYSQVLQDVVRRLDKAFQAFFRRVKAGEKPGYPRFKSANRYDSFTYPQSGFQLQNGRLKLAKIGLVKIKLHRSLQGKVKTLTIHRKADGWYACFSVEVDPAVLPPSNKAVGVDLGLESFAITSDGEFFPSXXXXXXXXXXXXXXXXXXXXXXXXXXXXXXXXXXYDKVIILRLDWGNNNLTSLPENFGNLEVKGNLILKYNQLTSLPESFGNLKVGGSLYLDYNKLASLPESFGNLKVDGHLDLGYNKLTSLPESFGNLKVGGYLYLGDNQLTSLPESFGNIKVGRILWLQSNPWIIDTNFVNFYEKYKGKVVLGKKAAEEIKRFNKLKEWEE

SEQ ID NO: 29124 - protein, 498 aa, unknown
  TnpB Polypeptide
  misc_feature (200)..(233): Xaa can be any naturally occurring amino acid
MRAYKYRLYPNKTQTILINKTLGCTRFVYNYFLDARIKAYQEKEETLNYTKCSAQMTELKQELNWLKEVDSIALQQSLRNLDTAYQNFFKHKSGFPKFKSKHNNRQSYRTQNSNNNIRIEGNRIKLPKIGKVKFANSRNFEGRIINATVSRTPSGKYFVSLLVDELPEKLSETDTVIGIDLGIKDFAVFSDETVVPALNXXXXXXXXXXXXXXXXXXXXXXXXXXXXXXXXXXGIHRVNFGHVKDTVQVESYEDVINLLKEDLRPYESIIIDTGGKLLDYMGEWIIRRNPKMGKANGMLTLQGYGERKAEFSNFCKKISLLNKHLIFVAHRQTQQEGDEYRYVPLFGGSNYDALVTELDLVGYMEAQGKKRTITFDPTSRNDGKNTCNLPSIVEVPNTVDDKGNALENTFITEKVINVYNERLQKNKEMKKEYDYLIEFISSELSAIETPENLTEFMTKIPSLKHVGSSLLKAKELLNKKAAELNVKFNKETSRYETI

SEQ ID NO: 29125 - protein, 276 aa, unknown
  TnpB Polypeptide
FKKQAKFPRYKSRKHSRASFYNDCVKLKVKKNEVLLEKIGWVRIKETIPMDCKYSRPTVSHDGKYWYISVGIETPQEKVELTGERLGIDVGVKDLAVCSNGMVFKNINKTKTVRKTEKKLKRLQRKVSRKYEKGESYHKTSNIIKLEKQVVLVQRRLNGIRKNHLHQASTMIVKTKPSVVVMETLNIQGMMKNRHLSKAVQQQGLYEFKRQVKYKCEKYGIQFIEADKWYPSSKTCSECGNVKNISLSERTYICEECGCIIDRDLNAAINLSRYVA

SEQ ID NO: 29126 - protein, 252 aa, unknown
  TnpB Polypeptide
PKGLHIKMAEELRFEPTKIYNVTVSRTANMWFASIQCEVPDGENQASGAVGIDLGVTDLATLSDGTKFANPRSERKFRKKIARAQKNLHRKQKGSRNRHKARIKLARAYYKSACYRGDYLHKMTSAIAKKYAVVCLEDLNVAGMLQNHCLARAISDAAMNMCKNMLLYKAQEVRFIGRFDASSKICHVCDYKNKDLKLSDRHWTCPQCAASLDRDVNAAENILRWATSEVRPVERPMRDAMKQESNSVVKVS

SEQ ID NO: 29127 - protein, 226 aa, unknown
  TnpB Polypeptide
HVSASKEIDNPDEANIQRIVGIDRGLRQILTIADDTAHTTFYSGKSLIKKRRHFKKLRQSLQAKNTKSSRRRLKTIERRENRWMNDVNHQLSKTLVDRYGANTLFVVEDLTNVTFNTTHHRKQDARYEHHSWRFFDFEEKLMYKALESGSQVLKVSAQFTSQRCPKCESIDKANRQQDKHLFTCQNCGYQSNDDRVAAINIKELGHRYLSSEKNPRFEKVVPIQNY

SEQ ID NO: 29128 - protein, 162 aa, unknown
  TnpB Polypeptide
NARRDYLHKATTTISQNHAMVCIEDLQVRNMSRSAAGTVIQPGRNVCAKSGLNKAILDQGWFEFRRQLDYKLEWNGGWLIAVPPKNTSRTCPSCGHVSAGNRKTQAVFECVDCGFKENADVVGAINILRAGHARLACEVSGATRPPAAGTHRSDSGLAPCHA

SEQ ID NO: 29129 - protein, 273 aa, unknown
  TnpB Polypeptide
  misc_feature (220)..(253): Xaa can be any naturally occurring amino acid
LHRTFEGIVKSSTITRTSTGKYFISILVEVNESDVPMKPICESKAVGIDLGIKTFAVLSDGTEIPNPKYLKQSLDKVKHLQRSLSHKTKGSKNRDKARRKLALAHERVTNQRKDFSHKVTKYLVSNYDTICLEDLNVKGMVKNHHLAQSISDVSWSMFNTLLEYKAQEQGVNILRIGRFEPSSKFCPCGYINKGLTLAMREWTCPECGTIHYRDLLAAIXXXXXXXXXXXXXXXXXXXXXXXXXXXXXXXXXXAGQELLLVPGKLLACRRKQP

SEQ ID NO: 29130 - protein, 254 aa, unknown
  TnpB Polypeptide
  misc_feature (12)..(45): Xaa can be any naturally occurring amino acid
MDNLFLEVLNGXXXXXXXXXXXXXXXXXXXXXXXXXXXXXXXXXXSINYTTEIKDPKINKEKTPIIGADLGIKDYLITSEGNKYINNKYLLKYENRLKKLQKRLSKATKYSENYYKILNKLQKVHVKVANCRSDYLHKLSRKLINENQVIVLESLKVKNMLSNHKLAKHIQDASWGKFITMLQYKAEWCGSQIIQIDTFFPSSQLCSKCGFRNKAIKNLKIREWECPHCGAIHDRDINSAKNIKEEGKRLLKIA

SEQ ID NO: 29131 - protein, 111 aa, unknown
  TnpB Polypeptide
VIISEDLNVKGMLKNHHLAKAVSDATWSRFCDMLEYKAKWYGRTYHKINPWYASSQTCSKCGFVNKEVRCLSIREWVCDNCGTVHHRDINAANNILKQGLKELGLSYIKIH

SEQ ID NO: 29132 - protein, 270 aa, unknown
  TnpB Polypeptide
VKNDIYVSKDNEKLLKVPKLGFVRLSQKIRYKDYNLKKVTISKSSTNKYYISILVEIDKKSLNHKGLKTTSIEKVGLDLGLIDYLVDSNGNKVSNPKHLKKFEAKLAKEQKILSRKYKQAKKDGRNLSESKNYQKQRLKVAKIHEKIRNIRHDFLHKLTNAITNESQVIIAESLNVKGMVKNKRLAKYISDASWGTFISHLEYKSERKGRTFVQIDTFFPSSKMCSNCKEIHELTNDLSVREWQCPTCNSIHDRDINAAINILNEGLTLI

SEQ ID NO: 29133 - protein, 366 aa, unknown
  TnpB Polypeptide
  misc_feature (8)..(41): Xaa can be any naturally occurring amino acid
  misc_feature (322)..(355): Xaa can be any naturally occurring amino acid
LIRAAPRXXXXXXXXXXXXXXXXXXXXXXXXXXXXXXXXXXDSLALANAQMNLQKAYKNFLEGYAEFPKFKNRKAKQSYTTNLVNGNIELKDGHIKLPKLKLVKIKQHRQIPADYKIKSCTISKTKTGKYYISILTEYEKDIKPVSIQKVVGLDFAMNGLYVESEQGEKANYPRFYRESLDKLAKAQRILSKRKKGSARWNKQRLVVAKLHEKVANQRMNFLHHKSKELASNFDAVVIEDLNMKGMSQALHFGKSVHDNGWGMFTTFLAYKLKEQGKQLVKIDKWFPSTKKCSCCGAEKPMKLSERTYCCSCGYEADRDYNXXXXXXXXXXXXXXXXXXXXXXXXXXXXXXXXXXPAHTGCHCGGG

SEQ ID NO: 29134 - protein, 276 aa, unknown
  TnpB Polypeptide
AITYDSRILSYKGMSVSIWAIGGRLKMPFVCHNPKYLPYIKGESDLVYKKGKFYLFQTVDIPDEDVEDVEEFIGVDFGLTDIVVTSGGGKQSADWVNSYREQRQKVRKSIQSKGTKGRTHSCKRGCAKLLKRLKGKEKTTATIINHTIAKRIVLAAKAEHKGIAIEDLTNIRFTSKRRNKKFRTKLGRWSFGQLRSFIEYKAKLHGVNLIVVEPRYTSQTCSCCHHIGVRKNKSFKCPNCGNDMDADLNAAKNIATLGAAVNQPEKSGMYCSLHTA

SEQ ID NO: 29135 - protein, 416 aa, unknown
  TnpB Polypeptide
  misc_feature (32)..(65): Xaa can be any naturally occurring amino acid
  misc_feature (381)..(414): Xaa can be any naturally occurring amino acid
VRASYKNLEETKDLNLHCHIKYKVAGLHSLSXXXXXXXXXXXXXXXXXXXXXXXXXXXXXXXXXXNQLSGSVNFVWNYVNALSFEHLKRTGKFFSAYDLSEYTKGSGEYLGLHSQTLQAINETHAKARKQFKKAKLNWRTNRPDAKRKSLGWIPFKKSAIKYLQTRQTGKKGLKSTLQLSLSKGQKLIIDVFDSYNLSLYQINTLEIVQDSRNRWYACITVKDFPKQVSGKGSVGIDLGLKESATTSNGDKLTIKQTQKWANKLAVAQRAKNKKRVKAIHAKIKNTRLDLIHKFTTKLVQGNALIVVGDVKSRSFTTKKTKLAKSTYDAGWFELKRQLEYKCKHAGCQLEIVNESYTTQTCSCCYKISDSSPKGRAGLRIXXXXXXXXXXXXXXXXXXXXXXXXXXXXXXXXXXRK

SEQ ID NO: 29136 - protein, 272 aa, unknown
  TnpB Polypeptide
YGLEQFINTPNYEIANTDIIRKASGIYLKVSVYVPKKEKEIKNKSVGLDFGIKTSIVTSDGDSFNCNKQESEYLKFLQKQLHRKQQGSKRYWKLRNQIQKEYEHISNQKKDIANKIVSKLEKENDVIYFQDEQISNWKKKKRSKKNGKKCGFSFGRQVQSSCLGRVKTKLELLEKQDKAFKISKWCPTTKFCPKCGCLNTLTLKDRIYICDCGYTEDRDFHASKNVKLFGSTKRTECLEQASAEASVTTQSIDSQLVMQIEPLKRKQEATTL

SEQ ID NO: 29137 - protein, 267 aa, unknown
  TnpB Polypeptide
MGIWNGKRQQPIVVYVKELPIGKIKEIELIYDRGLKLSLAYEDGLIESINNNKNIAGIDAGEIHTISSYCENGNAIIITGRKARSVKRLRNKKIAELQRKMSKCKKGSRKWKKYNKAKQYILSKSDKQLTDILHKTTKQYVDWCIENKVKEVVIGDIEGVQRNTKKKRNKNTNQKLSQWQFGKLYKYLEYKLKAEGISISKINEGYTTQTCPVCGKRKKTSTRNYVCICGYKEHRDIHGSKNILSKYKYNDIRYLGETKEIKYLRIA

SEQ ID NO: 29138 - protein, 400 aa, unknown
  TnpB Polypeptide
  misc_feature (289)..(322): Xaa can be any naturally occurring amino acid
LRKNAWEQEQHSISLYETNKILTQWKKERPELNRVHSQVLQNVQMRVDLAFKAFFRRVKAGGNPGYPRFKGKGRYDSFTYPQSGFKLDGDRLHLSKIGDVKIILHRPIEGTIKTCTVRRSSTGKWYACFSVEYEPSPLPQKEMVIGVDVGLESFATLSNGEKIENPRFFRTDEKALAKAQRKLSKAEKGTPERKKARKNVARIHERIANRRLDFAHQTSRRMVDQYGTIVFEDLNIKNMQKNHCLAKSIADVAWNLFITITENKAEEAGSRVILVNPRNTSQMCSRCGXXXXXXXXXXXXXXXXXXXXXXXXXXXXXXXXXXTSSGLNSRSMTRTRSPRRTASCSYPVNSSRLTTSRRYVARGTLRLPSSSRVFCKSFAGSVSSSSTNTPKRWRPPGRPH

SEQ ID NO: 29139 - protein, 309 aa, unknown
  TnpB Polypeptide
  misc_feature (274)..(307): Xaa can be any naturally occurring amino acid
MPKIYRGYEFALYPDTEQKVFFAKSFGCVRFIWNKMLAAKINYYKENKTNLKITPATFKKEFSFLKEVDSLALANTQLNLEASYKKFFKEGSGFPKFKSKKIGKNSYTTNNQGGTIAVIKTEKGDFIKLPKVGLVKIKLHRELPTNSVIKSATIKQSKSGKYFCSILFEKEIATTMGVSISPDKVLGLDYSSGHFYIASDGNIADYPKYYRQKEKQLRRAQQKLSRCKNGSKNKEKARTKVARIHEKIANQRKDFLHQLSRKITNSYDVVVVEXXXXXXXXXXXXXXXXXXXXXXXXXXXXXXXXXXIG

SEQ ID NO: 29140 - protein, 231 aa, unknown
  TnpB Polypeptide
VEGRILNATVRRNPSGKHFVSVLVETEVNELPKTNSSVGIDVGLKDFAVMSDGTVYMNPKFFRTLEKKLAKEQRILSRRKKGSSNWHKQRIKVSRLHEKITNARTDYLHKISTDIVKNHDIIGIEDLSVSNMLKNRKLAKAISEVSWYQFRTMLEYKAKWYGKQVVIVAKNFPSSQLCSQCSYRNKDVKNLNLRKWECPSCGTHHDRDINAGKNLKNEAIRLLTVGTTGIA

SEQ ID NO: 29141 - protein, 322 aa, unknown
  TnpB Polypeptide
MAKGSPVFQASCDHSAIAVASSYLSREKQKIRSTSFTESVTCYKGMYRDFEGNAITLKVWTGEKWLWNRIKLRGNTIPEEGQMMSPSIVLKKTGPELHIPWKTFVKDGRTAKERMAAGEKICAVTFTNQDALTVCCVLNSDGAKENVFFVRGGAEYAHRCRQVTDKIKKSEASGSSGSSAIPNSRYWMKLKNLNDFYSHSISRQVINYTIKQGAKIIVLPEYEKEYSRILMSKAGNFSPIHLSTAIREKIKYKAWQEGLVVVELQQHNISSTCAACGASIHKKGQNFVCKNGHQGNYYLNASWNLGLKCIRGFQPKEPRTSD

SEQ ID NO: 29142 - protein, 370 aa, Chamaesiphon sp.
MRISFKTELKLNNRERTQLAKHAGVARHAWNWGLDLCQKILNYNRENPDDKLRFPSAIDLHKFLVKWVKAENPWYYEVSKTSPQYALRHLSSAFSDFFRKKMANGRRVGFPRFKKKGQHDSFTLQGTIKIKHRSIQLPKLGILKTYERLPQGLAPKTAVVSRTADRWFVAFSYEIEPNPTVKMLTAVGVDLGIKTLATLSTGETFPNPQPYRKSQARLARLQKAASRKVKGSKNRHKANMKVAKQHARTANIRKDTLNKLTTHLAKSHSQVVIEDLNVSGLMANHCLAKSIADLGMYEFRRQLTYKCELYGSELITVNRFFPSSKTCSGCGHIQDMSLKERVFNCQQCNASIDRDLNAAINLRNQALILA

SEQ ID NO: 29143 - protein, 449 aa, unknown
  TnpB Polypeptide
MAGTIIKSTKHYLSDNNTGKLKHLNIFLRDYRIVLKRAIDFYWAEHNLNTGTQNKSAYKAQKFYPFTNQLKTDDLVLSGRAIKCAVTQANGMIKSLLKKYEKKCYALEKAREKGNTTREAIINSWLYKNRFIKKPKINKQVGAELGTILVSMTESVDTKEFDLLFMFGSLFDATYKKRYLPKNKLFILSKKHKRYNYLDSKKEERLKSFLLTENYISVRFKVAIPNIKEVGKTVAIDQGINKLLTLVDRNNNVYQSSNNAHGIDFKDILTALSTKKKGSKSFNRTVEHRKNFINWTINQLDLSDISEIRLEEIKNIFHKQKRSKFLNGFTNTLIRDKLEDMALLAGVQLVEQSSAYRSQRCNSCGFVHCLNRSNKDKEIFKCRCCGHTANADVNAASNHLVDGLPALRYYIVKGINRTSGFYWNPVDDEVQGVYSPLVQVVVRKNKRKK

SEQ ID NO: 29144 - protein, 474 aa, Nocardia sp.
MILRGNTRVRPAAATRTEVSVSHRQGVRFELAPSTEQAIVMGRHCGLSRVVENFCLETVYAKWAQRKAEESYGLIGDALTQVPWSAPELEREWRAVHRQRFPWFAENKMSSRVPKEACRGRAAGFANYLESKNGRRKGRRLGFPTWRKRKHGSRFRYDADRAKPVGPRTVRLPAIGDVGTREDMSWLTDRLVDDRARILGATVREHAGRWWISFQLELDRTDINLRHKVAAEAPACGIDLGLTTFAVISNSDGSFEHISAPKPLAAALRALARANRSLARCAEGSKNRIKARRRVARLHLRVANQRRDFLHKTTTRLARTKSAIAVETLNVKGMTANRRLSRAISDAGFGEFIRLLAYKADWYGATLYRADRWFPSSKTCAVCGSVNQGLTLADRSWLCPGCDTAHDRDRNAAANLLAAMLADPHFLAGKFPGETKRLAEIAEDQLPQWSRRQSMKQEEDQLGIAEIHATVTHR

SEQ ID NO: 29145 - protein, 294 aa, Photorhabdus sp.
  misc_feature (11)..(55): Xaa can be any naturally occurring amino acid
MMLRATKVRIXXXXXXXXXXXXXXXXXXXXXXXXXXXXXXXXXXXXXXXXXXXXXLSRSATGKYYASILCDDGMAAPEKPSLITQMTGLDMGLSHYAIKSSGDKMANPRHLINAGRNLRRKQKALSRKQKGGANRRKARQRLAAVHERVANARADFQHKLSRTMVDENQAIIVETLKSANMMKNPRLARAIGDAGWHGFIKKLEYKAAEKGVHLVKLDQWFASSKTCHCCGHKMPELPLHKRSWPCPCCGVEHDRDINAALNIERKGIQELQAAGLVVSAHGGQRKSVASTVAA

SEQ ID NO: 29146 - protein, 366 aa, Firmicutes sp.
VKTNRAYRYELKPDKATRILLAKHAGCAPFTYNWGLTERIRLYEENGKSTNAIKQHRRLNALKKTDYPWLYEVSKCAPQEALRDLDKAFRNFFRGIKDKTGVGFPKYKKKGRHDSFRLTGSVKVKEQAVQLPRLGIIKLKEKTAVEGRILSVTVSREADRWYASLTVEQQIPEPEKINNGDIIGIDVGLSCFAKYDDGTAIEAPKPLNKYIKTLKRRHKQHSRKQKGSNNRKKSAMALARLHRKIRNIRSDFLHKLTTQLAKTKQEIVLEDLHIRGMIRNNKLARHIADSGWGEFRRMLEYKTRWYGSILTFAPRFAPTSKTCSNCGHRCEDMPLLIREWKCPECGTYHDRDINAAKNIKRFAVTA

SEQ ID NO: 29147 - protein, 380 aa, unknown
  TnpB Polypeptide
MPGEKWNTAIKIRLYPSPEQAELMEKTFGCCRWLWNHILADVQEFYAATDLQFIPTPAHYKKEAPFLREVDSQPLCTVHQNLRRAFLDFFRNPGAFQYPQFKTKKSGKDSFTVYCRQYRTGPSIRLLGNGLQMPKLGFIKAAVHRKPLHWWDLRMVTVSRTATGKYFASVIFAYQAKKQEAVEPTQKTTLGLNHSISSLYVDSEGRRPEMPSWKKPQKKLAEMQRKLSRMQKGSRNYQEQQQKIRLLHEHIANQRRDFIHKESRRIANAWDAVCVRDADLNDLAKKLKGAKVMASGFGMFRDCLRYKLQRQGKACITVDRYTPTAKTCHECGFVHEGLGQREKIWTCPHCGAALSREVNAARNLRDMGLFQYKSKETSAA

SEQ ID NO: 29148 - protein, 327 aa, unknown
  TnpB Polypeptide
LNIAYRFRIYPTEEQKILLGKTFGCCRFLYNQMLNDKIQEYKKSKTMLKNTPAMYKKTYSFLKEVDSLALANVQLHLEKAYKNFFRDPKVGFPRFKSKHHSKNSYTTNVVNGNILVEGNRIRLPKLKWISMKKHREPAENCRLKSVTVSMESSGKYFASLLYEGYSCENQAADKDYSNAKILGIDYAMQGMAVFSEEIELEKAGFFRKNEKRLAREQRKLSRCVKGSHNYVRQKKKVARCHEKIRSQRRDYLHKLSRRIADQYDIVAVEDIDMKAMSQCLHFGKSVQDNGYGMFRNMLEYKLEWKGKELIKVDRFFPSSKNAVNAER

SEQ ID NO: 29149 - protein, 446 aa, unknown
  TnpB Polypeptide
LKAFKTFSTVLEEDNAKEIIEYFEETAENYGFLKRCALHILRNCPETSKNNLNKLLQERFSVTARTANSAIHEVEEMISSALALIPLNIEKLEARIEGKMKIIEKKKKEMAKIHASRKTNTKRLGKLKLHIYNIHNSINKIRQKIENLEKQMNERKPNICMGTKKLARNDMKAFKQHRDSQINYIGRAKEKQGNVNFQMQYVKKGNFFSMKVRRDFGKWKEDRSPERFAYGKCHFKYGGRQLRNALKDNASPVTVSVIRRNGRYYLFVTVAVSYESSSIVTRKDHGTIGIDFNKGFINICETDEKGNIVNIEKIKYPFGKAGITNAGLADVISKVSKKAADTGKSIVAEDLSFEKKKRKSKKAVTPTEKERMRMLHSLPYSRYAQILENITFNKRIELIKVNPAYTSRTAEQKFCNRMKLNIHNGAAYVIARKGMGIKDKFLKKTG

SEQ ID NO: 29150 - protein, 365 aa, Fusicatenibacter sp.
MQKGIKFRIYPNREQKNFIHQTLGCCRFIYNRGLAMRKEGYENGKKIGYSQTSAMLTELKKQEEFAFLKAADSIALQQSLRDLDRGFVNFFQKRASYPTFKSKHNRFQSYRTVNQKDNIRIVGRYLKLPKLGFVKIRQSMEVGKINHVTIEHTPAGKYFAVLNVDFEPEPRQNGGGTIGIDVGIKTFYSDSNGNTVSNPRYLERSMRKLIREQRRLSRKRKDSHNREKQRIKAARVHEKVTNQRNDFLQKQSTMLVRENQTICIEDLNVKGMIRNHKLAKSIASVSWAKFFEMLEYKAIWYGNEIRRVPTMYPSSQTCSFCGCRNPLVKNLCIRIWECPKCHMVHDRDTNASINILKKGLQMQSA

SEQ ID NO: 29151 - protein, 257 aa, Solobacterium sp.
MQKFMDGSWTLGTAKLVELNNIWYLHISATKSTDEFERSDVKHVVGIDRGLRFLATVYDEQQKTQFFSGKDILRKRDRFDAVRAQLQAKGTRSARRRLASISGRENRWMSDVNHCISKALVRKYGAGTLFVLEDLTGVSFEEDNMHGAKQTHDLRNWSFYDFKTKLTYKSGETGSFVLKVNPQYTSQRCPRCGAVIKENRDQNLHLYKCGQCRYSSNDERVGAMNIYMLGTLWVSGNEKPQFDKIELIEHAETVSVS

SEQ ID NO: 29152 - protein, 465 aa, Solobacterium sp.
MEEHMILTSSYGLHFKGSESAIKNTSAYYASAVKYLIPVVRVNWDAVEPISYSKGRVRLIECLIHSNKNNQAVYNFDDRFYKFPVYLRRAAIADAIGKVTAYFKLFEQWIKNECEGVMPQIDTCDHLMPCFFNGNMFAWDQLGRTAQIKVYVNNDWVWREIRLSKTDIRYLNSRKRLHNAKLSAPVIEKKHGHDQLRFTIQENVRLHDTPIFEQKICAVDLGVGTDAVCSVLDSKGTVLSRKFINFGREKDSVSNALHRVSDFQRYHGSHDSGRLWNLAKRRNLNHARLIANAIVDYAMANECHTIVFEHLNTAGKKKGSKKQKLVMWKHRDVQNTAERLAHRYGMRISRVCAWNTSKLAYDGSGIVKRGSDVPRSEKTESMIRHSIYKGRMEERVPYDICQFMNGKLYNCDLNASYNIGARYFIRELLKALPQIQAEVPDLGSGSSRTLADLWQLNTAIGTAVS

SEQ ID NO: 29153 - protein, 314 aa, Vulcanisaeta sp.
VFGTVPKRWFTRAWVPLKTVRVYGDGSMMGDRNALVVLDFRGNAIKLRQVCRNEPGYSIELTMPIWVIDRIKEGGVIKYAMIGLKDDKPYLALIVEREVAQYTPSEYRLVVDVNSWKYGISWGLIRNGRIVSYKQEGLNLGRYYGLYNEVVRLGRKYGELRRSGLHRTVEGRRLWKRIRAMHARLYAITRDKAYFLAGNLIPQRLPNQPSLVIDDVTEESRRELLEEGLPRDVIKLLMSNLKRFVHQLETLAQWYGVPYKFRRLPSTVCPICQHELTQLPGRTMACENCGFKAPRDLVPIHWALREHNYEFEQS

SEQ ID NO: 29154 - protein, 162 aa, Bacillus sp.
LKLPKFGFVCFTKSREVEGRILNAIIRRNPSGKYFVFILVETEVQEMPKTESTCGIDVGLKDFAILSDGTTYKNSKSFRTLEEKLAKAQCILSRRTKGSSNWHKQRIKVSRIHEHIINTRADYLHKLSTEIIKNHDVIGMENLQASNMLKNRKLAKAISEVS

SEQ ID NO: 29155 - protein, 423 aa, unknown
  TnpB Polypeptide
MKQLIERSLDLETIEINRTIKSRIIFQNNNDIPKMVESQEAFRQGCNFVSEYMFHNNFPMNTTTLVKLLYNDLRAKFGLKSQMAQSCVRTVIARYRSRQTQLRKERVWDGYKKDNHGKEVKNYVNKDLDFLWEPIEFKRPQLDLVRNRDYSHKDDNTMSLNTIHGRVVVKPIFNGWEQYFDGSWKLGTAKVLKSGKHWYLHISVTKDVEQPEFKPSHVVGIDRGLRQLLTIYDEKGQTTFVNGKAILQKRRHYKRLRQQLQSKNTKSAKRRLEAIGQRESRWMNDVNHCLSKTLVNRYGIGTIFTLEDLTNVTFNTVSKRAKNDRYEHHSWAFYDFEQKLIYKAFDKGSQVVSCDAYYTSQRCPKCGLIDAKNRNKDKHEFCCRACSYRTNDDRAAAMNIQFLGTLYNSGNPKPAFEKLDMIN

SEQ ID NO: 29156 - protein, 392 aa, unknown
  TnpB Polypeptide
MIQRWTFRCYPTQAQEKHLAREFGCARYVFNRALAERSKAFKDGRRINYAQSSANMTKWRHDKPTAWLAECSSVVQQQALRDLQAAYVNFFEKRAEYPAFRRKNGRQSIEYTKSGFRFDTERRALTIAKVGALKIKWSRPEVPEPSSLRLIRKPSGRYFVSLVVDVSVKQLPKTGESIGLDFGINRLATLSNGERVPNPKYGSHYARRMAWMQRQLARKQKGSKRRFLWKQRVANLHEKIANSRTDVQNKLALDLVRRFDTICVEDLHLRGMLKNHSLARALSDASIGSAIRKIEEKAKTHGKNVVRIDRLFPSSKMCSQCGVIQEVMPLSVRDWTCACGAVHDRDENAASNILAVGLTVTARGAGVRAKRTTVRRANLRRNVNLNTIKHVA

SEQ ID NO: 29157 - protein, 430 aa, unknown
  TnpB Polypeptide
MSYKVIQCQIAQDSLIYDYCDSNAQKAKLLYNAALFRIRQIFTGWDKDSRTDNEKEVFAEVALLQQTYPSVKVKKVISYGHLEKLMRVTHNPDFFAGLPMQTAQAVVKHAGTDFSNWLKSLKAYKQDPSKFLGKPQMPHYQKRNIITFGITNQDAVLYPADHGVNLKLPGRKERLYLSNVEADSVLKEVKIKPYYGRYILCLTLESENFAADNTDMPNICAIDFGVSNFAAVVCNNGSSMLYKGEAVLSECQWFHKKRAKAVSIITKGHEHRHASSRYLSALSRHHADFIKDQCHKISRSIINYCMEHHAGTLVLGENKRWKQDCDMGSQNNQNFVSMPTGLLKQMIIYKASDAGIKTIMQEESYTSQADITAMDYIPVYGVDAENAVFSGRRISRSLYRCFNGMIINADCNGAANIMRKAITDAWNMHN

SEQ ID NO: 29158 - protein, 550 aa, Actinomadura sp.
LRPIDPPFVAPARCGVAVRDRLKGLTAEDQQMLRLIGGHLGSMASGDLKARCADGLEHDNEAWASRKRELTRASSARWAGAITKATHDQWALARRCQYAHLQSLEAGVQTIERRLSLAVGVKGTKGAPGGYRSQHEWFAKSRRLRVLRDRLERERTDYSAGIVHVVRGGKRLARNRHHLQEAGLAKEEWRARWEAGRWFLQADGESGKRCGNETIRVTPGGEVSIRLPAPLTYLANAPHSRYVLAARVAFGHRGTEWADRVAANRAVAYRIHLDAARGRWYITASWQAPKTLPIPLEAVLAEGVIGVDTNADHLAAWRLDVHGNPIGVPGRFGYDLTGSADHRDAQVRHALTRLLHWANACGVRAIAVEDLDFAREKTREKHGRRKRFRKLISGMPTGRLRARLTSMADATGIAIIAVDPAYTSRWGAQHWQGPLTNTKHKTTRHDAASIAIGRRAQGHPVRRRTAPPPAHRSDGQGHRTVQAEPGARGREGTRRPATDRAHDARRRAGHAGRTRGTSASNTVRDARSTGRWAQDPLLNTDEGRFRADLG

SEQ ID NO: 29159 - protein, 344 aa, Actinomadura sp.
VKVVVQVKLVPDAVQVRALERTLRTVNQCANRVSAGSFEAYGLKGSVKDLRSMAYGDLKARGLGAQAAQHVIKRVADAYTTLRASIRAGNLGPEGCKRRRKAESKEIVFRADAAHTYDDRCVSWNYDAQTVSIWTMDGRLKNVRFACSATALKRLTQYRRGESDLMVRNGKWFLIATCEVPEAERYEPNDWIGVDRGINNLATTSDGDNHCGRRLDRYRRRQARKRAEIQAKRTRSAAQLLKRRARRESRHATHTNHKISKTVVAVAYKARRAGVPFIEVDPAYTSQRCPRCGHTARNNRPTRDHFCCRRCGLAGPADVVAGVNVRDRARSAWVFVNMPPPAPT

SEQ ID NO: 29160 - protein, 130 aa, Caldicellulosiruptor sp.
VTNIRMDFLHKWSSRVICENQAIICEDLKVKNLVRNHHLAKSIMDVSWSKFVEMLEYKSKWYNRIFLKIPSSFPSSQICSRCGYRNEELKDLKIRTWQCPCCGQKHDRDENAARNILKQGLLQLGMVVSV

SEQ ID NO: 29161 - protein, 383 aa, Actinomadura sp.
MRLRYNFRIHPTAGQRQALARAFGCARVVFNDGLRMRQEARVQGLPYVSDAELSKRVITQAKKTPDRAWLGEVSAVVLQQALADLNAAYRNFFASVTGKRKGPQVAPPKFRSRKDRRQAIRFTKNARFQVTAGGKLRLPKIGDIPVRWSRDLPSDPSSVTVIKDAAGRYFASFVVEVGDEPLPETASEVGIDLGLTHFAVLSDGRKIDNPRFLRRAERRLKKAQQALSRKEKGSNNRKKAVVRVARAHVRVADARRDFAHKLSTRIICENQAVVVEDLSVKGLARTKLAKSVHDAGWGRFTAMLAYKAARHGRALVRIDRWFPSSKLCSTCGAVAESMPLNVRTWECACGAVHDRDVNAAINILAAGRAERLNACGGTVRPAA

SEQ ID NO: 29162 - protein, 486 aa, Richelia sp.
LLTNYVYKLRSNQTQSSKMSDWVDMLRSHYNWCLNDRITQYSQQFIQGNYCDIRTKSEASPLTCFVSKSGAAGNPWKDSKVDSEGKTRNPRRSAGDIQITALPELKIARPWYSGIDSTVLQQNVKRLDAAYKNFFDGRGFPKFKNRSNFTSFTYAMGVKIKGNKIYLPKLGWMRFYNSRSIPDGFTIKACAVRKRQNGWYVSVRIEDKSVPEYSPKTLGNNPKVIGCDLGITKLVHLSDGCQIENPKFATNKKAKRTLKIRQRRVSRKIKGSKNRKKAAIKAARFHQKISDKRQAHQWKTANKIVSRSVDAIALEDLNISGMMRRCKVKSDGETGRFLKNGQSRKKGLNRAISDAGWGDLGLKIEYLAVKQGKTAIKVNPKHSSQECRNCGHIDKSNRDGEKFICVECGYHEHADIGAAKTIRDRAMTLVRGDSAKPSARHSNAQKISQGSLGVSPRVATGVSPRSQSKRGESGNPSNRDIKAAMS

SEQ ID NO: 29163 - protein, 380 aa, unknown
  TnpB Polypeptide
VLRNGAVLWKQAYSRYFSKLGGRPVIHQRHGKQSVWLTSEVFKFVPVVDTGTGEIISHQLHLGIKKFPVGILAFKAHKEYGLPASLHISIHAGRWHVSFNYDDDIPEPTDKDSTAWLRQFDETELRNLTVGLDRGVTLPLAGSGGQQFGFSEVQKKRLLAQERHKKRWQRRQARRTKGSAGWVNAKRKVARYQRYGADVRRDVAHKTSHALASDPRYKLFVFEALQIKNMTTKAKPKQDEQGRWIKNGAAAKSGLNKAILASTWGQTKVYLQYKARRQGKLVIEVPPFYSSQECAACGYIHQDNRVSQTEFVCLSCGNTDHADHNAAKVIAMRGVQQLLSGKGVQKEKKRCRITRIKVGAEGSEPVAETQPTTGKTVVSR

SEQ ID NO: 29164 - protein, 428 aa, Limnoraphis sp.
MRNVVKARIYPTTEQQTALSKAFGCARWWWNYALNLNNETYKATGKGLSRQGYNDCLPELKKEFPWLTECYSQVLQSVSLNLSQAFINFFEGRAKYPNFKSKHNKQSIQYPQHVKLLDGAIKLPKIGEVKAKLHRVFDGKLKTVTVSMNKTGKYYASLLFDDGLPEPEISNQGKAVGIDVGLTHFAITSDGSKFDNPKPLKKYEKNLKRKQRKLSRKQKGSKRRAKARRIVARVHERIANTRKDFQHKLSRKLVNENQVIIVENLAVKNMVKNHNLAKAISDCGWSEFTRQLKYKAEKDGKTYLEIGRFFPSSKTCHVCLNQVGSLPQDVRSWECPNCKTRHDRDINAAINIRDEGLRLLALGTSATAQAGNVRRSLRSSRSLHPRERRPKRGRKSSVEAVAVELGSPVPQVERGSSLESEDLRHKAS

SEQ ID NO: 29165 - protein, 394 aa, Halorubrum sp.
VDDDTNRVQVRISPKPYKKVTGHLRGEPDAMDELRDAITSDEVDVGQAELLYRDGMYSLHVTVTREFDVPELNTSDTLVGVDINERNVALTALDRNTMRTKGTLVLGYGRVKQGCKHTGTVGRPVVQKLYSAIATFDFDGPKRGMVVTTGRFTNPAEEYAQRLQQNDDLHPIELLDGEDLREIADEIGLDLYNGRIEILCDETLRPYDSAADVDAPVEEAFRDVEGAFRDIENIEAADLPEPHSSVTFRPVVAVTADTNAVFETSVGVIHRINDQAQFVAHAERGQPQVVDEDVATLATENLHATVDLDSEQFGEVFDDVEERRFGQTQTEYKEWAVDRLQQHHTTTASIGASTVTRAESMRPTPTVRTAGPSPAPATLRPNGWKASRSVRAVR

SEQ ID NO: 29166 - protein, 391 aa, unknown
  TnpB Polypeptide
MAIVSNREATNLLNMFRTVKVALPYDSALTQTAIAFNRACQIVLDYGSQAKTYNKNKLNRETYRAVRAALPNLPSALVQTARDEALEMLKRNSFARIVKKRLSVRYDKRTFKFYPETRRVSLTTVFGRLNFIFKHYPYLERWRGEYTNAQLLVRGKRMFLNVQVKIPDAVPKINENSEVLGIDRGIRNIVTCSDNSFFNSKRLRAVKGRYQYLRHRLQHVGTRSARRKLKALAGRERRFVLDVNHRISKAIVSKPFTVFALEQLRNLKKKKNGKRLNSKLGSWSFAQLQRFLQYKAEQIGKTVVTINPRRTSQRCSRCGYTNKANRKGAWFKCEQCGFQLDADLNASRNIGALGMSEHLRLFVNEPNVASDEPMPTGVVDDGYKPTLFRGG

SEQ ID NO: 29167 - protein, 426 aa, Desulfovirgula sp.
LSGFCPASNKGKRSKPSGTAALPSGMPSSTGADRPSSRVNPCLPTKPCAPSSRNTRPYRALPAHIGQEVIKKARKAWDSFFALLRLYRKGELGRPPRIPRYWKDRRTGRRTFCVIPVKAPTSYALNSRTLSLTLPRDLREKHGGRLVLHTKGVLRFHGTPKTLELRYDRVKKRWYAHQVVEVPEPARKTRPEKCAALDLGARVLAALAIEGVSRQILFSGRKVWKDFLYWTKRIAEEQARLARAGRKTSRQLRKLYQTRARRLRHAYLALAAEIARTLNQHRVTTLFIEDLTGIREDMDFGPKNILVHNFWAVRQLKNLITAACARAGIKVVPVEPRGTSSRCAVCGSPTGRPVRHKAVCKRCGRVWHADANAALNILLLGSSKGHGAEATQLPPLAFRWNHHRWVSRFESAAGTLYAASGSRMAA

SEQ ID NO: 29168 - protein, 93 aa, unknown
  TnpB Polypeptide
MVKNHKLARSISDASWSEFRRQLEYKAVWYGKFVVTVDRFYPSSQLCSVCGAQWPGTKDLSVRKWTCPVCGTVHDRDINAAKNILNEGLRLLA

SEQ ID NO: 29169 - protein, 555 aa, unknown
  TnpB Polypeptide
VLSHYLYWVQKFRNEVVAFCEQRRKARNLWLHNHPVLTVGWKALGMDEDATLTLLPEDIAGNDVNAASKWLTQRLEQARSEVTSLSGWNIKAHKKQLRAAVYSVWVNLSKAERDEIPDAWLLTLPRTILDQCLQDMNKTYAKALKDRKSKIKNPAGFPQFQKHSYPYSVRFQIATSQNKTYVEAWNTAYANKSKEIYIPSLGVVKFRDKQDIPAVPPELITIARNSSGQFHLTFVNKDPTTMTNAQLRNVNDHVLPCEEIYDPNLKAMVMVPVTRGGDVGLKTLVTYSQKLAKQQADAEKKEVARINFFQRQEKRLRWANKILARKKHGSKRWLKQKIKQGRVHTQTTNQRHDYLRKEAHDLVEHTAIVCLEDLFVGFMLKNKHLSKSAADASLGAFKRYIQWEARKAGHLVLECGRFDATSKTCHACQYYYKDLSLDERTWVCPDCHIKHDRDANAAINIRQMALLKTIKGLGNGTIVLCYPQKSKAKKGLSASGNGAPKMLSPYPLHKDLTAFIERGGLTSLLTLKCVNESQVGESQLLSGEAFILPQQRVSV

SEQ ID NO: 29170 - protein, 351 aa, unknown
  TnpB Polypeptide
MMRTYRFRVKDATPGKHLTALAECVDTVWNRCRHEQAMVASHYDPSGPNLRWPSHYDLVRHFTGHARDCALHSDTINRIVATFVQSRATHKKNPKRRGRKSLGWVPFIPRAAKVKTDTLTYMGHDYRFWLSRPINGTIKTGCFAQDARGRWYVSFQCEVEPVKACGVGAIALDLGCIDLATGSDGRKIENPRWFRKHENALAVAQRARNKKRIRAIHAKIANCRKHHLHVESTKLVREFGQIVVGDVNAKQLAQTRMAKSVLDASWSAFRGMLKYKCQQAGAGYAEVSERYSTRACSVCGSLSGPKGVGMLGIRQWICGDCGADHDRDVNAALNILVGAERRPPVVGIPVL

SEQ ID NO: 29171 - protein, 439 aa, Deinococcus sp.
VEITLTAKLKLKHTQEQKVALDAFTLSYRDALNHTAKVAFDMGKSSNASKIQKEVYTHLREHFGLKAQSACSVPRRVGASFKQFWTKLKDHQKKQAFRMEAGLKPRRFKGFDAPPKFVSRSLTMFYKKDYSFKKNQQVSVDTLNNRIVIPYEGYAKHLQLIVDGAKIGSGTLWYDRRKKQYYLLVALTVTLPDPQSEDHKRVVGVDVGQRYHAVVSDTQDNSFFQSGKQARQRKEHFSRLRKNLQRKGTRSATRKLIELSGRERRFIADWNHKLSLRILRRFPNAFIGLEDLTNIRDRTEGRRTHRANKKSRANKRRRSQWSFAELQTFLAYKAPLNGCMTVKVDAHFTSQACTQCGHTSKGNRPGAGLMFRCESCGYEVHSDLLGSRNITMRTLVIRQDWMVTGYLSTTPDVSDAEAKTARLTRYAGLRWSPETNPRL

SEQ ID NO: 29172 - protein, 431 aa, unknown
  TnpB Polypeptide
VEQTYKYRVYPTERVASEARRHINICREVYNHALGLYNSAPKDNKPTYTHLQDKLPAWKRKWNSWKTVNSKCLQMAVRRIFSSLSILKSLTSKGYKVGRLKWKSPREYRSIVFNQSGFDVDSNTGRTEHATLELSKLGTMDVDYHRPLPDDGTIKEIRLKEEKSGKWYASVVVDHNPEHPEKPAVEDISLENTVGIDLGILKFTHDSDGNAVTPLDESEDRERIEKRHRALSRKQHGSANWEKARVKLAEAYERLSNKREDFIEKLARSYTTQYDAVFLEKLNVRGMLEQDSNGRNVASMSWSKTIDAFDSHGDKNACYVVMVPPEGTTKRCALCDVESDKALWVREHSCPSCGFEADRDENASYNVQKLGLEELGVEYDVDAVVGLGEAELTPAETALPTGASASDDSSFRVVPAKRVVETGSHGSPDPW

SEQ ID NO: 29173 - protein, 377 aa, unknown
  TnpB Polypeptide
LLTIIFLNKLIGSCRFVFNKLLEIAINEKLYSYYELKKRIVNLKKEYPFLKEANSQSLQAASLNLKKAFDNFFKKRSDFPSFKSKRENNSIIIPQFFKIEDNKLKIPKLKISIPIILHRGIIGNIKSISITRTSSGKYYLNILVEKEIEKLPLTKNAIALDVGLITFAKLSNGEEIQNFRFYKNSEKNLKKLQKRISRKQKGSKNRTKAIIKVAKIHEKTKNKRNNFLHKESLKIIRDNQTIIMEDLKVKNMIRNKNLSKSIQDASWAEFKRMIKYKAIWHGREYIEIDQFYPSSKKCCICGYKNINLDLKTREWICPKCNTFHDRDYNATINQLKVGLERSKLTPVDYAMAAEQKYVFWSTSYHKKKQDACHFNDE

SEQ ID NO: 29174 - protein, 389 aa, Lachnospiraceae sp.
LLKSYKTEINPGPEQMQKINQTIGTCRYVYNFYLAHNREVYEKEKKFVSGMDFSKWINNVYLKENPDKAWIKEVSSKAVKQSIMNAEKAFKRFFRHQSGFPKFKKKGKSDVKMYFVKTDANSVIPCERHRIKIPTLGWVKLKEKGYIPVTKYGEVIKSGSVSCKAGRYYVSVLVEEKEQEKPQLNDFGLGIDLGVKEFAVISNGSVKKNINKTKRVKKLEKKLKREQRCLSRKYEDLKKRNKKKGEATGQNIQKQVLKVQKLHHRIDNIRTDYINKCVNEIAKTRPSYVTIEDLNIAGMMKNRHLSKAVASQKFYEFRTKLEAKCRESGIELRIVDRWYPSSKLCHECGCIKKDLKLSDRVYRCECGYEADRDYNASLNLMDAKTYKTA

SEQ ID NO: 29175 - protein, 384 aa, Clostridium sp.
VIRKKAYKFRIYPTKKQAELINKTIGCCRFVFNYSLGVQKTKDNYWNIVEEMVQQGYFQENNWKGKFFNKANSIKDIAKLKKSYDWLKEVDSIALQASVENLGAGYDKYYKKTGSRPKFKSKKNEIQSYTTKLVKAKGNVNIEIVGKGIKLPKLGLVKIENSRNVDGNIKRVTVSRTQSGKYFASILCDVNIQELPKIDKKVGVDVGLKTFAVCSDGYEEANPKHFRKAEKRLIKLQRDLARKEYNSKNYHKNRIMIAKLHERIVNQRMDFLQKFSTKLIRENQSIAIEDLRVSNMLKNHKLAKVISEASWSEFRRMLEYKAEWYGRKIVIAPPDYASSQLCSECGYKNIEVKNLGLREWVCPECGTHHQRDLNASINLEKLIA

SEQ ID NO: 29176 - protein, 376 aa, Rubrobacteraceae sp.
VRKAFKYRLYPNRSQAEALDTMLATHRRLYNLALRDRRDTYEGGERSVSYGEQSARFKESRKVLASFAATNFSSAQATLRRLDKAFKAFFRRAKAGECPGYSRFKGEDRFRTVEFPSYGDGCRLKDNHRLYVQHIGHIKVKLHRPVEGTIKTVSLKKACGKWYVIFSCDLGEAPEPVQDGPEVGIDLGLKAFLVTSDGESVRPPRYYRKAQKQLRVAQRSVSRKQKGSNRRRKARQKAVRLHEKTANQRRDFHHKEARKLVDEHRLIAVEALNVKGLARTCLAKSTHDAGWAQFVNILSYKAEEAGTRIIAVDPRNTTQACSSCGAMGEVKKTLSDRMHVCSCGYVADRDVNAAKNILSLGRSDQVRTQRVAASVA

SEQ ID NO: 29177 - protein, 390 aa, Bacteroidetes sp.
MYLTRKLKLGRTEQLDRLARRAGDLWSTVAKWHWRFVDRQGYWLSKGQAQTMYCKGLGGLHSQSAQAVADSFYDALSAWREKRQNGNYEGLRPPYKQKRYFKVQWKCHAIRLRDDGVLRLSNGRGADPILIDWPCEKEPKRVEIGWDGTQYELRAQYKVEETADPKGQKKVGVDFGEKQLATIYVEAGENVSIHGGRLQSLRRHHNRTHSNLRSKIDRKEKDSRRWHRLVRAKDRQLTKIRNQIKDFLHKVTTRLANTLHERRVGTVVVGDLTGIRERIDYGSRTNQRLHQWAFSEFEHMLTYKAQLRGMTVERASEAYTTQTCPQCGNKRKPPGREYDCRECSFEGHRDVVGGWNILNRKYPGATQVAGAMAAPTGIRYTPNMQCNPVR

SEQ ID NO: 29178 - protein, 378 aa, unknown
  TnpB Polypeptide
MISYKYKLYQSKKTTALAYMMREAAFVWNHALALQKRYYSLAKTFGWSKTYISLYEMKRHQARRVRRKRLDAQTVQELLERLDTAYRKFFRHENRRPPKFRRAEDFTSFVFKQHGFKLYGNEFVINKVSKRFRFSKSRDWEGKVKNVRVFRSRGDWFILVITNADPKPRGKTHTGASAGIDFGLKTFLTLSDGTEIQAPLFYKQLIRKIRKWQRLLSKAQKDSNHRRAYRRQLNRIYAELADKRRDWCYQTAHQLCREYEYIFVEDLNIAAMARMRHWGRKVNDLGWTTFLNTLEYIASKYGVTVHRVDRWFASSRLCACGYRNDALTLSDREWTCPQCGTHHQRDLNAAQNIYRRGIADLESISKTCPSECGGRQMR

SEQ ID NO: 29179 - protein, 240 aa, Erysipelotrichaceae sp.
MFGQSFLVPKLRIQTKIHEQQWNRLNSGDLVKADIKEIHEDFFVYLLISVRTPHISVSLKEERKMGVDIGMRCPAVCYTCDGVIRFVGNGREIRYHTRRIRKRADEFIKRTQGTKKQLRHRLNDYKRYIDHRLSREIVDFAVEQNIQIICLEKLYHLQKKFSHHEQVCWSYQRLQQFIAYKAKLAGIHIRYVNPRLTSKRCPSCGKINNVKGRSYSCRCGFHHHRDVVGAMNILHAPEIL

SEQ ID NO: 29180 - protein, 488 aa, Calothrix sp.
MTTITYCKGLPTPKVEMNSLGFTEFEMFLNAYSKVFKQAEILTIDHLQSESSFNKSQWNTHLQTIFQINKRHASGVISSAKGRLDGANEHRSLHLKTLEGKINSLKLWIKKTERKLSLAKKFYTKKNWQHSKTGCNFPLSCSLKFRGSNWQNLKFQLHSKKRKLHCFQTKLEHLKAKPIRVSVPDSNVFVVGSKDETYGNQVCQWNGQTITFRVPKCLELEFGQKVSTELGNFDRKINRLPLDGAKTWHFYRKDEKWVAAVQFTPSAVFQQSRPIEYGCLGIDMNPGSIGWSYVDPEGNLKYHGKIPLQMGLPAGAQQSQIVEACLQLVTLAVTFECPIVCEELDFTAKKEKLGEHGRKYSRMLSSWAYSEFFKQLSSITSNRGIELKTVNAAYTSIIGLVKYMRMYGLSSDTAAAIAIARRGMKLLESIPDSITAYFEVNSEKHVWSQWNQLNKKIKQSGINRRHDYYAISNWSFLANLSTEEVARH

SEQ ID NO: 29181 - protein, 443 aa, Butyrivibrio sp.
  misc_feature (283)..(378): Xaa can be any naturally occurring amino acid
VYRTRQFRISKNNRLYGYCSDICRACAILYNRANFIIRQYSSAVEAMASYRPLYPNQMQVFRLVNDTLDGTKYQVKGFWLSYNALDYLLKTTKDKAYYGLPSQANQQILKLLLRDYKSFFEAVKAYAKTPSAFTGRPRMPRYVGEGKYKTAILTNQICRIKDDSLIRFPGTNDMLRLGEDFPCGKLKEVRIKPHGKDFVIDVVMDVETRGMAPADDKEILKDLADMADISGIHIMAIDPGTDNIAAVVNNFGESPFVIKGGTIKAINQFYNKEMGRLASCAMXXXXXXXXXXXXXXXXXXXXXXXXXXXXXXXXXXXXXXXXXXXXXXXXXXXXXXXXXXXXXXXXXXXXXXXXXXXXXXXXXXXXXXXXXXXXXXXXFSGRRIKRGLYRHYDGTLTNADINGAANILRKVFPKVTQWDRGIVDMPCSSGCHRQTEGSCRTAA

SEQ ID NO: 29182 - protein, 320 aa, unknown
  TnpB Polypeptide
VLKDFNLKIRYVGRIRWEGKQERLEIIYVNGRWFAHIPIEVGVEPPKSNKRGYVKTNYKDKKGRIVNPRSIRQKDPIGDREAFMDMGLNNLFAVTISDGSAMLIKGGKIKSEYYWWKREIATYQAIRDLLRNAGISTWREYHEKYLKEMYKRDERLRHLYITAIRFLADEFYDRGVRKLYIGYPIMLSQNNGNEYNTNIWWYRKIVLWIVDVFREYGIEVEIVPEDYTSKECSICGNKHKNGRIYRGLYECKKTGKKINADINAALNIARKLGHRIRIARKIESYSITHNGVKPLIPLQRANTRDPSIETPPFRAGRVSY

SEQ ID NO: 29183 - protein, 303 aa, unknown
  TnpB Polypeptide
MLLHQGSGYRVKEGYVEIIGGVKLKIIGWDRRYDQYENREARLVYRDGKMMLWISKKVPKPEPYQPRDIIAVDINERKIVYGDHVINEERDTKIGEAHRWKLLAEDLQKRYSSPRYPAWRRRGILNRIRSYHRKARNILEDWARKTSLEIVELAKRLGYAVAREDLKGLINSLSKIKNKDHRTKLIIMGYKRLGKWIDWYAKKQGVPLAIVNPNGTSSKCPKCDSKGLKEVDYRRLRCSRCGFEEDRDVIGKLNIRKRALKKLRINPPGGVLTTPTAPQMTDVNPNRWGTDEQLKDILGLKVL

SEQ ID NO: 29184 - protein, 316 aa, unknown
  TnpB Polypeptide
MLGGIILRRGRKPRVRKLSMWLYPGQSYWIRDGYVEIAGGIKLRIIGWDRRYDQYENGEARLVYRDGKMMLWISKKIPKPQPYQPRDTIAVDINERKIVYGDDRINKERDTKIGEAHRWKKLAEDLQKRYSSPRYPAWRRRKGILNRIRSYHRKARNILEDWARKTSLRIVELSKKLGHAVAREDLTGLINSLRKIKNKDHRTKLIIMGYSRLGKWIDWQAEKQGVPLAIVNPNGTSSKCPKCDSKGLKEVDYRRLRCPRCGFEGDRDVIGKLNIRKRALKKLKIKANPGGVLAPLTAPQMTDVNPNRWGEPMSRR

SEQ ID NO: 29185 - protein, 466 aa, unknown
  TnpB Polypeptide
MANSYKLPKVLIIFGGGSMPAGDEGALTLSIGMRVSPEPAGIELLRRYNVALNYAINKILSLNLKTIKDVHRELYRELREWFGLSSRIALDCYRDALANARAWRRNPYRGKRPRVKKLSMLLHPGSGYRIEDGYVEIIGGIRLKIIGWDRRYDQYENREARLVYREERMILWISKRIPKPEQYKPRDAIAVDINERKIVYGDDEINKDIDTAIDGAYRWKILAENLQKKYSSPKYPAWRRRKAILNRIRSYHRKARNVLEDWARKTPLKIVRLAVKLQHALAREDLTGLINSLRKIRNKDHRTKLIIMGYSRLVKWIDWQAMKHGAPIVIVDPRGTSSECPLCDSKLEENGYRRLKCPICGFEADRDVIGKLNIRKRALKKLKIKAIPGGVLAPLTAPQMTDVSLNRWGEPMIRSQRGGEPPPFRAGRRSDPRRGSSREGFSPNRGGVVWKVAHALSRRSCLRGMI

SEQ ID NO: 29186 - protein, 549 aa, unknown
  TnpB Polypeptide
MIVGMLLYSFIINYWLKWRFRGGQGLGIMARGKRKRDKRWMWVVKPGDKIVVSRTAVIPSKKLSRRDFKVLEEILNIYSRMLENVLPHASRNIIESYYRLKNEKYHELRNIYPDIPSHYIHGVCQDAVERISSLRRNRARQYSREIFDELVKYLNLGKRDLRGRRIVRYLWRRSWEIARHQVDLEMGDGILVPRINSVSLWLVDDHVWKPIDATKININGFENIFFTSVAINTHRGWVHLDLEPSKEFYKLLARGFKPSSHAKIKLDRRNRRVIFHLSLEKEVEIYKPGNIKPVDVNENSVATLYGAFAVILETDLAKTTLGYSYRKKSIRRRNGSDGREARKAMKKLKEGKKKRDYRMKTANMIVRDALRMKGVIVVERISGEDIRVMIARYRNKQLRHRIYQSALKGELNAIIDKAREYGVPVLMVDPRNTSKICPIHNAPIEYGEDRIGICSKGDERWHREVVALINIYLKALEALYEGSAQKGFGDPRVDGSPVPLGSTATHEPIEIPRSLWGRWKSLDDHRDVIASLWIKKQNNPKQININDNQ

SEQ ID NO: 29187 - protein, 380 aa, unknown
  TnpB Polypeptide
MHKQTFQYRLYPTPAQATAMQHALDECRWLYNRLLEERKLTWDDAETNVTLYDQINRLVALKAERTTLADVHSQVLQNVAVRIDLAFKAFFRRVKAGETPGFPRCRGYGRYDSFCYPGSGHKVEPRNDGAKKGRVFLSKIGRVTAIIHRPLEGTVKTCCVKRTATDKWYATFACEVEDAPLPATDSAIGIDVGLASFATLSDGSEVANPRFFRKDETALATAQRRLSKEPRTPKGQRPTPARRKRRTVVARVHERIAHRRKDFAHQQSHRVVNQHDTIAVEDLSVNRMVHNHCLAKSISDAAWSMFSAFLSYKAASAGRQFIAVNPAYTSQDCSWCGHRQKVTLADRVYQCPCCGLEIGRDHNAAINIVTLGLQSLGARP

SEQ ID NO: 29188 - protein, 443 aa, unknown
  TnpB Polypeptide
MKITSSYAVEIKKQRMFDDTIKLYREAVSFLIDCFNKEWPAIQAVDKAKAKFNFAEKLVHTTKYNVAKYDFDAKFYKFPSYLRRAAIQAALGSVSSYHSNYKNWKNNGKVGNEPKLQCDRFCFPTFYKTVMFTESNEPNQCYLKLYSKNDWVWVSIAMRATDVKYITKYWSHCQKSAPTLEKKYGKYFLRFAFEEEVKLSDTEIQDRRICSVDLGLNTDAVCSIMTADGTVIARKFINFASEKDHLYHVLNRIKRKQREHGPKSTAAMWRYAKALNDDIAKKVAAAITEFAVLYSVDVIVFEHLSFTGKKHGGSKAQKLSMWKRNSIQDYIEHKAHRCGIRISRICAWGTSKLAFDGSGALKRDETNHALATFASGKQYNCDLSASYNIGARYFVRELLKPLPAMVRSRLSAKVPEAERRIQVTLATLKVLYPEYQKLTIQAA

SEQ ID NO: 29189 - protein, 344 aa, Actinocorallia sp.
VDGGKSLARGRHHLEAAGVSEQEWRGRWEAARWFLSADGETGKRHGNETLRITPDGQVFIKLPAPLADLANAPHGRYTVSARASFAHCGREWADRVEADRAVAYRIHVDPARGRWYVDVSWQRPPVQTISLEAALAAGVIGIDTNADHLAAWHLDVHGNPVGRPRRFSYDLSGTASHRDAQLRHALTRLLNWTRHLGVAAIAVEDLDFTDVKTREKHGRRRLRQVVHGIPTARLEARLVSMAAEHAIASVAVDAAYTSRWGAQHRQQPTSTPAHKTSRHEAASLVIGRRAQGHGARRRTAPPRHHQSDGAGHRTLQARHHGLGCEEPRPARTGGRTRSAAPPGA

SEQ ID NO: 29190 - protein, 462 aa, Actinocorallia sp.
VKTIRAYRFALDLTPGQERDVLAHAGAARVAHNWALAKVKAVMDQRSCERSYGVPEEHLTPSPSWSLAGLRRAWNAVKSEVAPWWAEVSKEAFNTGLDAVARSLKNWADSRKSMRAGRPVGFPRFKSRRRTTPSVRFTTGAIRVEPDRMHAVLPRLGRLKLHESARKLARRLDNGTARIMSATVRRDGGRWHVSFTVEVERAERAPARPDSVVGVDVGIKHLAVLSTGELVDNPRHLVAARRRMRTLGRALSRKTGPDRRTGRRGSKRWERACARLGRAHARVANLRRDGLHKLTTRLAREYGTVVIEDLNVSGMLQNRRLARHIADAGFAEIRRRLAYKTTWNGGLLLVADRWYPSSKTCSGCGAVKTKLALSEREFTCPACGLVIDRDRNAALNLAALAAEFDTAGSGPVAARGADRKTRQRGQVAVKREPGTTPVDQTGTVLPQGRTTDRVRSPERTER

SEQ ID NO: 29191 - protein, 398 aa, Actinocorallia sp.
LRYNFRLYPTVGQREALARAFGCARVVYNDALRARETARRDGLPFPKTGDLSRTLITQAKATPERSWLAEVSSVVLQQALRDLDTAYRNFFDGLSGKRPRMGAPGYRSRKDTRQTVRFTANARWQITTGGRLRLPKVGDVPVRWSRRLPSVPSSVTVIKDSAGRYFASFVIDASPEPLPETDAVVGLDLGLTHFVILSDGTKIESPRFLRRAEKKLKKAQRDLSRKQKGSKNRARARVKVARAHAKVTDARRDFHHRLSTLLIRDNQAIAVEDLAVKGLARTRLAKSVHDAAWSRFVTMLEYKAALYGRTVVKIGRFEATSQVCSMCGVKDGPKPLNVREWECPHCGTVLDRDVNAAVNVAKAAGLAVSACGAQVRPGVIPAQRDEAETHSKLTPSPV

SEQ ID NO: 29192 - protein, 506 aa, Actinocorallia sp.
MAAPFVVSEACGVSVRTRLNDLTAADEMVLRRVGAHLGSLASRDLKARCADGLGHSAQRWAERKRELTGLSSSRWAGAITKASHDQWALARRSQTAHITTLDAAITTISHRLALPVGQKSARGVPGGYRSAKEWFGKSRRLTVLKQRRQRAVADRADGRVRVVRGGKSLARGRHQLEAAGVSEQEWRERWEAARWFLTADGETGKRHGNETLRITPDGQVSIKLPAPLAEFANAPHGRYVLSARVSFAFRGEEWVDRVEADRAVAYRIHLDAVRGRWYVDASWQRPPVQAIPLEAALTAGVVGVDTNADHLAGWQLDARGNPVGRPRRFFYDLSGSASHRDAQLRHALTRLLHWTRHLGVTAIAIEDLDFGDVKSREKHGRRRLRRVVHGIPTGRLKARLVSMAAECGIALVAVDAAYTSRWGAEHWQQATSTRKIKTSRHEAASLVIGRRAQGHGARRRTAPPPHHRSDDAGHRTAQARHHDPGREEPRPARTGGRTRSAALPSV

SEQ ID NO: 29193 - protein, 381 aa, Lactobacillus sp.
MTLKAIKTRIYPTIEQQERIIANFGYCRFVWNQLLAMQKARYENGGRYVNEFGMNYLIKCLKQEYSFLKVAESTSLLHVSRDLNHAYQKLFKAHQGFPKFKSRKFPKQSYQSNSVNHNIQLVDNHHLKLPKLGDLKFKSGRKPVGKIKNVTIRFSATGKFYAVILVDTDIKFLAKTSNSVGIDLGVADLMITSDGVKYPTIRFDKRLGKKKHYWEKRLARRRLQAQQEIAWDKHNKVIEPRELADFKNYQKAKRMVAKYAEKIANQRNNYLNTLTKTLVAQYDVIKIEDLKTKNLLKNHKLVRAIANQSWRELRRMLEYKCVWYGKQLVAVNPRKTSQICSSCGYDDGKHTLDIRQWACPNCGISHDRDINAAVNILQATA

SEQ ID NO: 29194 - protein, 350 aa, unknown
  TnpB Polypeptide
MLLSKKTSIKVSREYANLIGHMCYAASKLWNVCNYERQHYKETGIEQHPDWYYQKKAHKEDLWYKQLPSQTAQEVCKLLDKAWKSFYALKRSGGIETPRPPRFKQESIPITYMQMGIVHERDTDRVRLSLPKTLKKYMEETYQIHENFLYLENKIFRGMDQIKQLRIYPPEKGNCKIIVVYEVPDQEELPQNGHELSIDLGLHNLMTCYDSENGKTFILGRKYLELERYFHKEIARVQAQWYGQQSGKGVKHPVTSKHIRKLYKRKQDSVTDYLHKITRYLAEYCREQGITCVVAGDIRNIRREKDLGHRTNQKFHSLPYNRIYIMLEYKLKRYGIRFIKQPANKKSRLN

SEQ ID NO: 29195 - protein, 265 aa, unknown
  TnpB Polypeptide
MKEYNNLILTKVTGHHLSTRIVPKGGCYIIEIVYDDEKQCKNELDRNRIASIDLGVNNFVTMVNNIGESSIVINGKGIKSYNQYWNKKVSNLKSIAKTVNGSDWTKQMQNLTNKRYFKMEYFMHCSSRWIVNYCAKHNIGTLVVGKNDGWKQKSDMSKIVNQSFTQVPYENFIQKLEYKCVETGIDLIKTEETYTSGTSFLDNELPIKENYNKSRRVYRGLFKSNNGEYINADVNGAFQIMRKVFSNVKANEIVGAYSHPVIINL

SEQ ID NO: 29196 - protein, 375 aa, unknown
  TnpB Polypeptide
VNKAYKYRLYPTDEQATMFAKTFGCCRKVYNLMLEEKIDNYKRTGKFGTVTPAKYKKEYPYLKEVDSLALANKQIDLQNAFKNRFDKSRKKKSGFPNFKSAKHSRKSYTTNNQGGTVAIMDGAIRLPKIGYVKAVIHRLPQTDWILKTVTVSQESDGSYYASVLFFFEKQVSKVKLSDNAIGLDYASDGLYIDDQGNKGTNHKFYRESHKKLAKAQRRLSRMKGSKKSETKSHNYVKQLQRVNRIYRHIANQRSDNLHKISTEIANQYDVVCVESLNMRSMSNRGFRNGKATMDNGYGLFLNMLEYKLTDRGKYLVRVDKWFPSSQICSYCGARHHEMKDLSIRIMKCDCGFTMSRDQNAAINIKNEGLRILRNA

SEQ ID NO: 29197 - protein, 384 aa, Paenibacillus sp.
MKHIIMKAYKFRIYPTYEQIILINKTIGCSRYIFNYFLNQWNTTFRETGKGLSYKICSDQLPHLKLEHEWLKEVDSIALQSSTRNLSDAFDRFFKGQNELPRFKSKKNKVQSYITRFTNHNIKIEKQGLLKLPKLGFIRFAQSRQVEGRIINATVRRNPSGKYFVSIMSEVEVEKLSNSTPMRNIGIDVGLKTFATCSNEMVYENPKFFRKKEQKLAQLQRILSRRKVGSNRWNKQRVKVARMHESITNARMDFLHKVSTDIVKKHDIIGIEHLKISNLIKNKKLSKAISEVSWSEFFRMLKYKSLWYGRTTMEVASDYPSSQLCSNCNYQNRDVKNLNLRMWTCPNCNANHDRDVNASKNIQKESLRLYNERIQTTGTVGLAQ

SEQ ID NO: 29198 - protein, 388 aa, unknown
  TnpB Polypeptide
MDIACKCRMYPDHKQCEQAIKTLGSCRYVYNLFLDVWNTTYKYTGSGMSYNSCSASMTELKKVLPWLKEADSTALQSSLRNLSDGFTAFFKKNAAHPVFHRKRSGDSYTSKNNNNSIRILDQNHILIPKLGKVKVRGLRLLDGKIISVTVSHESTGKWFVSVLFETEDPKPLEPAGNEVGIDLGLHDFAILSDGRKISNPKFLHKLEKKLRKEQRVLSRRIEENIDHYIEANGKRYPVYKKSLGEYKNIQKQRRKIARIHEKIRNCRNDFEQKLSTEIIKNHDVICIEDLNVKGMVKNHKLAKSVSDASWSEFVHMLEYKAERYGRKIVRVDRFFPSSQMCSCCGAINSAVKDLRIREWDCPSCGSHMDRDINSAVNLRAEGLRLLYI

SEQ ID NO: 29199 - protein, 340 aa, unknown
  TnpB Polypeptide
MVRRHACKRAYRFRFYPTPEQEQLLRRTVGCCRKVYNLALEARSVAWTAEHRSVTYVQTSAMLTQWKKTAEYSYMNEVSCVPLQQALRHLQTAFSNFFKQTGDYPRFKAKSHGGSAEYTRSAFKWDAKRNELTLAKMREPLPIRWSRTLPRKTEPSTVTVSLDAAGRWHVSILVEETIRPLPARRNAIGIDLGVDSYAVTSDGETIANPRHYKKLAERLEREQRTLSRKTKGSNNRRKAALKVARTYARITDMRRDFLHKLSTRIIRENQTVILEDLNVKNMAKRCAPKPDPDKSEPLAPQRPVREKRAERKHHGRRMVGVPSNARIQGRMVRATAHNHR

SEQ ID NO: 29200 - protein, 119 aa, Blautia sp.
METEICASLAGSFDAVCVEDLNLKGMAGGLHLGKGVHDNGYGLFLSMLEYKLEERGKYLIKVDRYFASSKICSVCGKKKEELSLADRIYYCECGNRMDRDVNAAVNIMNEGKRIFAECA

SEQ ID NO: 29201 - protein, 421 aa, Microbacterium sp.
MSMKRYSFRAYPTPVQVRALSRVFGCVRMVFNDFIAERRRQHESGAAFEPASVLARRVTTEAKQTPQRSWLAEVSAVPLQQAVADADRAYRNFFDSLSGKRRGRKIGAPRFKSRHARRQTARFTANSRFSVQTTTHGVGFVTLPKVGRVRFALSRELPSSPTSVTVIWEADGTYHVSFVVDEQPALSAPMFEARVAGVDLGLTDYATVVYSDGTREKIANPRYLRASERRLARAQKSLSRKVKGSRNSEEGRARVARLHSHVARQRLNHAHQTAARLVRENQAVVVESLSISGLARGWAAKSVHDAGWGTFLRVLREKADHHGRLLQRADRAFPSTRTCSACGVVDSVKPLHIRDWHCAACGAHLDRDYNAALNLMTLAGGQPERINACGREVRLALAQPERAHPDETGTPRNDDGFHAAA

SEQ ID NO: 29202 - protein, 346 aa, unknown
  TnpB Polypeptide
VSVFQNTYVYSDALLGILGLRWRVVLGFDADDGYQRQYLDSDEWSVTESTLTARDGDYFLYIGFRRYKNDTERNTAEDGTVLGVDLGIENLAVTSTAYFFSGRELTHDLREFEKVRVGLQQTGTRSAHRTLEQSSGRELRYVRDVLHRASNAIIDEALRYDCDVIAFEDLTHIRDRTGASWGHKWAFRTLYEQMEYKAEAEGIAVKQVGSAYTSKRCAECGFTADENRPTRTDFQCVKCESEANADYNAAKNIGMRYVRRGQQSSRRTGNSQLALESGTVTPKRGFSTYPDRFEAEFTDKPHHQKSRVVGVTFERSGVSNRSAETDHSMDENSSIQTWCRPLKTSG

SEQ ID NO: 29203 - protein, 366 aa, Moraxella sp.
MKTLKLRIYTKHSNQLEKLSSSVNFVWNYINELGFNYLQRTGKFLSAYNLNEYTKGSGEYLNLHSQTLQAINETHTKSRKQFKKAKLSWRTNNPKAKRKSLGWIPFKKSALKLIKTYQTGKKALKSKLQLSLTKGQKLIITVFDQYNLSNYDLNTCEIVQDSCGKWYACITVKDFPKQQCGTKSVGLDLGCKTAVTCSDGSTLTTKFTHKYANKLAKAQRANKKKQVKAIHAKIKNSRLNTIHQFTSKLIKQNALIVIGKLNSSNFTSTKLAKSVYDASWFELKRQLEYKCKNANCLLVEVNEKYTTQTCSHCLTISDNSPKGRTGLGIRVWTCSCCGATHDRDVNGAKNILRLGHQTLAGGSPLL

SEQ ID NO: 29204 - protein, 462 aa, Tolypothrix sp.
LYKTIPVKATFTDEEQVFWVNQCEHANSLINSAIYHTRQTHYSKLEQQQDAFTTYWRGDELRYGWKTYKCGTTYPELDKVLKDNPHYKAMAAQSAQQTLKTVGESIISYNGLVTAYYKGEVERPSLPKYRKRGGLASVTFPRQALNYKDGCFYPSISRDTKPHLLTDITLQLPEFIDSDWVKEVTIRPNLGELWIDWVIDDGKEPISNNSNLDYTQAWSFDHGGTNWLTGVSTRGKSLIIDGRKLKSMNQGYCRLVAKYKQGKSDFYWDSNLDRVQRKRNNQMRDAINKAARFIVNQCLNDRVGNLVIGWNEGQKNGSNMGKRNNQNFVVIPTGRLIERLKQLCPEYGIVLTITEEAYTSKASFLDGDFLPKHGEKPEGWKPSGSRIERGLYKTARGFLINADCNGAANILAKVATQLRVSLVEVVRGALTLPQRIDLFTRLNKSYRKRCVDGLLALAATTV

SEQ ID NO: 29205 - protein, 479 aa, Tolypothrix sp.
VSLDQGGKREAGNKAAVSLYNKTSSEASGMYLTQKNQVRELNKSEFLALRELCRLSKNLYNVGLYTVRQYFFQERKHLRYESNYHQCKASENYQLLNTDIAQQTLKVVDRTFKSFYGLISAVKEGSYQQRVKLPHYLPKDGYFLLIIPCGWATRRDKTKAPRLVIKDGKFRIPMSNQFKKQFGEVWINFPDRVDYESLKEIRIHPKYNARYFEVEFISEVKPEPVEVNPSSAISIDLGVDNLAACVDTNGASFLVDGKPIKSINQGFNKRNARLQSIKDKQGIKGFTNQQVKLVAKRNNQVRDYLNKTARKIANHCIDNQIAQMIVGYNPGIKQEINIGKCNNQNFVQIPFHSLRSKLKALCERYGLIYTEQEESYTSKASAVDGDEIPVYNADNPKTYQFSGKRIKRGLYRTAHGHLVNADLNGSLNIGRKSKHNGFAGVSRGSLTAPRRINLLKLERNVEQRSFNPLRNILLESPAL

SEQ ID NO: 29206 - protein, 538 aa, Ignisphaera sp.
MKRTCIVELIVDKNSEEKLKRLCSLSSKLWNEVNYARRRMFFEKKGVDFKATYKEFYEKYKILIGSTTTQQILNKNDEAWKSFFKMLKLKKEGKLPPFVTRVNPPGYKKKNNKRSLWTVLRKDQYRIEGDRIVLKGLGAIGWIEVRYKGLIHLRGEQGRLEIRYDQDRRKWYVHMSFDASEKAIRGVWASVPGSPRGNLVAGIDVGVNNLVAIYVGNGLTKLVNGRPLKALSHYWRMRIAEYQSTLNKYGLKTSRRLRSMYSKWRRQVKTYIDSKVRQAIEWLHNVGVSVIKVGYPKYIAQENGNFNNIHIWTYGYLLRRIYEVAEEYGIAVVYVNEAHTSSKCPIHGKKCGSRAKHGLFKCTKLSKVFNADLVGAYNILITPSPMDRGNRLETRPGIEPSGRGNVIPNLPALAGTPALKGGEEVRDREQPHISDILGDAIDSNAIVLGISTYDGDIFPVIRYVVQLLIDKINANKPILIINTYGWGKLQEDKLNNLFKTSKFKIVDVVYINGLPQRNDVEKIKQNIEKLVNTIPKHG

SEQ ID NO: 29207 - protein, 419 aa, Ignisphaera sp.
MKRTCIVELIVDKNSEEKLKRLCSLSSKLWNEVNYARRRMFFEKKGVDFKATYKEFYEKYKILIGSTTTQQILNKNDEAWKSFFKMLKLKKEGKLPPFVTRVNPPGYKKKNNKRSLWTVLRKDQYRIEGDRIVLKGLGAIGWIEVRYKGLIHLRGEQGRLEIRYDQDRRKWYVHMSFDASEKAIRGVWASVPGSPRGNLVAGIDVGVNNLVAIYVGNGLTKLVNGRPLKALSHYWRMRIAEYQSTLNKYGLKTSRRLRSMYSKWRRQVKTYIDSKVRQAIEWLHNVGVSVIKVGYPKYIAQENGNFNNIHIWTYGYLLRRIYEVAEEYGIAVVYVNEAHTSSKCPIHGKKCGSRAKHGLFKCTKLSKVFNADLVGAYNILITPSPMDRGNRLETRPGIEPSGRGNVIPNLPALAGTPAL

SEQ ID NO: 29208 - protein, 492 aa, unknown
  TnpB Polypeptide
VDSPGVGGLARPRPPVRAHRAGRLPSACRPPMQGLHLSGTARRVPAPALAAADTVVEVIPGRLGRACVGGGDPTVHRRADHPAGEGQAMKRAYKLRAYPTRPQEGRAVRLLADHCDLYNAALQERREAWRMQRVSVSYGQQSAQLKEIRAADPQGQGRLSFTAQQQTLRRLNAVFAAYFQRVRDAERAKQRARSKGENPKEGRVGYPRFKPRQRFDQVLFVAGDGAKWEATDGDRWAHASFQAVGRVKVRQHRAVVGRVKTLQLKREHRRWYVIVVTAAEVEPLPPTGRSVGVDVGVARFLTTSDGEVVANPRFLDAAQQRIADLQRRKERARPGSGNRRRLRRRLAREWRKVRNQRRDFHHKTARALVDSCDALALEDLRVDGMTASASGTLEQPGRNVTQKTRLNRSILDAGWAQFTSILTAKAESAGRRVVRVNPSLTSVTCHTCGTRCTRPRQNTVVCPTHGMLDADLNGARNIVTRAGLGSGQAPAA

SEQ ID NO: 29209 - protein, 397 aa, unknown
  TnpB Polypeptide
MIKGFRYRIYPNNEQTQQINQMLGNARFVYNWALDRRIKEYQAEKKSISAFTLMTELTQLKKQNEVEWLNLSVAQSLQQSIVNMDKAFTRFFKQKKGFPKFKSKHIGTHHVGFPQNTKIDFEGNKVSLPKIGWVKTKISRLFDGEIKTSTIEKTPTNKYFISITVELPTITVKQKPISKNNAIGIDTGIKTFATYSDGTEIENPKHLKSSIKRLKVLQRRASKKQKGSSNRKKANLKVARLHEQISNQRLDFLHKTTTAIAKQYDTVACENLNIAGMVKNHKLAQSISDLGLGRFYTLLKYKMNERGGNYLEIGRFEPSSKMCGCGVINKELTLFDRIWTCKSCGSINDRDILAANNILKFALVKVKTDGMSGIAYGSAGISQADEVGTIDGRSLRS

SEQ ID NO: 29210 - protein, 162 aa, Okeania sp.
AQKSLKRKTKGSNNYQKARLKVARIYAKIKDSRLDYTHKVTTQLIRENQTIVVEDLAVKNMVKKRCDPATTIVARERAPRDHKLARAISDANWGELVRQLEYKAEWYGRELIKVDRYFPSSKRCSNCGHIVEKLPLNIREWDCPECGSHHDRDINASINILA

SEQ ID NO: 29211 - protein, 404 aa, Okeania sp.
MRIYEFKVKGKQEQYKAIDNAIITSQFIQNKCIKYWMDNEKVGKYDLNKYCKVLAKEFKFASELNSMARQSAAERAWCAISRFYDNSKKQIKGKKGFPKFKKYTRSVEYKTSGWKLSETRKAITFKDRKNIGTLKLKGTYDLNYYQLDQIKRVRIVRRADGYYVQFGIRTDLRIETKPTGKAIGLDVGIRYFLADSNGNTIENPQFYRKTEKQLNRANRQKSKKYKKNAKPQSKNYHKARNRYARKHLRVSRQRKEYAKRVAYCVIQSNDLIVYEDLNVKGMVKNRHLAKSISDVAWSTFRQWLEYFGLKYGKVTVAVPPHNTSQNCSNCGQKVKKSLSTRTHICPHCGFVEDRDVNAALNILQKGLRTVGHTGTYVWGDLPSGLVGEVLLGDGESVNQESPCL

SEQ ID NO: 29212 - protein, 171 aa, Okeania sp.
MVKKRCDPATTIVARERAPRDHKLARAISDANWGELVRQLEYKAEWYGRELIKVDRYFPSSKRCSNCGHIVEKLPLNIREWDCPECGSHHDRDINASINILARDSQCQRQSLMGETPKTALACLWSALLDHLRVNLAYAGALKQKASNSDARESHAVTQVQRREDVNASSL

SEQ ID NO: 29213 - protein, 410 aa, Okeania sp.
MVEKAYKFRFYPTPEQENLLRRTLGCVRLIYNKALAARTTAWYENKERVGYAQTSTMLTSWKKEEQLDFLNEVSCVPLQQSLRHLQTAFSNFFSERAKYPNFKKKRNGGSAEFTKSAFKWKNGQVYLAKCAEPLPIRWSRQLPSGCVPSTITVKLDPSGRWSVSLRINDPRDLTLKLVQKQIGIDLGIKFLLTTSDGEKVTNPKNLNKLHKKLRLAQKSLSRKTKGSNNYQKARLKVARIYAKIKDSRLDYTHKLTTQLIRENQTIVVEDLAVKNMVKNHNPPPSPPGRGARGVGCDANWGEIVRQLDYKAKWYGRELIVIDRYFPSSKRCSNCGHIVDKLPLSIREWDCPECGIHHDRDINASINILAAGLAVSVCGATVRPEGSKSQKAGAMKQKAPTSDVRESRAVC

SEQ ID NO: 29214 - protein, 181 aa, Okeania sp.
IIPLKGEALNHNFSVNRNNKIRDYLNKAARYLINWCRENKISTIVVGVNPGIKQSINLGKKTNQKFVQIPHNIFRFKLKAMCDRYGLIYTELEESYTSKASFLDRDKIPVDNADNPSEYSFSGQRIQRGLYKTKQGKLINADCNGAANIGVKSKLNGFTPDRLEASLAMPLRVKFDVALAC

SEQ ID NO: 29215 - protein, 283 aa, Okeania sp.
VVWNDSLACCQQKYRSGEKKPNNSQLQKQFITQSKKTEDREWLSEVSAIPLQQSLNDLNQAYQNFFKSTKGERKGRPIKPPKFKSRKSKQTARFTKGGFKVGQHKVYLAKIGKLKIVWSRELPAPPSSVTVIKDSDHRYFLSFVVEIQPEVLPQTDNSVGIDLGIKTFATFSDGTKVDAPKPLKKRIKKLRKLSKSLSHKTKGSKRYEKARVRVAKFHAKLKDTRTDFLHKLSTEIIRENQTVVLEDLNVSGMVKKRCDPATTPARLRNAHQETVNYLEQYQI

SEQ ID NO: 29216 - protein, 362 aa, unknown
  TnpB Polypeptide
MNKAIKYRLYPTEGQQQKFRQTFGCCRKIWNLMLSDKINYYRECKKSLQTTPAQYKKEYPYLKEVDSLALANVQLHLQTAYANFFRDRRVGFPSYKSAKTSRRTYTTNNQNGTIALLDNAIKLPKIGKVKAVIHRKPDNDWKLKSATISQDQDGKFYVSILFTYKENRQKIGQINNVIGLDYKSDGFYADSNGQVCGSPRYYRKSQKKLAKLQRQLSRKQKGSNNRNKARIKVARLQKHTANQRLDFLHKKSTEIANQYDVVCVETLDMKSMSNKGFGNGKATMDNGYGMFLNMLEYKLNDRGKYFIKVDTWYPSSQICCRCGARHKLLLSDRIYKCECGNIIDRDYNAAINILNKGLEQIF

SEQ ID NO: 29217 - protein, 514 aa, unknown
  TnpB Polypeptide
MSSKTVVSRTYPRTPYAAFSKSGEPLDLDEVLNGIRKDAELVAHYALQEMTEQNLALSTYFDRLKPAEAGRQMNLKLPVEVKKQFRSGASRLEKMFQEQVVTNLRSWAARYRVVSGNCTDYVSAGWKRNASDSKPASMQPRLALSATDKGYYYKNFSVTPDHIELMMVVQGKKTLLHFPTPPQLLEVGCEPGVPDIWVDNNNRVVFGFHGKTDPGRPNFSERYVIGVDVGVKHPAAYVVWDTENKEIVEESLLSQRARSLNNKIKRGAKQVSALQRKNCPEEAASHREHLSNRRRELSILIAQELADTSWHYDNAIVSFEDLSHIKNTMAYVRWFRGEVYRRTRDMVEADGGRVFKVNCAYTSKKCHICQSNLNMSDYSSPVCESCGITHHRDINAAANIAQRANVKKACQTRKRHATKTKRVRRSKCHSKPLKHPGTKNKPTPKAPQNQKKTKTHTRTYPPLPKREVSKGMCPAESRVSAVDHVEWFQTTSGTTNPKGKPSIASTVDVVYTKE

SEQ ID NO: 29218 - protein, 510 aa, unknown
  TnpB Polypeptide
VKFYDTVTRHRFTTDDGVDIDQVSANLAQMVVWMAEAEREVLASQEFHDLALKALKGDKPTGSLSAWGRKRLTRYPFSFQKHNMNEMLVNNVLSTLELYAMSVGLFQVMSTHIKETKPNQILSRYRSTYPKAPQPTSGMVRAHLIRYHKKGERKASLPGVSAKLNLAVCDTYFAPKVSRDNNDPLNVVIQVKIPSRGLTKLYLELPSNTERFGDGKVCRPTVRLNNKGQVVFDIAIEHEIDERQTNKVVGVDLGRVEPFVATVIDSETKHRSAPFHTNHKRRLGSLVKKEQQRRDLSHYLYEKANLCDKYNRTDHADVLRTEAKRVSAKATRIKHEISQCIASQVVEIADRNDAHVSLENLSWLDSQGGRWPYAEIQSRIESTAKRYGLRTIKVVARGTSSTCSRCGGKTTNNKVTRVGTCATCGFKLDRDVSASREIALRATSPSSRSRERMRCLIRQRALEQSSAATRQSKPVTALSGNQGHTGTSSNGLEATLMMVRENLDSRGSPT

SEQ ID NO: 29219 - protein, 363 aa, Lachnospiraceae sp.
MNKGVKFRAYPNKGQQNLINRTLGCCRLIYNKGLAMRNDAYSNGKKIGYNQTSAMLTDLKKQADFAFLRDVDSIALQQSLRDLDRGFKNLFEKRARHPQFKSKHNNHQSYRTINQDDNIRIIGKYIKLPKLGYVKIKQSMEVGHINNVTVERTPTGKYFVVLNVDFEPEFRPNAGRMIGIDVGIKEFYSDSNGNVVNNPKYLEKSMRKLVREQRRLSRKQKGSNNRSRQRVKVAKAHEKITNQRNDFLQKQSTILVSENQTICIEDLNVKGMIRNHKLAQHIASCSWSKFFAMLEYKATWYGNDIIKVPTLYPSSQTCSCCGYKNPLVKNLSIREWECPNCHAKHDRDTNASINILNKGLSLA

SEQ ID NO: 29220 - protein, 398 aa, unknown
  TnpB Polypeptide
IKLQRTLKLVLRPTQEQKQILLETLEQFKFAYNYTCKIGWEAQIWNGVQLHNPTYYTIRDKTSLPSQLVISARVVATESLKSAIKGKRKGLKSRCPQSNNPAIRYDKRSYTVWLDREEVSLATIQGRQRFKIKVPDYFKQYLDWKVTSANLKYDKKLRKFFLNITVEKDVPDVEATDFLIGVDLGLRKLTVVSTPDGKINKFFDGGHIRAVSERYQALRKRLQPKGTPSAKRHLKKLSQREKRFRTAINHKVAKEIVELVPAGGVIVLEKLKGIRKRIKTSKQNRRWIHSWNFAQLQRLIEYKAQTKRIKVVYVDARYTSQKCSRCGHISRKNRRDQAHFVCERCGFRLNADLNASRNIVKGYLASLEGKSGHEAVYPSVWGAVNRPDVGSVGCAMHG

SEQ ID NO: 29221 - protein, 400 aa, unknown
  TnpB Polypeptide
MKLSYKFRAYPSKSTQKVLEEHLEVCRWLYNRLLEEIRKAKDSGKKVSKYDTQRLILGLKEEKPELRGVYSKVLQMVNYQLWGNIRALSRLKGNGKKVGRLRYKGRGWFKTINFNQSGFKIFYEKGIIEFSGVGRVKVRFHRIPGGKVKGVIIKREKSGRWFVILQCDGIALNPLPRTGKRISIDVGVENFVYDSQGFFFQPLKAMERFLRRIKLLQRSLSRKKKGSRNREKARIRVARVFERIENIRNDFLHKVSSWYVKNFDEIAVEDLDVKGLVEAGYGRALHRNIMDSGWGKFFMMLSYKAERAGRRLIRVSPRGTTNRCSRCESVVSKRLWDRVHRCPFCGVELPRDLNSALNIWRLAGWGPPEEPVERRAIPAELVLSGQLNSWKQEAPCVSWE

SEQ ID NO: 29222 - protein, 485 aa, Mycobacterium sp.
MARFEVPDGWVVQAYRYALDPTPAQARALASHAGAARFAHNHMLAVVKAVMDQRAAERSYGIDEAQLTPVVGWSLPALRKVWNQHKTVCAPWWAENSKEAYNTGLDGLARGLDAWSKSRRGQRAGAPVGFPRFKSARTSRSVRFTTGTIRVEPDRHHVTLPRVGAIRTHESMRKLARRLEAGTARILSATAAQDSAGRWHCSFQSVVAAKSRPAHARVSPHPVVGVDVGVKADSLLVVATPGGVEIDRIPAPKSLTDAQHRLSMLQRRAARQHGAYDPATRTKRAPSHRWRVTQARIGKAHNRAAAVRRDVLHKATTALAQQHQVVVVETLNVAGMRAAGGACKRGLNRALADAALAEIRRMLDYKTRWYGGHLVPADRFYPSTKTCSACGRRKPNLTLVDRIFHCDGCGMKIDRDINAATNLARLGEPVHAGEQSPAGSGPVAGRGATHETDPAPAGDAAGDETSTPRHPVDQTGTAAPQGEAA

SEQ ID NO: 29223 - protein, 529 aa, Microcoleus sp.
MQAKGRSKASKTKQGNDSMMSSPKSAVQLELPLFATVASVRPNSETTSLDKLTLCNSNTPTPKSSKISGQDSTSKGRDCKPYWSDLCAANSSRLLLPVATSKADSDLNYSSSWFNKTVDKSWFLTELFTRAKANSQAIFSPSFTTTVAECRDSEVTARRSKKIRLFLNPEQKALIKQWFGVSRFVYNATIKYLQEPGTKANWMTIKTGILNSLPEWAKPVPFQIKSIAIKDACLAVKAAKQGFKKDGLLRQCKFRSRKDTKQSIYVPKSAVKDCGVYHSILGKCQLTESLPEKFSDGRLTLAYGEYYLVVSEEVQQTKTDKQGRVVALDPGVRTFMTFFSEDSYGWLGNDSNLYIQKLCFRLDKLVSKISKAPSRQKRRFKKSASRLRCKIKNLVRELHHKVAKFLVDNFDVILLPTFETSQMMSKSRRKLRNKTVRQMLTLSHYEFKNFLKWKAWENSKLVIDCNEAYTSKTVSWTGEIVKNLGGARTIKSAATGLKMDRDLNGARGIFLRALVDTPLLRDSLNLYVC

SEQ ID NO: 29224 - protein, 321 aa, Streptomyces sp.
VKARHNLEKAQLTERQWRGRWDAERLFLTADGESGAPFGNYTICVDPNDGSVTVVLPEPLRHLANRPRGRYRLSSAVRFSHRRDEWLDRVTANRSVRYDFVHDPVRGRWYLDASWSSGTAALPAPEEIRGFGERTIGIDLNAGHLAAYVLDPHGNPIGQSQTIPLDLVGPASQRDGRLRDAITQLITLARQHGCAGIVVENLNFDDARATGRERMGRGGRGRKFRRTVAGIPTARFRERLRGMAFHAGLLVIAVDPAYTASRCRCGYRQAWPGTQNPASARCDRKRPEDRFAESYRPDRIRSQATRDRGPTQDSERAPTGR

SEQ ID NO: 29225 - protein, 362 aa, unknown
  TnpB Polypeptide
LNKSFKIRIYPNQEQKILIDKTFGCTRFLYNFMLNLKQKLYKFYGISLSYNNMSKILTELKKHKSWLCEVDKCSLQECLKDLDYAYKKYFDGAGFPKFKSKRGKNSYRTNCNLHLDQDNKMIRILKVGWIKFRDKTKFNGLNKIYNITISKSYSEKYFASISAEVDITAFAKTKKSCGIDLGLKDFCILNDGIKFENLRFLECNKRRLRLLHKSLSRKVYGSKNYEKARIKLAKFHEYIANCRKDYLHKISIFLVKNYDVICTETLQIKNMLKNHKLAKAISDVSWYEFCRQLEYKCLWYDKKFVKINTYFASSQICSNCGYKNSDIKNLDMREYDCPECGQHHDRDVNAAINILNQGLNLL

SEQ ID NO: 29226 - protein, 517 aa, Streptomyces sp.
LWCPAPRGVAIRTRLKHLSAGDEKVLRLVGDLLGSLASRDLKARCAARLDHDSERWAERKRTLTEQSSSRWAGSITKATHDQWVLARRGQLAHIQSLQAGIETITHRLSLPVGEKGTKRAPGGYRSKQEWFAKSRRLHLLEDRLQTVRADREAGVVHVVRGGKRLLNTRHHLDAAQLTEPEWRKRWQAGRRFLAADGESGKRCGNETIRVTDDGEVSLKLPAPLAHLANAPHGRYVLTARVAFAHRGEQWADRVTANRAVAYRIHEDTGRGRWYLTASWTIPPVQTVPLEAARTNGLIGVDTNADHLAAWRLDNHGNPTGNPRRFFYDLSGTAQHRDAQVRHALIRLLHWAKRHGLAIAIEDLDFTAETSREKYGRRKRFRNLISGMPVARLRARLVSMAAELGITVVAVDPAYTSKWGARHWQKPLTSKTRKTTRHDAAAVAIGRRALGHPIRRRTAPPPAHQSDEQGHRTVQARPGTPGREGNRPRTTDTIRWRRTRRERGGPERPTPFGAFGWA

SEQ ID NO: 29227 - protein, 459 aa, Massilia sp.
VQGLLKFDVLLHSGDECVATEFHTNTRLILIDLCRDHCSWVDDNRNMLRLQAYKYELRPNGEQARAMRRYAGACRYVYNKALALQKENRDAGNRFIGYVAMAKHLTSWRNSAETPWLKDAPCHPLQQALRNLDKAYKNFFEKQADFPCFKRKGSSESFRYPDPKQIKLDQANNRICLPKLGWLRYRNSREVLGEVRNVTVSQSDGKWFASIQTRREVEQPLPTATTAIGIDAGITRFATMSDGDFVVPLNSFKKHQPRLARYQRSMSRKVKFSNNWKKAKARVQKIHTDVANARKNFLHKTTTTISKNHALVCIEDLQVRNMSGSAKGTVEQPGKKVNQKSALNRAILDQGWGEFRRQLDYKMAWCGGVLLAVPPHHTSQTCPCCGHISKDNRQTQASFLCVDCGYENHADVVGAINILARGHRVIACGEPVQQGRSLKQEPTEATRRRAHGAVGIPVL

SEQ ID NO: 29228 - protein, 361 aa, Duganella sp.
MKLVYRYRVKSLSGLLNEQARKVNDVWNFCNDRQKDALRFSRPWHTGFDLIKLTTGCSQELGLHSGTINDVCQQYAKSRQQRRRPYLRYRGRKALGWVPLKGRDLKREGNAFRFAGRTFRVFYSRPLPDGKICDGTNFSRDRRGNWSLNIVLELSEPAKRAPLREVGIDLGLKDLVTLSIADKVSAPQFYRQSEAQLAVAQRAHKKRRVATIHAQIAKRRNDFLHNLSTDLVRRFDLIAIGNVNAAGLAKTSMAKSVLDAGWSALRNQLAYKAIKHGVWFAEVDERFTTQVCSNCGAKPETRPRGIADLGIREWQCCDCGAVHDRDLNAAINILRRGRATLAAGISVLYGRADVNDSSHVG

SEQ ID NO: 29229 - protein, 379 aa, unknown
  TnpB Polypeptide
MQQMTLTAKIQISVSETDKQLLDNTMSVYRDACNYVSDYVLRTHDLKQFSLNKALYAELRERFGLKSQMTQSVFKTVIARYRTILENQNEWIKPSFKKPQYDLVWNRDYSLTQNCFSVNTLNGRVKLPYFTGGMSKYFDHTIYRFGTAKLVNRHGKYFLHIPVTYDVEDSNLSDVCNVVGIDRGINFFVATYDSKHKSGFVSGKTIKQKRANYSKLRKELQMRRTPSSRRRMKAIGQRENRWMQDVNQCVSKALATSNPRHTLFVLEDLSGVRNATERVRTKDRYVSVSWSFYDLEQKLIYKAKQNLSTVIKVNPRYTSQCCPICGHIEKSNRDKKLHLFTCKNCGYKSNDDRIGAMNLYRMGINYLEDSQVPNTVTAE

SEQ ID NO: 29230 - protein, 227 aa, unknown
  TnpB Polypeptide
MVAMKQVLTIVVKLQPTPEQAAKIEATLQAFAAACNYVNEHTDPKLTNKIAIQSLTYQTIKSEFNLVANMAVRACARVAANRKVAKHKGKPVKWFAPTSIDCDKDLFRFREHDWTVSLATTHGRERVKLKVGNYQRGKLKGRNPTSAHISKHRDRQFYLHIQIKDDAPYSPITDKVIGIDLGRRDIAVTSEEKKWDGKHIQSVRDKFSQVRASLQKKAPKGTEDNSA

SEQ ID NO: 29231 - protein, 432 aa, Thermococcus sp.
MKRSVTVKLQPSKAQEKTLKELVQISSKVWNRVNYLRRQEFFEGKPVDFLKTEKIVYEEFKSEIGSATVQQICRKNAEIWRSFFSLIRNKRNGELPNWLKPKPPNYIKEGGLIVLRNDQYKIEGNKLILKGLGKFKRLEVQFKGRIHLKGKQGRLEITYDPVRRKWYAHISYTVKEKLQGEEWVEVPRQPLGDLSAGIDLGVNNLMAVYVENGESFLVDGRPLKSIAFYWQRRIAGYQSKINKSGAKKSRKLARMHQKAKLQAKHYINTAVRRTVEKLYHLGVSRIVVGYPKGIARNSDKGKKQNYLLSHVWRFNCVIKRLIEVAEEYGISVIVVNEAFTSKRCPVCGKPHEGARFVRGLFKCPVTGLIFNADLVGAFNILKKVVKTITPNLSGLYAQRRGNGGKTLPEGSKTCFNLGLNETPQTSPSLARG

SEQ ID NO: 29232 - protein, 318 aa, Thermococcus sp.
LRRDQYRIEGNKLILKGLGKFKRLEVPFKGRIHLKGKQGRLEMTFDPIKRKWYAHISYTVEERLYGQEWVKLPRQPLGNLSAGIDLGINNLMAVYVENGESFLVNGRPLKSIAFYWRKRIADYQSKLNKSGAKKSRKLSRMHQKAKLQAKHYINTAVRQTVERLYHLGVSRIIIGYPKGIARNSDGGKKQNFILSHVWRFNTVIQRLKEVAEEYGILVEVVNEAFTSKTCPVCGKPHEGARFVRGLFKCPATGLIFNADLVGAFNILKKTLKTITPSLSGLYAQRRGNGGKTLPKGSKTCFNLGLNEDPQTSSPLARG

SEQ ID NO: 29233 - protein, 244 aa, Thermococcus sp.
MPKGNLSAGIDLGVNNLMAIYVENGESFLVNGRPLKAIDFYFRKVVADYQSKLNKSGAKNSRKLKRLHVKAKLQARHYINTAVRQTVRRLYDLGVSRIVIGYPKGISRNSEKCRRQNFILSHVWRFNYVIKRLKEVAEEYGIGVEVVNEAFTSQSCPLCGQRHKNARFVRGLFKCHREGVVMNADLVGAFNILKKVMGTITPNLGGLYAQGRGNWPKARPEGLKTRFLVGLNETPQTSPSLARG

SEQ ID NO: 29234 - protein, 211 aa, Thermococcus sp.
VSYTVEEKLINGEWVKLPRQPLGNLSAGIDLGVNNLIAVYVENGESFLVNGRPLKSIDFYWRKRIAEYQSKINKSGAKKSRKLSGMHLKAKLQARHYINTRVRQTVEKLYRLGVSRIVVGYPKGISRNSSKGKKQNFLLSHVWRFNYVIKRLKEVAGEYDIQVLVVDEVFTSKRCPVCGRPHEGARFVRGLFKCPMMGLIFNSDLLGRLIF

SEQ ID NO: 29235 - protein, 391 aa, unknown
  TnpB Polypeptide
MSRCRWTVNQGIAHFNSTSRFNAIDACDEFVTQFPKIENGVEQIIPFWMFDTRPKWIFDTPKVYRYNILRKLGSNIKSAFSNLKAKNIKHFKFNFRSKRKNDVDQLECDEANWSIRTSYNGNVFISMPGGLTNLKVRIPKCDRKKGFSIEKAGGLTLRRENNGWYVDLIYKLQPAEMQDDQKRICAVDPGQRSFLSGFDLQGNSFQLGIDVQAGLRKLKFKRNLAQSRYDKLKVKTKNHRSYKEYQMFARAKRAFYLSTNKIKNYIKQLHYHSCKYLTDNYDKIIIPVYGTQKMVKAGCKKWNDMILSLNHFSFRSMLIAKCEVLRKTVIVCSEEYTSVTCGKCNSYKMDLEDKKVFNCSQCDYKADRDENAAFNILRFVINTALPVLSVE

SEQ ID NO: 29236 - protein, 391 aa, unknown
  TnpB Polypeptide
MFVLEVKQMIKAQVVELKPNKTMQQELDKLCDYRRYCWNQALATGQDMYEARTLDKDNNPSPNERRIRDELVDNKADWQFALSARCLQLAVKDLANAWKNFFDKAQPDWGKPHFKSKKAPRQGFKTDRAKVVNGKLRLDKPRGIKTWFDIPTYEALKMKQIKVASVFRERGHYYAALSYEEETLVKPRTGRKTAVDVNVGHFNYTGGKINVLPSRLQKLYKRIKHYQRMLAKKRRANGKLAGQSNNYVQVRTKLQRDYRKVANIQNDLLQKFTTKLVNNYDQIVIEDLAVKQMMMTHVASKGMQRSLFSKFRQILTYKCEWYGKELILADKTYPSTQRCANCGYVKKGDEKITLQGNQKHHTKHNEYICYECGYTNDRDDNAVLNLLALAK

SEQ ID NO: 29237 - protein, 385 aa, Moraxella sp.
MTVIRGHIIRLDPTDKQATYFAKACGVARLAYNWALAEWQNQYKLDKAYRDDCLANGIEIDTSKLNKPSQGKLRKQLNAIKRTQFPFMLEVTKCSPQLAIMQLADAFKRFFKGEAKYPQFRKKGVDDRFSLSNDQFKIDQNRIKIPKLGWVKMRENLRHNGKVLSAKIFKKAEQWFVSVAVELQEITQPLPKTNKVVGIDLGITDLAVLSDGTKIQAPQPLKQQLQKLKRLSKQLSRKQKGSNNRAKAKTKLSRLHAKIGNIRQDFSHKLTTQLVKSYDVICIENLNVKGMVQNRKLSRAISDLGFYEFKRQLIYKANQWGKVVKEVDRFYPSSKTCSNCGFIIAKADLTLNVRNWQCPSCHTQHDRDINASINILNNATKVLTV

SEQ ID NO: 29238 - protein, 472 aa, Halorhabdus sp.
MDWLMKRTNTFAVRPLTNDGEQLLRDLLDASAALWNEINYQRLLRYNDEDGFEGDVWDADTGALEGRYKGVLGASTAQQVIRKNSEAWRGFFRLKEQYHDESNTVVTEHPEPPGFRGNENDGRHLKGVIRNDAYTVEWGDRSRLEILVGRELKDRYDHTGRLRLEIAGDPNWPEYEDQSRLELWYDETDSTFRASQPVTLSDDARDTPLADETAALDIGANNLVACTTTTGEQYLYEGRELFERFRETTREIARLQSKLEDGRYSSKRIRRLYRKRTRRRDHAQEALCRDLLDRLYAEGVDTVYIGGLTDVLDTHWSVETNAKTHNFWAFKKFTDRLACTAEEYGISVEVRSEAWTSQECPQCGGTDRTTRHQDTLSCSCGFEGHADLTASETFLKRQTEQTVRPMARPVRFQWDDHTWSESPRSHESPNEQRTDQSTVHRDGKYCLRGLSDRLRLPRRRGNRAVAGLRPAA

SEQ ID NO: 29239 - protein, 425 aa, Halorhabdus sp.
VKKVEYRRTAVIKLDTPEGAGEHLRETVEQFKYCANTASEWCWHGRHQIPEESGCQPETRGVSGDDDGYHVTSKAKAECGLYDQLREETELTANLVQKGIRQAVEAVKSGVERLKNDKETSRPTFTADTAIYDKRSATFHRDYVSLSTVDGRIECDYILPDDSENPPTKYITDEDYEFRRATLHRRDGDWFLHASMLKEDDDTDTTTGHRTVLGVDIGVNQLVVASTGRFWSADEFNHWKREYEKRRGDLQQCGTRAAHAAIAGIERKADGRFEIFLHRVANEIVTEAVEHDCSHIVFEDLTDIRENVPEASWHHLWAFRRLYEYVEYKAEEHGVEAVQVDPRNTSKRCSTCGFTHDDNRHGEDFECQKCGYQNHADYNASKNIGLQYLRRRQNADDGGAPVDVRLNRGTLNVSGEYNPPASSEA

SEQ ID NO: 29240 - protein, 417 aa, Halorhabdus sp.
MEVRRAVPVTLDVDSDDAALLETTVDEFLFAAQYVVDHAFQAEYVTTSKSQLQDETYDDVRDQTPLNAGLVQNARNKAAEACKSVVERWKQGKKASKPSMTAPHVVYDHRTATFHDDYVSLATTDGRVEADYRLPEDMDGTPHAEYLFSDEYEVTGAELHRKHGEWQLHIHTKTDVEFDTPEQATTENGTVLGVDLGVNNLAVTSTGTFWTGAEFDHWRREYEKRRGDLQACGTRWAHVNMQAVGRKEEGRFNLTLHRIANELVQEAHDHGCSVIAFEDLTDIRERTGASWGHKWAFDRLYGYVQYKAEQHSITVEQVVPENTSRRCSACGFTHPDNRDSEKFECLKCGYENHADYNAAKNIGLRYLRRNQTGDDGGAPLGVRLNSGTLNVNGEYESPTDVSARTGVHAESHRFSGG

SEQ ID NO: 29241 - protein, 404 aa, unknown
  TnpB Polypeptide
MQRLQAYQFELIPHGQQQRKMQRFAGACRFVFNKALAWQKEQYASDPTIRFSYTVLANLLPLWKQDPNLAWLKESPSQALQQTLKDLERAYINFFSQRANFPRFKKKGQSDSYRYPQGCKLDQRNSRIFLPKLGWMRYRNSREVLGEVKNVTVTHSCAKWFVSIQTEREVEPSLPQATTAIGIDVGVVRFATMSDGSHIEPINSFKQHQERLARYQRRMSRKVKFSNNWQKAKTKIQRIHRAIAHARKDYLHKITTTISQNHALVCIEDLQVRNMSRSSKGNSEEHGKMVKQKSGLNRAILDQGWGEFRRQLEYKMTWRGGILLALPPHNTSRTCPCCSHVSKDNRKTQAKFECVECGYENNADLVGAINILERGHRLLACGELGQSDHSVKQEPAEVTQALAA

SEQ ID NO: 29242 - protein, 495 aa, unknown
  TnpB Polypeptide
MSTFIMEYEITVGNQEKIFLEKCFNIGSNISNLCLNRCLKQLNKLKRDKEYLKSVKAIKNLNKRIEKKNISQIEITKLKEIKKILSDKIKDLEKKYQFTENDIQKYAKVPREFNGKILNSNIVQKIASTAFDAVKKIQYGKAKKVKFKRKGKISLEGKNNRTGFIFDIKIMKLKLNRKLSCNLKSLDKKQRDCFKNRIKFCRVLKKYIRSKKRYFIQIVFEGIPETNFQIGKGEVGLDLGTSTVAISSKNEVKLLKLSKTEQERTKIRNLQRSLERKRRIANPDNYDEKGKVKKKSKKRKLSKNYFKELNKLKEVYRKKKVKDNQYKNILAKFILRQGDTVKVEKISVTSWKNRSKKAAKNKNNGKIISKKRFGKVVNGNAPGTLLRKLKEKLLYFGKELIEINPFKVKASQFNHIKQEFKKCSLEVRFKELEHGIIAQRDLYSAFLIQNVKNSNEYDIKKINQEFGNFYKKQLEEIERIKKEEKLKFYIRNHIA

SEQ ID NO: 29243 - protein, 412 aa, unknown
  TnpB Polypeptide
LFIERQLVSSSGKSEGMYSENEKEVRSLTREMIPRTQMTVGYAKLEKIIRKHKSELYKRNLPNQSVQHCLKAVVHDIKSYFESLKQYKENPSAFTGKPKLTKYCKADRKTFVLTNQGCVLYKQTDETYKLKLPYITRKDGILLDVPYLPADFKKLKEVRIVPFYDTYKLEIVYEQFTKEKPHTLTKVASIDPGVDNLVTLVTEDESLVINGRIIKSKNQWFNKRASQLNSHLDKMYKTSKHEDSKQLTTLWKKRSLWMLDYLHKVSRYIINYCVEHKIGILVLGSNNGWKQECNIGKTNTQNFVQIPHNRLYNLIQYKAEAEGIQVILQEESYTSKASYLDKDAIPTYNPEEENKKYSFSGKRIHRGLYNSADGTLLNADVNGAANIYRKHFDETPFTAKSLQNVHKITIAA

SEQ ID NO: 29244 - protein, 324 aa, unknown
  TnpB Polypeptide
MIQAKNKLVYQIKNNIYSVGFGGKHTFDNQNRLQENRYKTHKKWYNNYVKLRDKNIFYLGSSDETFGNQMFQMTYNSSFDDFIIKVRKENHWCKSTKEIDKYIVVEHIDFKYMKTYVKNIILSHYNKNDKDKLPLSYRFHRRKTHWYLQVMFSIKYDNYVTFSKYGTIGLDYNDGFIELSETDECGNLIYQDHIILKEHGTGNKAKSEIEQAISKIVSYALTKGKDIVIEDLDFKKKKSTTSKSDKNKKYNKMLHLFDYSRYKEIMENSCHRNRVYLNKINPYMTSQIGKQKYSNSKKLNIHQAASYVIARRGQGFKDKYKKIA

SEQ ID NO: 29245 - protein, 304 aa, unknown
  TnpB Polypeptide
MRLTVQLKLLPTPQQADALRRTLETANAVCNAISQVAWKTQTFRQFPLHRLTYRSVRKTFPLSAQVVVRCIAKVAEAYQHDTNTKPVFKPHGSVAYDDRILSFALSDALVSIWTLEGRQTIPFICGDRQQMLLAYRRGETDLVFSNGSWYLYASCEVQTPQPFEAEGVLGVDLGVTNIATDSDGEVYSGKAMKNVRHRHRRLRQKLQRKGTLGARRRLKKLSGKERRFATYVNHCLSKRMVAKAECTKRAIALEDLTHIRTRMKACRSQRATLHSWSFAQLQGRRPSPRAFIAYKAVLKGVPVH

SEQ ID NO: 29246 - protein, 399 aa, Thermoprotei sp.
MRASITRLAWVMPEGTYHKALKAKAEVIEGNINDLLWDLAIYKYALQRCIDALWELDRIPKKSQAHQLFYSVLRSYGFRAHVARNIYSIALALVKSAKENGGRKPVIKKMCARLDYQDGRVDLGNEVVRVILRNKWYSLKLVHRKEYIERFRGLRWKEVHVKYGNGKLYVSIVFEVRYAPYTPRGSLAFDVNLRHIAVYDGSNVRRYGTRFIDALSKRARAEELQRKHPKRWRCNRRILNRIRSLHRKAKNLVVDWCRKFAKELVLKTKKHGYAIVLEDLEYLRENVVKKEDKIVWKLSIFAYRKLQEAVISKVIEYNVPVVFVNPRRTSSTCPRCGAKLSYVYRLAICRSCRFIVDRDTVGAMNIWIRFIYAHAGELGSPLSAPVMKDEARRNGRIQG

SEQ ID NO: 29247 - protein, 237 aa, unknown
  TnpB Polypeptide
LKSVYAQILQNVQARVDLAFRAFFRRVKAGEQAGYPRFRGYGWYDSFTFTQFGFKLREDGLYLSRIGAVKIVPHRPIEGRIKTLTLRREGVGNWYACFAREVEPQPLPFNDRAVGIDVGLESFATLSSRVKIGNPRFFRRDEHELARAQRRLSKAEKGTPERARRLKAVQQIHQRIANRRRDFAHQVSRELVNHFGLLAFEKLNGRGMLQNHCLAKSLQDVLPLWNTAREALVGSNS

SEQ ID NO: 29248 - protein, 426 aa, unknown
  TnpB Polypeptide
MANRTVTRTTRARIVNQSTVRDDLDSLGFAASKLWNVARWTTERIWSETGHIPGDSELKSYLKNHERYADLHSQSSQRVLEELAEAFKSWCGHRSNGDLKANPPAYRKHGDQHPRSTVTFKQKGFKHDAEYGRVRLSKGRNLKESAYAHDFVLCDYDVIGPPDTTVENVQQVRAVHEHGEWRLHFVCRVEIDRPESPGDQTAGIDLGICNVAAVSFGDEALLYPGGALKEDEYYFAKERAKHDDTACREAQRLDEKRTDRRRHFLHALSKHIVSECVERGVGTIAVGDLGGIREDEDSEPKNWGRHGNLDLHGWAFDRFTAMLEYKAEERGITVEQVDERGTSKTCSVCGAESDSQRVERGLYDCGCGLVANADVNGAENIRQKVPPSLAADGGDRSTGWLAQPAVYLFDKSTGRVAPQDQVVGKP

SEQ ID NO: 29249 - protein, 369 aa, Nonomuraea sp.
VAQLVKRAYKYRFYPTPEQAEELVRTFGCVRLVYNKALEERTRAYKMEGRGVSYAESSAALTAWKKTPELAFLCEVSSVPLQQALRHLQAAFANFFARRAKHPTFKSRKRSRASAEYTRSAFRWRDGRLTLAKMGAPLDIVWSRPLPEGAEPSTVTVSRDPAGRWFVSLLVEEKIAPLPPVERSTGLDAGLTALLTLSCGEQIANPRHERRERRRLAKAQRALARKEKGSKNRAKARLKVARVHARIADRRRDYLHKVTTRLVRDNQVIAVEDLSVRNLLKNHALARAISDAGWRELRRMLEYKTDWYGRTLAVVDRFFPSSKLCSVCGTLQEAMPLSVREWVCACGAVHDREVNAAKNMLLAAGPAES

SEQ ID NO: 29250 - protein, 188 aa, Escherichia sp.
DSPSQPLQQSLKDLERAYKNFFQKRAAFPRFKKRGQNDAFRYPQGVKLDQENSRIFLPKLGWMRYRNSRQVTGVVKNVTVSQSCGKWYISIQTENEVSTPVHPSASMVGLDAGVAKLATLSDGTVFEPVNSFQKNQKKLARLQRQLSRKVKFSNNWQKQKRKIQRLHSCIANIRRDYLHKVTTTVSKN

SEQ ID NO: 29251 - protein, 438 aa, unknown
  TnpB Polypeptide
MVVEEAFKYAAKPEDAATAESAWQAIQTCREVYNHALTQEYKTAPDYDKPSYTTMQNKLPQWKREWPEWCSVYSKCLQMAVRRIKHSETILGKLKERGFDVGELKWKSPREYRSITYNQSGFDVDRNTGRTDHATVEFSKIGTFHLNFHRPLPDDATIKEVILKNQKTGDWTVSIMIEYDADYSEKTPVEDIDVEDTVGIDLGIMKFIHDSDGREFAPLDEEEDRERIDKRHQTVSRKEQESNNWNKARQRLAKAYEQLSNKRKAYREALANAYTKRYDAVFLEDLNVGSMMQQNGNSRNIASMSWYETLQTFQRFGEKNGCHVVLVPPEGTTKRCVQCGVKSEKPLWVREHSCPSCGFETDRDQNAALEVQRLGLLELGVVAGEWGLGQELAESTPAETGTAAGSRSSSSRDVIPASAVVDTGSPTLKERTASAVSE

SEQ ID NO: 29252 - protein, 367 aa, unknown
  TnpB Polypeptide
MPSYWEDGETGRGKSPLVVRQDGYAVEEENRRLMIKDFNVELEFTGGLRRGGKGLGLRYTATRPRTLGTPLSSSRWALRQVRMATSRGISLTVRVDPSKSRPPGETRPLRSTRAKTSALASAVVRDGACLLYGSVRTEEDYFYLERRISELRSPADKAENMGEQEARDGLDREKRRLFKKLTSGLLHLNRDSASYPVKALHELGASAICLGYPLSAAREEGNELTVNLWFYRKLMDAVKSRAQEYGVKALEVVEHGTSKQCAYHGGEVQRYPRGVVSCPSGHKQRSDLNGALNILKKATNSVVSTVRRTPSFLVDQNTVAPVKGCNPRDLGEPSPFRAERRSGEGPLRCHGIGMSNDEGASSFWRES

SEQ ID NO: 29253 - protein, 193 aa, Enterococcus sp.
MESFVSLNLTNNNNNKFTSKMEKKLKREQRKLSRRALLAKQKGINLFEARNYQTQKRKVARLHEKVMNQRTDFLNKLSTEIIKNHDIICIEDLNTKGMLRNHKLAKSISDVSWSSFVSKLQYKADWYGRKIIKVDKWFPSSQICSNCGHKDGKKSLEIREWTCPICHTHHDRDINASINILTEGLRLHSMGLA

SEQ ID NO: 29254 - protein, 431 aa, unknown
  TnpB Polypeptide
LATATQAYRFALDPTPRQRRALASHCGAARVAYNWGLKLVDARLQQRRAGEDVEVPWTLPALRREWNRAKDQVAPWWAENSKEAYSSGLDGLARALKNWTDSSTGRRKGRPVGFPRGKRKGRSQDACRFTTGPLRVEADRKHITLPRIGGLKTHESTRKLARRLEQGTARILAATITRTADRWFVSFTVEVERHIPTGNGTTTVVGMDVGIRRLAVLSTGVTIPNPHALEHQLRKLHRLNRRLARCKPASKRRTQTRRQLARVHARAANVRNDALHKLTTTLATQHEVIVVEQLNVAGMLRNRRLARAIADTAMGESRRQLAYKTRWYGSRLVVADRFYPSSKTCSDCGWVKAKLSLTERIFTCQACGLQIDRDLNAARNLAKLADHVARSGRETLNARGADARPGLAGLTASKREAGTESPRVGPAPVGV

SEQ ID NO: 29255 - protein, 372 aa, unknown
  TnpB Polypeptide
MARRVKAIRATVSMKIAISEPLLTLINNYVKALRFVLFWLKENVPNPNEKGVLGRVHEGLYEKLREEYNLPSKVAEDCYRDALSIYKGWFNNPKKGRFPRVYKPTVWLTPKASYNVDFGTMTVRIASVGELSILGYPRNLKDYMSWRMRESRLVVRGGKAFLKLVFEKPLENVEPKSSIAVDINMSEIVVGKDDKNYVRIPTRLEEAHHRKSLAENLQKKYPRRWKESKTILNRVHTFHQKAKMIMEDFARKVGKWVVDVARIMDANVIKLESLKNLIKNVDRLPREFHDKLYLMQYRRLQYWISWQAKKHGILVEFVNPRYSSVSCPKCGRKMREVSHRWFKCNCGYENDRDIIAITNLNGRGSLTLSTLK

SEQ ID NO: 29256 - protein, 385 aa, unknown
  TnpB Polypeptide
MQRTYQYRLYPTPQQRDALNMILRQSCLLYNEVLEHRRHVYKHAGQSVSYPAQWRRFKEDRKERVEDFGLLNATSVQQLLRRLDKSFTSFFRRLKAGDKPGFPRFKPTTRFRSVEYRHNDGCKLSDDKLYVRHVGDVPVKLHRAVPEGCLKQVVITRKAGDRWFVSFQGDDGCDPAPLKGGKAVGIDIGLSSLLAFSDGTLIDNPRWFRRSLKKLRRTQRALARKTRFSSRWRKTKCQLETLHWKIGNQRRHFLHKLTHRLTDTFALIAVEDVSPSFMLANPRLALSASDASWHLFRSMLDYKAERAGCLIVEVEARYTSQACSGCGKIEKKLLSQRWHACTCGTELNRDVNAAVNILNKARCGPTEPNVEVVNSSVLRQKADAL

SEQ ID NO: 29257 - protein, 421 aa, unknown
  TnpB Polypeptide
MRCRRRQISRCFEKSSKTGNHTLNCWHHIVKIPENLRHSQSSRDILGHLTRPLPLPIRLQSGLISKEKCTSHFHAAWCRSVLESRKVLMSERKSSPCYGGYMVYVTFQDAVKMPEAPTNPTRILGLDPGLDNFLTALTNFSATPFIIDGHWLKSINQNFNRRRAALMSELTKGMDSTKSVKNSARLNRISKKRACRIDDFFYKAAHYIVDFCLKNKVEVIVCGHNKDQKQEINLGSGNNQHFVSIPYTRFFWILTCVAAKAGIPVIETEESYTSKASLIDKDPIPVYKEGDRLEYHFSGKRISRGQYESKEGTILNADVNGAGNIIRKVYPNAFDGVTDFSYTNKTVIRVTREALCHAKHKKKTRQTTKKTWYEPMAASSQAGTETCIFRTVQSKQCERQDQIYRRIKTNSRKKDGLKVSS

SEQ ID NO: 29258 - protein, 351 aa, unknown
  TnpB Polypeptide
MYPNREQRKAIEFTVERCRLLYNRLLDERIHAYRDEGKSLNYYNQANTFNERKAAIPALKQVHSQVLQDVAKRLDKAFQAFFRRIKAGEKPGFPRFKPATQYDSFTFPQGGYKLERNKLKLSKIGDVKIKLHRPVEGKIKTCTIIQKNGKYYACLSTKIEPKQLPQCTDAVGVDLGVKTLAVTSDGEYFESPKCLRKSEKHIKRLQRSVSRKKNGSNRRKKAVRVLARLHEHVANQRKDYSHKVSRQLVNRYGLIAFEDLNVLGMIKNHNLAKSIVDSSWSQLVAFTSYKAESAGRIVKRVDPHNTSQLCSNCGEIVKKQLKDREHHCPGCGFVADRDENAAVNILKRATA

SEQ ID NO: 29259 - protein, 380 aa, unknown
  TnpB Polypeptide
MEDVTFRVVKLVVQIQLKPTPEQAAALTATLRRANAACNWISDRAWEEKTFRQFALHKLAYHDTRAEFADLSSQVIVRCIAKVADSYKLDRLTRRTFRPLGAISYDARILSWRDESANIWTVAGRQRIPFVCGDHQRALLKYDRGETDLVLRDRKFYLFVTVDVPDTEERKVLDWLGVDVGIVNIATTSDGQNFSGTHLNALRGRAFRLRKKLQAKGTKSAKRLLKKRSRKETRFASHVNHVISKQIVVAAERTGRGIALEKLDGIRARIRASRSQRRSLHSWAFADLQSKIGYKAKRAGVPVCFVDPRNTSRECRVCGHIEKANRKTRDRFACLACGHSADADANAASIIASRAIVIRPNADRVEVVVSHGSDLQSSAL

SEQ ID NO: 29260 - protein, 425 aa, unknown
  TnpB Polypeptide
MPVQDDDTILAGANVLALIYSNKYSIHMQLRYNYRLYPSPGQQQALARAFGCARVVFNDALAARRDAHAAGLPYLTDAELSARLTAAKKTPERLWLGGVSSVVLQQALADLNAACRNYFASLNGERKGRKVAPPRFRSRKDRRQAVRFTANARFKVLASGRLRLPKIGDVPVRWSRPLPAAPSSVTVIMDAAGRYFASFVVEASPEPPPPAVAQAGIDLGLTHFAVLSDGRKIASPKFLRRAERKLRTAQKDLARKVKGSRNRSEARARVARVHAKVADSRRDWLHKESTRIIRENQAVYVEDLCVAGLARTWLARSVHDAGWSAFTGMLEYKAALYGREFRKTGRFEPTSQVCSACGVKHGPKPLHVREWTWVTCGAVHDRDVNAARNILALGRRESLNARGGQVRPPLAAAPAGEAGSLRGAA

SEQ ID NO: 29261 - protein, 568 aa, Streptomyces sp.
MGDLYGWGSLDAVTDLRCRAGGDGVGGLRKVAAPFVVPGPSGVAVRARLRVSETDAAVLAEVGTFLGALASRDLAVRSRQGLAHDAATWAARKRELTGDSSARWAGSVTKATHDQWALARRGQMAELAWLRGQITAIEARLARPLGAKANKHEGLVRGYGSRAEWHAKARRLHTLKARLTAVEADWAAGRVHVVRGGKQLARLRHHLGQAGLDQAAWRDRWEAARMFLAADGESGKRFGNETIRITGTGQVSIRLPAALAHLANAPHGRYVLDAAVVFRHRGEEWADRISVNRAVAYRIHQDSVRRRWYVTASWQRAAVPVLPIDAALAKGVVAVDMNDDHLAAWHLDIHGNPVGEPQRFFYDLSGNTSHRDAQIRHVLTRLLHHTRRRGAAAIAIEDLDFTDGTSREKHGRNKRFRRLISRFPTARLKARLVSMAAEQNIAIVAVDPAYTSRWGAQHWQQPLTTPHRDTTRHDAAAVAIGRRALGHPIRRRTAPPPHDQSDRAGHRTVQARPETRRREETRPRIPGPRSRVVPPGRGAKTGDQRAQHRSEHAAEHEPWQQDSLPLSL

SEQ ID NO: 29262 - protein, 410 aa, Streptomyces sp.
VTIMQLRYSFRVYPDTGQQTALAKAFGCARVVFNDAVRAREDARRSAQPFPTAGHLSRKLITEAKRTAERSWLGEVSAVVLQQSLRDAEAAYKNFFASLKGARKGPKLGPPRFKSRKDARQSIRFTANARWSITDRGRLSLPKIGAVKVKWSRTLPATPTSVTVVKDAAGRYFASFVIDTDPDADAAQMPENDRTIGIDLGLTHFAVLSDGTKIDSPRFLRRAEKKVKKAQKELSRKQKGSKNRDKARLKAARAHAKVADARREFHHQLSTKLISENQGIAVEDLSVAGLARTRLAKSVHDAGWSSFISMLEYKAERYGRTLVRIGRFEPTSQTCSTCGVKDGPKPLNVREWTCTACGTVHDRDTNAAINVKTAAGLAVSACGAPVRPGEIPAQREEAGSHGFPTGNRAA

SEQ ID NO: 29263 - protein, 296 aa, Hydrocoleum sp.
  misc_feature (276)..(276): Xaa can be any naturally occurring amino acid
MKSIKTKLKVNNYQKTILAKHAGVARHAYNWGLTTSIKEYQLTKKRPSAITLHKRLVDEVKSENPWYYEVSKCAPQQALRDLDRAFKNFLTVPKHGFPNFKKKGKKDSFYLEGSIKILKGNYIQLPRIGVVKTYEILPSVPVKNVRISKRAGEWYISFKYDDDAQANPSRKKRELIGVDVGINTLATCSDGTKFANVKAYKQAKKRLTRYQRRVNKKEPGSFNRAKAIKKLAKTHKKVADIRADALHKLTTWLAKNHSTIVIEDLNVSGMLKNHKXGQWSSVKQEASSKAHAITHG

SEQ ID NO: 29264 - protein, 412 aa, Microtetraspora sp.
LSATADIVVISLLSVGGGVRRSYTLLLRPTGKQAATLTQCLEDHRVLYNAALEHRRTAYRKAGVTVRYGDQSGELKHIRADDPAGQGRWSFSSQQATLRRLDKAFAAFFRRVKAGQKPGFPRFKGRGWFDTVEWPKDGDGCRWDSQPEHPTATFVRLQGVGHVRVHQHRPVLGRVKTISIKREGSRWYVVLSCDDVPAQTLPAAGAVVGLDMGVASLVTTSDGEHVANPRHLHASADRLAAAQQALARKKRGSKRRRKAAARVGALHAKVRRQRLDGAHKAALALVRDYGVIVHEDLRIANMTRSAVGTIEAPGRNVAQKSGLNRSILDAGWGVFLTVLAHKAESAGRELVAVNPANTSRTCARCGHCAKENRVTQAEFACMACGHTAHADVNAAVNILRAGLALREAAGAA

SEQ ID NO: 29265 - protein, 383 aa, unknown
  TnpB Polypeptide
MKVVVTAKVKLAEGSEVLNDTMRVYAQAVQFCIDVAWQHKITSKAALQPRCYYEVKARFGLQAQLVINAITQAVEMVKRARSKPEVSPELAIRYNFPRCASISKDWTCLSLSTLKGRVKFQLVIPEVFEPSLVWKLGESTLIKDYKGRFFFCFTFSKETTCQPTANNHFKIVGVDLGVNTLAVTSDADFFGSVKQQRIRWERLVAELQAKGTRAAKRKLQRVSGAWKRFMTWINHNISKRIVEKLSEGDVLVMEELKYIRQTATYNRWVHKWAFRELQRFFEYKATLKGVRVVYVRPHYTSKECNRCHSRNTTRHRGFFVCRTCGHTLNADLNGARNIAQRYMRITGLGFGKHAHVLACDEVETLLHRRELKLSAAKSLTALA

SEQ ID NO: 29266 - protein, 561 aa, Hydrogenobaculum sp.
MLTLQCILEFKNEKDKEVVLDLMRRFSSAMRYAYKRLLESEKRKDLKKHLSKTFNINTRYSDDAILLAKQTIETYKSHNKNPKKVIFGSRMLFDKLNKKHLTGESRKSLIKKWREKRQGNLYSRGDKSKQGNLNLRLQWIDDKLYLRINIGDRQYIYAKVIRTVSRKNDKWIDFMLMLLKAKESGSWFPYSVRLALKNGKVYAFISVEEKLPPVTIKKDSGVIGIDINAYPFHLALATASKDGNLENYQAISLHELLDVSSEKRQYLEWRIAHQIIEIAKKENKAIAIENLDKLPKGKRGNGFAKLRQKLQKWIYKRLLNKIEITARRNGIEIRKVNPAYTSLIGKLKYAPQFNIDKDIAAAFVIARRGLGYKEKLPKNYREVLNDIDFLSYSIARIEDDIKRVKENIKDEKNPYIRNRLKSMLAKLRKELKALQKHLSFIIQSEKSKSVSQQPVNQRKEQVRSSAYAGYKNWQVLFTAFAFCYLEKSYRDFSPLKQLIVSKDWIAVANRLAPVLGAGTTSMPRFMILPKYRLLGLEVSEMAEYKYPNSSCTEQYSFVQFG

SEQ ID NO: 29267 - protein, 452 aa, unknown
  TnpB Polypeptide
MKRTNTFAVRPLSTKGEQLLRDLLDASAALWNEVNYERLMRYNNEDGFEDESVWDADTGRLEGRYKGVLGASTSQQVIRKNSEAWRAFFRLKDQYHNESNTSVTDHPEPPGFRGNGDDGRQLKTVIRNTSYTVEWGERSRLEILVGRDLKDRYDHTGRLRLEIAGDPNWADYEKQGRLDLWYDETDSTFRASQPVTISDDVRATPLADETAALDIGANNLVACTTTIGEQYLYEGRDLFNRFRETTREIARLQSKLEDGQYSSERIRRLYRKRTRRRDHAQEALCRDLVERLYEDGVDTVYIGGLTDVLETHWSVDTNAKTHNFWAFKQFTERLACTAEEYGILVEVRSEAWTSQECPQCGSTDRTTRHQDTLTCPCGFEGHADITASETFLERHTNEAVRPMARPVRFEWDDHTWSESPRSPERARPKEQRTDPSTVDSDGNVASEDSQAV

SEQ ID NO: 29268 - protein, 277 aa, Actinomadura sp.
MTAAKKTPERCWLGEVSSVVLQQSLRDLEAAYRAFFEGLAGRRPKVGAPRFKSRKDNRQSVRFTANARSSITPGGKLALPKVGEVKVRWSRRLPAIPSTVTVVKDAAGRFFASFVVESSDEPLPEPGTETGVDLGLEHFAVLSDGRKIASPRFLRRAEKKLRKAQQALCRKQKGSSNRDKARTKAARAHARVADARREFHHRLSTARGGTARRAHEHPRPVRHRRGRDRRRHRDPGHRARDLANAERRQAEADAHAGRGEPDPEVTEAAEAGSGSGS

SEQ ID NO: 29269 - protein, 425 aa, Acidimicrobiaceae sp.
VGSGKILGLQFSCFLEIFDRPLCSYMTSKGSRCRTYRYRIHPTKLQTQALLLQQRYQCELYNAALEERIGSWTWERRSVSYFDQCRTLKGLKDFRPEVVASGTVLCRGTLKRLDRAYGAYFRRVKRGETPGFPRFKPASRFDSLQWAEDSGWKLKPQHRRLYLKGIGEIKTNYYRPFKGEPKAITVKREGTRWWLSVHCVNVPAVPLDRTCSEIGIDLGVVNQIATSDGELKKGQHFGAKVQNQLTQAQRSLATKQRGSNRRRRQVDEVVRLHYKIKNQRRNAAHQLSRQLVNDYDLIALEDLRIANLVLAPKGKPDPEQPEAYLPNGVRKKAGLNRSIHDAGWGQFVSLLSYKAESAGRTVVSVNPRYTSQTCAECHHVDAGNRVSQEEFRCRRCGHCDYADINAARNILRAGRALQASACDGR

SEQ ID NO: 29270 - protein, 357 aa, Acidimicrobiaceae sp.
MAHEGSRCHTFRYRLHPTKLQSQALILQQRYQCEMYNAALEERIGAWAWERRSVSYIDQCLTLTGLRECRPEVVASGITLCRGTLKRLDRAYGAFYRRVQNGETPGFPRFKPTSRFNSLEWGDRDGWKLKTQHRRLCLMGIGEIKANYHRPLKGEPKAITVKREGTKWWLSVRCVNVPAMPLARTCSEIGIDLGVVNQIATSDGELKKGQHFGTKARKKLLRAQRELATKQRGSNRRRRQVDEVVRLHQKIKNQRSDAAHKLSRQLVNDYDLIAFEDLKITNMVRAPKGIPGPEQPGAFLPNGASKKAALNRSIHDAGCGQAQSRGERQSLLHQPHVCRVPLRRRRKPGQPRRVSMS

SEQ ID NO: 29271 - protein, 482 aa, Acidimicrobiaceae sp.
VEEPYRTRGVVVPLDPTPAQEQLLRSYCGASRFAYNWTVAIAKMNLDTREEELRAGIDRADLTFLSWSEWSMTPLWNSVKDEVAPWHRDVTKHAFRSGVTNAAVALKNYNESTKGLRRGLPVGFPNFKNRRSKLSVTFTETGSKCGWFSEDSRHVRLILPRFATDPRITRRREQLRRLHTTESLRRLKKKVTSGEWTIQAVTISFTSGRWQASFSVRQFVIPVPNSVRLRGPLVGVDFGVKYLATLTVTVKGLCDDHGHVENPGHLDAQLARLAKLNRQLSRCVKGSKNRARIVKRRQRLYGRITRTRDLHQHQLTTILAGSFETVVLEDLNVASMVKKTKKNTAKALSRSIQDAGFYELRRQLTYKTEDRGHRVLVVNRFYPSSKMCSHCGETKAKLTISDRVFECSNCGISLDRDVNAARNIRDEGNRLLTNEASTVAGHQPETLNAVSRDRETKPPRRGRGDRYQSRTTQPARELSPLA

SEQ ID NO: 29272 - protein, 441 aa, Acidimicrobiaceae sp.
VTRSNCTLTTLTQAYRFAIDPTPVQANHLRSHIGGSRFAYNALLELVVANWDENRAKKASGLNVTKDDYLSTSHFGLLYLWAEKRDELAPWWSENGVSTYNDAAQRLSKAFQNFHRQRAKFPSFKCRGQVGSVRFKKDAVRLSDSHHVRISRIGEVKTYESTRKLFRHLERGTGRIVAATVTQRNGAWSISFTVEVQRQLPPTRIPEMIVGVDLGLTTLYTCATPEGVPILALDNPRHLVGAQRSLAHAQRIASRRSGPRKGVAPSNRWKKANGRVQKIHAHVANSRKNLIHETTTRLAKNYDVIVIEDLNVVGMMKNPFLAKHISDASWGEFASQLEYKTRWYGSTLVKVDRFYPSSKTCNQCGTVKAKLSLDQRVFECGACGLAIDRDLNAAINLARHGLAATDSVTGRGGEVRPKHQRLDATAHPDETSTKTSTLVGV

SEQ ID NO: 29273 - protein, 487 aa, Acidimicrobiaceae sp.
MVEPTREFMRIFVSHLEPILILVMTRLKTAPDSHTGQVLSRSVTFVFALDPNFEQRILLAKCAGARRFTVNHHLARVKANLETRSSERVTEGEGDALVDPTTPALSWSRFSFINEFNDWKNGQSEDSPLNEDGSRGLSWRHDLPCDVFECASVDAARSLEHFASSRSGQRSGPPVGFPRFQAKGKATPSFRLKNYATPGQAPLSQSIRFVDSSHLRLPKFGPIKVMTPTREVRRMIDAGRFHVYSATLKECAGRWTVCLTGVAAELHPAERSRATRHLVPVGVDRGIISLCVAADAKGTPFEIFEGVKTLREAQRRLRTANQALARTKPGSKGRQRARARIAKTHRTVANTRRHLVHQVSAALVTRYQILVLEDLNVAGMMKNRRLAKSVSDAAMGELARQILYKAKWHCVEVRVADRFFPSSKTCSGCGVVKTNLNLSERTYCCDSCGLSIDRDLNAAINLARWQPKEPISIAPPAPTSALLLSTA

SEQ ID NO: 29274 - protein, 552 aa, unknown
  TnpB Polypeptide
LYSFQRWPDVRAAFDRFGSYTPSWSAARRQAVADDGDTGWWNAISPLFAGRNCVPLFDYYARNVIKIGMTQKVCIARVEVRGAAPYLGMCVDTVGREMPVWSDNPQVVLDWLCDAWRCRYNQLRTRRMKWNRDRSELVPLGPVVDSRTDRQVREQCSWLASVPAMVLQSPNRIENTDWWAANKRRKTLKKQHRYPGMMPRFKSHKTDPMFVCWYNKGANAVFHKLNKHHGVVVIVGQNSKAHSLPGQGCRYEIRIRVRLSQEIRPYTSIGVHPRGGHLVFVNDPLPISRRRTGMEVGVDRGCVHNLALSDGSFLDLPKARLEKIDKEIRRRQKAQARRISQSGLSAKEYVRSEHRSNRYVKEQKVIGRLYRQAHNIIDDFQQQVSRRLVSKYDLIVLEDLNLTGMGRKAKPAPDPLHPGRFLPNGQAAKRGLNHALRSASMGGIRQKLEYKTKRAYASSLLLVNPAYTSQQCCQCGHTCRENRESQAVFHCTQCGLMLNADTNAAINILQRGHEVLISGMGEAGRGNTAPDVRGEHIAENAAVSKREPTASH

SEQ ID NO: 29275 - protein, 616 aa, unknown
  TnpB Polypeptide
VAYGKGPQNVLRRSIPSGKIMLAPDVVPVGKINQVLIIRDKYIAAANAFVDAAFQAEPLASARTGEDIHRVLTNLQKTMEKGFNKAYVEKARLAVPAAMDQVEQKYFNRLFGRLLHCATGTGEKDPAKRQYLNIPENIQANVTVPMLAALELKASGLGYHGVIELFRDVVVRKRTRGLTRKEAMVIRAIHGECLLKYRKPVFGSDGRYACQINLDYRIVRNKSEPIAELDKGARLLVDRGNRKYYHFLEISNPIPRGEPIRIPVVMSSRTLRRFDRLSSVSALAVIIEPDSVLVRAIIAKPDSKADTRHVTHLIGRDFGMVNTISLSVARIDDPIDPLKLKRISNFTRDEALRYLSSYNHPDTNIVERVRFSGRNFLRSINDSCSRIDRLKSQIDAGYNKLNKLKGIICGYLGVSERELFSESRLCDDQYIQKIHEKFIRLYKHIVQMKRVRLAIYKRIASIKRVWFGFLSNQEALLAKKYNAALVREDLTILTMEKKSSGYKGRTFNKMINNGSKGQYMQRASDKLRWDGIPELAIQSYHTSSACTVHALVDRNMRQGELFYCPQCGNKQHADEHAADTICNYLLLRPVDAQQVTLQLPRGRQSLGNLLIGSPNQ

SEQ ID NO: 29276 - protein, 410 aa, unknown
  TnpB Polypeptide
MKINKAYKFRIYPNKEQQSIFEQYFGVYRFVYNTVLDYKINSYKRGIKYTAYDAIKDFTEIKKLKGYEWLKEVNSQVIQQAILNLDNAFQQFFKVKQSGFPKFKSRKTNHNSFRVPQHFQIDFENKKIKIPKIDWIKFKDKRIFDSKIKSMTISKNPSNQYYVSILIEEEFEQNLLNEITESKVFSADMSAKNFLVSQDMEFENQKFYRKNERRLKIRQRRLSKKQKDSNNRKKERLNVARFHQKIVNKRRGFQWNLAYELTQRFDALIFEDLNIKGMQQFNKGLSKTVTLDFSFSEFLSNLEWKCFKENKHFVKIDKWFPSSKLCSSCGQIKQDLQLSDRQYICECGLNIDRDINASINIKNAGLNILKEKGINLLKNSTGLMPESYACGYMSVNIINSAQESSSFRGW

SEQ ID NO: 29277 - protein, 410 aa, unknown; identical to SEQ ID NO: 29276
  TnpB Polypeptide

SEQ ID NO: 29278 - protein, 531 aa, Scytonema sp.
MPQVYQTYVTQISNNLSGEIFALDMLEQFSPIAASMSQMVLAGLESDMKKEKLNSLIQNTFNVNKRHANSVINFVTGELDSAEKSYKKHLEILDAKIKLVKQETEKLNKRLKAHREYVRTVEKRNLAIKSPQKTKTGKLKKVSPLNKKPEFDDACPINGKSHGKTYLQLAKQQLHQKKRQLRMYLDRKSRVLQGGVKVNLGNLGQVAFVGSTNETNSNQICQLIPDVIPQLKIRVPYFLEETFGAQVQLPLYKINPHGYDKIVTAWALNQALTYVFSKNPKGKWVVAITCLVDFAITSNEKSLGCIGLDINPDSVGWCATNCHGNPVAWGKVNLDLHSCSTDQTEARLAGAITELTNRALATKKPIVIEKLDFSEKKKQFSRGRKYNRMLSGFAYAKFKELLKARCLKLGIKVIEVSPKYSSQIGVVKYMKRYGMGSDSAASLVLARRGMNIYYERMPVRYAFQSSIQPEPRQHVFAYWQRFNKYYLKLGSRHAWFGLPTLTGSTGDSLVNTGNFGFPKLQHKHGSVCPVW

SEQ ID NO: 29279 - protein, 427 aa, Lactobacillus sp.
  misc_feature (87)..(87): Xaa can be any naturally occurring amino acid
MSDFFERYGRCRHFFLNRFCGINSMLAVNNWQALRNQVRKWDKPVKGSKGKLETVYNFQTKHWVGALREACANIKSMWSNLANRLKXITYRYHYRARKSGKLGSSMKCDLNWAFEGNTFSFSSDVPRKQFSVEMTSSWNYPRTGDITVVLDRIKQRLEVHKLISSKRYSNDSKKAIGIDKGIATLLSCSSGNEYGENFSKLANAIVDKYGKRNANRQPYMSLRWQLNQQLEQLEKANQPLSKTALRKKIKLLGKLKNLEQNNIGRKSYDKSYRSAHETVRSFINCAINRMIETEHPAVIAKEDLTFVKEKGVKSDNSRFARKMRKRLNSWTKGQLDERIVYLSSKNSVETHDVNPAYTSQYCPICGQHFEERYGSHHELTKCKKCGEMNANIAAAKNILSRLTDEEITLYTPYKRVKEILASRIKEA

SEQ ID NO: 29280 - protein, 359 aa, unknown
  TnpB Polypeptide
MEITKTYKYRLRLSNEQMAMIDNQIGICRMIYNLAKETKEYAYVSQKINLSCYDLQKQITDLKKEFLFISNVPSQTLQDVIERLDKAYKSFYKGGGYPKWAKKHKYNSLTFKAVSQVSDYVFKLPKIGNVTIFKDRIIQGELRLATITRCNNKYYISIVTKHKINKQSKANENQVGIDMGISFFATLSNGTQIENPRHFLKAQSKLRIENRSLARKKKGSKSWSIQKKRLTTLHSKISAIRKDFLHKNSSILVNQFGFISVEDLNVKNMIKNHRLAKSITDCGWSMFFDMLEYKSNWNSVKFVKISPKYTSQTCNNCEEIDRLSRISQSKFVCKTCGTKINADINASKNILGKGIALIR

SEQ ID NO: 29281 - protein, 214 aa, unknown
  TnpB Polypeptide
LGIKDFVITSAGQIYENLKIKRNNKQKISKLQRELSRKTKGSSNRNKSRIKLAKLYEKLNNKKEYYLHSIANQLLSENQTIVIEDLNVKGMLKNHKLAGSIQELSLYRFKEILKYKAEWYDREVIEVDKWFPSSKLCGVCGYKNQELTLKDRSWTCPECGSSHDRDLNSATNIKQEGQRIKEIGMSLPELTPLESKSLDPHRIRKSKIELIQLI

SEQ ID NO: 29282 - protein, 397 aa, unknown
  TnpB Polypeptide
MQLTYRYRLYPSRAQKQKLLATLDQCRWLYNHFLERLNQKKDGKTPRRYELQATLPSLKRERPALKHVHSKVLQMVLHQLYSNLRALAELKRNGRKVGRLRFKRQGWFKSFAYNQSGFKIIEGHGKHRELWLSKIGAIPIVLHRELDGDVRQVHIKRERSGKWFACFSVAVEDAPGVEKISKPVGIDLGIEHYIADTNGNFVEHPHNIIKSEWGLKREQRRLSRKKRGSRNRAKQRVRLARAHERVSNQRLDFLHKLSHDYVNRYDFIAAEDLNVKELIEMARNGKNRADAAWATFLNMLTYKAERAGRWIVRVEPRGTTDRCSKCGEVVEKPLWVRVHRCPKCGLELDRDLNAARNILQDGLKKIGREPAEFAPVEIGPLSPLGTSSVAEAGSPAL

SEQ ID NO: 29283 - protein, 594 aa, Mycobacterium sp.
MQMRYRYRIDPTPAQQSMLARVFGCCRVVFNDALRVRAEAYRAGVKLSDSEIQRRVTTQAKTTEERGWLCEVPSVALVQSVNDSRRAWRNFFDSRSGKRRGRKVGRPRFKSRKDHRQSFRLTRNGFSLKPNGRLFVAKVGEVRVRWSRELPSTPSSVTIIREPDGHHYASFVVEVPAMPLPAIGREAGVDVGITRLATIATTDEQRADVANPKHLGRKQRKLARLEREKSRRQKGSNNRNKTRRKVAIARGKVARARRDYHHKQALTLVRENQVIHVEDLNIVGMVKNRRLARAISDAGWGQFVRIIGEKANRYGRTMHTVSRWLASSKTCSACGNRLDELPLQIRQWTCPACRAVHDRDHNAAKVILAAGRAERRNACGAPLSPPTTREAQGDEAGSAPNSGIAARESPPFTAGSTSRIPASDLRPTQRGKRRQKYPSQPWAWSRIMAEWTRHQTRWPAPESWSRRSGRGNRPATTGCSAIRSPPNWRGSRAAGCLPRPSPKPVNDPHCKSWSAPGSGMRPCCGRRVRSGRSSSWRPGWMRGRIGCHGRSRPPSTNWTSRQWWPPRRGYWPTINRAVSACRSASTWPTTGRAP

SEQ ID NO: 29284 - protein, 148 aa, Endozoicomonas sp.
RAKAKQAVAKLHYRISNQRLAILHEVSDYLTANFSVIAIEDLNVRGMTKNHKLARAVNDAGFGMLRQFIEYKAELRQREVVIADRFFPSSKTCSGCGHKNDAVVLGVQWWDCPSCKAHHNRDFNASVNLDRYGRDTLQLDLKPYTRVA

SEQ ID NO: 29285 - protein, 423 aa, Endozoicomonas sp.
MKIIKAYKYRLDVTPEQHERLMQLCGTCRFVWNKALSICNEKWKSGEKIPSSYTMHKWLPTWKKEEETSFLAQGNAVALQQKLNDLGAAWGKHFDDLAKLKAGKMKEVKFEKPCFKQRNKDSHNSIRIMQFSKYCRIENRRVKLPSKLGWVRFRKSQEICGEIKNCTITRKSGHWFISFQTEQERLDPVHPSEKIVGLDMGVKKFVTLSTGEQYKPLNSYRKHEKKLASEQRKLSRKVKFSENWKKQKRRINRIHSKIANCRSDYLHRASYEISKNHAIIVIEDLKVSNMSKSAKGNAENQGKNVKAKSGLNKSILDQGWYEFRRQLEYKQAWRGGEVIAVNPAYTSRTCPEESCRYESKENRPNQETFRCVKCGYENNADIVGALNVLSIWELGHSLSACGEGSLESSEKQEPRRNRERVAA

SEQ ID NO: 29286 - protein, 207 aa, Endozoicomonas sp.
VGIDAGLTDIAITSNGLKTSNPRFLKNAQRNLKRKQKVLSRCKKGSKGRAKARLLVAKAHERVAFARNDFQHKLSRQLVDENQAVVVETLKVKNMLKNHCLARSIADAGWHSFVIKLDYKAKQAGKHLVKIDQWFASSKTCSCCDRKQEEMPLNVRSWTCDCGAVHDRDINAAINIKRQGILKLKAEGLSVSADGGQRKSGTLPVAA

SEQ ID NO: 29287 - protein, 404 aa, Halopiger sp.
VITRLAVAESDSNLLERTIDHWLEGCNIASEMAWGVADTAIDVQQLTYDRIRDETALGSQHSVLATHHVARAIRSGLERRRTGYRATRPEFTSRSMTFDARTMTVFPEREEVSLTTCGDHPRVRADLVLPDDDDGYQYEYLGNDDWEPTESTLHYRDGDWYLHLGVRKPVDVDPDSENGTVLGVDLGVSEIAVTSTARFFSAGELNHVRREFERIRSNIQSSGSRSAYRTLEDVSGREEEFVKHVLHEVANGIVEEALEYDCDGIVFEELNGIRERLPNADWHSEWAFDTLRSYVVYKAKAEGLFVDTTSPANTSRRCPECGSTDSANRVSRDKFDCQSCGCTGHADYIASKNVAAAYLRRGQQSSRRRGVGQYALKSGTVTPNTGFSPYGGEPADESTDKSTS

SEQ ID NO: 29288 - protein, 405 aa, Halopiger sp.
VAGGYLRRTAITRLVLTPEQRQLVDSTIGEWQTACNVSSRIGWEAGETRARQLQALAYEVVREQTRLGSQHAVLATHQAAAALSGVEEIEELDEPYETSRPTFTSDTLKYDSRTMTLFDDGTVSLSTVDERIRCDLVLPADEDGYQYQYLEDDDWELTESTLSKRGGDYYLHLGFRNPEPDSSTDTGTDPEDRTVLGVDLGIVNIATTSTAYFASGRQLHHRHREFERIRADLQRTGTRSAHRTIQRLSGRESRYVRDVLHRVANDLVAEALEHDCTCIAFENLTHIRERAPPVKEFHQWAHRKLVDLVEYKAAAEAITVDFVSPANTSRRCPECGHTSENNRVTQAEFECNYCGATANADYVGAKNVGLRYVRRGQQSSRRTGDGQLALKSGTVKPNRGFVPAG

SEQ ID NO: 29289 - protein, 339 aa, unknown
  TnpB Polypeptide
LLIHKAYKYRIYPNSYQKKILSNTFGSVRYVYNYFLGLKIDKWKSEELSISYNECSKILTELKNTEEYLWLKEIDSTALQSALKNLDLAYKNFFEGNAKFPKFKSKKKHRDSYTTKNNGNTIRFLDKKIKLPKLGYVKTKLSRVCNKRILSATVSYTPTGKYYVSVICEEEVHKLPEVSEYIGIDLGIKEYATFSNGIKIHNHKYLIKMQKQLIKFQKQLSRKTIGSHRYEKQRLIVARLHERVSNLRKDFLDKLTTDLVRNYQIICIEDLNTKGMLKIHKLAKQISDAAFGMFQRMLTYKCEYYGRTLVKVGRFYSSSQICNHCEYQNKAVKDLNIRS

SEQ ID NO: 29290 - protein, 389 aa, unknown
  TnpB Polypeptide
VRVGELSAPALRSVVCRYADATIETARRKRRGQAARYPRRKRALMPLRWYAGTFVLDGLHCKLSTARGTTELWVRLSRPVPYPAAAVRSVTLVAEGGRLALDVTAEVACAKPTGGRRAGCDLGIIHPFALAAGGACLLVSGRATRAEERLHLADTKARVRAMARKVPAGKGQRGSRRWRQLRAAQRRAEAHHLRRVRQMHHQAARQAVAWAKAQQVGTIITGDLRGIARRDAGRRHNWRVANTWRRTHLLAALCDKAEVAGIQILLVDERGTSSTCPQCGNKTAKPRGRNFACPHCGYTGHRDLAGARNIAARGGGITTALAVVTHRRAGTVSARRDRRRHLMDQRRSCPAPGRPPRRGVARQNPPRASEPGSALKGHWRGSANVANVA

SEQ ID NO: 29291 - protein, 282 aa, Streptomyces sp.
VIVKLVVQVKLLPTPDQAAALQATLRACNEAATWASEVAFSRDVKRNFALRELVYGEVKQRWGLGAQAAQHVIKKTCDAYAVLKANLRAGNLGRPDSKRYRKATAEPVAFRPDGAQPYDDRMLSWRLPERRVSIWTVSGRMKDVAFTASPEQLARLTLHRKGESDLLHRDGMWFLNATCEVPEGELNTSPDGFLGVDLGIVNIATTSDGEVMAGRELNRVRVRERGLRTKLQKKNTPSGKRRLKKRRRMEARRAKDINHKIAKHLVAEAERTGRGIALEDLG

SEQ ID NO: 29292 - protein, 376 aa, unknown
  TnpB Polypeptide
MKELLALLNVYGESFKLAYAGYSYKALREIHKEYNSQIDANAIYDARNFWKAVLKTHNYPKKLNSSPLLRKQDFRIDGNQVSIIYKPRERLSLKTFPSERQLKLMKEASCKGARLISKDGKFFLNLVLEKEIHLPKLKECKTVIGVDIGINYVAVCSALLSNGKFTNPVFFRGGEWRNLCDRKRKVTRVEEIQHITRRQHEILHTVSKRIVEYAKQFPKPIIVLERFGHFNNSSWNKRWNFLLGNWARRKLQFMIEYKAKWEGIPVIYINPAYTSLCCHYCGSKGEREGLTFMCTNCGREYNADANAAMNLAKRFRQLLDKPKAMTGECSARDMSSLAEGETCLPLQTHMQPGNGQEMKRMMVIRTLTCPLAVGGA

SEQ ID NO: 29293 - protein, 226 aa, unknown
  TnpB Polypeptide
MVNTNLHIPVTYEVEESNISDICNVVGIDRGINFVVATYDSKHKSGFVSGKAIKQKRANYSRLRKELQMRHTPSSRRRLKAIGQRENRWMQDINHQVSKALATGNPKHTLFVLEDLTGIRNVTERVKTKNRYVSVSWSFYDLEQKLIYKAKQNQSSVIKVDPRYTSQCCPACGHTEKSNRNKKIHLFTCKNCGYTSNDDRIGAMNLYRMGINYLADSQVPNTVVTE

SEQ ID NO: 29294 - protein, 398 aa, unknown
  TnpB Polypeptide
VKTIHRTYRFELRPTREQKVLLDKHFGCVRFVYNHFLNERKEQYQANKKSDNYYAQAKTLTELKKQDETVWLKEVNSQTLQFALRSLDTAYLNFFRGNAKFPRFKSKKRRNSFTVPQHTKLEGSKIHVPKFKEGIKCIVHREVRGEVGKMTFSKTPTGRYFVSILTEEQYQPKEKTGAVCGVDLGLKDFAITSDGIKFKNNRYTKKYERDLAKAQKHLSRKQKGSSSFERQRRKVAKIHEKISNTRQDVLHKVSHQLVSDYDIIALEDLNVKGMMSNRKLSKHIADASWGTFVRFLEYKAGWNDKQVVKINRWYPSSKTCNVCGWINQDLNLSVREWTCKNGHHLDRDENAAKNILKEGLKILNSAGTVENTGGAINKTSAKKRKAVKPEAHLSLANG

SEQ ID NO: 29295 - protein, 407 aa, Nitrospirae sp.
LLSLFILFAVKSVWQYYAPSREILLLLEVFRRMVNESIRIGLANNLSSLRRLSLLSYNELAQYDSPSCYKLCAISRAAGILAARKKSLRRGFPSRTPYAVRQQLVSCYGFKTKNGRLEIPIARGKRLSIPLTKHTLDTISQPGVEVRSFTLTRNRLSLCIARDVVPVECTSTVGVDRNLRNLTVGNDQETRHYDLSKTVRIASTTMRIVASFRRDDARIRGAIASKYGERRTARTGHLLHTTTKTIVALAVQRRQAIVLEDIRGIRALYRKGNGQTRNYRGRMNGWSFSEAQRQLEYKARWTGLPVIRLSRRETRGSSLSCPRCGERLQSDKRLKRKLWCGECRMVMDRDVVAAINLSRRGRVRFARSRPPILLEAQGGAVEAVKGNPTPTVIPGVDASKLTHPTKS

SEQ ID NO: 29296 - protein, 443 aa, Streptomyces sp.
MVKLRLYPTPEQELVLAGQGHAARTLWNLLHEWYTFHAPQRWPSIAEADEAIRQARREIDWLSALPAQTCQQVLKLYVQAWQAARRGARRRPHFHSRARTRLSIDVPQAGAMKIARLNRRWGEASLPLVGRVRFRYSRELPGLGDQAPVGRVTGGRLVRETEGWYAAFRCAFQRENPAPGSHPGPAVGLDRGVAVPLATSDPGRPFVSHGPWLHPKERERLRRLERKAARQRRSAQRGQPASSRLQRTYAHIAELRGREKRRRADWHHKVTTELAARYGLVGVEQLNVRAMTASPRGSADRPSRRVAQKTGLNRAILSEGWSRVLALLDYKAVERGGVVVPVPARNTSLRCSACGHVDAKNRKSQAVFECTNPECGYGPVNTDVNSAYNIKTDAIHTYEWPRGLACLTALGSRVDGRSVPAWRRRRPRRWLQPNRQPNRVVTA

SEQ ID NO: 29297 - protein, 370 aa, Brevibacillus sp.
MILANKVRLKPTPEQESQLWKSAGTARWAYNWSPARQEESYRNGKKFIPDRSLRKELTQLKQTAEYSWLYDVSNNVTKQAVKDACDAYKQYFKKLSDKPRFKSRKRSKPTFYNDNVKLKVKGDSVLIEKVGWVKTAEYLPDAAKHINPRVSFDGKYWYLSVGVEREDEKTNWTGEVIGVDVGVKELAVCSNGMVFHNVNKTKVVKKTEKRLRRLQRKVSRQYEMNKEGSRFVKTCNIVKVENRIRLLHRRLTNIRKNHIHQATAAIAKTKPSAVVMETLNIKGMMKNRHLSKAVAQQKLYEFKRQLQYKCEKYGIRFTEADKWFPSSKTCSDCGQFKKDLKLSDRIFKCDCGLKMDRDVNAALNLAKLAN

SEQ ID NO: 29298 - protein, 415 aa, unknown
  TnpB Polypeptide
MIKAYRYKIKPTKAQEAFLKKCFGCCRFVYNYALNKRIEAYSSEKKTLTFFDQCTALRKMKKQPKYAWLNEVPALSMNYALLNLNNAYGHFFKTKSGFPKYKSKKDGHDSVKFEPNSTKYDFKSNKVRIPKLGWVRIYKDKFFDQSSVKINATTVSRDKCGTYWCSVSVDDGIPLPPKAKVTKATAIGLDMGLSEFATLSTGEKIPNMRFSEEKAIAKAQKCLARKVGYKKEETPSKRFLLYKTKLAKKHRRIANRRTDFLHKLSTDLVRKYDTICVEDLNVNGMMKNHNLARAISSVAWSEFFRMITYKCDWYGKNLLKSGRFDATSQVCSRCGYRNANTKDLSVRRWTCPECGTHHDRDVNAAINIMKMAIERDSPSVKGITGADGADSENNNGTSSHICNYASDETPMKLSF

SEQ ID NO: 29299 - protein, 422 aa, Erysipelotrichaceae sp.
MKKCSQMNYHYGVVLKIYPSDFQKHIIAVNDGAQRAVYNLLVGVDKETYRLKKTADIVPADRKRLEDVTLKIRELNGSGSDMAHIRNTLPFLNEPEVDGQVIATAKKNYTAAWKNMRERHTGVPTFHKKSYEQSYQTSNHYQSGHEGLNGGSIRFLDRKHLKLPIIGRIRCSGSPKIIDKLFSHSSQTRIGTVTVSRDAVGEYWVSLQIASDDPFVESLPKTGSQVGIDLNLIDLVNDSEGGSFENPRCRKKIQTKLAKAQKKMSRRANQAKKDGRKLRNSRNYQEMRQKVAYLHRKTARQRADYLNFVSKQLIKSHDLVAAEDLKVRNLVKNHCLAAAISDAGWRTLLTMLKQKGEMYGRDVILVAPQYTTQTCSVCGHVMTGDQKLPLSVREWDCPACGAHHVRDTNAAKNILAKALESL

SEQ ID NO: 29300 - protein, 387 aa, Chloroflexi sp.
MYRAYEFRLYPNRNQSRCLAEMLETHRRLYNAALEQRKTTWEAEGRSVKYTDQSSWFKEQRVANSWFARLNFSSAQATLRRLDKAFKAFFRRVKFGEKPGYPRFSSRDRFTSIEYPSHGDGIRLTGNRLRVQHAGVIRVCLHRPVEGNIKTVRLVCRAEKWYVTATCELPDVVVAPNGKPEVGLDLGLENFLTSSDGLVVKNPRFQKRELPALRVAQRAVSRKKKGGRNRKKAGRLVARLHERVANCRKDFHRKVALDLTRRYGFIGVENLTTKNMVKNHSLARAIHDAGWAGFVVRLEHKAESAGVQVVKVNPRGTSQECSACGDVVPKNLGTRTHRCSCGYVAHRDLNAAKNILARARLVRTEPVEANVCTSARSPRSRRLQATE

SEQ ID NO: 29301 - protein, 376 aa, unknown
  TnpB Polypeptide
MEVVRAWKFRIYPNGKQGKEIQTHLWLSKNMWNTLLEYSKNRYRETGKFLSKTELQSMVRDSGLYSQTAQAVSHRLYGALLRYFRTRRKDRNAGFPRFKNMDRIKSLSYPQSGFRITGRKLEVTPFGEISIRKHREMKGTVKTLTLKKESSGKFYAIFTAKREITPKENRGKEIGMDLGLINFATLSDKTIIKNPKHLKKYEERLAKRQSELSRKEKGSVRRKKQKRKVAVLYEKIRNSRRDFLHKLSLHLANSYSFVALEDLLIKKMTMEGLGKSINDAGWNEFANMLCYKAEEAGCRIIFVNPDGTTKECSSCGEVVDKKLRERQHNCPSCGLSMDRDLNASINILNRATAGQAGSNARGVGQQADVEARSPAL

SEQ ID NO: 29302 - protein, 477 aa, Allochromatium sp.
MIVLTVHLDQLRLKIDTDLGEDVAQVLKDVLGKDAAPILGHEDQVNVHQEDTLPSASKIVVAAHRPNYTACMQRHQAFKYALRPTGQQERQMRRVAGSCRFVYNQALALQKARHEHGDKKLGYAELCKRLTAWRNGAQTPWLAEAPVHPLQQTLKDLERAYTNFFAQRAAFPRFKKKGQGDSFRYPDPKQIKLDQANRRIFLPKLGWLRYRHSRDVLGAVKNVTVSRSGGQWFVSIQTERAVDPPIPNGGAVGLDLGIVRFATLSDGTYYAPLNSFKRHETALRQAQQALSRKVKFSRNWKKAKARVQKIHSRIGNARRDYLHKTSTTISQNHAMVCIEDLPVRNMSKSAAGTTEQPGKNVRAKSGLNKSILDQGWFEFRRQLDYKLAWKGGWLIAVPPRNTSRTCPCCGHVSADNRRTQARFACVECGFEEHADLVGAINVLRAGHARFACEVSGAVRPPAAGTHRSDSGTAQCRV

SEQ ID NO: 29303 - protein, 437 aa, unknown
  TnpB Polypeptide
MIVRMTRHTLKYANTGKQEAVTTLLAEWRRVMQLYCDEIWDNGYRWNDDSGWHEFKPREFKYELPKYLDYKYFNVDTWLSARMLSSLTNQLSGKLRAICSKNEARLHVFDKEAGKGNYLDRLWEKIETQNPSKPDLSDAGIEISSKCAEFYRTPGGEFFGFLRIKSTGLPIFNVPICKHSHLSKYADDISWEQCNGYLIDEYGVQLRWQKEVPERTEGIKVGIDQGLKTCLSLSDGQTTMDMVVSAPRKGDPNRTIIKNLDTLTDKMCRKKKGSKAFRRCQAERKNYIGYAINHLNFNGIKEIGLEKITNINYGRNTAQKLKHWSNPEIVTRLTQVAEELGVRVNLQSNAYRSQRCSECGHVLKAARKGKLYVCPTCGMAMDADTNASKNHAIELPEIPRCTVLSNLAKSEGFYWMPNGLFRMDGSEFRVPDTYKSQ

SEQ ID NO: 29304 - protein, 406 aa, Moorea sp.
MRAAYQYRLRLSKKQTAELDRWLEMLRCQYNYLLADRFNWYEENRCSSNACPLICHLPELRDNPDYFSQKRTLPQLKKDRPWYTDIHAHVLQDCVKRVDLAFKRYLKGDSKGKKNGRPRFKGKGRYRSLTFPSLGKDPIKGNLLKLPKFGWVKIVYHRPIPDGFKIKTATVTRKADGIYVTLSIQDDTIPQTIPVDEVSNPVGIDMGLKSFLIKSDGSEVEIPQYYRKAQKLLKKIQKTVSRSKKGSNNRKKAVAKLGKAHKKVADTRKDFHFKTAKNLLDNHDLVAHEKLNIKGLARTIMAKSVLDAGWGQFLSILATKALNAGLLTVPVNPRNTSQNCSNCGKKVPKKLKDRIHSCPDCGYVADRDINAARNILNLAVGHPVSSKACRATKPLGGVGKKPALSR

SEQ ID NO: 29305 - protein, 436 aa, Moorea sp.
MYGCQQHLISTTPENRAILEFICSEANKLTNCGIYYCRQILFKAGKYLTNAELDKIMKTNPHFKAMRSACAQQTLHGVIESFKSYKALSKLYKKGQLSNKPRVPTYRKKGGLAVVSYPARWVKQVKGQLKFTLGKQIKAWFGIDNFMLPMPSNIDFGSIKEYRFVPRNGCLYIDFVYERSTPEQVQKTDKVLGIDPGVNNWLTCVSTTGKSFILDGRKVKSQNQRYNKRVASLKKGKEQSYWDDELASLTEKRNIQMRDNINKGARFIVNWCLRNEVSTIVFGWNQRNKDSINIGKRNNQNFVQIPTAKLKNRIEQLCIEHGIKFVETEESYTSKASFLDRDFLPTLGGKPEGWKETGRRIRRGLYRSGKGELINSDCNGAANILRKVATQLEFSLAEVGRAVLNLPQRYKLDSLSRSYREAASRSAVSTREVISV

SEQ ID NO: 29306 - protein, 336 aa, unknown
  TnpB Polypeptide
MFVLLLLTSLLMIVVESCSTGSLRYLLNGVIFLIVMLLGWMLVFAIFSAVVDVMTGDVIEASGGNRRIRTLENRISRTENQIRSLHRAGRHEEAARHRRGLANRRNELAILVGQEIADLSFRYDNALVAVEDLSGIRNTMSHGRWVRGQMVQRSVDMVESNGGRVLRVNPAYTSQKCHVCNTQMDMRDSRRPRCLVCKVTWDRDENAAVNIAKRAPHGKACATRKRHASSGRRRNSKGSAAPLKHPLSKGRPTPKAPQNRPVNHELEHSRRAWYKKRKEGTANSTTCAVGWSPVVKTDVSVPTVGSSCEDVQTTSRTTTPCSATSRETTSCGNAKV

SEQ ID NO: 29307 - protein, 445 aa, Methanohalophilus sp.
MQLTLPILIKPTPEQESVLWDISGKCRLVYNFGLNERRDAYKNKTRISYVKQQNGLPGLKQKYPEYNWVYSKVLQGTLKCLDSDYKSFFNLRKNGDKKARLPKFKGKQYFTTMIYNQSGFEITDSNNHIVIRKSMDTRINRLDSGYSIHDKLYIDFSHKHPSGIPLRFELPVVLFDERIFKQATDIDQVNIYQKNNRFYISVTYKVPSIQYNNNNSYLAIDIGTTKQTMVTSDGDFTELVNRRPDKYWEPKIQQVQSRRDHCHKNSRKWKRLNDCLVKMKKRSSNQLKDNQHKITRNIIENNNNTNTIIIGDLDIKQMASKKPNSNKRKRSINRGTHNSGHMGRFAQFLTYKAEKSGKRIIRIDESYTSKKCCVCGTIKNMPLGNRTYECNVCGNILDRDSNSSVNILLRYLKRNALWTSYQQTVDNLRQTGLLIGIIPNGMISK

SEQ ID NO: 29308 - protein, 393 aa, unknown
  TnpB Polypeptide
MGELKMEIRTFKVRLYPTKQQEKQMFFQAGCARHVYNWCLAFQKSRYEDESIPKKEKFIPAKGLSKHFTSYKHQEGNEWLKDCDCMVLVIAYTDACTAFKNFFKRPEVGYPKFKSKNRTIPAFAPHYQRIKITENTVRLPKIGEVKLARKGYIPYEESEMYPKIKYVNPRITYNGIYWSISVGLREVKEKPELNPTSLGIDLGIKDLAIVSDGTVYKNINKTAHVRKLEKKLKRMQRQVSRKYEMNRQGKKYNKTNNIIKLEKQILKLQHRITDIRNNYRHTVTHQIVEKKPQRVVIENLNVKGMMKNKHLSNAVGKQGFNEIKNQLTYKCDDYGIELVVADRFYPSSQTCSKCGYVRTGEEKLKLKDRIFTCPECGHIMDRDLNASINLAQY

SEQ ID NO: 29309 - protein, 365 aa, unknown
  TnpB Polypeptide
MLIHSYLVRINANTRKVASLDAMLAKWVPLVNERIALYWPMENRGSFGPLATRIGGSFLRRASDLAWVIVKAAKASGQTVHPTYIAKEISFDETACRVTFNHETSFDGWIEVQTLVKRHRVALPFKSFRRLNEALERGTVRKCIKLVRSKRGWFACICIAIEAKPYRLKGELIGIDVGKTVAAATSTGRFYGRDLDELRRRTRHRAYRSTAKMPYRQGLNRVAKQIVADHPAADFAVEQLDFRGSNKRGRVFRSRLQTFAYQHLARRLEDLGQTEGFRVLWVDPAYSSQTCPKCREVNKGNRQGDNFRCLACDFTGHSDVVAAINLATRKERRPVGRRSRTSALPNRVSRVSRDIQCPDQKGALR

SEQ ID NO: 29310 - protein, 365 aa, unknown; identical to SEQ ID NO: 29309
  TnpB Polypeptide

SEQ ID NO: 29311 - protein, 353 aa, unknown
  TnpB Polypeptide
MLQRTVSFSLEEANKGKKDSLRSVMDESKRILQVYVDHYWLQQDRIGRYVDFKVPSWLGSKLLQCLGKDALSMIRVLRKRKTKSKPTINHLTLNLDRRFFPDLQESDGHFDFWYQLSGLGDRKHPIKLRLPLKSHSVYKKFVNDGWALKKSFRLKMRDDGKLFLHLLFEKEESKPKTEGEILGVDMGYRNLIATSKGELIGSNLREVYEILRRKKRGSKSQKSVLRRRDCEINRAINSLKLDGVKTIAIEALKNVKYKSHQRNKMPSKVMDRVQWWSYPKTRSKLQRLSEERGIGLVEVPPAYTSRTCPRCGSTHEKNRQGDVFKCLDCAYEGHSDVVGAINIRARGERLVHA

SEQ ID NO: 29312 - protein, 382 aa, unknown
  TnpB Polypeptide
MGAPLVLKTIRIILKPLRNQRLWLFRKAEAIPKEFRPVYEKGKYPDGCARIINNAIQKMWQTCRATKQIPIDKQTSRIVRKNGVLYLKIQKELIPFRVKTVDKLDDLLLNHYNSAVVWLKGKKWIADVQVEIESQYQEGKPEAVIGIDLGKWHNAYSIWIEGKEVYRAFDKFGKYHFTMRKITKKIAEVQRNFEGTRKQLSIALKPLYEKRRMVLRQYYGTLRNKILKHVPEGYNPVFVLEDLDSLPRAELRKAQRTWAHQELANGIFASQLEWNGYKVVKVYARGTTHACWKCGNPVKSRKDRKIVCPTCYPKGLDRDLNGARNIARRYMLSCIPQHTCSGNSLDDPYKATCKEAIIEAKIKVESESNEPPSLVAGRLQRE

SEQ ID NO: 29313 - protein, 438 aa, unknown
  TnpB Polypeptide
MYRTDRIYVSKQHEMFPYFDGLAHKAKNLYNASLFRIRNAFTAHDKTNVTSNEKEVLDELALLKGQKTYRVLGYGVLQRLMRVTQNPDFFAGLPMQSAQATVKHAYSDFQNWLSALKKYKQNPALFTGKPRMPGYCKGDITTLTLTNQDAVIYGDELKLPKTKQRLRIRKRHSARLQEVKVCPVSGGYDILLVYQVKEPSAETGTHSAAVDFGVDNTMAVVADTGDSIIFKGEYIKSINQYFMKKKAERISLMNRGKETTERVWSKYLDRLSAYRTSYIRDCFHKMSKKLLVWCQRNDIGCLVLGSNAFWKQNSSIGTVNNQNFVSIPFEMLKSMIELKACEYGVTVVRNEESYTSKASFLDLDFIPVYSKEEPDKKYHFSGRRIHRGLYKSADGTLINADINGAANILRKAGYDVSNIKIARLLNPTIIHFKDLNCK

SEQ ID NO: 29314 - protein, 371 aa, unknown
  TnpB Polypeptide
MTKNKEKKITRKEIVSNIKEQILLSKNSENDVTFEYQSLFEQIEDFVIDMKSQGLIYKDIREFIELFVETPKVTTVSHNIQYPTLTIPDLDVTEKTVVQEGKAGKYNIVITELYKEEISRAKVIEESTVTEIIKVPMLSEEPNVVSFVGERYERYKSKQTEYLSVGIDINSSYKDDNLITVVFSDQRRPVSFVSEQYKNYLASLKGSVGVDPTNKKFNSQNVGAAFYRKTLNYAISVVKELKEMGVEKLYLGRSGSMSLNNGNNFMLSLYAQLITACSIFSLEVIVVDEHRTSLADSIANDEFDKDNFSGERSKTNVHNYKSGIGGVVDADVNAAYNILRKGTKGEFRVSPELIKVSFKKKTVQLPEVNYM

SEQ ID NO: 29315 - protein, 447 aa, unknown
  TnpB Polypeptide
MSAMNSQVSKGDALDSLTLTYSTRLRIDAEADRRYLDGRFEFYSNIEHSLYNGLAHGRLEPKGLRGRVAHKYGISGRQANSLVHKASGRLRSLKALKSLEKTALEQRINAIQNKLEAIASEIAVLKLEAAENIITMKNLDKLRKLKAKKHRLSQKLNQLKQKLAGFEKRANSLCFGGKRPFKAQHNLEENGFSSHTEWQRKWRKARANSWYFLGAASESFGNQNCQYDIGKEEARIRADTIKLNHIVIGDVRFSYGAEAIRAAQQSKQPVTSRVCKTGRKYYIRISVNIPKPQEVTNKINGGIGLDYNKGFIQECEVNRDGNIIGFNRYMLPDSGKDKAKGEAALRAAVKDIAEITIEKLDFKKKKAAVNKHVSKNKKHNAMINSFDYARYTEYLETACYKAGVYLCKINPYNTSKTGAAKYAKQKGLNAHQAASYAIGRKGLGFKM

SEQ ID NO: 29316 - protein, 448 aa, Weissella sp.
MINLTSTTEYVYVRHYRLVATPALMLKHQHGLHVQNKLHNYAVKYLEKSYGRKHVSRPFPQSLAAKKFLVAEIAGKFAKDCYDLNRWQANKIGLHSQGARLFLLTLITNFGQYRKTLFKAFKMSSQEKMAYKNNEHGNNAKHKSWYRKGSLNFLRNSNSYKTISLPDNKQIQVIANHQIKIQAFGVVQVVENIKNLANKQIVVSKIKLKGNDQYELQLVIREQVARKKPDNKIGVDWNMKDNKIFHTSADQTYYLATTVADQADYLEAQINTLKSKRDKLTWLRFNSQRLIKINQHIKYLNVKRTNLLDEAYKKLARALFQATDLVVVEQLDSKEMRAVKRTNTGLNRKLAKIKPYRLMALIEMTANKTGKTLIRVDSYKTSQVEYGTEFAEKHPVIVREWISKHTGNMVSRDLNAAKNILAWGLDPEKHIKLKDYPAIRPSSLIAIN

SEQ ID NO: 29317 - protein, 247 aa, Weissella sp.
VISKLKLKGNGHYELQLVIREQVARKQPDNKIGVDWNMKDNKIFHTSADQTHYLATAIADQADYLETQINTLKSRRDKLIWLQFNSQRLSKLNQQIKYLNIKRTNILNEAYKKLARALFQATDLVVVEQLDSKEMRAVKRTNTGLNRKLAKIKPYRLMALIEMTANKTGKTLIRVDSYKTSQVEYGTEFAEKHPVAVRDWISKYTGNMISRDLNASKNILAWGLDPEKHIKLKDYPAIKPSSLIAIN

SEQ ID NO: 29318 - protein, 371 aa, Actinomadura sp.
VQLRYSFRLYPTGGQRQALARAFGCARVVFNDALRTREDARQAGLPSVKAAELSAAMAAAKKTPERSWLGEVSSVVLQQSLRDLEAAYRAFFDGLAGKRPRVGAPRFKSRKDRRQSIRFTANARWSITNGGKLSLPKVGDVAVRWSRRLPCTPSTVTVIKDAAGRFFCSFVVETADVPDPPDTSSQIGIDLGLEHFAITSDGRKIDSPRFLRRAEKKLRKAQRGLSRKQKGSANRDKARLQVARTHAKVADARREFHHRLSTELARDNQAVYVETLSVKGLARTRLAKSVHDAGWSAFTGMLEYKTRRYGRTFVRVDRTFASSQICSQCGHRDGPKSLQVRQWACEQCGADHDRDVNAARNILDQGRRITT

SEQ ID NO: 29319 - protein, 417 aa, unknown
  TnpB Polypeptide
MLSGRRFRVRLTPDQLAYAEQVAGACRAVWNTGLDQRRQYRQRRAWINYPEQCRELADAKTDPDLSWLAEAPGHCLQQTLKDLDKACRTHGTWKVKFRSKTRWSPSFRFPEGKHMRAQRLSKRWGQVNLPKFGQVRFRWTRDLGGTIRSATLTRDGVHGDWHVSILVEDGVMEATADPTLPEVGIDRGVTVALALSDGRMMDQDFTSGRERAAIVRLQQKAARQHGPRVPGTRGRKGRRAPSKRWLRTQARITKKLAKQRRRRDDFTAKTASTLSRDHSLIVVENLRVTNMTRRAAPKPDPEQPGAFLRNGAAAKSALNRAILGKGWGKFLLALHHQARYTGTRIVLVPAAFTSQRCHQCQHVSAGNRENQASFRCTGCSWHGNADTNAALNILAAGLAASGRGSPDLSGSVNHQAA

SEQ ID NO: 29320 - protein, 481 aa, Rhizobiales sp.
LIRTYETRLDLRKGDGPSLACVLNQYADLMSRAERLLLAKLKAGRVWTGDLKVSFYQHLGLSASHLDMAYRQLQAKLKSVGELASDRVKQLTGKIASKHTDIGRKEKALAKAVAERSKLPEELRILEAKVAKWRASLATVKASMREKHLFVLKQHLDQWHARTAAAASITRRIHALRAALHQHKRRLGILDHRKSEAQRLAADPTMCFGSRKLFRAQFALAENDYGDVDDWRKDWSALRSAQRTIDGNASKESGNQFARLRRRDDGLYDLELRLPKALAPLATRSFKFAGYEVDCVDFHALSFNHGDEVIQQAIEAKRPVTVKFRRDPTSWRASVSVDDKIDPVVVDFSGGALGVDLNAGHVSAALVDADGNPVESFTFPCVTYGRSADQTKNAIRKAAAQIAALAKRLGVPVVSETLDFAKKKSALKGSDDARYARMLSSSAYSAFDAALASACLRGGVGHRRVNPAYTSIIGRVKFAGR

SEQ ID NO: 29321 - protein, 374 aa, Paenibacillus sp.
MILAKKVRLLPTPEQQHQLWKSVGTARWAYNWTLSRQRENYEKSGKFLFDGELRKELTVLKQTEEYFWLYEVSNNVVKQAVKDACDAFKRFFKKQASFPQFKSKRKSKPAFYNDNVKLKIKDDLVLIEKVGWVETVESLPMNTNYTQPRVSFDGKYWYLSVGFEERLTKVELTNVVLGIDVGVKEFAVRSDGIKHENINKTKTVRKTKKRLGRLQRSVSRKYQNNKEGSRFVKTSNIIKQEKQIRLLHRKLANIRNNQIHQVTNSIVKTKPLKVVIENLNVSGMMKNKHLSKAIAEQKLHDFKVKLFYKCEKYGIELVEADRWYPSSKLCSRCGALKKNLKLSERTYNCSCGLRIDRDLNASINLANYGLQLAI

SEQ ID NO: 29322 - protein, 402 aa, Lactococcus sp.
MQKGYRFRLYPDVDQQTKLRKNIGCARKMYNELVNDEDVNYHLDEVSPLPFGKKRKRLTYTQIKAQFPYMKDVDNLALANAQMNYRAGRKRFFDNLRNPSGRKISLPKKKRKSKAKWSYQTNNQTPKGVVAQNNVNGSVRFSHNYKYIQLPKVGLIKVKAHRRLQQLWRISTVTITQERNGQWYISLLMEIGEITKPEKTGAKLGIDLGLKDFAITSDGVKYNRPNDVALDKKIRRAQRKLSRKYEVAKEMEKSVRFAANYQKQKVIVAKLKAKRAAIRKDFQHKLSWEIINNHDDIRIENLQINNMMKNPKLARAIQESAWYQFTTMLLYKANMYDKQVHKVSMWFASSQICNECDWHCHKFGMTTNEWLSVREWTCEQCGAVLDRDVNAARNIRDTEQVA

SEQ ID NO: 29323 - protein, 410 aa, unknown
  TnpB Polypeptide
MLFKGVVFPLASELPSEARFLLEDFRLTSNEAIRIGLENRVTSRNAISGFAYKELRERYPRIYAQHLVSAFEVAAVALKNYRRRNRGRATAKIPYLKRLMMKAENQAYTLDRERGVIDLPIRAGCHIDLKLVVSRYHRRYLDDESLSLGSITLLPDRVVVAFRKEPPTRIETTSVISLDTNERSLDGILVRPDSSSGIVQASFPDVAIIQQRHHNRRKRIQKRKAHDRRLSKNLCRCEGKREHDRIDYRMHQAANEVVKCAQNHNSAIVLEDLRGMRPTWNKDLNRRLSLWPRRKLHHIIEYQAAWRGIPVMKVDPRFSSRRCPICGRIQHSRMDTRDKEFRCECGWHLDRHVNASLNLLQTAISKGLEVAGGLRFDPGAFQRDVVMTLYEPAMAARSEPNGTSEVGGMV

SEQ ID NO: 29324 - protein, 298 aa, Proteobacteria sp.
LERAYANLFAGRTAPPRYRKKFLADSFRYPQGFKLDGRQVYLPMIGWVEFWESRPIEGTIKNVTVSRQGQHWYIACQVEVDLPAPVHPASAAVGIDLGIALFAAFSDGAVHPPLNAYRRVEKKKACLQRKLAGMVQYSQNWKKHQQRIAQLEIRIANCRRHFLHQLSTETSKNHAVIVLEDLQVRNLSRSARGTMAEPGRKVAQKAGLNKAILDQGWGTFRHMLEYKQARRGGEVIAVNPRYTSQTCPACGHVSQANRPHQALFSCEQCGYSYHADVVAAINILAVGHTERLNACSPH

SEQ ID NO: 29325 - protein, 397 aa, unknown
  TnpB Polypeptide
MSRYRLTPTAAQEAVLRNHCAHARLVWNLAVEQQSHWRPGRKSAPGYLAQCRQLTQARAEYTWLREGAQMVQQQALRDFAQATANFFAGTHERPSWRKAGRDEGFRIVTVKPEHVHQVSHNTGEVWIPKVGWVRFRWSRAVPAAKSYRVTRDCAGRWHIAFAAIPEPIPAPGTGEEVGVDRGVVVTAALSTGEMLIMPRLSPARQRRLSRLQRKLARAKRGSNHRARVKEAIARLKVRETDARKDWVEKTSTDLVRRFDVIRVENLDIKGMTRSAKGSFSSPGRNVRQKAGLNREIMRSGWGLLVRRLTDKAPGRVEKINPAFTSQRCSTCGHIAAGSRESQALFCCVACGYACNADVNAARNITAGHPTRLPIPLHSRGGLRDTGPANREPQLLAS

SEQ ID NO: 29326 - protein, 397 aa, unknown; identical to SEQ ID NO: 29325
  TnpB Polypeptide

SEQ ID NO: 29327 - protein, 358 aa, unknown
  TnpB Polypeptide
VRYVYNWGLRARTDAYYQRQERLYYEQLAVLLTTLKRQEATAWLQEVSSVPLQQALRHLESAFHNFFEGRAKYPTFKKKRGPQAATYASSAFKWDGTALTLAKMEAPLDIRWSRPLPKDAKPITVTITKDPAGRYFVSFLVEEDITPLPISPKTIGIDLGLHDVVTLSTGEKTGNERYFAKDEKRLARAQRAHARKHKGSKNREKARRKVARIHARIADRRRDFLHKLTTGLIRDNQVVCVESLAVKNMMQHHCLAKAIADVGWGELIRQLQYKASWYGRTVVAIDKFYPSSKRCHACGHLLDSLTLDVRQWTCPECGTVHDRDVNAALNIKAAGLAVYACGEVIRPGRAKTRSGALR

SEQ ID NO: 29328 - protein, 388 aa, Lactobacillus sp.
  misc_feature (321)..(388): Xaa can be any naturally occurring amino acid
MKRMSSLAYHFGIKLRFYPSSKQKKIIKLNYDAQRFVYNSYVGRNRTNYHARRFLAVKQINAMPFAFPILNDYEAQLAETVVANDELLAKPKNIRDTYSFLRVKEIDSLALANAIQNYRKAWSNYRKIGHGIPTFHKKRSDWSYQTNCQYIKQEEAYLDNGTAKFIDAKHVKLPKLGVIRIAGLRKLIKDRLLKHVPTRIGTVTIKKTAGDQFYLSMQLGSDIAFAQKLPKTQSQIGIDLNLDNFLTDSNGAMVANPCFYRQVKKKLAHAQRVLSRRQRRVKQEGRNLRTAKNYQKQRLVVARLHDKIRRQREDFLQVLSXXXXXXXXXXXXXXXXXXXXXXXXXXXXXXXXXXXXXXXXXXXXXXXXXXXXXXXXXXXXXXXXXXXX

SEQ ID NO: 29329 - protein, 442 aa, unknown
  TnpB Polypeptide
VLKAYKYRIYPNSEQRIQIAKTFGCCRFVYNQTLAYRKEIYEKEKKSVSKTDCNNYCNRELKKDYEWLKEIDKFALTNAIYNMDAAYQKFFKGHAGYPKFKSKHDNHKSYTTNFTNGNIAVDFETGKIKLPKLKAVKARLHREYSGQIKSATVSQVSSGKYYVSILVETEHKELAHTNHNIGIDLGIKDLCITSDGKVYENLKIIKKYEKQLVKLQRQLSHKGKRSKNYYKTKKKIALCHEKIRNIRKDYLHKVSHEIISENQVIVSENLQIKNMVKNHHLAKAISDVSWYELTRQLEYKAKWNGRKYIKIDTFYASSQLCSVCGYQNPDTKDLSVRTWICPKCGAEHDKTTRLMLKLEFDGVIDMKIREVNENKKQFIALLLLADEQENMIDHYLEKGTMYVLEDGNVKAECVVTDEGNGILEIKNIAVDVVMLLCMYQLK

SEQ ID NO: 29330 - protein, 369 aa, Chloroflexaceae sp.
MKVIAQIKLIPTPEQHEALTRTMEQANAACDYISQVAWETRTFKKYDLQKLVYQKVRDQFDLSAQLTVRMLAKVGDAYKLDTRTLRTFKPHGAIAYDDRILSYQLSQGTVNIWTLEGRQRIPFVCGERQRELLQFRQGESDLVLVKNTFYLLVVCDIEEPGSAEIEGILGVDLGIANIASDSDGEHYSGEQVEQTHQRFHDLRQRLQRCGSKSAKRHLKKLRKRQARFQKDTNHRISKTLVAKAKDTNRGIALEDLTDIRERTRLRKTQRARHSNWAFAQLRQFISYKAALAGVPVFIVGAAYTSQRCSVCGHTERGNRPTQNHFCCLSCGHTTSADTNAAINISRAAVSPPTVSEAALPSRQGQAHAL

SEQ ID NO: 29331 - protein, 425 aa, unknown
  TnpB Polypeptide
MVCARLVTLSRVILAVVKRIERIRLYPTTRQAAALEVMLDVTRDLYNAMLQQRRDAYRLRRIAVTAKMQYAEITALRAEDCRVRAVYREAEDAVWHRLDLAMTAFFRRVKRGENGGYPRFKSRRRWQQLEFPHGNRALRFDQEQRRVSIPGLGGVKLRKGRRVPATYGRAWVVSKNGRWYACFQCERAVRPLPRTNQVIGVDFGVHVLAALSDGRLVANAAVSEKRRAKTARLQRELEAITVRDCARRVVNGREHSRVKAQARLARAKERQGNARRDYAHKVARGLVKGTDVIALEKLFLRAMTRSARGTVDCPGRKVRAKAGLNRVVLDSGFGLLRQMIVAKAEEAARTVIEVDSRFSSQECSRCGHVARESRRRRRFCCVQCGYANHADVNAALVIRGRAQLARKSELDPAEEAGRRSRDAAA

SEQ ID NO: 29332 - protein, 332 aa, Enterococcus sp.
MNVLKGYRFRIYPNKEQQEFFTQTFGCVRFVYNHLLMARKEEHYSAESLKLTPASLKATYPFLKKTDSLALANAQRNLDRAFLNFFKGRAGYPNLKSKKKTWQSYTTNNQKHTIYFEEGKLKVPKLKTLIDVHQHREVKGQIKSATISAKNSEEYYVSLLCLEEITALPKTKKVVGVAYCPKHLVSVSCGREHLPELTKSTVEERLARARQKLELRAKIVKKRKVHRDCAKNYQKQKRRVDKLYLTRAYQKNDYIDKLTLKLIEQYDYVFLEKEPNFEKNCSFTETDWHVFMQKLRYKGKWYGKELRLIDIASDQEEKSETLEHLGRTQFSK

SEQ ID NO: 29333 - protein, 356 aa, unknown
  TnpB Polypeptide
MQIISSYGVELRKQNIPIRQTLEIYRSAVSYLIGIYVQVWEKLAEIPDAKRRFNAAEHLVHTTKKNHACFDFDIRFPKMPSYLRRSAIRHALGTVSSYKTRLDLWEKTDGKSGKPRLVYENHAMPVFYRDVMYREGAEGKDEAYLKLYDGHDWKWSCVRLDHTDMEYLRKCWSGKKASAPTLEKRHQKYFLRFSYKEEVTLTKTPVKEQIICSVDLGINTDAVCTIMRADGTVLGRRFIDHPSYRTLGRIRRFQREHGSAQTQGRWAYTKRLNTELGKKIAGAIVRYAEENHADVIVFEYLEMQGKISGKKKQKLHLWRKRDIQKCCEHQAHRKGMRVSRICAWNTSRLAYDGSGR

SEQ ID NO: 29334 - protein, 207 aa, unknown
  TnpB Polypeptide
MRVNISNNVTKQAIKDACTAYKNFFRGLQKFPGFKSKKRSMPKFYQDNVKIRFSNTHVKFEGFSSGRKANKKMNWVRLAEHGRIPTNAKYMNPRISFDGLNWWISVCVEFPDCRETLNDDGVGIDLGIKDLAVCSDGTKYKNINKSQKVKKLEKQKRRLQRSISRSYEKNKKGESYCKTNNVIKKEKLLLKRNHRLTNIRKNYLKKE

SEQ ID NO: 29335 - protein, 264 aa, Streptomyces sp.
VEPRPADRVHLDGRRSGQEDSVRLLAGGDEAAGLPLSAIGLVLRDGMFFLIATVDIPEPPVSGPIGFLGVDLGIVNIATTSDGEILAGRALNRYRERHRDLRTKLQKKLTKSAKRALKRIRRREARHAANTDHVIAKRLVATAERTSRGIALEDLSGIRQRVTAKEDQRARLHSWAFAQLGGFVEYKARRAGVPVVFVDPRNTSRQWSECKHTHRTNRVTQARFVCRSCGAVLHADHNGSRNIAHRGEAVWKRGAVNRPRTGAR

SEQ ID NO: 29336 - protein, 245 aa, Streptomyces sp.
VRSRRSFCSPPCGISRLRTATSSPHGRDPAGARRWVRLGSRGSQAVRFTKAARFSVTADRRLRLPKIGDVEVRWSRGLPSDPSSVTVVRDSAGRFFASFVVEAEDRTLPRLDWEGTDTGIDLGLSCYAILRGRKIKTPKFFRRAERRLKRAQRELSRAQKGSNNRRKAKVAVAKVHARVADQRRDFIQQETTRTVRESQAVYSEDLNVKGMARTFGKSVHDRDQNAEYNIRAEGRRIVAEGRPDT

SEQ ID NO: 29337 - protein, 396 aa, unknown
  TnpB Polypeptide
METPFLRRVYRFRLEPNPTQEEGFRRYAGARRFIWNWALQQKREHYHATGKGLSEKELSTRLTALKGDADTAWLREMDSQLLQQVLADLKRAFGHFFERRAKYPRFRSKKRDMARFRIPQRVTLAAGYLTVPKIGRVKVRQSQPVEGVTKSATFKRDACGYWFVSLVAEMEMPTVALSPPDEDRTVGVDVGLKDAVVTSDGERLVAPRFYRTAQRTLRRTQRSQSRKVKGSKNRAKARQRVARVHQRIAAKRTDFCHKLTTRLVKNHDAICIEDLNVKGLAKTKLAKSILDASMGTIRRQLAYKGIWYRRHIVGVDRFYPSSKLCFECGYKHDGLTLSDRAWMCPSCGCMLDRDLNAARNIKREGVRILAAGHADSLNACGQTVRRPMGAGLAIPA

SEQ ID NO: 29338 - protein, 404 aa, unknown
  TnpB Polypeptide
VCGRQLKHLVSSQQVQMEADRVWSGVEKCLFGNGNTIHFQKWYDLKSIDGKSNLNGAKFHVHTMTVEWTGLTLSCVIRKKRAPYIAASLNGNVAYCAIVRKMFDSGWRYYAVLCIRGKAVPNGCRSGKGALGIDPGVSTMAAIGTETGFLEELAPKVPEYNKQIRDLQYHMEASRRKTNPQKYLPDGAIDPKNRDRWVCSSRYKRNLQKLRVVYRKKAAYIKQDHEERANRFLEATDHIYIEKMDYRALQKRAKKTERQGHASAVRKKDGTETTVFKFKRKKRFGHSLNNRAPAMFLTILNRKAAMLDIPVEEIVTSSYKASQYDHVAGQCTKVPLPQKEKTIGGKLVQRDIYSAFLIQNPEPDRKHPDRRKCSERFPDFLKIQERILNTLKSSGQSMPQCFGF

SEQ ID NO: 29339 - protein, 498 aa, unknown
  TnpB Polypeptide
MKKKKVHWKSFNINMPDELKPIYDFLQNELNFILSNDETRALLDKIDLSKLRGDVWRDLRDSLKFRIKDWSLHNKTWHSYILFENIRREIKSKQEAIIIWNELVKNEFDINGELFDSLHKLNLYPTRSRIANIKRSNAMPELARSAIFNLDYTISEKQFFRMKTNNICEIKVGKKDWIEYEIIFPSSIDSRFTGEIAKPRFIKRKRDGKYIGICSYLYEVGDYELEDKILGIDIGKIKLFSSVVMDKRGNFSDEFINTKRSQETEYKINRLYENKQVLYNKIKSYENLRLTNQPKYEVWRKLYSNIRTKINNTKDYQAKLLSSEIVKLSLEKKCKTIHIENLSWLNSQGGKWNHSQTHAKIIEKATMYGIEVKRISAFNTSKENPITKEIGVVQDRIVKFTTGKIDRDLLAAINISLRSTNIMLKKSLPKKAKTKRIKLKSNKKAIKEKVNRLKGNGQIVSFLTNVLDSTIQVELGVRPLHEVLPCNSLIDYYNKLQV

SEQ ID NO: 29340 - protein, 557 aa, Burkholderia sp.
MISVYRYRVKSLNGLLNKQSRAVNYVWNFCNDTQKHALKWGKKWPTGFDLNVLTTGSSKELGIHSGTVNAACEQYAKSRNQHKRPYLRYRGRKSLGWVPLKGRELKREGDAFRFAGNTFRVFNSRPLPEGKIKDGTNFAQDARGNWFLNIVIETPDVQVRPICSGVGVDLGLKDFATLSNGESIPNDRFGRQAAEKLAKAQRARKHKRHLAKLHAKVANARADFQHKLALDLVRRFDYIAVGNVSAGKLAKTRMAKSVYDASWSSFRDKLRYKAITHGATFEEVNESFSSVTCSACGSRSGPKGIAGLRIREWTCGECGSIHDRDTNAAANILRCGRASLVEGISRPVPEIQSLMDSPALINASSAGVGSQHETINGPCSVATSRIGRTLHFEMSPSQSGGAPKLRVAPSIRRISILSLVFPRLVVQPHREIRQLDRFSGLEYPAAFALSSAPLVHLMRARWLSVTALPCAGIGRRFAKLAIGKECMVVGFVWIKLDARSIVDAPCLAAESIACQRHMAIEPENLLLVDHRHTPPSHAKSHSVTKYVTARMSFSVGS

SEQ ID NO: 29341 - protein, 385 aa, Lactobacillus sp.
MCTIIAELTDYNRFCWNQGLTTWNDMYEASLIIGDKKIRPSERSVRNELVLNKADWQYQRSPRVLQTAIHRLHQAWQNFFNPNMPDAHKPKFHSKRDPKQSFTTDRATVRGKFLRLDRPRESKHHFTDIRLAETLRFSGAIKTVTITKRGDKFYASIAVLVADTPRPAFYESWDIGGIDLNVGHISWNGGKVSTFTPRMAVLHQRVKIYQKRLARKRRENPKHFRSKNYQRTQAKLNRAYQKINALQDDLIHKFSQQITQAYDVLCLEDLNVRGMKMAKNKVKNLQRSLFRRLRTAIEYKAAWQHQHVVIADRFFPSTQRCSNCGFIKTADSYGGKMTLRGDSIYHDHDTYRCYECGMVMNRDENAVQNLITYAAGLPPERETVH

SEQ ID NO: 29342 - protein, 402 aa, Streptomyces sp.
VGRVIRSYKFLIRPTVGQEQQLAAMLRDHCTLYNGALQERRDAYRHVSRTTVRYGEQSAQLKEIRAFDPECQGRWSFSSQQATLRRLDKAMQAFFRRVKAGETPGYPRFRGVNRFDTVDFPRDGDGCRWDSTPHDPVTRVRFQGVGHVRVNQHRQVVGRVKTVSVKREGRRWYVLLTVEQERPEPLPATGSVVGIDLGIANFLADSGGGFIPNPRHGHKAAQRLQGAQQALSRCNRRSNRRRKQVQRVADAHRKVRRQRLDHAHKTAIDLVRRHDIIAYEDLKIRNMLRTPAPRPDPGRPGGFLLNGAAAKAGLNRSISDAGWGVFLTILTSKAESAGREVIAVDPRNTSRRCPVCGHTAKENRPTQETFHCVACGHRAHADTVGAVNVLRAGLARRDTLKD

SEQ ID NO: 29343 - protein, 236 aa, unknown
  TnpB Polypeptide
MDHKKTTVNISEYRLKSVTVSQTPSGKYYASILFEYEDQVQEKKLQKFLGLDFSMRELYRDSNGKEPAYPGYYRNAEKKLAREQRKLSKMQKGSNNRNKQRLKVAKLHEKVSNQRKDFLHKQSRQITNAYDCVCIEDLDMKAMSRSLNFGKSVSDNGWGMFTTFLRYKLEEQGKKLVKVDRFFASSQTCSVCGYKNAKTKNLALREWDCPQCGTHHDRDVNAAVNIRNEGMRLVNA

SEQ ID NO: 29344 - protein, 396 aa, unknown
  TnpB Polypeptide
VPKPKSAIAVKKIRFYPENERAYFDLLSLFRRTYNLAVEQYINDEHKDDEGNWRNLRPEIKAIAKPEFESSNRAYNSLVADNGVLAAKTTFKSVCKKNKSLKGASSGFSKISFKSRKDSEQTFTLDRFPKGQHPCVKALGKIKLTEKVPKECFDKSCSVTFKNGRWFIQVQQIIPLQPEIQGDVKCISVDPGVRTFATCYSDQEALIIGENLAKERLYPLMKKVDKLISRKQKVLNTQKGVLFEDMPQWARDEIRHCNRLIDTLKCKKDDILLDVHNRTAHYLVTNYDVIFLPTFETKNMVRRRGKVRTIRRNTCRQMLDLAHYKFKMRLKWYAKKYGKHVVDVNESYTSKTRSWDGTIDEKLGGKKVIKGIGFSVDRDINAARNIYIKSLARKAA

SEQ ID NO: 29345 - protein, 434 aa, unknown
  TnpB Polypeptide
MNTVKVYQLKRVSQTLFRRLKAAHMEAALVWNTCCDLHKEARTTHAKWPGRTELQTATKGKYALHSQSVQMVVHAFLANVQTTRQLKPANPQMHYPYKVKQFYPVHWPEQAVSKEKGRVVLPMGRGRASLVLPLDLPENSGACTLVWNSGFELHVCVAVPQAEHAPGNTHTTVDLGEIHLAAVSTNTGEALVVSGRGIRSLKRQRNQQLGKLAKKQSRCNKYSQRWKKLQRAKNKTCRRSERRIRDMRHQATRKVVNFCVQHQVGALFIGNPHGVRTRRCGRHHNQRMSLWEYGKDIDYLTHKSKQAHIMSFTGSERGTSSQCPACGHKRKPKGRVWNCKKCGFTGHRDIVGSVNMHKLAYGEQVMFPRSVTYLRPRPARRQAAVHKDPAVGRSSRADTPPRCLSKSVAQPLVSDKVPTGTGYTAEVVEKPVGL

SEQ ID NO: 29346 - protein, 417 aa, Methanohalobium sp.
MYLTQKNHLRADKQTYETLKRLTKLSKNLYNFTLYTIRQYFFNHGKYLDKDTAYHTVKENENYRLMPSQVAQNTIETVDGGMKSFFKLLDKKRKGEYEKPVSLPMYLDKDGNFICTFKKDQLKVIDDKIRLSLGLDYYRTYGIKYLYFKIPDNIIGQYINQVRIVPKYKGRWFEIEFVYHEDGEIAELDYNSHLSIDLGVDNFATCVTTGGTAFILDGRVIKSYNRWWNKEKSRLQSVYDKQDVDNGIKDVDNGIKMDRFSNKRFWKINDYMNQCVNHVVKHCLENRIGNIVIGEMKEIKQEQNIGKENTQNFQTIPFARFRHKLASKCEYHGIKYNEVNEAYTSKVDALALEPIRKHKNYLGKRSKRGIFQSSTGRLINADINGALNILRKVIGDSLERITDSGDVNSPERIRLSW

SEQ ID NO: 29347 - protein, 331 aa, Methanohalobium sp.
MTYNQSGFEITDSKANNITYNSTDTTNYLYGKSEPVYTEDDEVFISFSHKHPFGIELKFGLPAKIVYDNILSVADDIAQIEIYQRKNGSYYLSITYNVPCLDFKHNDKYLAMDIGVSKHTMVDSDGYLSEVINNRPDKYWEPKIQQIQSRLDHCKRYSKKWYRLKRNLNRMKQKSSNQLKDFQHKKTRNIVDNTDANVIILGDLSAKQMATSKKGDKKSDKSTHRGTHNSGYIGRFAQFLIYKSIRVGKRIIEIDELYTSQDCCNCGNRKKMSLYERTYNCPYCRQSIDRDKNSAILIMERYLRQNALWTGYQRFADNRRQTSLLIGVITH

SEQ ID NO: 29348 - protein, 416 aa, Methanohalobium sp.
MHLTQKNHIKADKQKYEVLKRITKLSKNLYNFTLYTTRQYYFDNSKYLNHESAYHLVKENENYKMLPSQVAQQTMKVVDRNMKSFFRILGEKKRGNYNRPVKMPEYLPKDSKFVCIFPKDMFKIEDNKIRLSMGREFYKNYGVRYLYFKLPENITGKHIKEVRIIPKYNGQWFEIEYVYRDNGNGEKVDLDYNKHLSIDLGVNNFATCVDTNGTAFIIEGRGLKSYNRWWNKVKSGLQSVYDKQGIKSGQKLNWLFEKRKNKLNDFMNQSVNYIVKHCIDNNIGNIIIGELKDIKQNSNMGKKNNQTFQTIPFGKFKQKLRSKCEYYGIKYIEVDEAYTSKTDALALEPIGKHRKYMGKRVKRGLFQFSTGKLLNADVNGALNILRKVVGDSLIEITDSGCVNHPRRIRFFGNTCR

SEQ ID NO: 29349 - protein, 301 aa, Methanohalobium sp.
LENKIKSYEQDGKAISRFELNKRIRALKGDYEWLKEINSQSLQGATLNLENAFTKFFREKSGFPKFKSKKNPVQSFPIPQWYKVDFGNNKVYIPKIGWIKTRLHRRFKGKQRTATIKRTPTGKYYISILVDDGKQLPQKYKFDQNNTVGVDVGIKDFAVTSDGEKIDNPRYLKNSIERLKVLQKRLSRKKKGSNNYKKLKHQIAKYHEKIANQREDFQHKLSSRLISENQAVALECLNVKGLLRNHNLAQHITDASWSSFVQKLEYKAAWYGKNIIKIGRFDPSSKICHVCGYYNKDLELK

SEQ ID NO: 29350 - protein, 369 aa, Methanohalobium sp.
MYNIFVDSMYLTLKVKLNPDREQRDKLLTTMEKFNEACNYASEAAWYNKKFGKTGIQKLTYYDIRQKFTLSAQLTVRAIGKVAESYSNDRKTMHKFDRRGAVVYDQRVLSFKGNDMVSILTLDGREKISISYGDYRPFDISKIRGQTDLIYEDNNFYLMLVMEVGENEVEYNDDVMGIDLGVVNIATISDNEVYKGTKADEIRERYTSLKSRLQSAGTWSAKKHLKKLSKKERRFKRDLNHRVAKQLVKRAKDTSRAIALENLNGFRPEATVTKAQKDRLGKWAFSELTDFILYKAKLEGVPVVIINPMYTSQQCSECGYIDKNNRQKQSNFRCKRCGHRENADYNASKNIAHRGAVSLPNVLRLASIS

SEQ ID NO: 29351 - protein, 400 aa, Methanohalobium sp.
MIVSRTETIHLKYDDRLSRLCHISKNLYNQANYIIRQNWLNGYGYTKYEKVNEELKGTENYSILPSQTAQQTLKMVDRNWKSFFNSLKDYKINPHKYEGKPKPPNYKKKDGEFLLIFTSQQLTRGIKNNYLKFPKKLGLKIKTRLNEDTNIQQVRIVPLGVGYKCEIVYKQKIIHNKLDENNIASIDLGINNIITMVNNIGEKPIVIKGGGVKSINQYYNKKKSQWKSFYDKRGFDETKRLEKIYQKRNNKINDFFHKVSKKIINYCIENNIGTLIVGYNEGWKQECNIGKKNNQNFVQIPFFKLKKQIEYKSEDAGIKVLFQEESYTSKCSFLDDEPVEKRTSYLGKRIMRGLFKSNTGKVINADVNGAYNILKKAFPGAMKGIEGVALHPVSISHEYN

SEQ ID NO: 29352 - protein, 339 aa, Methanohalobium sp.
MFVKRKDVPCGNNSSGFIKYDGILPKGHPKFKSRDDFTSFRYKQHGNGWNLDGNWLYLSKITGKSNPIKIDIDNLPDGELKTCTLKKEGKQWFVYLTVELPENPTPSTPTNAVGIDLGLKSFITTSDDDFVEPPRFLRKAEKRLAKEQRKLSKMEFRSKNYQKQKQKVNRIHRKVASARNHFSHCLSKLLVEKYDLVVFEDLKIKNLIKNNRLAKSISDVGWNKLVQHVTYKAAERGKIVDKVNPNYTSQVCSHCGRKKKEKLKLEDRTFYCSNCGLEIDRDLNAAINILTKSSYYNPKWHTVGLAGINGCGYGTSTSGLGISSQVPSMNQQMLNLVIG

SEQ ID NO: 29353 - protein, 339 aa, Methanohalobium sp.
VETVETVDRSMKSFFKLLDKKRKGEYEKPVSLPKYLDKDGNFICTFKKDHLKVIDDKIRLSLGPEYRRTYGTRFLYFKIPDNILGKYIKEVRIIPKYKGKWFEIEYVYHEDGEMANLDYNSHLSIDLGVDNFATCVTTSGTAFILDGRVIKSYNRWWNKEKSRLQSVYDKQNLDDGIKISQFSNKRFWKMNDFMNQFVNYIVKHCLENRIGNIVIGELKEIKQEQNIGKENNQNFQTIPFARFKQKLASKCEYHGIKYHEVDEAYTSKVDALALESIKKHKKYLGRRPKRGIFQSSTGRLINADINGALNILRKVIGDSLTGIVDSGDVNSPERIRLSR

SEQ ID NO: 29354 - protein, 434 aa, Methanohalobium sp.
MSFRNKDKFKNTVTFTLKQEIYFSGEDENILDGQSKICNWLYNYLYDMVEYDYKYNGSRNKLINKYNLRNQVPRLKEEKPFLKTVYSSVLKNVAIRLAKSYENFFQIPEVGHPQHRSWKTKWFSLEYEEKIGWKIDGKTVIISLGKDKYSKQLKVVGTLNEKPKLDGGEPRAFRLVKQRGKFYAILTVVKDKTPKKDVEKWIALDPNHKNLLTAYDYKGNTIEFQNLDEIKYWDGVIDDLMSKRDNCKRKSQFIPISETRGYWEPSNNWKRYDKALEKALHTKREQTKLGMFTIANYLCRNYDKILIGDYTPSKEVSPHKKANRSILNQTLIAKLRGTIEWVCDKSGKTFKKVDEKNTTKKCCICEDVEKKDPEVRTFTCKKCGQTLSRDINSAVNIAKKEMHLSGTDYKANLKEPLYIAYWRYNNSKINMQTN

SEQ ID NO: 29355 - protein, 310 aa, Methanohalobium sp.
MRNQSLPKYLDKDDNFICTFKKDQLKVIDDKIRLSMGLDYYRTYGIKYLYFKIPDNIIGQYINQVRIVPKYKGRWFEIEFVYHEEGEIAELDYNSHLSIDLGVDNFATCVTTSGTAFILDGRCIKSYNRWWNKEKSRLQSVYDKQDVDNGIKLDRFSNKRFWKINDFMNQCVNHIVKHCLENQIGNIMIGEMKEIKQEQNIGKKNTQNFQTIPFAKFKQKLVSKCEYHGIKYHEVDEAYTSKVDALTLEPIKKHKKYLGKRPKRGIFQSSIGRLINADINGALNILKKVIGDSLTGITDSGDVNSPERTL

SEQ ID NO: 29356 - protein, 446 aa, Methanohalobium sp.
MVRKDDQNCRNLRFRIHPTPEQEKKLNETLECCRLIWNHLLSLQVDLYERFGLSVKRSELEKLLKNLDYPIHSSVRLDVFQRLCFAYDKFFDDLEKGRLKNTKPKKGMFVKRKNVPCGNNSSGFIKYDGILPKAHPKFKSKEDFSSFRYKQHGNGWRLDGNWLHLSKITSKSNLIKIDIDNLPNGELKTCTLKKEGKQWFAYLTVELPDNPVPSTPENAVGIDLGLKSFITTSDDDFVEPPKFLRKAENRLAKEQRKLSRMKFRSNNYNKQKQKVNRIHRKVAAARNHFSHCLSKLLVNKYDLIVFEELKIKNLIKNNRLAKSISDVGWNKLVQHVTYKAAEKGKIVDKVNPDNTSQVCSHCGTKKKEKLRLENRTFYCSNCGLEMDRDLNASVNVLTKSSYYDPSMHTVGLAGMNGCGDGTSTTGLDISSQVPSMNQQMLNLVKG

SEQ ID NO: 29357 - protein, 426 aa, Methanohalobium sp.
VLLTKKYKIKPTSEQLDVLWKLSKRCTLLYNLSLSERKEAWKHERKSIKYSHQQDNLPSLKDQYPSIYSLYSKTCQGVLQKLDANYKSFFGLRKNGDKNAKPPRFKKSVYFFTIPYNQSGFKIENGKIIFSHKYNNRPISFNIPQELENYDVKHTEIFNSEPYKGKGDFFVSVVYETFPQTNYKDNEKNQAIDLGITKTITAVNTDGKILEITNPRFDKYWDKKINQAKSRRDHCKKYSHRWFRINDAIRVMTKKKNNQIKDWQHKLSRKMVDNTRLNTIIVGDLDVKDMTNSKKLPKSRQKSLNRSTQNNGYISRFIEFLTYKSEFAGKQLTKIDESYTSKICYVCGKVHDMPLYKRNLSCDCGNEIDRDKNSAINIMIRYLSQNAIWTGYRQFACNLRQTGLLTFDVYKIHPMDDMNTRRNLHA

SEQ ID NO: 29358 - protein, 353 aa, Methanohalobium sp.
LKTVYSSVLKNVAIRLAKSYENFFQIPEVGHPQHRSWKNKWFSLEYEEKSGWKIDGKTVIISLGKDKYSKQLKVVGTLNEKPKLDGGEPRAFRLVKQRGKFYAIFTVVKEKPPKKDVEKWIALDPNHKNFLTAYDYRGNTIEFQNLDEIKYWDGVIDDLMSKRDNCKRKSQFIPISETRGYWEPSNNWKRYDKALEKALHTKREQTKLGMFTIANYLCKNYDKILMGDYTPSKEVSPHKKANRSILNQTLIAKLRGTIEWVCEKSGKTFKKVDEKNTTKKCCICGDVEQKDPDVRSFTCKKCGQALSRDINSAVNIAKKEMHLSGTDYKGNLKEPLYIAYWRYNNSKINMQTS

SEQ ID NO: 29359 - protein, 448 aa, Methanohalobium sp.
VESIVRKEGQNCRNLRFKIHPTLEQEKKLNETLEYCRSTWNHLLSIRVDLYDRFDLSVSKSSLEKYLKNLDYPIHSSVRLDVFQRLCSAYDKFFDDIKNGRLKNTKPKKGMFVKRKDIPCGNNSSGFIKYDGILPKGHPKFKSKEDFSSFRYKQHGNGWKLEDNKLYLSKITGKSNLIKIDIDRLPDGELKTCTLKKEGKQWFAYLTVELPENPVPSTPENAVGIDLGLKSFITTSNDDFVEPPRFLRKAEKRLAKEQRKLSRMEFKSNNYKKQKQKVNRIHRKVASARNHFSHCLSKLLVEKYDLIVFEDLKIKNLVKNNKLAKSISDVSWNKLVQHVTYKAAERGKIVDKINPDNTTQVCSHCGTKKKEKLRLGDRIFYCSKCGLEIDRDLNAAVNILTKSSYYNPMHTVGLAGMNGCGDGASTTGLGIGSQVPPMNQQTLNLLRG

SEQ ID NO: 29360 - protein, 305 aa, Methanohalobium sp.
MPSQVAQNTVETVDGSMKSFFKLLDKKIKGEYEKPVSLPKYLDKDGNFICTFKKDQLKVIDDKIRLSLGPEYGRTYGTRFLYFKIPDNIIGQYINQVRIVPKYKGRWFEIEFIYHEDGEMADLDYNSHQSIDLGVDNFATCVTTSGTAFILDGRVIKSYNRWWNKEKSRLQSVYDKQNVDDGIKMDRFSNKRFWKINDFMNQCVNHIVKHCLENRIGNIVIGEMKEIKQEQNIGKQNNQNFQTIPFARFKQKLASKCEYHGLKYQEVDEAYTSKVDALALEPIRKHNKYLVRDIREESSSHLQVD

SEQ ID NO: 29361 - protein, 334 aa, Methanohalobium sp.
LILTYKIKHNRDFSEELAKAKQVAEYGVKYRTRSSKDVKHIGLNSAISNQILKKYAKDKSAKKVTSVKLTIPNQSVKLNRNERKIRITPLKLDLRYYFPDDFEKINQIEIGEKYVYVSVTVPEKEQIEPEDYLGVDLNTTGHIAVMSNPKTGKIWKLGKKAQHIHLKYKNDRRKLQVKGKYKKVKQVNDRESRIVRDLNHKISSRIVDTAAANNCGIRMENLKGIRDSAKCKKSFKYSLHSWSFYQLQFMLEYKARLLGVKIEFVEPEYTSQDCSRCGYLGIRNGDSFKCPHCGHVDHADANAAFNIAMRSGDQCGADRDASYGSTGAPQVATV

SEQ ID NO: 29362 - protein, 430 aa, Methanohalobium sp.
MKITTKNYLRMNKQQYWIVDTLSKLSKNLYNVGVYNVRQYYFYNNKFLPYTNNYHYCKDNDNYSLLYSDNAQQILKIVDRTFKSYFRLLKERKKGNYNRPINTPGYLDKNGRFVLIYPAQRMSIKGRYFKLGMSREFKKQYGLNGDELTFKLPDHINPDELKEVRIVPKHDGKFYQMQYVYDKKLQDMNLDKNQYLSIDLGLDNFATFVETSTGTAEIIDGKHIKSINQFYNKEKARLQGVKDKQGMEHKFTKRLSRLTNKRDNKVDEFLNRSVDYIVKTCIDKDIGNIVIGELKEIKQEQNIGKKNNQNFQSIPYFLFKSKLQSKCDLYGINYIEEDESYTSKTDALSLEPIRKHEEYMGRRIKRGLFKSSTGQLLNADVNGALNILRKVVGDSIQRITDRGLVSRPERIRVTFEPEKRPAFSRIKLSV

SEQ ID NO: 29363 - protein, 400 aa, Methanohalobium sp.
MEIVMVKRTETIYLNYDKNLSWLCHISKNLYNQANFIVKQSLNDDGDWVRYEELNKQLKGTENYSVLPTQTAQQTLKLMDKNWISFFQSIKDWEKNPENYYSKPNPPKYKKKNGENILTFTNQQCKIKNGVLKLPKKTNLQVETRLTDDTKLNQVRIIPMGVGYKCEIVYEKDLETPDPNEENIASIDLGINNIVTMVNNIGEKPIVIKGGVAKSINQFYNKKSGKLKSIYDKLGIKNSKKLKKLYHKYKMKINDFFHKASKRVVDFCVKHNIGTLVIGYNEGWKQEVDMGKRNNQKFTQIPFHRLLEQLKYKAEDVGLKVIEQEESYTSKCSFLDGEPVERRTSYLGKRIKRGLFRSSNGTIINADVNGAYNIMKKAIPDLDGIEGVALHPVSISHECN

SEQ ID NO: 29364 - protein, 383 aa, Methanohalobium sp.
MLNHNNYGMLKAYKYRMYPNQIQQELIAKHIGACRFIYNWALENKIKSYEQDGKAISRFELNKQIRVLKEDHEWLKEINSQSLQGATLNLENAFTKFFREKSGFPKFKSKKNPVQSFSVPQYYKVDFGNNKVYIPKIGWIKTRLHRSFDGKQRTATITRTPTGKYYISILVDDDKQLPQKQTFYEVNTVGVDVGIKDFAVTSDGEKIDNPRYLKNSIERLKVLQKRLSRKKKGSNNYRKLKHQIAKYHEKIANQREDFQHKLSSRLISENQAVALECLNVKGLLKNHNLAQHITDASWSSFVQKLEYKAEWYGKNIIKIGRFDPSSKICHVCGYYHQDLELKDREWECPDCKTIHDRDINASVNIKKFALDKQNLIGINSPSG

SEQ ID NO: 29365 - protein, 354 aa, Methanohalobium sp.
MYQTLLVRIIPTSQQEELLWILSEKCRLLYNFALAERKDAYSNGTKISYIKQQNDLPNTKKQYPEYKWVYSKVLQSVLKRLDANYKSFFSLKKNGDENARPPKYRGVDYFFTMTYNQSGFEITDSKSNKIAYNSTDTTNYLYGADKPEYTEDDEVFISFSHNHPSGLELKFGLPAKILYDRILRVADEIAQVGIYQKKDGGYYLSITYNVPCLDFKHNDKYLAMDIGVSKHTMVDSDGNLREMINKRPDKYWEPKIQQIQSRLDHCKRYSKKWYRLKRNLNRMKQKSSNQLKDFQHKKTRNIIDNTDANVIIIGDLSAKQMASSKKGDKKSDKSTHRGTHNSAHISRFAQFLTL

SEQ ID NO: 29366 - protein, 447 aa, Methanohalobium sp.
MYQTLPVRIIPTSQQEELLWILSEKCRLLYNFALAERKDAYSNGMKISYIKQQNDLPNTKKQYPEYKWVYSKVLQSVLKRLDANYKSFFSLKRNCDENARPPKYRGVDYFFTMTYNQSGFEITDSKSNKIAYNSTDTTNYLYGADKPEYTEDDEVFISFSHNHPSGLELKFGLPAKILYDRILRVADEIAQVGIYQKKDGGYYLSITYNVPCLDFKHNDKYLAMDIGVNKHTMVDSDGNLREMINKRPDKYREPKIQQIQSRLDHCKRYSKKWYRLKRNLNRMKQKSSNQLKDFQHKKTRNIVDNTDASVIIIGDLSAKQMASSKKGDKKSDKSTHRGTHNSGYIGRFAQFLAYKSLRVGKRIIEIDESYTSQDCCNCGYRQKMPLYERNYNCPYCRQSMDRDKNSAIVIMERYLRQNALWTGYQHFTDNLRQTGLLIGMITQSLPG

SEQ ID NO: 29367 - protein, 190 aa, Methanohalobium sp.
VASNPKTGKVWKFGKKAEHIHKKYKNTRRKLQVKGKYKKVKQIKNKENRIVRDLNHKISKKIVEVAAEKNCGIKLENIKGIRKTAKQRKSFKYSLHSWSFYQLQFMLEYKARLLGVKIEFVDPEYTSQNCSRCGYLGIRNGESFKCPHCGHVDHADANAAFNIAMRPGGQSGTDRDVSDGSTGAPQVATV

SEQ ID NO: 29368 - protein, 255 aa, Methanohalobium sp.
VSILTLDGREKISISYGDFRLFDINKIRGQADLIYEDGNFYLMLVMEVGENEVRYNDDVLGVDLGVVNIATTSDNEVYKGTKADEIRERYTSLKSRLQSAGMWSAKKHLKKLSKKERRFKRDLNHRVAKQLVRSAKDTSRAIALENLNGFLPEATVTKAQRGRLGKWAFSELTDFILYKAKLEGVPVIIINPMYTSQQCSECGYIDKNNRQKQANLKCKRCGHRENADYNASKNIAHRGAVSLPDVLCLASACRS

SEQ ID NO: 29369 - protein, 446 aa, Methanohalobium sp.
MVRKEGQNCRNLRFKIHITPEQEKKLDDTLEYCRLIWNHLLSIKVELYDRFGLSVSNSSLENHLKNLDYPIHSSVRLDVFQRLCFAYDKFFDDLKKGRLKNTKPKKGKFVKRKDVPCGNNSSGFIKYGGILPKGHPKFKSKEDFSSFRYKQHGNGWKLEDNKLYLSKITGKSKPIKIDIDRLPDGELKTCTLKKEGKQWFAYLTVELPDNPVPSTPTNAVGIDIGLKSFITTSDDDFVEPPRFLRKAEKRLAKEQQKLAKMEFKSNNYNKQKQKVNRIHRKVASARNHFSHCLSKLLVERYDLIVFEDLKIKNLVKNNRLAKSISDVGWNKLVQHVTYKAAERGKIVDKVDPDNTTQVCSYCGTKKKEKLKLEDRTFHCSNCGLEIDRDLNASANILTKSSYYNPTTHTVGLAGMNGCGDGTSTTGPGISSQVPSMNQQMLNLVKG

SEQ ID NO: 29370 - protein, 345 aa, unknown
  TnpB Polypeptide
MAKHAGYARVAFNFALSSFKAGLDNDEWRSYVDIKREFNAVKYDTFDWCKDLSQNASKNAIHNLGDAVTHWKKGQNNFPVYKNRSGKCSYQADNGEGTIEVHKKRINLPKIGWVRMREALRYSGEITKVVISKYNDKWFASITVRRLDSSNYKYQPVLFDDTKIPIGIDVGINTLATCSNGDTYDNPRPLRRYARKLAREQRKFSRKRKGSQNWHKQKKRVSAVHARVANIRSDAHHQATIRIVRKASAIGIETLNISGLLKNRKIAKALSDSALGGFLTKLKYKAKRRGIPIDEADIFFASSKTCSNCGHKKKDLTLSERTYHCSECGFEADRDLNAAYNLCPV

SEQ ID NO: 29371 - protein, 417 aa, unknown
  TnpB Polypeptide
MIDPVLTTQTIALYPNRAQSARMEHFLFVGRVAFNRALSAHRFWYAKSGKGLNYYDHYADLTALRQADPFWRDVPVRITRDAVRRCHDAFQNFFRRVKAKIGPPGYPRFKGRSRWRSFSIGEPGTCVHENRIRVSGVDGLIHARNIRPVEGKIKLLRVLRKAGRWFCQLVIDDGKESPPPVAIKSAVGIDVGLTTFAALSNGEKIDSPRFGKSMAAKVRAAHKSVSRKAKGSNRRKRAVGKLQRVYAQLDNLRSNFVHHASKRIVTAHQFIAVEDLKIRNMARGRFAKSIYDACWGKFLWCLRYKAERAGCAFIKVNPAGTSQDCSKCGEKVQKDLGVRVHSCPHCGLKLDRDENAARNVLKRAVQGSAPASGRDVVRRGESVSPERCSSGGLVEASGFDQSELLPYKIVRVKGAKR

SEQ ID NO: 29372 - protein, 401 aa, Okeania sp.
MVEKAYKFRFYPTSQQENLLRRTLGCVRLIYNKALAARTQAWYERQERVGYAQTSAMLTNWKKQEDLKFLTEVSCVPLQQGLRHLQTAFTNFFSKRARYPNFKKKRNGGSAEFTKSAFKWKDGQVYLAKCAEPLAIRWSRQLPPGCVPSTITVKLDPSGRWSVCLRINDTRDLKLKPTKKQVGIDLGITNLLTTSDGETFANPKNLNKLHKKLRLAGKSLSRKTKGSNNYQKARLKLARIHAKVKDSRLDYTHKLTTQLIRENQTVVVEDLAVKNMVKNHKLARAISDANWGELVRQLEYKAEWYGRELVKIDRYFPSSKRCSECGYVLDKLPLNIREWDCPECAAHHDRDINASINILAAGLAVSVCGATVRPEGSKSPKAGAMKQKAPSSDVKESRAVS

SEQ ID NO: 29373 - protein, 405 aa, Okeania sp.
MLVYEMKLEGEDVQYEKLNEAIRTGRFVRNSIIKAWMNGEIKSRNEAYKYCKNLADNPEFPWAKKLNSMARQAHAERAWSAIERFYKNCKANVPEKKGYPKFKKYQVRVSVEYKTSGWKLSEDRRYLTLSDGFEAGTFKLWGSRDLHYYQIKQIKRVRIVRRHDGYYAQFVIDHTREEKKDLTGKQTGLDVGLNHFYTDSEGLKVDNPRFLRKDERKIKKLQKRLSRTKKGSKNRIKARNRLGRAHLKVSRRRNDWVCKEAQRVIQSNDLVAIEDLKVRNMVKNHHLAKSINDAAWYKFREWLEYFGSIYGVPLIAVEPKNTSQNCSNCGQKVSKTLSTRTHKCPHCSYEADRDENAAINILQSALKQLSTTLGRRESNISGETGLCLDGETQTGKLARRKRKSK

SEQ ID NO: 29374 - protein, 212 aa, Paenactinomyces sp.
LGEVCEIKRSRRPDSFCNGPAVPTGKYFVSILCERIASPYIPVDKDQAVGIDLGLKDFAILSTGEKVKAPKYFRKYEKRLAKWQRVESKRQPGGKNRRKARLKVNRIHEKIVNARRDFLHKLSTKIIRENQTIVLEDLQVENMVQNHHLSKSITDASWSEFVNLLAYKAEWFGRQIIQVGKRFPSSQLCSHCGFRNKDVKHLHLREWGVPRM

SEQ ID NO: 29375 - protein, 574 aa, unknown
  TnpB Polypeptide
MSITKTIVIQILPDGAAQAVLEEQAKESARWMNAVFRRLYTDKRNHKWANYGPDKDWGKSYGSIARWKPRKEDWHVVGEALYPAFIRKDAPNRIETPLNPESLQLLSQKVATTWGNFIGSARTVPRPRGHLPNMGGVAIYNVPLDKFEFGNDNFVLRIKGMVIPSVGSDKKKFLARLELIKQSIAGKKAVSKTPWAAVEIRKAGNKWYAHIPVTVAAPEPMKQPDKVMGIDVGVRNLMTAAVVNTKTEIPMPLRVSGMPVVHRLERIKARVRRLRSMHDRGNKNTRKVLKRLKGERRKIQQSVMRQVSAHLVDAAVESGATGIAVEDLRKMGRPDMSRRMNRLISGWSRGDGRDFLAQKATEAGLNFKEVFARGTSSTCPSCGKFDRSARDRTAHLFTCKVCGFAMNDDDVGAVNIARRGYNYWNSPKWAKSQSTAVAGTTAEDSAGNGAGESHNPHMEQPDAESPAARNGAQSEKPENRAIGTDTRVSATSSGSSSRAEPSKVQRPMRQVDKPDQASGEVARGAPGGARTVKGTAENARIDPATASGDPHPLENGARPLSVSEPPPSQRLANL

SEQ ID NO: 29376 - protein, 482 aa, Moorea sp.
MNFTQDMHGTGKRAIKLLTNSDEVIPRFYASCCNCLFSKSVILIISFLSFIFGLSFVYTLCYNQSGSISRMVTNMIIAYQYKLKPTKEQRSQIDNWLSMLCAQYNYLLADRFNWYEQNRCSVNACPLVCYLSDLRDNPDYFSQKKTLPNLKKTHPWYKTIHSQVLQDVVKRVKFAFDRFIKGDSNGKRSGRPRFKKRHRYRTFTYPQMKEGCLEGCLINLPKLGKIKVILHRPIPAGFKIKTASITKKCDGYYLVLSLEDKTVPEVKPNINLNSIIGIDVGLKDFLTTSEGEPIEIPQYYRKSQKRLKVIQKRVSRRKKGSNNRLKAIKQLGKQHKKIADKRKYFHFKTANYLLSKYDVIAYEKLNVKGLAKSRLAKSVLDAGWSSFLTILTSKAENAGLLAVPVSPKNTSQNCSNCGKKVPKKLQVRWHDCPHCGCNLDRDHNAAINIRKRAEGQSVLKAQRLLSNGRIGWEAYTEPERSV

SEQ ID NO: 29377 - protein, 314 aa, Blautia sp.
MLADKIEHYKKEKKMLRNTPASYKKEYPWLKEVDSLALANVQMHLESAFRKFFREPSVGFPRFKSKKSARKSYTTNVVNGNIFLEGKYLKLPKMAAVRIKLHRPISEKWKLKSVTVRREPSGKYFASLLFYCENQTAEKGPAEKFIGIDFAMQGMCVFSTNERAKYPMFYRHAEKKLAREQRKLSRCQKGSQNYKKQKKRVALCHEKIRNQRKDFQHKLSTSLAESYDAVCVEDLNLKGMAGGFHFGKGVHDNGYGLFLSMLEYKLEERGKYLIKVDCILHPVRFAVYAERKKKNCLYLIGFIVVNVETEWIEM

SEQ ID NO: 29378 - protein, 455 aa, unknown
  TnpB Polypeptide
MPMQQKITAKLKLTTTPEQFASLRQTQLAYRDALNAVSRYAFVHGKTSSAEKLQKGMYPELRMSYKLPAQMACNVPRQVGATYKGLWTKLKQNIEHRRSKRTKKRFKGLDQPPKYVSPTLTYNYGRDYGFKSEQRVSILTLQGRVIVGYQGYSRHMALLQQGATIGAAKLWYDKPHKQFYLLVSLEIEVLEPSPEGQQQVVGVDVGQRYLATTATLSGASHFFSGKAVREKADHYARTRKRLQQKGTRSATRRMIALSGRERRFKLNTNHVIAKHIVAAHPHALIGLEDLTGIRERTKRRKRRKKGIQVLPLTPKQKRVNRHASKWAFAELHGIIMYKAALSESSFAIKVDADYTSKACPLCSYTDKRNRPGNGLMFVCQNKECVSQVRTGRAYSLHSDLIGARNIAMRTGLIRQDWVRTGQLSVAPDVSDHEAKAARLTRYAELRWSPDASPSL

SEQ ID NO: 29379 - protein, 361 aa, Shimazuella sp.
MFRTYQFRLYPTKKQQEKIHFTLERCRLLYNRLLQERICAYQGEQKNLTYYEQKKTLPDRKKAIPELKQVYSQVLQQVVEKLDKTYRAFFQRVQNKQKGGFPRYKGENRYRSFTYPQSGYTLEGKCLQLSKIGSIRIRMHRGIKGVIKICTIMQKNGKYYTCFSCQVKPASQPKTGKQVGIDLGVKHLAVTSDEQFFSAPKHLRKSESHIKRLQRSIFKKKKGSKRRKKVVKVLARTHEKIANRRKDYAHKLSCLLVQAYDFIAFEDLSISNMVKNHQIAKNIVDAGWGQLVQYTTYKAESAGKRVVLVDPYQTSQRCSCCGEIVKKTLAERVHRCICGYEQDRDINAAINILHLAQQVAS

SEQ ID NO: 29380 - protein, 481 aa, Shimazuella sp.
METHYKTYQIRIKKGHRMYEYFQEMAQNSKKMYNTTNFYIRQVYSALSQKKELQPLQREVLATMEYKLDQMNEVQLAAYRKRVEREKKKPMEQRKEGKCNLFELPSEVHPYISYPFLDSLFKVMAQNDYRSLPTQTSQWVMKTVFQNWKSYFCSLQTYKKDPSVFRGRPKIPKYSRSNQKEVLFTNQDCAVKANKFLKFPKTKKQLNIGKLGVTEGRLKQVRILPKYGQYIVEIVVEVSLEFQERTETNCLMSIDLGIDNLATTVTNTGSAPLLVKGKHVKSINQYYNKRKAYYLSRLRQGKQPNEGPYTSKRLERIHQKRHQKLKDIFHKASSHIVNLAVLEKVDAIIIGRNKDWKQASHLGKRNNQSFVHIPHQRLIRMIEYKAMEKGIQVRTMEESYTSKASFLDHDEIPTYGESDTKQLFSGKRIKRGLYQTKQGKRLNADVNGAANILKKAYLYRNEDQTFDIQTVNVWNPQPKVV

SEQ ID NO: 29381 - protein, 255 aa, Synechococcus sp.
LGDGKYPNFKKKRNRGSAKYTRSGFRLKEGQVFLAKCSGPLPIRWSRPLPEGVQPSTVTVNLNPSGRRYVSVLVEDPTINPLPATTKQIGIDLGLNSLMVTDSGREVRNPRHFNRLRKKLEQFQKLLTKKSKGSRNRQKARVKVARVFETISNCRKDLLHKLSTQLIRESQTVVVEDLCIKGMLRSKRYSRSISDASWGEFVRQLEYKSEWYGRELIRIDRFFPSTRTCSSCGYLSPSMSESGSAPIMEHCTTET

SEQ ID NO: 29382 - protein, 387 aa, Streptomyces sp.
VKLAAQVKLLPASADDADALAATLRACNRAATWVSGVAHAKGLKRRNELQEEVYHDTRAAFGLAAQPTVRVIKKVVDAYATLRGNIMAGNYGPPGCRRRARAESKPVVFREDAAQPYDDRILTWNLDARTVSVWTVAGRLKGIPFACSEGAMKLLSHRKGESDLVMRDGMFFLVATVDIPEPGPYEPGGWLGVDLGIVNIATTSDGEVMSGRRVDRYRRRHRDLRRKLQAKRTKSAKRVWKRIRRRESRCTAQRNHIIAKKLVTTAERTSRGIGLEDLSGIRQRVTARRDQRSALHSWAFAQLGAFVEYKARRAGVPVVFVDPRNTSRQCSECRHTHPANRVSQARFACRSCGIVLHADHNGSRNIAHRADAAWQRGAVNRPRTSRR

SEQ ID NO: 29383 - protein, 402 aa, Catenibacterium sp.
  misc_feature (32)..(115): Xaa can be any naturally occurring amino acid
LSKEDYRSIKELCHIAKNLTNQAIYNIRQHYXXXXXXXXXXXXXXXXXXXXXXXXXXXXXXXXXXXXXXXXXXXXXXXXXXXXXXXXXXXXXXXXXXXXXXXXXXXXXXXXXXXXLKGNKLILPYSNSFRKTHKAVEITIPPILLDKKVKEIRIIPKADARFFEIQYIYEAECIQRNLNTTNALALDLGINNLVTAVSSKGETFIIDGRRLKSINQWFNKKNARLQSIKDKQHFGKKPTHRQKAIARRRNNRINDYMNKTASIVIDYCIDHDIGTLVVGYNETFQKDSNIGRRNNKTFINIPFGLLRDKLEYLCELNGITLVMQEKSYTSKASFWDKDVIPVYKSDDTEEYYFSGKRIHRGQYRTASGQVLNADVNGALNIMRKSSVVDVNILYSRGEVDTQ

SEQ ID NO: 29384 - protein, 371 aa, unknown
  TnpB Polypeptide
MEQAFRYRFYPTPEQETLLRRTMGCTRLVYNRALAARTEAWYERQQRVEYVETSSMLTQWKKQSDLQFLNEVSCVPLQQGLRHLQKAFANFFAGRAKYPNFKKRHNGGSAEFTKSAFKWKDGAVFLAKCTSPLPIRWSRALPEGCTPSTITVKLDPRGRWHVSLLVDNPNIQPMTVCTKSVGLDVGISSLLTKSDGDKIANPRHNKCHRKKLKRVQKSLSRKKKGSSNRHKARVKVARAHGKIADSRLDFLHKLTTQLVRENQTIVVEDLAVKNMVKNHKLAQSISDASWGELVRQLDYKCKWYGRTLVKIDRWFPSSKRCGSCGHIVESLPLDIREWNCPKCEAHHDRDINAARNLLAALLLRLKSVERA

SEQ ID NO: 29385 - protein, 410 aa, unknown
  TnpB Polypeptide
VQLRYNFRVYPTPGQRQSLARAFGCARVVFNDALRLRQQAREQGLPYVSDAELSKQVITRAKATPERVWLGGVSAVVLQQALADLNTAYRNFFASVTGKRKGRKVAPPRFRSRKDNRQAIRFTRNARFKVLDNGRLRLPKVGDVQVRWSRRLPSEPTSVTVIRDAAGRYFASFVVTTTDEPMPETDSEVGIDLGLTHFAVLSDGTKVTAPRFLRRAARKLKRLQQDLSRKQKGSANRRKAAVKVARAHPRVADTRRDWQHKLSTAIISENQAVYVEDLCVVGLGRTRLARSVHDAGWSQFTTMLEYKAQRYGRTFGKVDRWFPSTKMCSACGALTDKLPLNVRSWTCPCGTTHDRDVNAAINVLAEGRSESRNACGAQVRPAAMPAPRSEAGIRSNAACSTRSVERISVL

SEQ ID NO: 29386 - protein, 420 aa, unknown
  TnpB Polypeptide
MLRAVKIRLYPNKEQAIQYNKLLGCYRVAYNQCLNRKIESYKNDGITENLSTLGQFVHHELLKNDNFIWLREQNTKVLKQAVKDMLTAYKNFFEQHSGFPKFKSKHDNKQSCRFELGAISKRNIYTDYKVSLANIRNVKFKCNKKYAEYLEKHKNCIRQATLKRLPCGEYYLSILVDGDLMHQVKETNSSVGIDLGVKDFVITSEGEVFDNLHFKKSETKKIKKLQKQLSRKQKGSNNRNKARIRLAKLYKKIDDRKQYYLHSVSNSLIDENQVICMEDLNVKGMSKNHNLAESILEMNFGEFRRMLEYKASWYNRRIVFVDRFYPSSKTCHNCGYVNKNLMLNDREWICPHCGEVISRDYNAALNILDEGMRIIGCSSPEYKLVENPTMDDPIRNDLLKSSGSVKQEVNKARSSTLCKF

SEQ ID NO: 29387 - protein, 369 aa, Ruminococcus sp.
MNKAYKFRIYPNAGQKVMFSKTFGCTRMVYNYYPEKRIKVYEEEKITFGYTKCANDLTLLKKEKEFLQEIDSISLQQALRHLDTAFQNFFRDKKVGFPKFKSRKNHKKSYTTICVNNNIKLENGTVTLPKIGKVTVRQHRNIPDNYILKSVTVSQTPSGKYYASILFEYENQVPQTELQKFLGLDFSMHELYIDSNGNCPEFPGYYRLSEKKLKKEQRKLSKMVKDSKNREKQRIKVSRLHEKVASQRKDFLHKQSRQIANAYDCVCIENLNMQAMAQSLNFGKSVSDNGWGMFTAFLKYKLEELGKRLVKIDKFFASSQICSVCGYQNSETKDLSVREWTCPCCQTHHNRDINAAVNIRNEGMKIVLA

SEQ ID NO: 29388 - protein, 324 aa, Thermoleophilia sp.
MSGSDTELLDGTANLRVAVEADTRGRRRIVFRRAVEIEVIERPERGEAVGIDKGANTAITATSSDTEHAVLLAPEAGDALSRRSERSFRGQRSRLASHADNLAGRQAPGGRFHGNPNPSRAEREKARRIRKNNLGARRRDREQQRAEAEMKNLVGRAAREMVEAFPDASVFYEEKLDFRGSDARKPRHVNRKLNRWTKRELSAAIERHVSASGARREFVNAAYTSQACPRCSWTDRGNRKDIAFRCSHCGYRGHADAVASSNVLRRGRDGTVPIWMSQRGVKKSLAEQHAEWRVSAGTDARCASRGCGEGLPAVGPAGSGREAA

SEQ ID NO: 29389 - protein, 366 aa, Marinospirillum sp.
MIKATKVRIYPTPDQAEFLNRQFGAVRFAYNKALHIISSQYKRHGTKLKAKALQQACINLDKAFQSFFDPKLPARYPKFKRKHGKQSSYHCTSVSCGDDWIKIPKMGPIKARIHRQLEGNLTSITLSRTVTGEYYASLLHDDGVAAPVLIHDLDANQVLGLDMGLTHLAIDSSGNKTPNPRFLKKVSANLRRKQKSLFRCQKGSKGRAKARLKLAKAHQRLANARADFQHKLSRMIVDENQAVIVETLKVKNMLKNKKLSRHIADAGWSGLIQKLEYKAKEQGKHLIKIDRWFASSKTCSCCGHKLEALSLNVRDWQCPSCSTQHNRDINAALNIRAQGILKLKAAGLSVSANGGKRKTSHALAAA

SEQ ID NO: 29390 - protein, 524 aa, Streptomyces sp.
VAVRDRLGHLTAEDESVLRAVGEHQGRLASRDLKRRCADGPDHITETWATRKRELTKESSSRIAGAITKASHGQWALARRSQAAHIQELEAGIRTLRHRLSLPIGEKGSKRTAGGYRSKREWFNKSRRLAALEARHAVAVRDWQAGRVRVVRGGKRLANTRHNLTGAQLTEAQWRARWEAERWFLAADGESGKRFGNETIRVTPDGEASIKLPAPLAYLANSKHGRYVLASTVAFKHRGREWADRIEGDRAVAYRIHLDVQHGRWYLTASWQRPAVKTIPIEAALAHGVIGVDTNADHFAAYELDVHGNPVGDPHRFSYDLTGTAQHRDAQIRHALTRLLHWARQRGVNAIAIENLDFAAEKTREKHGRRKRFRQLISGIPTGRLKARLVAMAAEHGLAIIAVDPAYTSQWGGQHWQKPLVTPRRQMSRHDAAGIAIGRRALGHPIRRRTAPPPHDQSDRLGHRTAQAGPGSPGRDGTHPPTTDRLHREPTPSGKRKRGPSASKTVRDAPSMHQWVQDPLMHTG

SEQ ID NO: 29391 - protein, 398 aa, unknown
  TnpB Polypeptide
VLSFKYRVYPSKKQVLRLNRQMYLSKEIYNILLEKCKEHYKQTGKTFSQFDMNKYISQIKQEKPEFKELHSQVLQNISKRIADSYKAFFRRVKTKKKGAKIKVGFPRVKKYVSSLTYPQAGFKFKNERRLHLSNIGSIPIVLHRLPKGEAKTCFIKQYPSGKWYVGFSCELPKEDFKSNGKEKVGIDVGLTSFATLSNGQKIEPPKFLRKSEDRLKLLQRRISRKKKGSKNKRKAKFRFAKLEEKVSNQRLDFLHKLSRQQVNSYGLIAIEKLDIQDMRKTRYLAKSISDASWGIYAQMLHYKAPSAGCEVFDEDPVDTTKKCNKCGALRDMPLSERIYNCPVCGHIEDRDINAAKNILVKAMVGLTKSHACGDSSSIHSTKNEQDVSLKQELYGART

SEQ ID NO: 29392 - protein, 408 aa, Photorhabdus sp.
MLILKAYKFRLEPTEEQSPRLRQLCGCARFVWNHGLEVTKHILDSGGKLPSAFELNRMLTGWKKTPEYAFLQEAYTDNLQQKFKDLHGAWRRCFDKTLAAKAPVWKRKNDGRDSIRFVNFEKYCLLENRRVRLPSGLGWIKFRQSQEVNGKIKNATISQSAGKWYVSFQVEIEASEPHHESTTMVGLDAGISKLATLSDGTIYEPVNSFKTRQRKLAKLQRQLSRKVKFSANWQKQKRKIQRLHLHIANIRRDYLHKTTTKISKNHAMIVIEDLKVGNMSKSAKGTAEQPGRNVGAKTGLNRAILDQGWYEMRRQLEYKQLWRGGQVLAVPPTYTSQRCACCGHTAKENRLSQSKFVCQVCGYTANADVNGARNILAAGHAVLACGGTEQSGRPLKQEPDAERSTVAH

SEQ ID NO: 29393 - protein, 411 aa, unknown
  TnpB Polypeptide
MLLCEKIKIEVSLQDAEALEFMQAKCRGLYNWLVMKLRNGERWRFNETKKSLRESKQYDPELRYVYGKLLAEVYYRLDGAMQGFYRRLQAGEKPGFPRVKPRHQFFTLCYPAMYLEVQGDTIILPTGGGGNWGPKRYENIRALLTEEPPEHFHEVAVSRDARGNYYCSFVYDDVEQSEENKGKTSKRKRRKKRMPHPMRNDGIVAFDLGIKTLATGVNDQGRFYHIGGFKGYRYYNKQLDKLQSKRDKCKKKSRRYLHLSRVYKRVAEKKRRKQQDCLHKASHLIAHRLAERAVVLGDLSQRQMVIRKKEKETSKEKRKREIRNRMVYNDWGLYGFVQMLAYKCLHVGKELYIISERDTTKTCHVCQHKKDMPLWIRTYRCENCGLVMDRDDNSAVNIYQRFLARLGPHTL

SEQ ID NO: 29394 - protein, 504 aa, Burkholderia sp.
VPRNGRISESGQHAGRRRRRAAARPTLSPHHRLPARRALSTCSGVASISRRSSSISLVNTPRRYLVAKTKCTCIRNTQWRPRRMSLCVLIGQLYNDPMQRLQAFKFELMPNGEQQRDMRRFAGSCRFVFNKALALQKANHEAGEKFIGYVAMARLLTGWRNGTETPWLKDSPVHPLQHALKDMERAYKNFFAKRAAFPRFKKRGQRDSFRYPDPKQIKLEQGNSRIFLPKLGWLRYRNSRDVLGAVRNATVSLSAGKWFVSIQTEREVEQPMPQATSAIGIDVGVARFATFSDGSYLAPLNSFRRHEARLRRYQHAMSRKTKFSNNWKKAKARVQRIHTRIGNARRDYLHKATHTISQNHAMVCIEDLQVRNMSRSAAGSTDQPGKNVRAKSGLNKSILDQGWFEFRRQLDYKLAWNGGWLIAVPPQNTSRTCSACGCISADNRLTQAKFACVECGFEEHADVVGAINTLARGHRVAACGEAVLSGPSVKQEPTEVTMRGRSHA

SEQ ID NO: 29395 - protein, 381 aa, unknown
  TnpB Polypeptide
MRTFEYRLRPNKKQERTLMATLVASRKMYNTCLEELVTHYKETGKYMHIYEQDKLHHKADHPDLPSLVTDAVLRRLHRSFKNFFEGREAGRKVGFPRFKSANAWNTIELFDPFYRMEGKYFKTPKQMGGRIRAVVHRPLEGRFKHAVLVLRPSGWYVQCWCEVEVEALPKKDNAVGLDMGIRYLVADSNGHVIDNPKHHRKSAQRLAKAQKRFARCKKDSGRSKKAKHTVARIHEKVANQRKDTLHKASRYYVDRYQAIAIEDLKPANIVRNHKLAFALSDASWGTFREYLEYKAESAGRQVIAVAPQFTSQNCSACGERVQKSLSVRTHVCPFCGYIADRDTNAAKNILQKGLQVLARTEPSLREREGPEQSGESPHLLK

SEQ ID NO: 29396 - protein, 389 aa, Azospirillum sp.
MNPVECSYRFRFYPTTQQTDLLNRTFGCVRVIYNRARTLREAAWKERKERCGFTQTNAMLTALKKQPEFVWLNEVSSVPLQQCLRHLEAAYQRFFHKRARYPQFRRKDSRQSAEFTKSGFTYRNGMLTLAKMKEPLAVVWSRVLPGEPSTVTVIREPDGRWYVACRVTASIKPLSGGSAVGIDLGLTNLAVLSTGEKIANPRHLSKRQKRLVREQRRLAHKQKGSRNWTKAKLKQARAHAAVRHARQDFLHKLSRRLINENQVIAVETLSVEGMLRTKRHSRAIADASWGELLRQLNYKAAWYGRTLVQISRFYPSTKTCSACGATGHILTLADRAWVCPHCGAHHDRDHNAAQNILAAGLAVTACGGDVSPGVPRHPGQSSVKQELMP

SEQ ID NO: 29397 - protein, 150 aa, Cyanobacteria sp.
RKDFHYKQAHALCDAGDMVFMEDLDYRTSAKGMFGKHMLDAAFGQFRTIVKYVCWKRGKFFAEVDARGTSQQCPECGGEVKKDLSIRVHECPYCGYKTDRDVAAGQNIRNRGIQLISTLGHSGMETACADDLPGVEATQSRQVSSAIRCE

SEQ ID NO: 29398 - protein, 213 aa, unknown
  TnpB Polypeptide
MAEVRRTVVVKLDIDDSDATLLHETIEEYLWACNYVVQDAWQDDYKPTSKTKLHDRTYSDVRDQTRLQANLVQSARNRAAEAIKSVVARWKQGKQASQPHFTTPSVRYDKRSATFHNDHVSISTVNGRIEAEYVLPPEGDNPHTKYLRNDDYEITGATLQYRDATDTFFLHIGTKADVEAEIPTNSEGGAKHSTVLGVDLGIEQIAVTSTGMF

SEQ ID NO: 29399 - protein, 386 aa, unknown
  TnpB Polypeptide
LDTYREALHDAFNKGANTMSAVNDIVTPYDLPYQAKDALKSYVPRLHKTDNAVELDDDHPLCLVNRAATFDYTDEREHSFVWQVPQPGRGTNFWIPLRINPEQESLWIDLLNDDATAGELRLQRHRTSWELHVTVKCPVEEPINTDKQDVTYVGFDVGESALITGCALKRDVPRKPMLVSGSRARNLRKEMFTTLKRLQQRDASEWRMDKRFDHYQNALTDIVEKASRQAVEYAQQFEDPVIVLEDLSYIRDRLNYGKFMNRRLHAWAFAKLQGRIEDKATEARIRVKYVSAAYTSQTCHACHRLGQRREQAEFVCPHDDCHVSEFQADINAAANIARRANPWGESVRWEPGHDDSPRDGSACDSAIVHRETSENPSQMTLAAYSD

SEQ ID NO: 29400 - protein, 274 aa, Hydrocoleum sp.
DDSFTLDGSITVGFNHIKLPRIGCVKTFEILPDNVTPKSVTITKKADRWFVSFKIETASINTEKLVDVVGVDLGVKTLATLSTGEVFDGAKSYKKLESKLSRLQYLNRHKTKFSNNWKKAQLRIAQLHTKVADIRKDTLHKLTTYLAKNHSQIVIEDLNVSGMMANHKLAKAVADMGFYEFRRQLEYKCKLYDSELIVVDRWFPSSKTCSHCGHVKQSLSLSERTFDCEHCGFSCGRDLNAALNLAMAVSSTVTACGLDNADVARSEAGIEQIV

SEQ ID NO: 29401 - protein, 380 aa, Thermoplasmatales sp.
VFTAYKFRIYPDDEQKLLIEKHIGSCRFVWNHFLDFRNKRYVETGKGMSYRDMSVLLPALKEEKEWLNDVSSQSLQQELMHLDSAFHGFFKKIGKYPAFKKKKNGGSFSVPQHFTINGNHLAIPKFKNPLRLFMHRNIEGEMRSLTISKAPSGKYYASILAETGIKIAEPLKIEAGRSTGIDVGITAFLTTSDGMQIHNPKNLKKSEKKLAILQKRFSRKQKGSKNRNRAGVEVAKAQEHIANQRMDFHNKVLDAMLKAYDTVITEDLNVSGMMKNHHLARSIADAGWSSFVTMLKTKALSRGKNIIETGRFDPSSRMCSNCGNIKHDLKLWDRTYNCDICGLSIDRDLNAAINIKKFGLIQTGIHTDSGEYTPMEISLV

SEQ ID NO: 29402 - protein, 358 aa, Lactobacillus sp.
VQSAQQTLKEVNTVWSAWLKALKAYQKNPAKFTGRPRIPKYLRQNQRHIFFVTNQNTKLKGNYLIISKLQVKIKLDPKIKKIQRVAFKPTYGGYRLIVQYKTNKEISYLPDNGKYIGIDPGVDNAFACAGNTGTCPLLINGRSLKSVNQYYNKERSRLKSLQAKYHQLESTVQTKQGAKPVYQETKAMQRLTAWRNAKIRQFAHKASKRIVNYALSCEANTIIIGNNKSWKRSSDMGKRSNQNFIGIPHKTMIDLIQYKANLQGITVITTNESYTSQTSALDHEKPCWENGNRSRQKQDKTLINRRIHCGLFKTNDGRLINADVNGALQIIKKAFPKFSFDKGIAGVVLRPVKWTPLI

SEQ ID NO: 29403 - protein, 406 aa, Kitasatospora sp.
MATNHVKRAFKYRFHPTDAQAAELSRTFGCVRKVYNMALQARTEAWSLRQERINYNTTSAMLTAWKKTEELAYLSEVSSVPLQQTLRHLQGAFTNFFAKRAKYPTFKSKRKSRRSAEYTSSAFRFRNGALTLAKMAEPLDIVWSRPLPEGAVPSTVTVSQDAAGRWFVSVLCEDRPTMPDPVNAAVGVDAGITSLVTLSTGEKVANPKFERADRLALAKAQRELSRKAKGSRNRDKARLKVARVHARIADRRRDFLHKLTTRLVRENQAVVIEDLTVRNMLGNHSLARAISDASWTELRSMLEYKAQWYGRELITVDRWFPSSKLCSACGTVRNAMPLNVREWTCDCGAVHDRDVNAARNILAAGLAAAACGDGVRPQRSTPGGQSSMKQEVVPPPRPRAAAQPRG

SEQ ID NO: 29404 - protein, 827 aa, Spirillospora sp.
MRPKSIATVVVRFAATPSRSSTAAPTFVSASSVCSGRISLTAPTRVVLPTPNPPATRIFNATRGPSSRSSTSSGASGPGSGGSERTELIEHPPEQVRVVVRLDGRRGPPLDAHEPRVDQVAREDADHAEGQPQLRGDVRHGVRPPAQRQQPTLLPRQPAGLRRGPARRDQDRHDVERLPPGPGPAARHRVRPDHGTGGLVQPPLPARPPRGTGNAGIHGRSPRSRSRHLLAKARGQLPADPLHQHRHLVRDEPRVRARLAQQREAAVRPGGHHEEQPLVHLDEGLPHLPRLQLRARADREAVEPGRQRRQVLRVLAADAAGGAHHQAVARQHDHLPDLRDPGDQIVQQPVQIRPHSLPRHQVPFVDAPAFRLGGNETPAERVESSRSAAKADRRLSRRPGPGSNNRAILRKMTKRVKRAFKYRFYPTPEQADLLNRTFGCVRKVYNLALETRTTAWHQRQERVNYNATSAMLTAWKKSAELAFLNEVSSVPLQQVLRHLQSAFNAFFDKRAGYPRFKSRHRSRASAEFTPSAFRWSDDGRLTLAKMTEPLRILWSRPLPEGQEPSTVTVSRDSAGRWWVSLLCQDTPVPMPATTAVVGIDAGLEHLVALSTGEKVANPRHERADRSRLSKAQRELARKEKGSANRAKARLRVARIHARIADRRRDALHKLSTRLVRENQTLVIEDLSVRNMVGNHRLARAISDAAWRELRSMLEYKADWYSRDLVVIDRWFPSSKACSACGALAEKMPLNVRAWTCPCGAVHDRDVNAARNLLAAGLAVTACGAGVRPQRDSSRTGRSAVKQEHPRATKGVPVLEDGEDVKMTVPFP

SEQ ID NO: 29405 - protein, 421 aa, unknown
  TnpB Polypeptide
MFRLCSKIRLYPTAAQETILFETLATCCDVYNSLLNWREVAWVTERKCVSRYEQQAALPVWKKQIDAEGNLLHPELRSVFSQVLQDVVHRVDLAYSTFFKRLADRKAKGLIKEGKKSPGKPRNKGYGHYDSFTYTQLGFTAGEASITLSKIGEIRAIVHRTIEGDLKTCTIRRYGQKWYACLCYEVETQPLPQSQEQVGIDVGLEKFAACSNGELIANPRFYRQEQKALAKAQRKLSKKKRGTRAHRKARKVVGRIHERIRNRRYDFVHKLARQLVNRYGLIAVEKLDEKNMMARPEPKSDEVPPRQFLQKGAAVKSSRNKSIGDAAWCFFRRVLLEKAARAARQVVEINPAYTSQDCSRCGYRPEKEHRKQLSDRRHNCPICGLHLDRDINATINILKAALQILEINTAVGQHCLASLSA

SEQ ID NO: 29406 - protein, 409 aa, unknown
  TnpB Polypeptide
MMSNELILCERHVIKKSHPFYDECDNLTFLAKNLYNATLYYQRESFFNKDFKNYYDVNRVFTHGNQKDYRALPSKVSKQVQMLVDKSFKSYFALVKKKVNDDYSKSVRIPRYLGKTSGRCIVPYPKDALSLKNDGFVKLSKTSIVIKTNIDKRNIQGARIVPKGNHYVIEILYKKTCQPLKSETPTRVAFIDPGLNNLLTVTSNCFNPLIYNGKPLKAINQLSNKTITALNSKLSERGLRTSSLLQSVYSKRSRRLTDLTHKITTELVNQLDSYNIDTVIFGHNIGQKQDINLGKVTNQNFVQIPFTQLMKQLQYKCELRGIRFIETEESYTSKCSFLDGESICKHSTYQGKRLKRGLFQTSTRKLINADVNGSLNIGRKYLTKMNMYTKELHVDLVKFMVNPKVITIK

SEQ ID NO: 29407 - protein, 260 aa, Paenibacillus sp.
MHRAYKFRLYPNKKQAALINKTIGCSRFVFNHFLARRKDAYEQEKKTLNYHECSAMLTQLKKEIEWLQEVDSTALQSALKDLDSSYKKFFKEKKGYPKFKSKLAKWQRIHSRRQKGGKNRYKARLKVACLHEKIANTRNDFLHKLSTKLINENQVICLEDLQVENMLKNHKLAKSIADASWSMFRTMLEYKTEWYGRTISIVGKQFPSSQLCSTPNCGYRNKDVKNLNLREWNCPKCGAKHDRDENAAINIEQEGLRLLA

SEQ ID NO: 29408 - protein, 437 aa, Blautia sp.
MQIISSYGVELRKQNIPICQTLEIYRFAVSYLIGIYVQVWEELAEIPDAKRRFNAAEHLVHTTKKNHACFDFDIRFPKMPSYLRRSAIQHALGTVSSYKTRLDLWEKTDGKSGKPKLVYENHAMPVFYRDVMYREGAEGKDEAYLKLYDGHDWKWSCVRLDHTDMEYLRKCWSGKKASAPTLEKRHQKYFLRFSYKEEVTLTKTPVKEQIICSVDLGINTDAVCTIMRADGTVLGRRFIDHPSYRTLGRIRRFQREHGSAQTQGRWAYTKRLNTELGKKTAGAIVRYAEENHADVIVFEYLEMQGKISGKKKQKLHLWRKRDIQKCCEHQAHRKGMRVSRICAWNTSRLAYDGSGTVTRDRENYSLCTFQTGKRYNCDLSASYNIGARYFIRELLKPLPATERSLLEAKVPPLKRRTSCVYADLRKLHSEMERLKAA

SEQ ID NO: 29409 - protein, 448 aa, unknown
  TnpB Polypeptide
MPNLERTLVRQFEMPNETDRAALDRMCSSYGFVASKFLFAFQTRELRSEVKDFRAFRNRLVTALSRKSVEFNQKLAGLRANGKTAEATLLTLLRELKETSGPHLQARHLKLALEETSKMALTHWKSVIAESKKELADTLKRFHDQDRHYAYWLLCGINRQFFELLDGRIPVPNPEVSFDRNYCLSYERPLSLKTLRCIAGIVRRTVNRVRRNSVCYPRTKTFHNRIDFDSSCYTVRSAEDAQLLELMSLQPGKRISLRLKGKSKIRGTLQLLRDTAGTYSLRVYVPQQCEERRKTGKVVGIDLGYTEMMATSEQELLGTDLGKYFSAIADKRGKNSEGRNRMHALFRSLLKKTSKDNLAKAERIRKHNLGRKKQRARYIRDIGVIKTVVNRELNFLFTRKTNPVKAIVVEDLSARMKAHFGKKWNRRLSGWMRGYLQERIRYKAKNME

SEQ ID NO: 29410 - protein, 447 aa, unknown
  TnpB Polypeptide
MKRKFTVVTELRKSQNMKLIAYLDLCFADYGKAKRETFHKIKNSNCFDKSEHNTFLQMKYDVLKRTANSVISDAQMTFNSVKELKKTEKKKWERKIPAMEKKIEKLEGTLEEKKALLRQGKRVSLRSYQNMKRQLVRMKKDLNKWNQKVGYLGYQIETNKFKVCFGTKVLLKKDKKAFIAQRDSQLSFVGCKTESACNNLFQLTYNNRVNQFQIQLRKDWGGHKKSKDKYVYGKCHFSYYKNKIIEILKTHSSPLSYKVIRKNGRYFLHCTFEMEVKSEEILTRKNNGVIGLDFNKGFVTLSETNEYGHLIQTDKLYYRFGQNQKTRTDLEQIASKVKNLALETGKDIVVEGLDFWSTKAKTIAKQGKRGRKYNHMLHSLAYAKFVSIVDNCCYRNYINLIKVNPAWTSWIASHKYCNLMKLNVHTGASYVIARRGQGFYDHVNTAA

SEQ ID NO: 29411 - protein, 298 aa, unknown
  TnpB Polypeptide
LQSGTARSSATHRGASDPSPLSRGRLSSSCGRRRRSRMSLKGRSPWTRTKTLLDGVQASGDSAGLLRVPFEGVRRIQEIHFRRRRKIARKKAHDRRVARRLHNREGRRERHRVHHRLHRVSKGLVRLATEAWAAIVLEDLTLQGAGGRSRKMNRRLSSWPRSEIHREIEYKAALAGVPVIKVNPAWTSKTCPVCGARRRDRVGKDFVCLVCDWEMDRQINAGMNILKTALASNEALARAVRFQPGALRHDVVIPLYDLLREGGGAREEPSGVESAVARRLRKAAARQNHSLLEPSSAT

SEQ ID NO: 29412 - protein, 397 aa, Streptomyces sp.
LIRAYKFLLYPTMRQTQALGEMLRDHCSLYNGALEERRSAYRHASRTTVRYGQQSGQLKDIRALDPERQGRWSFSSQQATLRRLDKAFAAFFRRIKSGEAPGYPRFRGVRRFDTVDFPKDGDGCRWDSTPHDPQTRVRFQGVGHVKVKQHRPVAGKVKTVSVKREGRRWYVILTADQAPPEPLPATGAVVGIDLGIASFLTTSDGRHVDNPRHSRNAAKKLEAAQQALARSKRGSKRRRKAVERVATLHRKVRRQRLDHAHKTALGLVRDNDLIAHEDLKIRNMSKAPEPRPNGDGTYAPNGAAAKAGLNRSIADAGWGVFLAILAAKAEGAGREVIAVDPRNTSRTCPECGHVAKENRPTQEKFHCQACGHTAHADVVGASNVLRAGLARRQAQPA

SEQ ID NO: 29413 - protein, 398 aa, Streptomyces sp.
VRRAFKYRFYPTDAQAAELSRTFGCVRKVYNMALAARTQAWTLRAERVNYNATSAMLTAWKKTEELAYLNEVSSVPLQQSLRHLQTAFTNFFGKQAGYPRFKNRKKSRRSAEYTSSAFRFREGRLTLAKMSVPLAIVWSRPLPEGAMPSTVTVSQDPAGRWFVSLLCEDAITLAPATADAVGIDAGVTSLVTLSTGEKITNPKHERRERARLARAQRELSRKAKGSANRAKARREVARVHARIADRRRDFLHKLTTRLVRENQTVAIEDLTVRNLLKNGKLARAISDASWTQFRSMLEYKCAWYGRELVVVDRWFPSSKLCGTCGAVRGELPLNVREWTCGCGTVHDRDVNAARNILAAGLAVSACGAGVRPQRESSRTGQSAMNQEPLRATAGIPRL

SEQ ID NO: 29414 - protein, 446 aa, unknown
  TnpB Polypeptide
VLRDLLDACAALWNEINYQRLMRYNDEDGFEGDVWDADTGAFEGKYKGVLGASTAQTVRRANTEAWRGFFKNKKAYHDESNTSVTEHPDPPGFRGNEDDGRVLKGVVRKDAYSVEWSDRSRLEMVVGEELRARHNSPKSRLRLEIVGDPNWPDYEDQGRLELWYDETDSTFRASQPVTVSADAQATPLADHKAALDIGANNLVACTTTTGEQYLYEGRELFRRFRDTTREIARLQSKLPDGQYSSKRIRRLYRTRTRRRDHAQEALCRDLLKRLYAEGVDTVYIGGLTDVLETYWSVETNAKTHNFWAFKQFTERLACTAEEYGISVEVRSEAWTSQKCPQCGSTERTTRHQDTLTCPCGFEGHADLTASETFLKRHTEQTVRPMARPVSSEIEDFRDAENAQRFPARFEWDDHTWSESPRSHRPNEQRTDPSTVHRDGNVASGDS

SEQ ID NO: 29415 - protein, 315 aa, unknown
  TnpB Polypeptide
LEVTERVPEYDVFAVGFELKNTSGRHATLWLSKIGDIPIRYHREIPDEADIKEVTVKKETTGDWFVSFGLETDETDLPEKPDVDSLNVNNSVGIDLGILNYIHTSNGKTVDWLDLEDEYERLRREQRKLSHKEQGSNNYEKQRREVAKVNRHIRRKVLDYQHKITTWLVREYDAVFVEDLNVEGMLKQSHNAQNKQDAAWRQFITLLEYKADLYGCHVKQVEARGTTTECASCGVETAKPIWVREHSCPSCGFECDRDANAAMNVLQRGFSELGLEWPESTPVETALPTDTTSVSAKRVIETGSPTLNEATTVAE

SEQ ID NO: 29416 - protein, 387 aa, unknown
  TnpB Polypeptide
MRKLLKSFKTEINPTEEQKAKIRKTIGTCRYIYNFYLAHNKELYNKGEKFMSSNQFRVWLNNEYLPKHPECFWIKEAYSKAVTQAVNNGQAAFTRFFKHQSSFPRFKKKNRSDVKMYFVKNNPKDCRCQRHRINIPSLGWVRIKEKGYIPTTKDGYVIKSGHVSIKAGRYYVSALVEIPNNKIANSSNEGIGVDLGIKDFAVVSNGKVYKNINRSARLKKLEKQLIREQRSLSRRYENLKKGESTQKANIQKQRLKVQKLHHRIDNIRTDHINKTIAEIVKTKPSYITIEDLNISGMMKNRYLSKAVASQKFYEFRIKLQAKCNENGIELRVVDRWYPSSKTCHCCGAIKKDLKLSDRIFKCDCGYTEDRDLNAALNLRDAMTYEVA

SEQ ID NO: 29417 - protein, 389 aa, unknown
  TnpB Polypeptide
MQRVEKHIVKTNDYKELAIKSKELYNQTLYYLRQMLFKKIEWCGEYDLTKLYAEFDEEVYRNLPIQTSQQIVKLCFKNWKSWLKALKEYERNPAKFEGKPRIPKYKKELSVIIFTNQQVKLKDNLIHFPKFLNLKPISTGVSNIAQVRILPRSNHFVVEVVYNVPDVELLKDNNRYLGIDIGLGNLAACVSNVTNAFIVNGKPLKSINQYFNKHKAIAMSYIGGKGVSNRTERLAFKRNNKIQDYLHKSSRIIINKCIKDNINTIIIGKNKQWKTNINIGKRNNQSFVSVPFSTLIEQIKYKAEDVGINVKITEESYTSKCSALDLEQIKKHLNYLGKRIKRGLFKTATGLLINADINSGLNILRKEVGDAFMPADRGLVLNPIRINIF

SEQ ID NO: 29418 - protein, 369 aa, unknown
  TnpB Polypeptide
MLKTVSLKLKSTEEQALALSELQSAYSDACNSIVPVVVENRCWNRIALHNLAYSDLREKTSLGSQMCCNAIFSVCKAYKSQKALRKIKKDFVPEINFGRTSVHFDKRTYSFKGNYLSLYTLTRRIKVEWIAGKHQMTLLQNGFPKEAELIFKNGNWFFNLILEFPESEPVKSEIVLGVDVGENNLAATSTGKLFGGGNLRHRRDEHLSFRSRLQSNGSQSAKQTLRQVSGKEQRRVKHTNHEVSKAIVLEAQEVGAGKIVLEDLTNIRENIKAGKRVRTRLHRWAFRQLQTFVEYKARAVGIAVEYVNPAYTSQTCSLCGSLGIRNKHLFTCSCGFRAHSDVNASQNLSRIGRPIGLPMAEVDQPNVAA

SEQ ID NO: 29419 - protein, 472 aa, unknown
  TnpB Polypeptide
MRKQRRKRAKKGEQQQITKAVTHIPLMETNPGKLAILDRLAHVFLALTQQYVTLFCTEKMPDAFSAPCFVSELSERWHRVAIQQAAGIAKSWRTNREAAHQSYGDELAEYCEQKADGTLPEEAQEPKWREWNVPTLREICIQANANVVKLQPSEDSSFDYWLQISTLEFRKQLFVPVKLAEYHLKALTDPETGQRRPINSSVTLNKRNGSWWLTLSYDEVVAVTTPPDAPVIGIDVGIANFITTSDGKQYGTFHAKLRQRQKRDREKRRRKAKLRACLQKKGVPNDKLPSTTSRAGQRLARQVKQSINRAVNLCYEEHEGYQFAYEQLSVASMRFKARAQNAYLRASQLGQIPAQIAWNAKKRGMSATRVKSAYSSQECSRCHYVDRANRPNQQTFCCVVCSFSCHADKNASINIASRLHDEELQACKNRAEVKALLLRRHEQWKQKNSLVVVQAPIQLDLWACSEISTDVG

SEQ ID NO: 29420 - protein, 412 aa, Oscillatoriales sp.
MLHKAVQVRLYPSKDQEILLAQTFGCARWWWNYALNKSIDVYKETGKGLGQVALNALLPKLKKAEDTLWLANCYSQVLQATTLNLTTAYKNFFEKRAGFPKFKSKHGKQSIQYPQNVKIVDGNIKMPGNIGIVKAKIHRAVEGKIKTVTVSKTPSGKYLASILIEREGENPTTVSEGNIYGIDLGINHFAVVADGKKVSKYDNPRHLAKHEKNLKRKQKKLAHKQKGSKSRQKYRKVVAKVYERISNSRQDFLHKLSHKLVSDSQVVIIENLHVKGMVRNHKLAKAISDCGWGTFTNFLAYKLERKGAKLVEIDRWFPSSKLCSNCFCQASEMPLDVREWTCHHCGTRHDRDGNAATNIRAEGLRMLKTDGSAVSAVGGEVRPKGGRKSVLRHSPVITEAPALCLVLQVSGE

SEQ ID NO: 29421 - protein, 450 aa, Acetitomaculum sp.
  misc_feature (24)..(143): Xaa can be any naturally occurring amino acid
LSILLKYSPIFFCSSYDDTAVSTXXXXXXXXXXXXXXXXXXXXXXXXXXXXXXXXXXXXXXXXXXXXXXXXXXXXXXXXXXXXXXXXXXXXXXXXXXXXXXXXXXXXXXXXXXXXXXXXXXXXXXXXXXXXXXXXXXXXXXXXTSRWICRQPSVIRLANLVRRITDFLNSNLLNIVVNLILRNNQKGTIAIIDNSFIKLPKVGNIKAVIHRIPASNWIIKSATVSQESDGKYYISILFEFADVVNPYVADKTNAIGLDYASDGLYVDNNGNVGTNHKYYRESHDKLAKAQRRLSRMQGSKKHETKSNNYIKQLRKVNKIHRHIANQRLDNLHKISTEIANQYDVVCVESLNMRSMANRGFGNGKATLDNGYGMFLSMLEYKLSDRNKYLVKVSKWFPSSQICHCCGSLHPEMKNLQIRKMTCDCGLTVSRDQNAAINILNEGLRLLTEVA

SEQ ID NO: 29422 - protein, 372 aa, unknown
  TnpB Polypeptide
MKLSETVKLYPSKYQSNLIKATMQEYISCVNSLVSDAVKGKPLSNITTANVNADLPAALINQCIRDAKSIVKKHYKSCHNTVLKNRKFSGKIKAVSPTLPILKKMCCYINNQNFKIKDNNIIFSVMINGKTTRISIKTKMSDEQKNIFQSYKLGTLRIVMKNNHIVAQVVYESEEPLLFNDGNIMGIDLGIKCPAVSYCTDESVKFYGNGRKNKYMRRHYAYLRKKLQKGKKIKAVKRINDKEQRIMKDIDHKISNEIIKTAVNKNVSVIKLEQLNNIRSTTRKSRKNNHSLHTWSFYRLAQFIKYKAKLAGIKVEYVNPAYTSQTCPICGHVHHANDRNYTCTCGYHIHRDLLGAINICNSTEYVGNRHTA

SEQ ID NO: 29423 - protein, 301 aa, Salmonella sp.
MLRATKVRIYPTPEQTEYLNAQFGAVRFAYNKALHIKKHAYQRHGVNLNPRKDLKPLLAVAKKSRRYGWLKEYDSIALQQAVINLDVAFSNFFNPKLKARFPAFKRKHGKQSSYHCVGVKVLDGAVKIPKISAIEARLHREITGSLKSITITRSATGKYYASLLCDDGIDAPAKPTLVSTVTGLDMGLSHYAIKSDGDKVANPRHLINASRNLRRKQKALSRKKKGSANRRKSRIQLAGVHERVANARADFQHKLSRTIVDENQAVIVETLKSANMMKNHHLARAIGDACISACLTHKFTL

SEQ ID NO: 29424 - protein, 413 aa, Saccharopolyspora sp.
LVKRAYKYRFYPTETQRRELSRTFGCVRKVYNLALEVRARAWSTEGRRVSYGETSAMLAEWKKTGELSFLTEVSSVPLQQCLRHLQAAFAAFFDKRARYPRFKSRKKSRVSAEFTRSGFRYRGGRLYLAKLSEPLNIVWSRPLPENAAPSTVTVSRDSAGRWFVSILVETGVAQHPPARSAIGLDVGITSLVTLSTGEKIANPGHESRERHRLARAQRDLARKQYGSANWEKARRKVAHLHARIADRRKDHLHKVTTRLVRDNQVVVIEDLSVRAMVRNRKLARAISDAAWSQLRSMLEYKCRWYGRELVVIDRWFPSSKTCSMCGCSAANLRLNIREWTCEGCGETHDRDVNAAKNILAAGLAVSACGAGVRPQRESSRTGQPAVKQELSGVNWKEIPAPERGVVNRSSISC

SEQ ID NO: 29425 - protein, 400 aa, Microbispora sp.
MRTAYKVRIYPTHEQAAVLNRTFGCVRLVWNTVLAWRHARYRTEGVTTSYAQSDRYLTELKRDGGHDFLYEISSVPLQQALRHQYTAFANFFAGRARYPRFKSRHGRQSATYTRSAFRWRDGRLWLAKMDEPLELVWSWAKIDLATLDPTTVTISRDPDGRWYACLAVETEAEPEPVPAAGSAVGVDLGVKDFAVTSVGQRIANPRHLERRAHNLARYQRRMARKQRGSNNRAKAKAKVARAHTKVRDARADFLHKTTSRLVRDHDLIVIEDLNVKGMVRNRHLARVISDCGWGEFRRQLEYKTRRYGRHLIVVDRWYPSSKTCSACGHLLAELSLSTRHWTCPDCGTRHDRDVNAAKNILAAGRAVSACGADVSHSGSSRVRSAVKQEAQPVRAGIPRL

SEQ ID NO: 29426 - protein, 372 aa, unknown
  TnpB Polypeptide
MEFLEATSGCARFVWNEFLAANKRFYEHSKKFHFYHDMSALLTEIKTLEGYEFLKEVPKSALQYSIKNLDLSLRNSFKKASGFPRFKKKSYEQSFTLTRGQFQIKKGKLQIANLKIDKKHSLIKIRWSRELPSEASSLTIIKDNLNHYYASFVVECSEPTAQSSPQNDCIGLDLGIESFVTTSGGQKHKAPNYKRLLLKARHLQSRLSRKKKKSKNRERARQNLAKIHKKISRVREDFLNKLVSLLVRENQAISIETLKVKEMLKNKHLARAIALQGWSLFIAKLKSKSEEYRREIFEVGTYVPTSQVCSSCDFRWGKLNLNIRSLECDNCHALHDRDVNAAKNILNEYFKSKQTAGHAAALNNACGAKSST

SEQ ID NO: 29427 - protein, 344 aa, Calothrix sp.
LDVAYKNFFDGRGFPKFKNRSNFTSFTYVIGVKVQGNKIYLPKLGWMRFFNSRPIPDGFKIKAATIRKRQDGWYVSLRIEDRAVPDYIVKPFTEVNNIIGCDLGITKLVHLSDGYQIENPKFATNKKTKVTLKIRQRRVNRKAKGSKNRKKAATNVGKFHKKIADKRDCYQWYVANKIVSRNVDAIAIEDLNVSAMKRRCKPKVDEESGRFLKNGQSRKKGLNRSIFDASWGELVLKIDYLAAKHGKVVLKVSPKYTSQKCQNCGHVDASNRDGEKFICTQCGHFDHADINAAKNIRDRAYSIVRVDCPELKRPKQCKELSARPRGNRVEPGNPSNRDIKSVMS

SEQ ID NO: 29428 - protein, 389 aa, unknown
  TnpB Polypeptide
MLKTYKYRLYPDDNQKDFFSRQFGCCRFVYNWGLELKTKSWQADKKGISIYEIANKLPELKKENPWLTEVCSQPLQQSLFHLEKGFTSFFRKKTRYPRFKSKWDKQAAAFPQHVSVEFSSGTMLFPKIGRIRAVFSRTFSGTVKTVTVTKTPTGKYFASVLVEDESQVPNPVSETEERAVGVDLGLKDFLTLSTGEKVKNPKYLDKALKRLACLQQRLSRKKKGSSNRNKARLAVALCHEKIVNRRMDFLHKLSTRLVREFDTLCFEDLHVSGMIQNRHLSRAIGQVGWGIFVRLCETKATASGKHVRKIGRFEPSSKLCSCGYINSRLKLSERVWTCPACGQTHDRDVLAATNIKRMAFATQNTLADGEGGPVERPVNKRARRSREAS

SEQ ID NO: 29429 - protein, 470 aa, unknown
  TnpB Polypeptide
MHMIVFAVHFNKGSLKIIANIREDISQAIKSIPVKYTFSILGNKDKMNMHLKNAVSSMSNFLAHIHRPKYNICMIRLQAYKYRLKTNEAQEGQLKRFAGCCRFVWNKALTLQKQLLDNKEKRLTYNKIALLLPQWKQEHVFLKEVHSQILQQSLMNLDRAIKDAFNKSSPKRFPKFKKKGIHDSFRYPQGFKLNDNVVYLPKVGWIPFYKSRGIVGTIRNVTVSRNGKHWFVSIQTEQEVSDPVHASDSAVGIDMGVKRFATLSDGTIYEPLKSFKKLEKKLAREQRKLSRKVKRSSNWKKQKQKIACIHKRIADTRNDYLHKTSTAISKNHALVVLEDLKVVNMSASAKGTVNNPGRNVRAKSGLNKAILDQGWSGFRRMLEYKMIWAGGRIIVVPPQYTSQECPLCHNISPDNRKTQETFKCISCSYTNNADLVAAINILAAGLAVSACGEAVHQDFSRKQEPAWAVA

SEQ ID NO: 29430 - protein, 442 aa, unknown
  TnpB Polypeptide
MKPRKFTIVAQLHKKQNHNLIEYINSCFATYGKAKRETFHVIKHDADLNKSAFNTHLQNKYGILKRTANSIISNAQGTLNALMALKQHEKSQLKCKISSLKTMIDKLEIKVADNKTLLRLNDKSVSLATHHNLKRKLVSKKNQLNHKKQKLENLNYQIKYGVYKLCFGTKYLLKRDYNKFIEHRDSQLSFVGAKDETAGNQLLQLSYNHQNNQFDIKLRKDIGGFKDQRGSYVMGKVHFNHHKKELILILNNRNSPLSYKIIKKDGRYYLYCTFEIQRDESSFVTRSSNGVIGLDFNKGFVTLTETNQYGHMVNTDLIRYRFKQGAATQTDLEHVATVVKERALVTGKDVIIENLNFKDTKAKTVSKEEKRYNELLHSLAYRKFVDVMENVCYRNYIWLRKVNPAWTSWIAKQKYCPNMKLNIHTGASFVIARRGQGYTDNI

SEQ ID NO: 29431 - protein, 284 aa, unknown
  TnpB Polypeptide
MAIRHKSYKFRLYPTEKQMMMFEKTFGCSRFIWNQILADKIQYYKETGKMLNNTPARYKKDYPWLKEVDSLALCNVQLNLQKAYKSFFQSGFGFPNFKSKKKRHSQSYQTNNNNNNIVVCDGKVKLPKIGWVRFKQHRKMTGLIKGATISKTATGKYYISILCETDIQPYPKTNSSVGIDLGLSHFSILSTGEKIENPRFLISSSKKLRREQKILSRRALVAKRLGRSLIDCSNYQKQRLKVARLHEKISNQRRDFLAKLSTNLIKNHDRICMEDLASRKVAIS

SEQ ID NO: 29432 - protein, 312 aa, Halophilic sp.
MNYNYRYRLNPSDDIRERLAWTVDTCRQVYNHFLHRFNRHDDTSAYSEQKRLPDLKDWWTDLQDVHSKVLQKAVQRLYDNLSTLKARKENGYNVGELKWKAPGEYQSFTYSQSGFKLKNTSGQTRLWLSKIGDIPIMFHRDLPDDATLKTVTVKREPTGTWYAILGVETSDDPPEKPEKVTDAVGIDVGILKHVHDSNGTAVESPDLSDERERLERAQRNLSRKEHGSNNWEEQRKTVARRHADLKRKRRDFLHKLSAYYAREYDLVAVEDLDAKGLVELPGNSRNRAGASWGTFLRMLEYKCEREERTLSP

SEQ ID NO: 29433 - protein, 313 aa, Halophilic sp.
MHYNYKYRLDPPEALTETLLHHVDTCRQLYNHVLYKLNEADEIPARYKVQGTLPDLKSWWDDLNNVHSKVVQMVVKRVYDNLSTLKSQKENGRAVGMLNWKPPREYRSLTYNQSGFQLKNTSGRPVLWLSKIGEIPIRLHRDIPEDASIKQVTVKQEPTGEWFATFGIDVDENTPEKPKNPEQVVGIDVGILKYAHDTDGTAVESPDFSDERDRLERGQRKLSRKEHGSNSWEKQRKTVARRYADLKRKRRDFLHKLSNYYAREYELVAVEDLDAKGLVELPGNSRNRAGASWGTFLRMLEYKCEREERTLSP

SEQ ID NO: 29434 - protein, 263 aa, unknown
  TnpB Polypeptide
MRETLRFTGKIMSATVSRVADQWFVSITVDTPDSLPLLQAENQGAVGVDLGVSALATLSTGETIAGPKAHKTLLCRLQRLSRGLSRKVKGSANREKAKVKLSKLHARIGNIRQDGLHQLTTDLTRRFHTIGIEDLNVRGMVKNRHLSRAVADMGFFEFRRQLDYKAAQRGGMIVVADRWYPSSKTCSGCGHKLDTLPLSVRKWTCPVCGLVHDRDVNAAINLKNLAVSSTVSACGEEGAGLGRKLKTKPASVKQESSSKATYG

SEQ ID NO: 29435 - protein, 315 aa, unknown
  TnpB Polypeptide
MGKNLSVTPARYKSEFPWLKEVDSLALCNAQMHHFFHDVSVGFPKFRSKKKPVKSYTTNCVNGNTVLQNGRLKLPKAGWVRIRQHRKIEEGYQLKGATITQEADERYYVALLYSCEEPVNEIRKAESAIGLDFSMKELYVDSNGNRAAYPHFFSKAQKKLAREQRKLSRCVKESRNYVRQKKKVARCHEKIRNQRRDYLHKLSRRITDQYDIVAVEDIDMKAMSQCMHFGKSVMDNGYGKFRELLEYKLTWRGKKLVRVDRFFPSSKKCCKCGSVKKELKLSDRVYFCTCGNRIDRDLNAAINIREEARRMLLAG

SEQ ID NO: 29436 - protein, 417 aa, Halobacteriales sp.
MEYSHRYHAYPTQELAETVEYHIDVHRQAYNFTRYEYTNHNDADDVGSAYKHHDRLTDWKDEFPVFTKVHSKALQRTVTRFYQNLSNLSQKKQNGHKVGMLKWKSPREFQSITYSQSGFELKNTSGRRATLWLSKIGEIPIRYHREIPAEASIKEVTIKKETTGEWFVSFGLETDEADLPEKPDVDALNMNNSVGIDLGILNYIHTSDGNSVDWLDLGDEYEQLRREQRNLSRKEHGSNNYEKQRLTVAKIKRHIRRKVLDYQHKLTTWLVREYDAVFVEDLDVKGMLEQSHNARSKQDAAWRRFITLLEYKAELYGTYVVQVEARGTTKECASCGVETAKPIWVREHSCPSCGFECDRDANAAMNVLQRGFAELGLGWPENTPVETVLPTDSHSVSAKRVIETGSPSLNEATAVAE

SEQ ID NO: 29437 - protein, 388 aa, unknown
  TnpB Polypeptide
VILTYRHRLLPLKSQHRALERLCAAQRELYNAALEERIDCYRKTGKTRSYIDQCKALTECRHELPDMGELPANLQRWTLKRMDDAFQGFFRRVKAHNGKAGFPRFRGKGRWEAFGFNEFSGIRFDGKRLRFAGMPGGLKVHLHRELPKDADIRSCVFRQDDSGWFICLQIAVPTPEKRAIATVIGVDLGLTVFAYCSDNVEIPNPRIARRAEKELRRRQRALSRCQRGSHRRHKVRMQVARVHRKIANTRNSCLHKESAGLVKRADLIVVEDLKVANMIRHPTLARSIADASWSRFVSMLDYKVEKTGGHLTRVNPRNTSQECSRCHKLVPKSLAVRTHKCPHCGLVIHRDHNGSLNIRRAGIGARALNVIGRDERAPGNILLAPARE

SEQ ID NO: 29438 - protein, 462 aa, Halococcus sp.
  misc_feature (88)..(88): Xaa can be any naturally occurring amino acid
MLADYDRLFMANRIVTRTHRASIRNQRQVCDGLDELGFAAAKLWNVARWTAGRVWDSCGQIPDDSVLKSYLKSHERYADLNAQSSQAXCGQIPDDSVLKSYLKSHERYADLNAQSSQATLEELAEAFKSWYGHRNNGNQKANPPGYRKNGDEHPRSTVTFKEDGFKHDEKNGYIRLSKGRNTKAHWSDFILCAYEADPDVEIENVQQVRAVFEHGEWRLHIVCKHDIEVESPGNSVAGVDLGICNVAAVSFGDESLLYPGGALKEDEYYFAKKRAECDSSTSREARRLDQKCTDRRTHFLHVLSKAIVAECVERSVGTIVVGDLASIREDDETGEARNWGDHGNLDLHGWAFDRFETMLEYKGEAEGIEVEPVSERDTSKSCSVCSRCDDSQRVERGLYICDECGLVANADTNGAENIRQKVLPNPRREDRDNGWMAQPAVHLFDRREGTFVPREQEPNREP

SEQ ID NO: 29439 - protein, 362 aa, unknown
  TnpB Polypeptide
VKLVAAIKLLPSPEKADTLRATLRRCNEAATWLAATGFDAGKFRQFDLQKIAYYDLRERFGLTAQVAIRTIAKVADAFKVNRRAAPVFRLDAAQPYDDRIIRFVEGGTAVSIWTVEGRIVVDLVMGEHQRRLMAYRKGEVDLCFVRGKWYLAATCDVPEIEAFDPKDWLGVDLGLVNIAADSDGMLHSGADIERVRSRLARRKAGLQGRGTKAAKRRLCKLAGREARFRKHVNHEISKVLVATAERTGRGIALEELTHIRRRVTARRGQRARLHSWSFAQLRAFVSYKAKRAGVPVLFVDPRYTSQACSRCGCIDRKNRPDQATFLCTSCGHADAADLNAARVIRARAKVTSPECSQAALAA

SEQ ID NO: 29440 - protein, 198 aa, unknown
  TnpB Polypeptide
VLRLAKMTAPLRYVWSWPDVDVTALDPAMVIVAREPDGRWYVTRADFLHRASTRLVRQNDLIVIEDLAVKNMVRNRPLARAISDCGWGEFRRQLEYKCQRYGRQLVVIDRWYPSSKTCSACGHLLAELSLSTRHWACPNCGTRHDRDLNAAKNILAAGQAVTACGADIRHSGTPGVRSAVKQETRPARAGIPVLQGGE

SEQ ID NO: 29441 - protein, 483 aa, unknown
  TnpB Polypeptide
VLKGKSARNVNMKQKHQRKRPKSGEPQRITKAITHIRLLEANAGKLAALDTLAPVYLALCQHYVTLFCTAEQPNKLRDPLFHTPLSERWHRVAIMQAAGIARAFRSNRSAAYQQYQADLEQYQKRAADGTVATESKEPQWREWTLPTLREPCIQANVNVVKLETSQESSFDYWLTVSTLEKGQPIAVPVKLADYHKEQLTDAKTHQRKKLNSGVQLNKRDGVWWLTLSYDEEVQVETAPDAPVVGIDVGIAHFVTTSTGKHYGSFHKDLRARHKRDRAKRRRKAKLRACLKKKGRQKLPSTSSRTGQRLIRHVKQAINRAVNQCFTDPEHQGVQFAYEQLSVASMRFKARAQNAYLRASNLGHIPQQIRWNSQKRGVQATPVISAYSSQECSVCHYTDRKNRPDQRTFRCQVCGFEAHADHNAAVNLSRRVGDRQLRACRDRTAIKAVLMTRHEAWKQQQGMGNIRPVKRRKRGKSSASRVPA

SEQ ID NO: 29442 - protein, 374 aa, Halomonas sp.
MTKRAYKERFYPTSEQAVLLAQSFGCARFVWNNTLTYRTEAYQQHGESISPSAVEKRLVALKAEYPWLADVSSVILQQTLRDQKAAFDNFFNPKLRARYPRFKRKDGRQSIRLTKAAFRYRDGEITIAKTKTPLPIRWSRPLPSEPSTITISRDRAGRYFISCLCDFTPDVLPVTPKMTGIDLGLTDLFITSEGIKSGNPRHLKRYEAKLAYLQRRLAKKQKGSNNRNKLRQKVARRHAKIADCRRDAIHKATRTLVNENQVLCVESLNITGMIKNRSLAKAISDAGWGEFLRQLVYKAEWAGRQLVKVSQWLPSSKMCHGCGHKVEKLPLSRRHWHCASCGQALDRDINAARNIRTAGLAGLACGATGAGAAA

SEQ ID NO: 29443 - protein, 418 aa, unknown
  TnpB Polypeptide
MYRTQSNVIRSLSKEEYKMLREMCQYSNNLYNVALYNIRQYFFQEKKFLRYEENYHECKVNENYRLLQAGVSQQILKVVDRSFKSFFRLIKKAKSGEYSFKDINLPHYREKGGLFNLILSTNAISIKNGFLTIPMSREFSKAHSGKKIRVPFPSRLEGKAIKEVRICPDRRGTHFRIQYCYEQEKEPADVDQKKVLSIDIGLENLASCITNTGTSFIMDGRKLKSINQYWNKRKARLQSIVAKQGLNTTKQIIQLTRKRNNRAKDYIRKTARYIIDYCINQKIGTVICGYNKEFKQCVNLGKVTNQQFAQISFGSLRETLANLCERYGIQYIEQEESYTSKASCLDLDDIPIYMQEQPFTGEFSGKRIKRGLYRFSDGRIANADINGAANILRKSKQNFNFEELCKGLLASPLRIRLS

SEQ ID NO: 29444 - protein, 393 aa, unknown
  TnpB Polypeptide
MFISYKTEIKPTVEQSNKILQSIGICRWLYNEYIAYNNRRYKMYQRGMLDEHQKRFISGYDFNKYVNNVLKKKEGLEWISLCGSKARTRAIINAETAFKKFFSGKSKFTRFKKKTKQDVKIYFPKDHATDWTIERHRVKIPTLGFVRIKEFGYLPVDGKVVSGIVSHKAGRFYVSVLVDIPESRYAKPQNEPFGIDLGLKDLVILSDGIKYKNINKTATIKRLEKKLKREQRHLSRKLENKKKGGEKSTIYFANISKNILKVQKLYHRLTSIRTNYINQVINDIVKREPSYIVIEDLNVSGMMKNRHLAKAIAGCKFYEFRTNLIAKCHERGIEIRIANRFYPSSKICHACGHVKHDLKLSERTYVCSECGNVIDRDYQAALNLRDVKEYEVA

SEQ ID NO: 29445 - protein, 262 aa, Planktothrix sp.
MNSTLKLDNLVPNEPGLLFPIFTRTAKSQFLVKKDIPNSRKTLDVGLKEYYTDSNGIMVENPKFLRQGEKVLKRSQRRISRKVKGSKNRGKARQILGKHHLKISRQRKDHAVKLARCVVQSNDLIAYEDLRVKNLVKNHCLAKSINDASWYQFRIWLEYFGKVFERVTVAVNPQYTSSYCSSCGQIVKTTLSTRTHLCRCGCIMDRDENAARNILSRGLSTVGHTETFAKHASNALGELTSTQAGEILFEQVGSANKESPCL

SEQ ID NO: 29446 - protein, 326 aa, Planktothrix sp.
MAVQSAAERGWTAISRFYDNCKKKNSGKKGYPKFQKDCRSVEYKTSGWKLHPTKRQITLTDKNGIGKLKLLGKWDIHTYNIKDIKRVRLIRRADGYYAQFCLNINVTDIQPQTGKEIGLDVGIESFYTDSNGYQEVNPKFLRKAEQSIKQSQKQIYKKVKGSSGRQKARKVYAKKHLKVSRQRNEHAKRIARNVCTSNDVVVYEDLSVRNMVKNHCLAKSISDASWYLFRLWIEYFASKFDKLAIPVAPHYTSQKCSNCGVIVKKSLSTRTHVCNCGCELHRDTNAAINILNLGKQARGGHPQSNANGLETSTPLDESLVEQVSSE

SEQ ID NO: 29447 - protein, 416 aa, Planktothrix sp.
MFGCQQNLISPDTKLKAILEFLCAESSKLTNCGIYYSRQIYFKEGRIPNRAELHKVLGTENQNLHYQAFYSDTAQQILTSVSESFKSYIGLLKGIAKGTVTQKPRLPGYRKGGLSLVTFTGRSIKLKDNQLRFPLGGKVKAWFGIDSFYLPMPSNLDFKDIREYRILPRNGCFYLELVYKSQNIQSNVNPLNALMIDHGMDNWLTCVSNVGTSFIVDGRHLKSINQWYNKQVALLTKDTPNGYWTKRLQSLTENRNRTMRDAINKAARKVINHCLDNQIGTIVFGWNKGMKDGANMGAKTNQKFVQIPTSRLKDRIAQLCEQHGIRFVETEESYTSKASFLDLDLLPKFGEKPEEWQPSGKRVKRGLYRTADNWLINADCNGAANIGRKVATILGLDLSGVSRGELTAPLRVPLWA

SEQ ID NO: 29448 - protein, 386 aa, unknown
  TnpB Polypeptide
MQVNISIITKTHNVNVILKVKLKTNEIHHSALLRTMNEFNRICNELSIIAHTTETYNKVQLQRNAYHGMRETHSDFSSQLTIRAIDVVTATYKKKRSKNPNYFKKTSAVVYDDRVITFKGTDSVNIWTNDGRVEIPIKIYDEEKFKYRKGQVDLVYQNGKFYLLCTLDIPSQEKYDAKGVIGIDLGVKNIAVTSQGDVFSGEHIEKKRKQYHAHRQRLQKRGTRSARRRIKITGQKESRFRKDTNHVISKLLVAKAKALGYSLALEELTNINKRVTVRRVNRSERMSWAFAQLRSYITYKAELYGVTLAIVPAPYTSQTCSKCGHCEKANRKSQAVFFCMSCGHTENADFNASKNIANLGEQSISLLLGSPSDSLVASPALYGRGN

SEQ ID NO: 29449 - protein, 357 aa, unknown
  TnpB Polypeptide
MVKAFKYRIYPNAEQRQYFSKTFGCTRFIYNRMLHDKIEHYNLTEETLKNTPAQYKEEFPWLKEVDSLALANAQINLEKAYKNFFRDKSVGFPKFKSKKNNHRSYSTNNQKGTVNIENGCIKLPKLKSMVRIKQHRQFEGLIKSCTISQTPSGKYFVSLLVECDIEQLLQSEAKIGIDVGLKTFAVMSNGKEIANPKYIRRSEKRLAKLQKDLSRKANGSNNRAKARLKVARLHEKISNQRFDFLQKVSSEIINDNQVIVLEYLKVKNMVKNHKLAKAISEVSWGMFRTMIEYKAEWYGREVVIAPSNYASSQLCSECGNKSSQTKDLSCRTYICLECGLEIDRDYNASLNLVKLAV

SEQ ID NO: 29450 - protein, 419 aa, unknown
  TnpB Polypeptide
VPLETVKLTASFKLNGSIPESLFSMYGEVLNQLLDFAWMKGITSFKRLKAEKYYEMRMKYPSLPSHYIYTACQMACSIYRSFRKLKRRGLAKAEKPYFKKQVLMLDDHLFSLDLERWEASIATEHGRIRVKLLHGTYHEKFKDMKAGEAWILRKNNEFYLNICFSKTVKLMEQDNKAIAVDINENNVAFGSTEGIVNFKTEERAIRTAYFLKRKRIQLKLGSRGEMLMEKYRGREKRRIEDIYHKLADKIVEKAREDNATTIILERLTNIRRRIRYSRAVNGRLHRWSFRRLQKIIEYKAKLAGLNVVYVNARGTSTLCPICREKLSPNGHRLMRCPKCGLEEDRDVIAVRNLLKLRDVGSSSVHPEGPIREGMKVNARPERTFITRTIFFPSTSTVSTTTVTGGSHPLNATSSTSLSK

SEQ ID NO: 29451 - protein, 319 aa, unknown
  TnpB Polypeptide
LCSAIKTLSTLKKRGQHIGRLKYKSEITAINLHRFGKNEISKNNKILLPKVGRVKVSGLEQIVNKGFEIANAKLLNRSDGYYLKVTTYQNKVEQIYKGDEIGIDLGVSTTVTLSDGRKFNASVEESERLKRLQRKFAKQVKGSNNRRKTLRKIKIEYQKLTNKKNDLANKIVHEIKQYKNIYMQDENLTGWKIRFGKTIQHSVLGRVKAKLVDQAYVLDRFVPTTKACYNCGQIHEIPLSQRTFTCDCDIVPEDRDVHAAKNMIALAKLGCKVKSVPVVCRDLSGNAKKSVELGTSTGAMAKVSSELGSRKTLKGVKTP

SEQ ID NO: 29452 - protein, 360 aa, Oscillatoria sp.
MFAVKRALKLNNNEATLMAKHAGWRRVVFYCGLSLRTQIYSEGKLSDSKVLKEVKKVLTNHVKKQAEFAWMNQLSSRVYQNALIDLKDAFSRYRAGKAGHPKFASRRHGQSFRVDSFNGKVLLSAGKTIKIPRLETFRLYEPLECGYVSQTFTISKEGSRWLVSFCVDAERLPVQQPKSSVGIDVGIKSFAMLSNQQVFDAPKPLKARAKTQLATLQRQASRQVKGSNNQRKTYNKSRRLHAKIPRIRLDLLHKLTTYLAKTFKLIKIEDLNIKGMMANHKLAGAISDLGFYEFKRQVDYKCKMYGANLVLVDQWFPSSKTCSNYGSKKDMPLGFRTFDCPACGRSVDRDWKARVNIFNS

SEQ ID NO: 29453 - protein, 352 aa, Oscillatoria sp.
MKKHFFTSGSKVGGTRTIGQSFTILKPRDCSQSFPDQISNQVLKQLVCDWEDCQKSIIAYDRDIPRVSFLPSIPQYKHKICTGNLFSSDNQSIEKRGINPNNRLLHLSQSDIIISTKSQDVIKVRVVPATAIYFFEVAHQKPVTLVDLNYHLRAGIDLGIDRLVALAPNNPTFTPTIYDKKHLKSINQGFNQRRAFLLSNIARIKSTAGQIQQITFNRNKRLEKYFCQTIGLIVKQLVDEKIIQLIIGTNAVEKQNIKLEKKLHVFVVIPYAQLVKFITCKAELVGIKLIVTEASYTNNCRFWDLEPVGKQESYQGKSGKRGWFRSGNESRINADVNAALNMIRKVNVNSPP

SEQ ID NO: 29454 - protein, 243 aa, Oscillatoria sp.
LKERIDFTCSSPTFTISRTADRWFVSFVLDAEKIPPIIHPIQKIGVDLGVKALATCSDGSVYDMPIATKTAKTKLGKLQWRNRHKVLGNKKLKIKASNNARKFYKELARQHAHLANIRQDTTQKMTTDLSRKAETIRIEDLNVSGMMANSKLADAVSNISNNCFYEIRRQLTYKQAHYGTKVELVDRWYPSSKTCSKCSHVQQMKLSERVFVCQNPDCGNIQDRDENAAINLECAPQEKVRLA

SEQ ID NO: 29455 - protein, 398 aa, Oscillatoria sp.
MLCLTYTYRIYPDASQEAKMLAWMEICRKVYNYALRERKDSIASRKCAIDACSIDSEYIIPSDAAYPDYYKQQKALTRAKKVNPELQEVQSQVLQDALKRLDRAFKFMKERGFGFPRFKKLGSYRSFTFPQFKDYPLIGVQIKLPKIGAVPINLHRPIPDGFVIKQVRVINKASGWYTQLILQCDVSVPDLMPQGLSIGIDLGLEKFLAVSNGKLLSRPRFFVDLENKLKWLQRKLRNKTKGSANYRKIQHKVRLLHERIHDLRKEFHFKTAHALCDLGVGMIFTEELNLKMMSRGMLAKHCLDASWGGFLDILSWVCWKRGVYFAKVDPNGTSQTCPQCSTHTGKKKLSDRIRACHECGYTTDRDVAAAMVVEQRGLAAAGLAVKLPVEVSLSGTSV

SEQ ID NO: 29456 - protein, 398 aa, Oscillatoria sp.
VFSLTYEFKLKPTVSQVSLFEDWLEQCRRVYNYALAERKAWYKSRSCLVNACSLHSEYIIPADAKRPTYASQCKSLTAAKEKIPALRVVQSQVLQQTLKRLEQAFVSMWERNFGFPRYKKPGRCKSFVFPQLGKSPLKNGMINLPKIGWVKFRQSREIPGDALVKQARIVKRASGWYVMLSLQWGVSVPQATPSGEAVGIDVGLISFLATSSGLTLPRPRFFVDLQRKLKLLQQRVNRKKLGSNNWRKAQTKVAKLHEHISNTRKNFHWRTAHLLCNQAGMIFVEDLNCKALAAGLLAKHCLDAAWGQFFNILKQCCFKRGVFFMEVDSRKTSQICPNCGVETGKKDLSERIHKCNSCGYTTDRDVASVQVVLRRGLAAVGHTVKMLNEGKVVGLPTS

SEQ ID NO: 29457 - protein, 415 aa, Oscillatoria sp.
MMKARYRFRVYPTPSQQLALAKLFGCVRVVWNDALAHWNAEYREAGKKPSNAALQKQFITQAKKVAEREWLTEVSNVPLQQSLNDLEQAYQNFFKSCKGERKGKAVKPPRFKKRRAAQSARFTTFGFKLQNDSLYIAKIGNLDVVWSRPLPSELSSVTVIRDAAHRYFVSFVVEIGPETLPPTENSVGVDLGIATFATLSTGEKVDALLPLKKRIQRVRRLDKNLARKQRGSKRYEKAQRRRARLYAKLKDTRTDFLHKLSTRLIRENQAVILEDLNVAGMVKNRKLSRAISDLGWRLFRTFLEGKAQKYGREFRIISRWEPTSQRCSCCNEIGGKKELSIRQWTCLFCGSSHDRDINAAVNIKVAGGHSETQNGLQRKRKTSAKLAASVEASTRPEFIQLSLFDLSGITAPDSR

SEQ ID NO: 29458 - protein, 408 aa, Oscillatoria sp.
MRVEVMLVFELKAYGKKQQFEAVDEAIRTVQFIRNKALRFWMENEKVNKYDLNKYSAILAKEFPFCDDLNSMARQSSSERAWSAISRFYDNCKKKVPGKKGFPQFQKDNRSVEYKTTGWRLADDRKSITFTDKKGIGKLKLKGTRDLHFYQRSQIKRVRLVRRADGYYVQFCTQVDRSEKIEITGNTIGLDVGLKEFYTDSNGVAVDNPRFLRKGERRLKKAQKRVSKRVKGSQNRKKARAILGKRHLKISRQRKDFAVKLARCVIQSNDCVVYEDLRIKNMVKNHSLAKSINDASWYMFRIWLEYFGKVFGRITIAVPANGTSQECSSCGTIVKKSLSTRTHACRCGCVLDRDWNAAKNILSRGLSTAGHVGTWILDPNACGELTATDVEVILHRQVDSANQESPRL

SEQ ID NO: 29459 - protein, 196 aa, Oscillatoria sp.
VGASFIVDGRHLKSLNQWYNKRIGSIKEYKPQGFCSKRLARITEKRNRQVRDAVNNAAKLVLKHCLENQIGTVVFGWNKGMRQEINLGSKTNQNFVQIPTARLKDIISQLCEQYGIRFIETEESYTSKASFLDSDELPKFGEKTEGGKNLESALIVDCIVQKMEAKLMQIVMPLRSAIRSVETEKLGDDWLLQGNP

SEQ ID NO: 29460 - protein, 396 aa, Oscillatoria sp.
MLNLTYEYKLIPTNAQRETFDLWLNICRKVYNFALRERKDWINSRKCDINSCSIKQEYIIPADAARPTFAGQCKTLALAKKSIPELKLPHTHVLQQVLRQLEAAFVARWDRGHGFPRFKKRMRSFVFPQLNLESVKRFNGIHWVNLPKIGSVKMHLSRPIPEGFEVKQIRVVKRASGYWAMLTLQCDVQVPQVSASGHGLGIDLGLEHFLATSDGELIDRPRFFVGGQRKLKSLQRQLKRKKKGSRKFRQLHHQIAKHHEYISNSRKDFHFKTAHHLCDGAETVFAEDLNLKAMSAGMLCKHTLDAGFGQFLNILSHICFKRGVYFAKVDAHGTSQTCPKCQTHTGKKELSERVHKCQTCGYETNRDVAAAQVVLQRGYTAVGHIAVNFGEGKLPE

SEQ ID NO: 29461 - protein, 441 aa, Oscillatoria sp.
VSQVITAKLKLNLTAEQKISVAQVSLAYRDALNYASQVAFDNGKSGNGAKLQKLVYSELRALFGLGSQMACNVPRQVAATFKTLWTKAKQNSEAIKAGYTKRRYKGLDRAPKYTSRTCTLNYQRDYSFKKDRRVSINTLDGRIVVPFDGYNKHIDLMRVSKKIGAAKIVYQKSSKTYYLMVSLEVETPTLDPLNITRISGIDVGMRYLAVETDLANKSSFYSGKAARHRANRYQKARQSLQRKDTRSAKRRLIALSGRERRFIADVNHQIASKIAKPNSLIGLEDLTGIRDRTKSKSGKRASKKQRKANRNVAQWSFAELHGYIDYKAVLVGSLATKVPAHYTSQSCPKCGHTSKANRPNKGLIFRCECCGHQLHADLVGARNIALRTLLVRQTWMSTGVLSALPHVSSREAKAEILSRFSELRWSSDTSPHHSGTPLDGG

SEQ ID NO: 29462 - protein, 363 aa, Oscillatoria sp.
VFAVKRALKLNNREATLMAKHAGFRRVVFNMGLSLRTQMYGEGQFTDSKVLNEVKKVLTNYVKKQPEFAWMNQLSSRVYQNAFIDLKDAFRRYRSGKAGHPKFASRRWGQSFTVDSSKGKVLLNAGSTIKIPTLGTFRLYEALECGYVSQTFTISKEGSRWFVSFCVDAERLPVQQSESSVGIDVGINSFATLSTQQVFDAPKPLKQAKTKLATLQRQASKQVRGSQNQRKTYDKIRRLHTRIANIRLDFLHKLTTYLAQTFKLIKIENLNVQGMMANHKLAGAISDLGFYEFKRLLDYKCKMYGANLVLVDQWFPSTKTCSNCGTKKDMPLSIRTFDCPACGISLDRDLNASLNILNWEPSA

SEQ ID NO: 29463 - protein, 363 aa, Oscillatoria sp.
VFAIKRALKLNNNEATLMAKHAGFRRVVFNFGLSLRTQMYSESKLSDSKVINEIKKVLTNHVKKQPEFAWMNQLSSRVYQNALIDLKDAFSRYRSGASGHPRFASRRDGQSFRVDSSNGKVLLSAGNTIEIPTLGTFRLHEPLKCSFVSQTFTLSKEGNRWFVSFCVDAERLPFEQTQESVGIDLGVKYAATLSNQQVFEAPKPLKQAKTKLARLQRQASKQVKGSNNQRKTYKKIGRIHARIACIRSYFLHKLTTYLAKTFKLIKIEDLNVKGMMANHKLAGAISDLGFYEFKRQLDYKCKMYGSKLVLVDQWFPSSKICSNCGNKKDMPLIVRTYDCPVCGISIDRDLNASINILNWEPSA

SEQ ID NO: 29464 - protein, 394 aa, Oscillatoria sp.
MLLSFKTELKPNNRQVTLFRQHCGVARHAYNFGNAIIQEALQLREADKTIKIPSAIDLHKRLVAEIKPANPWYYQSSKASPQQALAEVRTAWDRCFKKVSKQPRFKKKGKSKDSFYLEQGTKAKPGISNDGKRVKLPKIGWVRLHEPLPITATHNCVISRTADKWFIAIKYEIEQPPIPLNRPSIGVDIGIKELAVTSDGKVFANPKAYRKMSKKMKRLQRSVSRKVKGSKNRTKAVRKLAKLHSRISFIRKDAIHKLTNHLAKNHSVIKIENLNVKAFLKNHKLAGAIADCGMYEFKRQLEYKTEKFSSQLILVDRFFPSSQICSNCRNHRHKMPLKNRVYVCPDCGHTEDRDLNAAKNIERWFEGIHIPTHIPHPQLAHTQLGCSVRVSRPR

SEQ ID NO: 29465 - protein, 607 aa, Oscillatoria sp.
MYHQESLFNDLEYVQKPLSGGKKKGKSKPTEHRQDSDGTTATQLSIFHLLNQPSSTPELAVEVKKPTFHDRLTFFCLATPDVKSSKTSGAASISKGKVLSPYWNTFTQATSEWLSLPQKIGCADSGSILSHGLRSGAGVKFWFSTITHLVQKEKGFKTYSPSSTSSVADSTDSKSTKSKSLKTLTYRVYPKGETKKIWLLRIHANRKVYNNAIAYLNQHQGKFTYYTVDKKTNQPVLKTSGKQAFRSFCKTLDYQIIPEWCKELGIAHGLDNALFEAYTAWKKTDKQPAQTGKGKNAKINPLVGLKLARFRAVRDQKQTIQFAPGDYKNGHLMANASKVLEKPLWTGQDFCLTNYNKAVEVTYNKGRWFVNMPVEMDVPEPKNGGKTIALDPGLRCFLTGFDGNYFTEFGKYDFGRIARICQHLDKMQSKLSKLKGGEFSRLRYRLRQAMEKVRTKIKNLRSEIHKQVGSYLARNYDVIYLPTFETSQMVAKGTRQLNSKSARAMMTWAFYQFSQTLEHLCNRYGSRLVRVTEEYTSKTCTKCGHIHTNLGGSKVFRCPNCGCEIPRDFNGALGIFLKALWDTTILSDVSDECAIFRFSPIVGDCLN

SEQ ID NO: 29466 - protein, 441 aa, Oscillatoria sp.
MSQVITAKLKLKLTAEQKALVSQTALAYRDALNYTSQVAFDAGKTSNGAKLHKAVYNELRVRFGLGAQMACNVPRQVSGTYKTLWTKVKQSNDAIAKGYTKRRYKGLDKAPKYISRTCTLNYQRDYSFKAERQVIIITLQGRIVVSYDGYNKHLDLIANGARIGAAKIVYQRSSNIYYLMVSIEVETPKIDPLKITRVSGVDVGMRYLAVEIDLQNKAKFYSGKNARHKANRYHKARMTLQRKDTRSAKRRLIALSGKERRFIADVNHQIGKDIAKPNTLIGLENLTGIRDRTRTKSGKKASKKRRRANRNKAKWSYAELHGYIDYKANLNNSLATKVPAHYTSKSCPKCGHTSDANRQNKGLLFRCECCSHELHADLVGARNIAMRALLVRQDWMSTGSLSASPDVSSGETKAQILQRFSELRWSSDTSPHHSGIPLDAG

SEQ ID NO: 29467 - protein, 408 aa, Oscillatoria sp.
MLRKVVKVRLYPTDRQSQHLAQSFGCARWWWNYALNKSIEVYQETGKGLGQSALNALLPALKKEYEWLSDCYSQVLQAATLNLTTACKNFFDKRAQFPKFKSKKHKQSIQYPQNVQVVSDSELKFPKLGVVKAKLHRPIDGKIKTVTVSQNPSGKYFAAILFEIEGKNPEFSTSGKIAGIDLGLKHFAIAADGTKISKFENPKHFVKHQQNLKRKQQKLARKKDGSNSRKKAKNLVAKVHERVANCRQDFLHKLSGKLVNKNQVVIVENLHVKGMVRNHCLAKAMSDAGWGMFVNFLSYKLDRKGGRLVEIDRWFPSSKTCSVCLHQVSEMSLEVREWTCSHCGTHHDRDGNAATNIRNEGIRMLKTDGTAVSAVGGKVSPKVGRKSNLRHSPTKTEAHAVCDSISAG

SEQ ID NO: 29468 - protein, 404 aa, Oscillatoria sp.
MSGMEKAYRYRFYPTTEQESLLRRTLGCVRLVYNKALAARTEAWYSRQERVDYLQTSSMLTSWKKEPELDFLSEVSCVPLQQGLRHLQKAFTNFWAGRAKYPNFQKKHHGGSAEFTKSAFRWKDSQVFLAKCCEPLPIRWSRQIPPGCNPSTITVKLDAQGRWFVSLLVDDPTVKPQIKTDKAVGLDVGITSLIATSDGNKIANPKHFKRLHKKLRRAQKALSRKQKGSNNRHKARLKAAKIHGQIADARKDFLHKLTTQLVRENQTIIVEDLAVKNMVLNRKLAQAISDASWGELTRQLTYKCQWYGRKLVKIDRWFPSSKRCENCGHIVEKMPLSVREWECPNCGMNHDRDLNAAKNILAAGLAVAVCGANVRPDRDSSKRQLRKTRLGDRSRNLNREVWEF

SEQ ID NO: 29469 - protein, 401 aa, Oscillatoria sp.
MGGKTMLVFEFKAHGKSNQFKAVDEAIRTAKFVRNSCLRYWMDNKKVGKNDLNKYCAVLARDFPFADELNSMARQASAERAWSSISRFYDNCKKNIPGKKGYPQFQRDGRSVEYKTTGWKLADDRKSINFTDKKGIGRLKLKGTRDLHFYQISQIKRVRLVKRADGVYVQFCVDVDRKENTEPSGTTIGLDVGLKEYYTDSNGNTVENPRFLRKGEKVLKRYGRRVSRKVKGSINRGKARQILGKRHLKISRQRKDHAVKLARCVISSNDVVVYEDLRIKNMVKNHCLAKSINDASWYQFRVWLEYFGKVFEKITVAVNPQYTSQECSSCGQIVKKTLSTRTHACQCGCVLDRDENAARNILSRGLGTVGHTGTFGLEPSNSLGELVSTVAGEILPQQTGS

SEQ ID NO: 29470 - protein, 417 aa, Oscillatoria sp.
MMVVERHYIDRQHQFFQQFDRLSFVSKNLYNHSNYWMRQHFFKSGSSAGSGLSLKQLYAIVKPTSDYKSLPAKVSNQVLKQVIHDWSAWQKSIKADRREIPKFSSRPKIPKYKHKTCGRNLLIYDNQSIGQRGRQKNNGRLHLSGTDIIIATKAQDVIEVRIVPKTATYIVEVVYEKPVTLADFHPKFIAGIDLGIDNLVAMASNKPTFRPIIYDGKHLKSINQGFNKRASFLQSQLETGKYTTRQIQQITLKRNKRVENYLHQTSSLIVKRLVEEQIGQLVIGKNEKWKQNVELGKKTNQTFCSIPHAKLIDTIAYKAQLVGIEVTVTEESYTSKCSFLDLEPVGKQESYQGKRVFRGLFRSVSGTPINADVNAALNMIRKVSGNSPFEGCSNRLEVFAVSPVRVNPVRKKTQKVR

SEQ ID NO: 29471 - protein, 427 aa, Oscillatoria sp.
MMRKCQVRFLGGRDAATYALLPDNKTLRHWIDNQGIKLVDLYKQCALMAKEFEWAGKLNSTARQASAERAIFAIQRFFANCQAKKPGKKGFPQFKKHTRAVEYKQSGWALSHDKRCLTFKDGFAAGKFKLIGSRDLHFYAPDEIKRIRVVRRADGYYAQICINVERKEELVPTGKVIGIDVGLNHFYTDSDGETVPNPRYLRKSEKALKRLQKRVSRKKKGSKNRKKAINKLGRKHLKVSRQRKDFAIKTALCAVKSNDFVAYENLQVRNMVKNHKLAKSISDAAWSQFAQWLEYFGKVYGKTVIAIPPQYTSQECSNCGNQVKKTLSTRTHICGCGTILDRDHNAARNILVKGFKQAKINLNTVGHTGIHAGGQTELYSLVVASFGANRLADPRIPSPSGRGVSKNITSSLLTCSDNLRAAVNVRV

SEQ ID NO: 29472 - protein, 405 aa, Oscillatoria sp.
MLVFEFKAYGKKQQYHKLDEAIRTGQFIRNKCLRYWMDNRGVGRKELYKYCTQLRAEFGFVKDLYSHACQAAVENAQRAIARFFDNCKNKKPGKKGYPQFKKNSRSLEYKVGGWKLSSCRKRINFTDKKGIGMLKLKGSRDLHFYQIEQIKRVRIVRRSDGYYVQFCVDAPRSALKDCKSSNPAVGIDVGIKYFLADSEGGIVENPKFYRKSEKQLNRANRKKSKKFKKGKPQSNNYKKAKNRYARKHLRVSRQREEFVKRVALRYVQSNDLVAYEYLNVQGMVKNRKLSKSISDAAWSKFRTWLDYFGSVYGTKTVAVSPHNTSQNCSNCGLKVSKSLSTRTHICPHCGYSADRDTNAAINILKRAQNTAGHAEINAWGEMPSSLVGETLLGYGNSLNQESPSL

SEQ ID NO: 29473 - protein, 262 aa, Oscillatoria sp.
LHFYQRSQIKRVRLVRRADGYYVQLCVQVDRSEKIEITGNTIGLDVGLKEFYTDSNGIAVDNPRFLRKGERRLKKSQKRVSQRVKNSQNRKKARAILGKRHLKISRQRKDFAVKLARCVIQSNDCVVYEDLRSKNMVKNHSLAKSINDASWYMFRIWLEYFGKVFGRITIAVPANGTSQECSSCGTIVKKSLSTRTHACRCGCVLDRDWNAAKNILSRGLSTAGHVGTWILDPNACGELTATDVEVILYRQVDSANQESPRL

SEQ ID NO: 29474 - protein, 401 aa, Oscillatoria sp.
LYSTQNQQIEVASTFWCARWWSHYGQNKSIEVYKKTGKGLGCFGCNTLLPTLKKSDESGWSDDIYSKFLQFTTIELTTAYKFFFEGFAGFYNLRFPDKKQSFQYPQNVKIVAGTRISPYRGINKPKINRHRLSEDKINNSVINKINYSGKYRASILTEIKAENQTTKEGRIAGSDLVLKYLAVIQNDEKVSKYDLNAKHFAKPEKKLKRQQQQLTEQQKKSDSEYKYRKAAAKVCDRFRNSWQDFLHKLSYKLVGDRLAVIVENFQLWGMIRNPNFAKAILDEVLGSFTNFLAYKWERKGGNLVEIERGYFSSKLCSNCFHQMTEMPLNRREGTCPHCATDRDREGNAAIKMKAEGIKILKAEGSAVFALGGEVRPKLGRKSQLRHSPMSTEAPTIFGTTI

SEQ ID NO: 29475 - protein, 182 aa, Oscillatoria sp.
VGVDLGIKALATLSTGEVMVGAKSYKKYAAKLSRMQWLNRHKTIGSRNWKKAQLKIARLHVKIANIRKNTLHKLTALLAKNHGTVAIEDLNVSGMTALHKLAASIADMGFFEFRRQLTYKCKLYGSKLVVVDRWFPSSKTCSNCSTKKETLGLSERVFECGHCGFVIDRDLNAAINLSKTVS

SEQ ID NO: 29476 - protein, 422 aa, Oscillatoria sp.
MQLTERHIIKSTSHRFAQIDELAFKSKNLYNAANYVIRQSFIYGWKYVNYNEMNRLMKSHEAYKNLPAKVSQQILMVLDRNWKSFFEAIKAYKADPSKFTGRPKLPKYKDKVKGRNLLVYTIQAISSKQLRNGVIKLSGTNLSIKTKVSPDRICQVRLIPKCDAYVIEVIYDEPESTVKESSFVAGIDLGLNNLVALTSNQPGFVPLLINGRPLKSIDQFYNKRKAQLQSQLKGNCKTSPRIQRLTRCRNQKIANYLHQASRIIVDFLVAQQIGTLVVGKNEQWKTEINLGKQTNQNFVSIPHARLIEMLEYKAFLAGIKVIVQEESYTSRANFLGLDPIPVYGKTEKEPVFTGRRIKRGLYKTSTDQLINSDVNGSFNIIRKAIPNAFSDGIGSCVVQPRRVNPLKVKAKGEGLEASHVYR

SEQ ID NO: 29477 - protein, 413 aa, Oscillatoria sp.
VLTITYEYKLAPTHEQVQKMEHTINVCRKVWNFALRERKDWLNSRKCPVNACSITSEYIIRSDTPYPNYFEQAKSLTRAKKQYPELATVNAQVLQQVLRKLETAFVDMKRKGMGFPRFKNRYRLRSFVYPQLGKGQLLKGNQIKLPQLGWIKYVKSREIPDGFVVKQARIVSKATGYFMMLALECDVNVPLPVPSGHPVGIDLGLDQFLATSDGKLVARPKFFQTKHRQLKLLQRRLKNKKKGSNNRHKLNKKIAALHQHITNTRKDWQFKLANHLCDQAGMIFVEDIDFRVWAKGMFSKHTLDAGFGQFISILQWVCWKRGVYFDKVNKDFTSQVCPQCDTHTGRKELEERVHHCRECGYTTHRDVAAAQVIRNRGLSEEGRFLDIKENACGDGLTGTGNSLVKNRRDRKKG

SEQ ID NO: 29478 - protein, 407 aa, Oscillatoria sp.
VKQVFNLTFEFKLKPTATQIAVFEDWLEQCRKVYNYALRERKDWYNSRKCPIDSCSISSEYIIPAEVPRPTYSSQCKALTAYRKTSPALQRVNAQVLQQTLRRLEKAFVSMWEQNHGFPRFKKQGALRSLSFPQLGTTFHQGNRFKLPVIGSIKFCQSRPIPQGAIIKQARVVRRSSGWYIMLTLQWDVSIPYIIPHGNPVGIDVGLTNLIATSNGLLIKRTRFLADAERKLKLLQQRVTRKKIGSNNWKKAQKKVALLHEHVANCRKDWHRKLSHQICDDAGMVFVEDLNLVGLKAGMLGKHCLDAGFGQFFNILEQTCFKRGVYFQKVDPKKTSQICPNCLNETGKKELSELTHSCHNCGYTTDKDVAAAQVVLKRGLAAVGHTVKMLAEGKFIGIPAKQESPRL

SEQ ID NO: 29479 - protein, 262 aa, Oscillatoria sp.
MGGFSFKNGGVYLAKIGIVNPVWSRNLPSEPSSVTVIKDCANRYFLSFVVEVQPIQVEAKNPSIGIDLGIKTFAVMSNSEKAESPSYKKLDRKVRKLQRKLARQPKDSKRRNITRIKLATLHNRITDTRKDFLHKLSTKIVNENQVIILEDLNVSGMLKNRKLSRAISQQGWREFRTLCESKSEKFGREFQVISRWEPTSQVCADCGFKWGKIDLSIRSVVCMSCGTEQDRDENAAKIIEKVGMGNRHDSKRAQRVCQASNG

SEQ ID NO: 29480 - protein, 396 aa, Oscillatoria sp.
MLNLTYEYKLIPTDTQRQTFDQWLNICRKVYNFGLRERKDWVNSRKCDINSCSIKQEYIIPDDAPRPTFAGQCKSLASAKKLIPELKLPHTHVLQQALRQLEAAFVAMWERGHSFPRFKKRMRSFVFPQLNLESVKRFDGADWVNLPKIGLVKMHLSRPIPQGFDVKQIRVIKRASGYYAMLTLQCDVAVPQASPSGHGLGIDLGLGHFLATSDGELIDRPRFFVDGQRKLKLLQRQLNRKKKGSRKFRQIHHRIALHHEYISNSRSYFHFKTAHHLCNAAQTVFASDLNLKAMSAGMVGKHTLDAGFGQFLNILSHVCFKRGAYFASVNPNGTSQTCPRCQTHTGKKELSERVHKCQTCGYETNRDVAAAQVVLQRGYTAVGQIAVNFGEGKLRE

SEQ ID NO: 29481 - protein, 201 aa, Oscillatoria sp.
MLVFEFKAYGKKQQFDAVDEAIRTVQFIRNKALRFWMENEKVNKYDLNKYSAILAKEFPFCDDLNSMARQSSSERAWSAISRFYDNCKKKVPGKKGFPQFQKHNRSVEYKTTGWRLADDRKSITFTDKKGIGKLKLKGTRDLHFYQRSQIKRVRLVRRADGYYVQLCVQVDRSEEIEFYRKDHRIRRGTQRVLHGFSWRCS

SEQ ID NO: 29482 - protein, 422 aa, Oscillatoria sp.
MQLTERHIIKSTSHRFAEIDGLAFKSKNLYNAANYVIRQSFIYGWGYVNYSEMNGLMKFCEVYKALPAKVSQQILMVLDKNWKSFFEAVKAYKTDSSKFTGRPKLPKYKDQTKGRNILVYTIQAISSKQLKKGIIKLSGTDLSIKTKINPDRICQVRLVPKCDCYVIEVIYDEPESTFSGDKFVASIDLGLDNLAALTSSQPGFTPLLVNGRPLKSINQFYNKRKAKLQSQLKGNRRTSCRIQRLTRCRNQKVDNYLHHASRLVVDLLRAKQIGTLVIGKNAQWKTEIDLGKQTNQNFVSIPHARLIEMLDYKARLVGIEVIVQEESYTSRANFLGLDPIPVYGKTDKDPVFTGKRIKRGLYKTSIGQLINSDVNGSYNILRKAIPNAFSNGIGSCVVGPMRVNPLKVKVKGAGLEASHVYK

SEQ ID NO: 29483 - protein, 405 aa, Oscillatoria sp.
MQLVARHVIKPNHRFYREADRLSWLCKNLYNSANYIYRQNFFASQQTKALAVDRALKTSPDYKALPAKLAQSTIGLVLKAWTSYYLAVRNYHENPTKFKAAPQIPDCKGSRERKRQDRRFVVVFNCQAVSKRALKKGYARPSGTNIWLPSKVTSILEIRIVPKVAGYVVEVLYEKLEQPLQVNQRVAAIDLGLNNLATLTYNVPGLVPTIYDGRAVKSTNQYCNQVSSALKSLLPAQQKNSKKIAKLWHKRNCKVDYYFQRTSCTIIKELVDHQMGLLVIGWNHDFKDGINTGKIRNQNFACIPHCRFLQMLQYKGKLAGIQVVLVEESYTSKCSALDLEPIQQHSDYIGSRVKRGLFKTKTGRFINADVNGYLNIGKKAVGDGFIPNSIEGFVVNPVRLKVYKH

SEQ ID NO: 29484 - protein, 395 aa, Streptomyces sp.
MHTVSLVKLVVRVKLLPTPEQALALDETLRACNESANWLAVRAFEHGRTSRAALQALAYAELKARGLSAQPALHVLRKVADAYTALRANLKAGSLGRHRSKRYGKAAAKPVAFRADAAQPFDDRCLSWRLDDRIVSIWTTSGRMKRLALTGQDEQLALLTAHCQGESDLMRQDGQWYLLATCEIPETTLNTAPDGFVGVDPGIVNIATTSAGARYSGRRLNRHREADRRLRSKLQKKGTKSAKRRAKRHAGRQARRARDINHKISKCIVAEAQRTSRGIALEDLTGIRERVRLRKPQRVMLHSWSFHQLGTFIAYKARRAGVPVVYVDPTYTSQECSQCHHIDRRNRPSQAVFACQACGFVEHADLNSSHNIAARGWWTWARGAESTVPALTLTV

SEQ ID NO: 29485 - protein, 555 aa, Sarcina sp.
MAQLLCTALRKDPARMYHVECIDIHKDDILFSYADRASLCANNMYNVAIFYIRNLMTGLKKEIRLRTENENFVIGTVTGSISGINDSLRDKYERKVRKIRETEGLSEEERAGRIAKVKHLQFSAPTTEKWFASYGLLDAVFKFTENPDYRSFHTHVIQNAIKACWQAWKGYFESLKTFSPSSGHTGKPKIPGYKKPGGRTTAVLSNIACCIKHGRLYFPYCTKECTDGKQEKKRTRHSLCIAGLPHAEKDKLIEVRIVPYFGNYQVQIVTDDGLKEEEFLPDERDIIAADGTPAGVMMLDPGLNNFAAIADNKGNEPIVIKGGAIKAENQWFNKRMAFLRSEQMKGHDPKTYHPSVTKQMQRISRKRDAFLRDTFYKYAHYICRLMKKRGLSYLIIGYNRGQKQGIDIGRRNNQSFVQVPFARFRRVLQTVCARYGIRVILQEESYTSKACFGSRDGIPTYGKGDTEGITFSGRRIGRGLYRQDDGRVMNADINGAVNTGRKYNESIYPEGMDCGYLYGTVKAMTYKDILSAGQRNHKSNPGETGQRASVCPVSA

SEQ ID NO: 29486 - protein, 408 aa, Burkholderia sp.
MQRFQAFKYELMPTGDQQGDMRRFAGSCRFVFNKALALQKTCYEQRKKKLGFAELCKLLTEWRNGTETPWLKDAPTHPLQQALKDLERAYANFFAKRADFPRFKKKGQRDSFRYPDPKQIKFDQANSRIFLPKLGWLRYRNSREALGELRNVTVSQSCGKWYVSIQTEREVDRPLPNGGAVGIDMGIARFATLSDGTFFAPLNSFKRHQTVLRKAQQAMGRKTKFSNNWKKAKSRIQRIHSRIGNVRRDYLHKYSTTISQNHAMVCIEDLQGRNMSRSAAGSSDAPGRNVRAKSGLNRSILDQGWFEFRRQLDYKLAWNGGYLIAVPPQNTSRTCPRCGHVSSENRRTQERFACVECGFEENADLVGAINILRAGHARCACEVSGAVMPPAAGTHRSDSSWIDAGGAP

SEQ ID NO: 29487 - protein, 570 aa, Bacillus sp.
MNGKKAIGTMSNQNKKPINLPTSPSFIVERELIISPRDRKFINALLEDARKIQNTVLSMAKKRYERMIRSLSHQTLYGHLIQVNKELETEPKNKSLQEKRKETITALRNISKEYSLTKSQFEKNAKIVRSYFHNRLDSVAVQKAADRAWISFDKYLNKKSKHLHFLKNGENHSIEGKSNQASVVVKYENGELKLRYGDYYFQFIPIKKNDLYMEETISSIRSFFETPLDQNEAVQENTKLQLSFINEEITKEYYQKHFQSTYRIKYNRIIKKVIRGRERFYLQMIVEGRPVPKRKKDGKFRHQLGKGTVGNDFGTQTVGVASNDKVALINLAENVENIDCKLNKIQRKMDRSRRKSNSENYHKNGTVKKGKKKWIDSKRYRKLKAKAKELHRKTAIKRKLAHQTLTNQLIHLGDIFIGEEMNFKALQKRKKDTEKNEKGQYKRKKRFGKSLANKAPSMFISIYRTKVNQLGGTFLLVNTKKFKASQYDHTTQTPVKKQLSQRWHILSDGTQVQRDLYSSFLLKCSNVTLDQPDFALCSFEFNAFIVKHDEFIEQTIASKKKIMNSGIKVV

SEQ ID NO: 29488 - protein, 498 aa, Bacillus sp.
MYSSYKIHIHPEHELFGYCDSLCFKAKNLYNITNYYIRQVYTALKKEIKNENQLQVLQDIETYLPQMNEIRLKSYEKAKAKPMNVDKEGKIIEPKLKLFEMPSQEKSFIGYTFVEALFKIMKQTDYTSMPSQSNQQTMKKVYDDWKSYFEASKKYKIHPESFSGKPKIPKYKPKNSRTTCYLTNQITDIKEGNRLKLPGTPLLLKLGKIVQSEGELQQVRIVPSYGRYVVEIVFKSEQEKEIKRTEKQKNEFIFTPKRVMGIDLGVDNLATIVDNTGRQPLLIKGTWLKSLNQYYNKLRANYMCVIRNGKDPKEGIFTTNRLISLDRKRNNRVMDFLHKASAKVVEIAVERTIDTIIIGRNVGWKSEVEMKKSDKQTFIQIPYATFIEMIRYKAERKGIQVIDREESYTSKSSFLDNDAIPTYGDDTHPYFSGYRCSRAFYKIKGSNVLIHADVNGAFNIVRKHVKQAFEGLERKQFLQAPKKIIIMEKKHEKLKAAA

SEQ ID NO: 29489 - protein, 373 aa, Clostridium sp.
MILAKKVRIIPSIEQEQKLWQSVGTARFIYNWTLARQEENYRNGGKFIFDGDLRKELTILKKTEEYKWLSGVSNNVAKQAVKDGCEAFKRFFKGLADKPRFKSRRKSKPSFYNDNIKLKVKPNIVLIEKVGWVKTAEQIPMGVKYSNPRVSFDGKYWYISVGIETEPPVIELTDESIGIDVGVKDLAICSNGMIFKNINKTKKVKKLEKRLRRLQRRVSCKYLKNKEGSKFVKTSNIIKMEKQIKLLYRKLADIRSNHSHQSTNKIVKTKPSRVVMETLNIKGMMKNKHLSKAIAQQGLYEFKRQLQYKCEFNGIEFVEADKWYPSSKTCSECGHVKLKLSLSERTYICEECGCVIDRDYNASINLSRYELVV

SEQ ID NO: 29490 - protein, 456 aa, unknown
  TnpB Polypeptide
MYGTIHFHISRNRYPALFDYCAAMTEKSRNLRNAVLFRVRQHFTSYGKDTLQPLQEEVRAEVLRTCKKTGRDMPKQVLTYYFMDKLLRVNRNPDYYSGLPMQSAQAVTKETINDFNSWLKALRAYNKDSSSFTGKPKMPRYTTCDHRIVSMTNQDCIIYRTEDGSTCLKLPKTKEKLHVIFPDDAKLKEVKIKPCYSEYEIIVVYEQEAGSAVCNGTYAAGIDQGVENIIAFVSNDGKTPILYKGGAIKAMNQSYNKAKAKYTGILMKGHDPKRVNIHTTRLSNIERKRSSFLRDEMHRISNHVVKECISRGIGTLVIGKNVQWKTKTAMSKQSNQTFVQIPHCTLVWMIRYKAERNGITVIEQEESYTSKASFLDGDTLPVYGDKQTHIFSGKRILRGLYCSKDGTVLNADINAALNILRKAKPEAFEKMKDYSFLQNVRTVKFRDLHPAGRALS

SEQ ID NO: 29491 - protein, 370 aa, Deinococcus sp.
MTHTAPQNRRNEPDHYDVPAHHGSYPTFALLIEQGVVVPLPRPEDERADPLKGVRSAQTYRLAPGVLPVVTGYRHLTLAGQPIQADLFRLPAHAYSALVTASPTHRAPLCLDVAFTLAREPDVSVRDVRLVLEQSAAHAPRHLDAPHLVPSTLPLQSSWLPEDTLLHMTPGGHWFVTLTFRTTCLTRPLPTERERVALDLGLFPLTTAVHEDGRVQVFHSTPLTLPERGTLTPPAQLLLDQVVYASGRQDAEQVTGYLLRHSSTVVAEQLRVQNLERGFVHRSRDRALLDHHHAALPQALNAARIPLFRLPAGYTSTECPCQTCRHVSPDNRHGALFRCRRCGFTADAHVVAGMNLLRRHERTARRHVRR

SEQ ID NO: 29492 - protein, 403 aa, unknown
  TnpB Polypeptide
MKQVLTVSCKLNLTTEQVAKVDELLNTFADACVYVNSVVPPSLTNELAMQSLIYHDVRAKFGLSAQLAIHAVRRVSGNRKTAKQKNKPVNKFAPTSATYDARTFSFREKDWTVSLTVIGGRERFNLAIGNYQLGLLKGQKPKTATLVKRKDGSFYLNIQLESTPEKPQETDKILGCDLGRTDICVTSENDTYSGKQTTKIRDHYSSLRSILQQKATRGTRSSRRRCRELLKQLSGKERRFQTHQNHTISYQLVQKAKTQNQVIALEDLTGIRERTNELPRTKTERRRSNFWSFHQLRQFLIYKCIKFAVKLVFVDPRYTSQTCHNCLHIHPVQGSSYRSGKSFRCGHCSWFGDPDWNGSLNIQKLGRFINLPGGSGLACSLEHHVLGLLKTPSSDDRKGVRAG

SEQ ID NO: 29493 - protein, 398 aa, unknown
  TnpB Polypeptide
MVELALTMKVKLTTNKHESEALNRLCDNYTSCCNEVSDWIGEHHTLSQRKINEAVYHPLRDKYGLLAQMTQSSIRRVIASYKAIHSRMERRNGENPKRKRTAYYSTRPKYSSAGVDLLWNRDYSYSPMTGMFSLPVMGGRIKVKAQWKGTPDEYRTARFGTARLISKRGKWYLHIPIILQVPDPTPSPKNIVGVDLGIRMLATSYDGEATVFQHGGEVKSKRGKYKRLRQQLQKRGTRSARRRLKTIGDRENRWMTDVNHQASKALVNHYDRDTMFVLEDLTGIRNATEQVKVKDRYVQVSWSFHQFRQMVEYKAKRNGQKVVFVDPAYTSQTCPKCGKIRKANRDKKRHLYVCRNCGYRSNDDRIAAMNLRHKGYDLLNSQYAASMTDGVRVQSTTL

SEQ ID NO: 29494 - protein, 273 aa, unknown
  TnpB Polypeptide
MSEFVSRAERHVITKYNKNYKNIKELCHRCKNLYNYCNYILRQSLFKNGSLPKEYDLTGLLAKENQDDYRALPAQTAQQVIKLLYKNWKAYFKSLKSYQKDKTKFSGCPRIPKYKPRGEKGYYIAFFTNQQTKLKDDKIIFPKQANLLPIKTKTSSIEQVRIVPATSCFIVEVIYEKEIIPAETIDGSVASIDLGVNNFVTFLDNQGNQPFIINGKGAKAYNQYFHKEKARLQSELKQGKYSSKNIQLLGLVMALEEEFDIEIPNQALLLFRL

SEQ ID NO: 29495 - protein, 385 aa, unknown
  TnpB Polypeptide
MKAYKFRLYPSKEQEQTLFQTFKSCRFVYNQLLEKLNKQTKINRGEIQHSILELKKEFPELNEVYSKTLQYECYRLFSNLRGLSQLKKKGRKVGKLRFKGRDWFKTINYNQSGFKLEQTEKRYEKLSLSKIGKIDIRCHRITSGKIKQVTIKKTAGKWYAIMITDEIYEKQRGKGITGIDLGIINFITDDKGNKIKSPLFLKKSLNKIKKAHQNLSKKKRGSNNRYKAKKRLGVLFEKVENQRTDFLHKVSTDLVSKNKIICIEKLGIKQMMSKERNRFWNRRNFADVSWGKFVSMLKFKAESAGTKIIDVNPRNTSKKCSNCGELQSMPLSQRTYFCDCGLELDRDVNSAINILAQGLGCAENETESSSMKHEAITSTQIGVRL

SEQ ID NO: 29496 - protein, 462 aa, Clostridium sp.
MGTIIKTVKQYSYELDDNIIKELSFIGNKYRNVKNYVYSRYSGINSIPLLKKDRQIRDEWIKSKFYEQWKLPARYWKLALSEAFGNIKAEWTNIKNRVKEQCKANNNLSNEDKHYINYILKFNDDYYKVVTNKSFEIPKIFKDKDLNYKYLNSVIKRYSRRYKGQIPYSKNGRIFSIDTGLYRYKDGGINITSTKKGKRLSIKLTDNNQYDRTMIVKRIDNKIEIHCPLKIKTKVNHNKENIIGIDKGYRYLFAVSSDEFYGENLNNYLNKETERLNKVNENRNRFWALYNQYLEQNNIEKANTIKENNLGKVKYNHNKKKHDQTVKSYINYSLNGLINREKPTEIVMENLDFVNWNDRYPKSVKRKLSRWIKGYIRERLEYKCDYNSIKYTYINPAYTSKVCNVCGSFGKRDGDVFTCPKCGEIHSDTNASKNILKRKYDKEITLYTNYKKVKEILENRVS

SEQ ID NO: 29497 - protein, 351 aa, unknown
  TnpB Polypeptide
MIQSQLKIRCNATLSRQLDEWLFMLTGVWNWAVKKIEHDAQDGIYYSPKEFQNLLAGHGKKIGIPSHTIQGVLLNAHIAWQRCFKKIGGKPRLKGMRNKLNSIPFPDPIRAPEGNYIKLPGIGRLRFHKQGIPSGKIKCGRLVKRASGWYLCLFIDAERQPIHGIPGHAIGIDPGFKDLLTTSDGEKIEHPKELQRSAKRLAQAQRGINRKQVARLHERIKNQRKDRNHKLSLRLVQENSVIVFSKDNTKGMAKTFGKSVASSAHAQLRKMLSYKSRVGGTEYIEVASRNSTKTCSTCGALSGPSGRAGLSVRQWVCSACGTPHDRDTNAAINTLLAGLGRSLEGGLRNAA

SEQ ID NO: 29498 - protein, 487 aa, Streptomyces sp.
  misc_feature (266)..(309): Xaa can be any naturally occurring amino acid
  misc_feature (440)..(473): Xaa can be any naturally occurring amino acid
LLRHCQRPRLCSCRSTDGGVLMQLRYSFRLYPTVGQRSALARAFGCARVVFNDGLRLREDARASGLPYPKAAELSKALTEAKKAPERAWLGTVSAVVLQQSLRDLETAYGNFFASLKGARKGPKIRPPRFKSRKDNRQAVRFTANARWSITPGGKLNLPKIGPVPVKWSRTLPSAPSTVTVVKDAAGRYFASFVIETDPITDVLPETDQVVGIDLGLTHFAVLSDGRKIDSPKFLRRAEKKLKKAQRALSRKSKGSGNRDKARIKXXXXXXXXXXXXXXXXXXXXXXXXXXXXXXXXXXXXXXXXXXXXHQLSTALVRENQALAVETLSVKGLARTCMAKSVHDAGWSAFVNMPEYKAIRAGRSLMRIGRFEPTSQVCSQCGVKDGPKPLNVREWTCEACGTVLDRDVNAAINIKKAAGLGGVSLRSADKTGPVPAPRDXXXXXXXXXXXXXXXXXXXXXXXXXXXXXXXXXXGIAVLQDDEDVKAS

SEQ ID NO: 29499 - protein, 408 aa, unknown
  TnpB Polypeptide
MVAYNTTLNTMLQSIWRTTEWKKHQIKGKKQHRLYPKYRKDNAFKRELRNKCLEEWCYAAHWVDSAIKTAFSILASWKRNYDRGERRRVCPCSGRLFLRIKQTLLKLEEDTLRITLRPREFVYIDLSRRYFKLPDNVSSVGLGEPVITPDRIHLPIHVAEEEEEERTAEAVAWDSNMLSMDGYSPKTGWVKIDTRKLVSAHVSSFEKRRSIERKASKSKRTKRVLTKYRRREMNRAKKHQIEIARAIRVLSKRSGFEALRKEKMYTRSRMWNRRLARTDWRGIKRRVAESGVVEELSPQFTSKKCSRCGWVNKDLRRGAVFECGNCGLRIDRQLNAAINLYLRMEGVPHEKERWDADILPTLLVGGYVLTGAERKGTDELVRFLDDAVKPQIYVGYDRYADTYLPVPT

SEQ ID NO: 29500 - protein, 385 aa, unknown
  TnpB Polypeptide
MILAHKIQLKPTAEQEVQFRMACGVARYTYNWALAEWSRQYKAGEKPSSYALKKQWNQIKPEWVYESPKDANQAPFAHLQTAFKNFFKKRAEYPKFHTKGKKDSFSINNDQFCVEGYKAILPRIGSVKMTEQLRFQGKIMSGTVSRSANHWFLSINVEMKDYSKPRISDNTEGVDLGVKDPVVLSTGEKFAGPKPLKRLQRKLRRLQKSLSRKQKGSSNRKKAIVKLARLHYRIKNIRNDFLHKITTKLCRENQTIVIEDLNVKGMMANHCLAKAISDIGFGEFRRQIDYKVKIYTDELKVASRWFPSTKTCNRCGLIKDMPLSQRTYICECGYIADRDVNAAKNLRTLGLRGIACGHGSSGSTERLNETTVVEAGILKCAEMHT

SEQ ID NO: 29501 - protein, 468 aa, Saudi sp.
MEKQNIILTRKIRIFPCVEHINFFNKCFGATRYIYNKTLDAIKKMYKKNSKILRTKAKKGCIHQISKNKSGSKTTKNKNQCGGKLYNKYFCKKHKHIKPKLDLPLGFQFWRNKMIKKNNNLSESEKWLSEIPYDTRQLVIKNILANHKSAITNLKNGNIKTFDIKYKSRKNKNQFLFVDYRALKPDGKLWNRTVKTPLGMRKGEKRWFDNYMKEYELKKFGDDKGDKERKDMIITREYPGMYYLHIPYTKTIEKKPIQESIISIDPGIRTFHTFYDPEGKCGKIGDNLTNHIIKLYEKIDKIQSKITKTNTKNNDLGYKKNKLCRQNMRKKCAWLRTKIKNTIRDYHWKTASFYCKSYGHVIIPKLDTDSLKKKIKKDYGLSKGSPMIRRIMALSHNEFINKLIHKSKEYNTNVLIVDEAYTSVTCGNCGIKHGKLGSNKIYKCVHCKKKIDRDINGARNILIKTLSK

SEQ ID NO: 29502 - protein, 356 aa, Spirosoma sp.
MNLTTLSYRIKDETAGKHLIQMSYSCTFVWNFCNQSNAERWAKFGKTFTAFDLNKLTAGCAKDLGLHSQTVQAVAEEYAKCCKQFKRVKLNWRSRKKSLGWIPFKASGIKIEHDSITYGGRPFRFWLSRPIGGRVRFGSFAQDSKGHWFVNLVVEKSVEIRTPTGKECGIDLGLKTLATLSDGVELSRENLTRQYEVQLARAQRARKKKRVTAIHTKIKNKRKDWNHKATTRLVREYDRISVGNVSSSNLKKTRMAKSVSDAGWADFKLMLSYKSIGIGTVYTEVNESFSTVTCSSCKARSGPRGQAGLGVREWVCVECGSRHNRDQNAAKNILWHGLPRILRTGHCTPLRESPRL

SEQ ID NO: 29503 - protein, 348 aa, unknown
  TnpB Polypeptide
MLKVNAQQVARKNAEDWRSFFSLIKEKKEGKLSKWFKPRPPGYWIDKSGKYKLRIIIRNDRYELDEENRIIYLKDFKLALRFKGKFKWHGKQGRLEIAYDEARRSWYAHIPVEVENVIENKGSLRASVDLGIVNLATVYIEDGTWYIFKGGSVLSQYEYYGKRISSIQEVLARHRQNRSRKLKLLYDKRRKFLKHALNSMVRKIMKELKEKGVGEVIIGYPKEIIRNHGNKLTVNFWNYSYIIKRFEEIEEELGIMITKVNEAHTSKTCALCGEAHKSGRVKRGLFKCPRIGKVINADLNGAINILHILESLRSRSGGQLLVRDKGNGLKTQPVVYRWMNGAGWGKSH

SEQ ID NO: 29504 - protein, 419 aa, Streptomyces sp.
VQLRYNYRACPDAAQRRALAQAFGCARVVWNDCLRDRKEAHAAGLPYVKSAQLSRLRITQAKRTEERAWLADVSAVVLQQSLRDLDTAYKNFFDSINGKRQGRKVGPPRYKSKKDTRQSIRLNTNAFCLQEDGTVYVAKVGNLKVEWSRRLPAVPTSLTVTKDSCGRYFLSFVVDTEPDILPGLEAESGIDLGLSAFAVLSDGRKIDSPRFLRRAEKKLKRLQRELSRKARGSKNTAKARIKVARQHARVADRRRDFHHKASTQIIRDSQAVYVEDLAVSALGRTRLAKSVHDAGWSAFVNGRSYSLGFGRGVSCHRLFRLPGCGHVAVAPVVHALADAGEHRKRVDLFGQEPANIRGFLGHRQLPGHGPRQEADGELLSHLTVVVGEDMTGVGVRADDAGDLYVVAGLFAGLADGAVR

SEQ ID NO: 29505 - protein, 480 aa, unknown
  TnpB Polypeptide
VNLNETVSIYRKALAFLISVVDENWDAVKSITTGSLEQQRYIDKLVHSTKNHEAKYPDFDKLFYKYPSYLRRATITAAIGAVSSYRSNLANWEVSGKEGKQPTLQVDRNALPTFFRDDMFLVEGAPPKVKVEKNPKPKDELTADEKKIEKAKRKAAELQNSQNELKALSNQYIVRLKVFHKNDWVWATVTLRKTDIAYLRKYWMHACASAPALEKHFGKYSLRFAFEESVTLSDTPIKEQRICAVDLGLNTDATCCIMTADGTILARKFINFASDKDHLYHVLNRIKKFQRLHGSREAHNFWAYAKRINDELSKKIASAIVEYAVLYSVDVIVFEHLDFKGKKASSKRQKIQMWRKNGIQHIAERKAHRCGIRISRICAWGTSKLANDGSGEVSRAQNNHALATFKSGKQYNADLNACYNIGARYFIREIIKPMSNKAWSQCQAKVPDIKRRTQCTLCSLRQLHAFLNSPKRARHAAAVC

SEQ ID NO: 29506 - protein, 451 aa, unknown
  TnpB Polypeptide
MSSYAIKLNGDLKALETSIVTYREALRFLIPIVNTHWDEMKDFENTKQRMTYTEQLVHTTKDNAARYPFDVEFPKFPSYLRRAVLNRAIGIVSSYRSNLENWEEKKVKLEAKGKKPSQIPRLNTHHFDYPAYYKYNLFRNFNPVTKTIDLKVFKNGDWVYETYTLKTSDCNYYQKNLANKKQNVPIIQKKGRRFYATFSYEEKIPLIDEEKIEKICSIDLGLGTDATCCIMGADGTVYARKFIHFSEEHDRLDTQLGRIKRNQRKGNKKNTRLWKRVSGISQDIADKTAHAIFDFGKDHGVDAFVLEFIDFKGKHAVKRAHFWRYKRIFSVLGTKSHRHGLRIARVNARNTSRLAFDGSGKVKRGSKISKATPYNIVQFASGKFYNADLNAAYNIGARYWIRHHLKPVPETERLALEVKVPQVAKRSTCTLSHLISLRSELIALNAKRTQA

SEQ ID NO: 29507 - protein, 418 aa, unknown
  TnpB Polypeptide
MPQRAYKYRLYPNKTQQKLLVNYFGAGRFVSNRCLDWRSLAYKIDGESVTGIDFSRELTFLKKLDTYSWLKEVPATVLIQKLRDLDTAFKKFFKEGAGYPKHRKRHQKQSIRFQMDQRIVKNNFLAGKLLKVPGLGKLNVRWTRLPQGIPKMVTISMDKAGCYFVSMAVEEEIEALPLAGKAVGIDVGLNHLACLSNGEKIDNPKHFKKHKSQLKKLQQRLSRQVKTSNRRKKTKLRIARLHARIADCRSEHLHRLTTQIVNDNQVICIEDINAEGMGRSAKGDMDNPGKMVKQKAGLNRNLKDAAFGEIRRQLEYKASWRSRTVLKVDRFFASSKLCSTPGCDYKHPNLTLDIRNWVCPQCNAEHDRDINAAKNIEAEGLKQLTPAGILGEVRDSGGKGACLISVSPRSSVTSKACQ

SEQ ID NO: 29508 - protein, 177 aa, unknown
  TnpB Polypeptide
  misc_feature (74)..(129): Xaa can be any naturally occurring amino acid
MTFKNINKTRVVKQLEKRLRRLQRRVSRKYLKNKEGSKFVKTSNIIKIEKQIKLLYRKLANIRSNYNHQVTNKXXXXXXXXXXXXXXXXXXXXXXXXXXXXXXXXXXXXXXXXXXXXXXXXXXXXXXXXSSKTCSKCGHVKPKLSLSERTYICEEWGLVIDRDYNASINLSRYELVG

SEQ ID NO: 29509 - protein, 591 aa, unknown
  TnpB Polypeptide
MKVMRGAAFKLAPDKDQESRLADIAAGRRLAYNAALELVDELYQFTAGSDPQTSEALAAGGYTPWRYLDSFTLNNLNVLLRNAGLYGNSKRLPVTVLEEAVVDALRAHAKWMAWTKDKTGRKVGKPQAARYDPRDLTFRIRKGADRALAAKDAIKLPGIKEPVRVAGLTRWLVRQLDKTEGSVRLATVKKEGGFWYASLTVEREQLAPDKIQTLADLDQPCDGRVIPFELRPDVVGGDLGLTTLPTPSDGTAFANPHFLIRSKLRLRALSKQISRAGRRRYLACWRLAIIHDPAKWAKEAELLKANPTTGRGLPVPPAYWRGLVPRSRNLLRLLEKLIILHRHIAAQRKAHGQVIASQIAKSYAAVGLESLNITGLMANSHLSRAIADAGWRGLVSAIESSLVGHGGLLIRHDTFYPSTQLCSGFLPDGTKCPGRMKLDLSTRIYQCPLCGLVLGRDLNAALNLRPRRNQVETALKAREEAKGAYDQKMANRAKRAEKTKETKAQAKAAKAARRAEQEEAIATLSDVISVDRVTRETLNWSGERTANEAEETLPRRRFLDLAALAAGGSGRIDYVVGVPGNSASLLAEPTG

SEQ ID NO: 29510 - protein, 591 aa, unknown; identical to SEQ ID NO: 29509
  TnpB Polypeptide

SEQ ID NO: 29511 - protein, 327 aa, Enterococcus sp.
MRLKVMKLLVAYKTEILPTEEQKEIINRTIGVARFVKNFYIYHNQEVYKSGGKFVSGMDFSKWLNNDYIPNHPDKLWIKAVYAKSTKHAIMETEKAFRKFFQGKANFPKFKKKNHQDVSMYFVKNDKKTIIRCERHRIKVPSLNWVKLKEKGYIPKHDDKHSIKSGTISQQANRYYLSVIVEQDCTAQVLNDTPTEGVGIDLGLKDFAILSTGKTYKNINKSGKIRKIEKQLKRQQRKLSRKYESEKKRVNEKQSKRGEATRKNIEKQVLKVQKLHKRLTDIRRDRVNKIVSELVKTKPAYITIEDLNVKGMMKNRHLSKAVRTVDM

SEQ ID NO: 29512 - protein, 198 aa, unknown
  TnpB Polypeptide
LRIRYVGRIKWEGKQGRLEIVYVNGRWYAYVPIEVGREPPKSNKKGYVRPNYKDKKGRIVNPRSIKQRDPIGDEKAFMDMGLNNLFAVVTTNGYVLLVKGGVIKSEYYWWKREISTYQAVRDLLRNAGFPTWITYHEKYLEAMHTRDERLRHLYRTSIRFLAETLWSRGVRKLYIGYPIMLSQSMETSIIKTYGGIGR

SEQ ID NO: 29513 - protein, 427 aa, Haloterrigena sp.
VSDDNYHRRTAITRLVVSSTAEPLLRETVSEWKRGCQTAVDKAWTRCHSKSDVQQLAYDDVRENTDLGSQHAILACHQAAENIKSCISRRQDGKKASKPTYTSPTVTYDSRTMTLFPDQERVSLTTHGDHSRVRADLELPDNEDGYQHQYLDSDEWEPTESTLHYRDGGWYLHLGFRKPKHDTKGEATENGTVLGVDLGVNEIAVTSTARFFSAGELNHNRREFERIRGNLQDHDSRNAHRTLEAVSGREDEYVKHVLHSVANGIVEEALRYDCDGIAFEELDGIRERLSGAAWHSEWAFARLYEYVEYKAEAAGLFVDTTNPKHTSKRCAECGFIHDDNRSTRDSFECQKCGNRNHADYNAAKNVADMYLRREQQSSRRRGVSQYALKSGTVTPNRGYTPYPDGFEVKSTDKLHRRPTACMPSDHV

SEQ ID NO: 29514 - protein, 296 aa, Bacillus sp.
MEVNEMMINKAYKFRIYPNKAQAILINKTIGCTRFVFNHFLSLWSHAYKETGKGLTYGTCSAKLPAMKKEFVWLKEVDSIAIQSSVRNLTDAYTRFFKKQTSAPRFKSKKNNVQSYTTKQTKENIAIVGKKIKLPKAQRVLSRRMKGSSRWNKQRIKIARIHEYILNARKDYLDKISTEIIKNHDVIGIEDLRVSNMLKNYKLAKAISEVSWSQFRLMLEYKAKWYGKQVIVVSKTFASSQLCSCCGYQNKDVKNLNLRKWDCPSCRTHHDRDINASINLKNEAIRLLTARTMEIA

SEQ ID NO: 29515 - protein, 336 aa, Ruminococcaceae sp.
LAATSREFIATVNDLADYVSRQEKAEKQSCSTFNAKLPSAVKDEASRNAMSIVRKFNRGSVGSFPILKKPQCVWNNQNYRIKQDTIEIPVLVDGKSKRISIAAVINEHNTDKLSGKLGTLRITKKNGKWIAQVAVEENIEALRTSEKVMGVDLGLKVPAVAVTSDGKTKFAGNGRQNKFIRRRHKSRRKRLGKAKKQKAIEKTSNKEQRWMQDQDHKISREIVDFAVRNNIGTIRMELLDNIRQTARTSRKNEKNLHTWSFYRLSSYIEYKARMAGIKVEYVDPAYTSQICPACGCLNKAKGRLYKCGCGFKTHRDRVGAINIIYAPVVSGKRRSA

SEQ ID NO: 29516 - protein, 416 aa, unknown
  TnpB Polypeptide
MYLTVKQQIRHLFKNDYKSLKELCHIAKNLTNEAIYNVRQYYFKEGKFLKYEKNYTLLKDSLNYKTLNSNMSQQILKEVDSSFKSFFGLLKLAKQGKYAFKDCKLPYYLPKNGYTTLVIAFVRLNGNKLILPFSNSFKKTHKPIEITIPPILMDKKVKEIRILPKANSRFFEIQYIYEVNCIQRNLNQSNALAIDLGINNLVTAVSNAGKSFIIDGRRLKSINQWFNKENSRLQSIKDKQHFGKKTTNRQKDIVRDRNNKVNDYMNKAARIIIDYCVMNDIGTLIAGYNVTFQRNSHIGKQNNQNFVNIPYGRLRDKLSYLCELNNIVYIEQEETYTSKASFWDKDEIPVYNNDNPKEYIFSGNRVHRGLYKTSDGKLLNADINGALNIMRKSSVVDMRILYGRGDVDTPVRIRIA

SEQ ID NO: 29517 - protein, 375 aa, unknown
  TnpB Polypeptide
MYKAYKFRLYPNDNQKILINKTFGCTRFIYNHFLNKCKEEKFIKAYDMCKELKELVLDYPFLKEVDSMALRCSIFNLEDSYKNYFSKRSAYPSFKNKFSKQSYRTNCITSVYKNKKYSNIKIDIKEKMIKVPKLGLVKIRGYRNLNELTDRIINITIEKEKTNKYYVSVITEKEEETPKKITPTSIVGIDLGIKDLVVTSDGEKYPNPKEINKREKRLKRMQRKLCRQVKGSNNYNKTKEKIARIHSKIKNSRKHNIITIANKIVKEHDIIVSEKLNVKKMSSNHKLAKNILDAGFNKICELLKWKAKLLGKYYYQVDTYYPSSKICSHCDNKTEITNDLKVRMWECENCGNTNDRDINASINIMFEGIKIHFAS

SEQ ID NO: 29518 - protein, 403 aa, unknown
  TnpB Polypeptide
MGSARYWWNYALALCKQHYKETGKGLGRTALNAYLPKLKSQQETSFLKECPSQVLQSATLNLTRAYKNFFEGRARYPRFKSFHHKQSCQFPQSVKVIDNKAMILPKIKGRVKAKIHRLFEDGKLKTVTVSRTPTGKYYASLLFETQQEEPKPVTEGKAAGIDLGIKDFAIVNDGEKCSKFPNPKHLSKHEKNLKRKQKKLSRKKKGSKSREKAKKLVAKVHERVSNTRQDYSHQVSRKIVDKNQVVVVENPSVHLNSIQVLADGRIPRLNIKGMIRNHKLAKAISDVGWGMFVNFLDDKLKEKGGVLVEIDRWFPSSKLCSHCHYELESLTLDVREWTCPKCGTRHDRDENASANIRAEGIRMLTVSGTGTAAVGGDRSPKLGRKVKFGHSPESTEAPTTALA

SEQ ID NO: 29519 - protein, 379 aa, unknown
  TnpB Polypeptide
MFQYLTTCATMLRVKLIAQVKLLPSKAQAQALKNTLELANAACDWISELAWDAQVFKQYDLHKLIYHRARSHYDLSAQVIVRCIGKVADAYKLDKKTARTFKTHGAIAFDDRILSWKTDKQAVSIWTLAGRQKISYVCGERQKRLLESRIGETDLVYRKGDFYLLAVCEVPEPTPSDVDNVLGVDFGIIKLATDSDGQSYSGEKIEETRQWYAARRATLQKVGTRSAKRKLKKMSGCQRRYQADVNHCISKQLVSKAKDTKRSIAIEDLKGIGARSTVRKSQRAKHHNWAFAQLRSFLSYKAQLGGVRVVAIDPRNTSRTCSACGHCARANRKSQSEFVCKVCHHSANADINAALNIRSLGIVKLPMVSSSIAIQKQAA

SEQ ID NO: 29520 - protein, 204 aa, unknown
  TnpB Polypeptide
LDFGLKTYLTKSDGSKIDSPLFFKQYQNKIKKCNKRISKSVKGSNNRRRRLFELQQAYRKINDLRSDFQWKLAHQLCKQYDYIFIEDLNIEGMKRLWGKKVSDLSHSSFIDKLTYVASKYGVIVHKIDKWYPSSKTCECGCINKGLSLRDRTWVCPACGAINDRDVLAARNILRKGISELESKSNSNDSNVGVSCVCIQESHLL

SEQ ID NO: 29521 - protein, 398 aa, unknown
  TnpB Polypeptide
METTTVRRVYRFRLEPNLSQEEGFMRYAGARRFVWNWALAQRQTHYMATGKSLSRMALSALFTSLKKETATAWLAEIDSQLPQQAIIDLYKAFDAFFEKRARFPRFKSKKRDTARFRIPQRVTLTDGYLTVPKIGCVKVRQSRAVEDATKSATFKRDACGHWFVSLVAEVVMPVVALPMPSEGRTVGVDLGLKDAVVTSDGERVAAPRFYRAAQRKLRRAQRGQSRKIKGSNNRHKARQRVARVHQKIAAKRNDFCHKLTTHLVKNHDAVCIEDLSIKGMAKTKLSKSVLDASIGTIRRQLTYKGVWYRTHVVAVGRFYPSSQIHNACGWRNRALTLSDRVWVCQGCGEMVDRDLNAARNIKDEGLRILTVAAGHAETENACGECVGRPMGAALAIPA

SEQ ID NO: 29522 - protein, 326 aa, Boseongicola sp.
MKMSGAFVAQNFDLAEPMPEEAWKKLTTIVLERGRWFICAQLHITTVGLDEIQVRSVVALDPGVRTFVTECPVNHAASYGDGFYTDKVFPLLLQLDRLVGQRAKARCEEWKRHFRKRIDRLAIRVRNLVDDLHRRVAHDLVQAFDVTLLPSFETKEMSAKKDRRIRTKTVRSMLGLAHCRFRQKLEWMCRKHGKRLVTCNEAYTSRTRSWDGFVDQNLGGARTVSDGRIVVDRDMNGARGIMLRALYGNLGRFRAACAEVALVAELVRRRMLTTYTVEIIEIFLHHGYACATSQHYRNTVHCIRGASIRACRGDSEVRSFRKQEFP

SEQ ID NO: 29523 - protein, 371 aa, Kribbella sp.
MSRFRMYPTTVQQAALLLQCSHARFVWNLALEQWSMWRRDKAFTPGFAEKGRQLTEARAEFEWLRAGSQTVQQQALRDFDHAVRSFFKGTHGRPTWRKAGCHEGFRIVGPQASRVVKQNRKWAAVNVPKVGWVRFRTSRSVPHAKSYRVTRSRDGRWHIAFAVIPPPLRAPGTGGVVGVDRGITVSAALSTGELLICPRLSDRESERLKQLQRRLCRCRRGSNRQKRYKSAIAKLYTRARDRRKDWVEKTSTDIERPGQYLPNRRRAKAGLNRAILASGWGDLVKRLEDKAAGRVEKVNPAYTSQTCSVCGHRAPENRKSQAVFRCAACKHQSNADVNAAMNIAAGRAVSARRETRVPVSLKREPQLAASR

SEQ ID NO: 29524 - protein, 383 aa, unknown
  TnpB Polypeptide
MIKTQVVELKPNKTMLKELDKLCDYRRYCWNQALEVWQNIYEARTLDKDNNPSPNERRVRYELVNNKADWQFALSARCLQLAVKDLANTWKNFFDKAQPDWGMPHFKSKKAPRQGFKTDRAKVVNGRLRLDKPRGIKDWFDIPTYEALKMKQIKIASIFKERGHYYAALSYDEEVRSKPKTDQKTAVDVNVGHFNYTEGKINVLPLRLQKLYKRIKHYQRMLAKKRQINGKLASRSNNYLQVRTKLQRDYHQVANIQNDILHKFTTQLVNDYDQIVIEDLDVKQMMMTHVASKGMQRSLFSKFRQILTYKCEWYGKELILADRTYPSTQRCANCGYVKKGDEKITLQGNQKHHTKHNEYVCYECGYTNDRDDNAVLNLLVLAK

SEQ ID NO: 29525 - protein, 258 aa, unknown
  TnpB Polypeptide
MAVLNCHISLTVCLSISTTQSISFGTAKLINKHGKYYLHIPVTYDVEESNISDICNVVGIDRGINFVVATYDSNHKSGFVSGKAIKQKRANYSKLRKELQMRQTPSSRRRIKAIGGRENRWMQDINHQVSKALVENNPKHTLFVLEDLSGIRNTIERVKTKDRYVSVSWSFYDLEQKLIYKAKQNQSSIIKVDPRYTSQCCPCCGHVEKSNRNKKIHLFTCKNCGYKSNDDRIGAMNLYRMGISYLVDSQVPNTVVTE

SEQ ID NO: 29526 - protein, 427 aa, unknown
  TnpB Polypeptide
MIQSIKIMLLPNNKQRTKMFDTSDPPAGRAGAARYAYNWTVALQIKTFNEVGKYLTDSECRKLFTQHKKQKEWLYNTSNNATKQAIKDCCNSFWRFVDKKKKPNYVPYNKKKIARAKKKGYTLTRYDMHGHPKFKKRGKVQPKFYVDTEKISFTGTHVKLEKIAENTRQNRAKANWIKLAETNRIPLNTNYLNPRCTFDGLNWWISVSIEIDLKIYPTSNPGIGIDVGIKDLAVDSNNNVTPNINKTQEVKQLKCKQRRLQRSISRKYEMNNEEESYVKTSNIIKSELKLLKINQRLTGIRHNHLHQTTNAIRLPDGQVVKTKPSYIVAEDLNVQGMIKNKHLAKAIQEQCLFEFSRQLEYKSNWNGIEYIEVPRFFPSSKICSNCGNLKKNLKLSTRTYICEECGLVIDRDYNAAINLKQYGNKVA

SEQ ID NO: 29527 - protein, 396 aa, Prochlorothrix sp.
MLVFEFKAYGKESQFAAIDEAIRTFQFIQNKCLRFWMDNEKVSKYDLNKYSAILAKEFPFANELNSMARQSAAERAWSAISRFYANCRKEVRGKKGFPQFKHDTRSVEYKTTGWKLADDRKSISFTDGKNIGRLKLKGTRDLHFYQKEQIKRVRLLKKADGYYVQFYIDVERREVIEPSGSTIGLDVGLKEFYTDSNGETVDNPRFLRKGEKRLKQAQRRVSRKEKGSNNRRKARQLLGKRHLKISRQRKDHAVKLARCVIQSNDCVAYEDLRIKNMVKNHCLAKSINDASWYQFRVWLEYFGKLFGKITIAVVPNGTSQKCSSCGTVVKKALSTRTRVCRCGCVLDRDHNAARHILQKAIGTVGHTGTYGLDPSNASGEMTSTLVGAILPEQVAS

SEQ ID NO: 29528 - protein, 332 aa, Prochlorothrix sp.
  misc_feature (57)..(90): Xaa can be any naturally occurring amino acid
LGHSLLSLCSVIRLSFANLAPDTLKLSLSFAIVPTHRISIYAIMVSMKVRYQYRIYXXXXXXXXXXXXXXXXXXXXXXXXXXXXXXXXXXLKGNKLELAKLGRFKVKWSRPLPSEPSSVTIIRNTAGQYHASFVVEIGPINIEPLRPSIGVDLGIKTFAFLSTGDRVESPGYNRLDRKTRRFQRKLARQVKGSKRREKTRLRIAKLKLKTANIRKDFLHKTTTQLIHENQVVVLEDLAVKNMLGNRKLARAISQQGWGTARTMCEAKANRVNDREVRIISRWEPTSQICSDCGFRWGKVDLSVRSILCVSCGTEHDRDGNAAKSSRKVWGWG

SEQ ID NO: 29529 - protein, 370 aa, Salmonella sp.
MKRAYKFRFYPTPDQVELLAQTFGCVRFVYNSILRWRTGAYYERQEKIGYVQASARLTALKKEPEFAWLNDVSCVPLQQSLRHQQTAFANFFAGRAKYPTFKSKRHKQAAELTASAFKYRDDKLYMAKSKVPLDVRWSRELPSAPSTVTVSKDAAGRYFVSCLCEFEPVSLPITASTVGIDVGLKDLFVTDTGFKSGNPRHTAKYAARLALLQRRLSKKVKGSKNRAKARLKVARLHAKIADCRMDALHKATRKLINDNQVVCVESLKVKNMIRNPSLSKAIADASWSELVRQLQYKGEWAGRSVVAIDPFFPSSKRCSCCGFTMKKMPLDIRKWSCPECDADHDRDVNAARNIKAAGLAVLACGVAVNP

SEQ ID NO: 29530 - protein, 315 aa, unknown
  TnpB Polypeptide
SVWITSELFSFRTNDETHCEELILGTKKFPLGVLSFKAQTPYSRPASLHVSVEAGKWFVSFSSDDGLPEPKEEDTISWLRMLSEEELEGKTLGFDRGVVTPVMVSSGRRIDFSDIQKSRMEKKERSRKRWQRKLARQQKGSQNRKKTKRRLSRSFEYVKNVRKDVIHKATRDFVSDSDRTLFVVEDLKVKHMTRSPEPKKDESGRYVRNGARAKAGLNRAILASCWGLFVVLLSYKARRAGKLVLKVSPQFSSQECARCGHIHPDNRPSQAGFVCQRCGLTDNADHNASRVIAKRGIRLLLEGNAPGAGSENSKR

SEQ ID NO: 29531 - protein, 201 aa, unknown
  TnpB Polypeptide
MTKVIGMDYASDGLYVDDTGVRGTEHKYCRESQKRLAKAQRRLSRMTGSGKHEAKSANYLKQLRKVNKIHKHVSNQRLDYLHKLSTEIANRYDVVCVEDLNMKAQSNKSFGNGKATMDNGYGMFLNMLSYKLADRGKQLVRIDKWYQSSQICHCCGERHPEMKDLKIRIMRCDCGNVMDRDQNAAINIRNEGIRILMSSVA

SEQ ID NO: 29532 - protein, 384 aa, Planobispora sp.
VSNNHAVLNRSRDDVDMAQSVKRAYKYRFHPTPGQAQELARTFGCVRLVYNKALEERTRASTVEGRRISYVETSAALTQWKKTPELAFLSEVSSVPLQQALRHLQAAFANFFARRAKYPVFKSRKKSRASAEYTRSAFTWRDGRLTLAKMDGPLDIVWSRPLPEGAQPSTVTVSKDAAGRWFVSLLVQETIAPLAATGKRVGADAGLTSLVTLSTGEKITNPRHERADRRKLAKAQRNLARKAKGSGSRAKARLKVARVYARIADRRRDHLHKLTTRLVRENQTVVIEDLTVRTMVKNHSLARAVSDASWRELRSMLQYKAQWYGRDLVVIDRWFPSSKLCSACGTLQEKMPLGVREWQCACGALHDRDVNAANNILAAGLAER

SEQ ID NO: 29533 - protein, 377 aa, unknown
  TnpB Polypeptide
MKLVKTVQCKLQVDSELTDVLLETLSRFASCCNDILVVANESKVRNKFRLQRLCYHNLKAKYNLPANLVIRAIARVTASFGGKRPPKVFKPTSIEFDMRTFAFIEPKEEVSISTHDGRKHIKLSLGNFQRGLLKGQKPTSAILSYRRNKKTFYINIVLEKEVSVPSGNNPVGIDRGLYNIATTSKGQRFSGKKAMQTKKHYAELRQRLQAKGTKSAKRRLKQLSGKERRWMTDIDHCISKAIVNNCKPGDVIVLEELTYIRDRIRAAKKQRQVLHSWTFGQLQNFVEYKSLEAGIPVKYIDPRYTSQRCSRCGQIGIRNKHSFRCPSCGLSNHADFNAAYNIQQAGLALLDGVQSITPDVASVDAKAPEQLLLFAVN

SEQ ID NO: 29534 - protein, 410 aa, unknown
  TnpB Polypeptide
LINLYNFGILYKYNYIKAMYKGFKYRIYPTKAQSTLLNKHLGCTRLVYNLALELKTMAWAGHRTNLSRYDISKQLPELKNEYPWLKEVNSQSLQSALVDLDTAYDKFFKGQADFPNFKRKAHGGSFHIPQNITLEGRKLSIPKFREGIDIVLHRETKGIIKSATISKTPTGKYFVSILCDTGQQPKPKPDIKPETTVGIDLGLKDFAITSDGLKVSSPKYLREAECKLKYLQRKYSKYKGKRTREKLALQHEKVANKRKDFLHKLSTRLIRENQTIALEDLNVKGMQQNHCLAKSISDAGWGMFVDMLKYKAEWYGVNLLKIGRFDPSSKTCSNCGQIHEELTLSDRKWECKACNKTHDRDVNAAKNVKAFALNNYNVSAGRRNKSQDELSALVEVMTPEAHPIGSAVGE

SEQ ID NO: 29535 - protein, 364 aa, Halorubrum sp.
LTANLVQKGIRRAIEATKSGVVRLKKGDKTSQPHFDAWSVVYDKRSATFHRDHVSLSTVNGRVECDYVIPTEPEGTPIGEYLLNEDYEFRMSTLQYDRFSESFYLHARLRRIETDEQSTTDSSDTKHRTVLGVDLNVDGSLAVTSTGAFIGNADEMTHQRREFEKTRGSMQQTGTRSAHLSIQSMNDREHRWMQDELHRASNQILEEAREHGCTHIVFENLTGIRDRVVGAKRFHAWAFRRVYQYVEYKAEEHGIEVEQVSPAYTSQRCSSCGFTHESNRRSKHQFVCQKCEYELNADYNASKNIARNLLKRLHSGQKSSSGGALCQCALTSGMLSLNGDFHASVSSTVEGESTDKPTTSVVGY

SEQ ID NO: 29536 - protein, 557 aa, unknown
  TnpB Polypeptide
VTKEKLNVSEKEEKELIGIIMSSPSLKTKEQSNENQKKQEEKFVIAESLPETKQMILRGKNNTSEQDIQHTNSLRTLDQVLTSRGKDLKPFWTTHTTENSKNLWLPIKTDCVDSDSTLLNTSLQNSQKEKSLFSMTVKVQKMKNLSRTSYQSSLFSQQESMVSESIKPAFSQNFSLKMMRIRIIPTLEQKNMLNLWFGVYRRFFNEAKIKSENTKTYSFQNLRNSLRENSKYVVPEKWDKKLIPPRIITGAIKDYCSAFKTGMSLLRSKKINRFQVHIKRKKQRTQTLNLEKSCFGKENVLFPNLKLKDGETRGLKFFGTYKLKKKKMELKEIPIEHDCRISYQYGKFYLLVPYEKKEIVTEPKISTISIDSGIRTFQTGYCPEGHIVEIGKNPLEKLRKQFDRIDILNRIWIEIFHRKGMRTTRKQRRIYEKMKNRVDDLHWKTIKFLTTNYKTIVISDFRTQSLLKRRELGRQSKRTLGVLSHFKFRQRLIEKCETIGNNLHIQDESFTSKTCGKCGIINPFLGSSKEFICPSCDYESDRDVNAGRNILLKFLQS

SEQ ID NO: 29537 - protein, 387 aa, unknown
  TnpB Polypeptide
MSIRTIALTLRPTASEKVALLRLQERFNAACNHISGVAWDAQEFNKVRLQRLCYGDVRRKFGLMAQHTIRAIAVVAASYKADREGVHSFREDAAVCLDTPRLYRVEHNRASITTLDGRIKVELGIGGHQRQMLKDAVKLAEADLIRDRKGRWRLLVSAHYADPPTVDTEGVLGVDLGRRDIAVTSDGVTFSGAKVTAIRDRYTTTRRSLQRKASKGTRSTRRRVRAIEKRISGREKRFQRDVNHTISRRIVETARATERAIAMEDLTGIRERTNRQPRSKEERQRSNSWAFYQLRVFHAYKAVAAGVPLVLVNPAWSSQMCHCCLYIGERSGKHFACVNPACLWRGDADYNAALVIARMGASVISPGGSPLCCSYQPGGRATASPGL

SEQ ID NO: 29538 - protein, 367 aa, unknown
  TnpB Polypeptide
LNRAFKYRLKPTKEQQVLIQKTFGSCRFIYNKMLEDKINAYNKDKTNLKVTPAKYKSDFEWLKEVDSYALCNEQMHLQTAYSSFFRNPKKVGFPKFKSKKSDRKSYTTSNVHNIIRINDNHQVHLSKLGWVRFIEHRKIPTDHIIKSATISQSATGKYYISILTEYVSQSISPVLDKYNSLGLDYSSHDFYIDSDGGSASYPRFFRKYESKLSKEQRKLSHMKCGSLNYKKQKVVVAKIHEKITNSRNDFCHKLSKKLADTYDYVFVEDINLQNISKGLHLGKSTLDNGFGIFREYLKYKMADRGKKLIKIGKYDPTSTVCSECGTYHKDIVNTLSVREWTCPDCGAHHNRDVNAAKNIRKIGLSLI

SEQ ID NO: 29539 - protein, 382 aa, unknown
  TnpB Polypeptide
MIFLGKGSGMVANRAYKFRIYPNDEQKILFAKTFGCVRMVYNHWLDRKIRQYEENKTNVTYTICAKEMAAMKKTEEYGFLKEVDSIALQQSLRHLDMAFQNFFKQLKTGFPRFKSKKRNKNSYSTVCINGNITISNGYLKLPKIGQVRLKQHRIIPEEYRLKSVTVSQTPSGKYYASILFEYEDQVQEREMQKFLGMDFSMHELYRDSNGKEPAYPKYYRNAEKKLAREQRRLSKMQKGSSNRNKQRIKVTKLHEKVSNQRKDFLHKQSRQIANAYDCVCIEDLDMKAMSQSLNFGKSVSDNGWGMFTTFLKYKLEKQGKKLVKVDRFFASSQTCSVCGYKNAKTKNLALREWDCPQCGTHHDRDVNAAINIRNEGMRLVIG

SEQ ID NO: 29540 - protein, 358 aa, unknown
  TnpB Polypeptide
MLCTLKIKLVPTTEQFNKLAETMKRFNLACNYISQIAFDSKTLGKIGIQKLCYYDIRAKFGLSSQMAVRAIGKVSESYKTDKKTLHTFKETGAMVYDQRILSFDGLEIASLLTLDGRVKVPMVLGDYHHGLLFGKRVRGQADLILQDGVFYLLLVVELPEPPKIDVKEFLGVDLGVVNIATTSDGKEYSGSAVRGIRYHHAALRKKLQKKGTKSVKRLLRKRRRKEQRFATDVNHCISKQIVSVAKGTKRGIAMEDLGGIRERLTVRKAQRRELSSWAFFQLRQFVTYKAILAGVEIQFVDPRNTSRTCNECGNIDKKNRKNQSHFECTACGFVANADISAAVNIGRRAVVNQPYAGV

SEQ ID NO: 29541 - protein, 318 aa, Cohnella sp.
MQAERAGIFPKLTSKDIRANLPSAIRNQVIRDARSIHKKTNKQGNCPILRRRAYYVNNQNYSINSNSVAFPVLMDGKVQRLRVASRMSERENHLLASGKRGLLKVVEKSGKWYVQVSVEIQTGQAIGDSTMGVDLGLKVPAVVVTSTGKTKFVGSGRQNKYIRRKYSSRRRKLGKLKKLSAIRKQQNKEHRYMKDQNHKISRQIVNMAKEQQVSVIKVEKLTNIRQTTRTSRKNAKNLHNWSFYQLQIFIAYKAALAGIRIIEVNPAYTSQTCPICGKRNKAVDRTYRCSCGFHAHRDRVGAINIMRQPVADGNSLSA

SEQ ID NO: 29542 - protein, 498 aa, unknown
  TnpB Polypeptide
MATYSLELKLNTKKASDCWYLENYFREVAKISNTVRRFAMRRIERLKRDKNYRDLLAQYIKLIKQDKEKEKETVGKELSVVVWSYGLTKFHLQKSALDLRKNLRYVHSTVYQKICDQVWKGVEKVLYADGKRMHFKKWDDFLSFEGKSNTTGIIYQDGKVYINCTPKRPKGGIILSVKLPNNKNSDHWNYETRCLCDPTKYCRIVRKKFSSGWCYYVQLIQEGIPPQKHVRGTGRIGIDIGTSTVATVSETACHLDVLGDSMETKEKEIRRLQRKMDRSRRATNPQNYKKDGTVKKGKKRWAYSHHYQKMRDQLKTMRRKRTASLKQWQEIYANRLLEEGDEVYVEDMSFNALKKRKKKTEKKENGRYKSKKRFGKSIGNHAPAQFLTIVKRKLDQTGGKYHEVNTWKFKASQYDHVADTYTRKKLTKRHHWANKDWVQRDLYSAFLLMNSDKSLEHADRNLCLLHYPTFKKLHDQCIEEIIASDKHIPASFGFHRAA

SEQ ID NO: 29543 - protein, 400 aa, unknown
  TnpB Polypeptide
MRRQGYRFRLKPSVVEEASLRQFLGCSRFVWNAILAENTYRYDQGDPLPLTYAALCARLQILKTRHEFLRAVHSQPLQQTLRDLAGAYEMAFDPNLAAQMPTFKKKAYAQGIRFPQGFNVERSGVFLPKIGWVSFRVSKRTARRKIEGEVKNVTVRLEASNWYVSFQTERAVDERTHKNAGSVIGVDVGVARFAALSDGTFFDGVNAFKQHERRLARLQRRLARKVKFSANWRKAKARIAKLHSRIANIRKDQVHKASATISKNHALVVLENFNVANMTAAARGTVANPGSNVAAKSGLNRRILDQGWGEFRRQLGYKLAWTGGTLLLVDPRNTSRTCSACGHVSAENRLTQAAFTCVACGRASNADTNAAINILRRAGQARIACGDAQASTKQEAPRAA

SEQ ID NO: 29544 - protein, 391 aa, unknown
  TnpB Polypeptide
MKTLFRASKETIDRLFECNRVSGEVWNFCLALAKETHLKTGKWITKSELQKRSKGIFPIHSQSVQAVCHKYLFARDAALKARKAGHKTKYPYKKKTYFNTKWANNGFKVFENGKIELSMGIFEGRRQKPLNIWVKEWPKGKIKEIELIFDQQLMLSIAYEDGREVKENQFVNRAAIDVGEIHTITAVAENGENLIITGRHLRSIHRLRNKKLSELQRKMSKCTKGSKQWKRYNRAKRYVLSKSEHQLRDALHKTTKQFVDWCLANEVKEVAFGEVDGVQRNTSRRKKKKIRRRTTNQKLSNWSFGKVYAFLSYKLEAEAIKLSKHDESNTTQPCPCCAKKRKVSSRIYSCTCGYTNHRDIHGASNFFAKTFYGEIRELDFLLNHTTYLRIA

SEQ ID NO: 29545 - protein, 381 aa, unknown
  TnpB Polypeptide
MLRHKAYKFRIYPTKEQEIFIAKTIGCSRFVYNHFLHRWSTTYAQTGKGLSYEACSALLPQMKREEATCWLKEVDSTALQSSLKNLADSFSRFFNKQNHQPKFKSKKNPVQSYTTKNVNNSVELKEKHVKLPKLGLVACAKSQEPKGRILNATIRQHASGTFYVSLLCEEDIHELPKTGSPVGVDLGITDFAILSDGRKVDNNRFTSRMEKKLKREQRKLSRRALIAKKKGINLFEAKNYQKQKRKVAKLHEKVMNQRTDFLNKLSTEIIKNHDIICIEDLNTKGMLRNHKLAKSISDVSWSSFVTKLQYKAEWYGREIIKVDQWFPSSQICSGCGHQEGKKALHIREWTCPACRAHHDRDINASKNVLAEGLRVHALSLG

SEQ ID NO: 29546 - protein, 451 aa, Nodosilinea sp.
MKTKKPTKIIRTDKWTLNPTAEQRVLFGETVAVYRRLCRHLVGVVFTHWPELGSLPSDNLVPAIERLIHQTAQNPSPKYALIDGTFHKFPSYYRRAAIMFAAGQVSSFLTRYQEWQSGPSRKRKDAKPPQLNADAGCYPTLYKGQCYKLHGYEQVEIKVFTGSDWVWTTVQITGLRDRHEVPGNKLLSPSLIVNSKACHLSVPFHCMPAKRKPDGNVTAVDLGINTTATVAVVTHDGTVIHREFIHPGRDIDRRDKRLKSVSMRASKTMGKGGKLHKGFCANTYRKCQNINQQISHIVSKRIVQIANEFNSEAIVFENLKGWKATGGRKRSNLRQRFHGWLKAKIRDFTELKWQELGGKVIDIVAAYTSKLAYDGSGLVRRDSKNYALAKFSSGKRYNADLNGSQNIAARGILKLTRRKDSEDCSSKRSGRSPRSWACLCDLWTLDSSRLT

SEQ ID NO: 29547 - protein, 295 aa, unknown
  TnpB Polypeptide
MLTTCYGFKIQDGVLRLPVKPRTYVYIPLNSHTRRSLSGVAVRSATVTPHTVSISYSKEEVDYKPEGYLGVDRNLDNVTVASTEGKARRFDLSEATRIKSTYRLVTSRFHRNDARIEHVVYAKYGLRQRNRVQPLLHNVSKNIVDEAKTRRYGIVMERLTGIRSLYRKGNGQTRKYRARMNSWSFGELQRQIEYKARWEGVKVTYVPARNTSKRCSVCGYKTLESTMRQVWCPGCGTMLDRDVNAAVNIAAGGVRFTPYGPPVEAMVEEREPNKAALILKVDGDKLSHLRMANQC

SEQ ID NO: 29548 - protein, 415 aa, unknown
  TnpB Polypeptide
LTPLNHKSILSLVKIRYKFRCCPTKAQKASLARVFGACRYVYNWALRMRTDAYFKDGISVGYNESSTRLTALKRDPMHAWLNKISCVPPQQALRHLQTAFANFFEKRAAYPKFKRKDGDQSAEYSRSAFKWDARNRNLALAGIGRLKVRWSREFASLPTTITVSKDTAERYFVTLCLDETILKLPPVHEAVGIDLGITTLATLSTGEKIENPRHLKRLEGQLARVQRDLSRKKKGSNRRADQRLKVARLHARVADARADYLHKVTTDLVRRFDVICVEDLNVRGMTKNHGLARALSDAALGEFLSMLEYKCEWYGRELRTVDRFYPSSKRCSDCGHVLEELSLAVREWDCPECGKHHDRDENAAKNILAAGHAVNNARGGGGRPVRAKARKGGSRRTVNQPGGQGKPRSSGIPAL

SEQ ID NO: 29549 - protein, 400 aa, Escherichia sp.
  misc_feature (3)..(3): Xaa can be any naturally occurring amino acid
  misc_feature (240)..(240): Xaa can be any naturally occurring amino acid
VEXLERAYKNFFRKRAAFPRFKKRGQNDAFRYPQGVKLDQENSRIFLPKLGWMRYLNSRQVTGVVKNVTVSQSCGKWYISIQTESEVSTPVHPSASMVGLDAGVAKLATLSDGTVFEPVNSFQKNQKKLARLQRQLSRKVKFSNNWQKQKRKIQRLHSCTANIRRDYLHKVTTTVSKNHAMIVIEDLKVSNMSKSAAGTVSQPGRNVRAKSGLNRSILDQGWYEMRRQLEYKQLWRGGQXANIRRDYLHKVTTTVSKNHAMIVIEDLKVSNMSKSAAGTVSQPGRNVRAKSGLNRSILDQGWYEMRRQLEYKQLWRGGQVLAVPPAYTSQRCACCGHTAKENRLSQSKFRCQVCGYTANADVNGARNILAAGHAVLACGEMVQSGRSLKQEPTEMIQATA

SEQ ID NO: 29550 - protein, 435 aa, unknown
  TnpB Polypeptide
LACCFSTAAAEPACTASYRLRARSAIFPAVVCGSGDSPGTMSAAVIDTSGGNASFRAGMKWAACRAGRNVGRGWDAQPMSRYRLDPSPEQEAVLLRHCADARYVWNLAVEQQSWWRPGRKPGPGYLEQCRQLTAARADNPWLRQGSQMVQQQALRDFDQAMRNFFSGTHRRPRWRKAGSRPVPGDARSYRVTRDRAGRWHIAFAVAPEPVPAPANGEVAGVDRGVAVSAALSTGELLDCPGLNASEWQRLRRLDRKLARAERGSGRRGKVKTAAARLKTREADRRKDWAEKVSTGLARRFDVIRVEDLKIGNMTRSAKGTAETPGRNVAAKAGLNREIGRSGWGLLVRRLEDKAPGRVEKIPPAYTSQRCSACGHVDAKSRESQARFKCTACGFALNADVNAARNIAAGHAVTARGGFRVAGPVNREPQLALQAS

SEQ ID NO: 29551 - protein, 373 aa, unknown
  TnpB Polypeptide
LWEAERLFLTADGEADKLWGNQTIRVHPDQGWLEIRLPTPLAHLSNTSGRAPTYRLSCPVAFTHRRDEWAAQAASGAVRYDISLDPAKGGGTGKGRWHLDASWRLPARPVPALDELRQQRSLGVDLNADHLAGWILNPAGNPLGQPHTILLDLDGQPASTRDGRLRAAVAELLRLANAHGCRSLTVENLDFADARHTGRETLGRGRRGKAFRRVVAGIPTRAFRDLLVGMAANAGLWIIAVDPSWTSVWGGRYWQQPLNSSTTRQVTVSRHHAAALVIGRRGLGHRARRRGWRGLSPPEDGQGRAADSAGRPTTLDAAASAPRVVPEPTAQGPGGPGGQRAGPHAYKTRPPESDTASDQAAQDRSGPPISANR

SEQ ID NO: 29552 - protein, 394 aa, Methanoculleus sp.
MLRRYRYRLYPTEDQKTLIAQHLGCCRVVYNWALARKNQAYHDGGISLSRYDLMKQLPALKEELPWLKEVNAQSLQQSIHHLFRAFTNFFEGRAEAPTFKAKHAPEQAFTVPQSYTVDFERGTVKLPKIGSIKVKYHRTFVGTMKSATVIRTSTGRYFLSIVVEDGRKPPKPVDPVPDQTVGIDLGLAHYAVLSTGEKVANPRHLRNAQKRLAVLQRRLARKQKGSKNRNKARLKVARCHQEIADQRRDFQHQLSSRLVRENQALAVEFLNVDGMVKNHSLARSISDAGWGTFLSMLAYKCQEAGKPLLKIGVFEPSSKTCSVCGYRKADLTLKDREWTCPDCGTTHDRDLNAATNIKQFALAGAGRAEEPVDPLPVGRGMIAGKPPAQAGVVH

SEQ ID NO: 29553 - protein, 344 aa, unknown
  TnpB Polypeptide
LVYNQCLAERKQAYETERKTLTAYDQILTLPVRKQEIPRLKDVYSQVLQDVPRRLDKAFQAFFCRIRSGGKPGYPKFRFARRYDSFTYPQSGFNLQGNRLRLSKIGAVSIRLHRPIEGEVKTLTIRRRAGMWFACFSCEVESQTLPATGRVAGIDLGVTNLAITSDGEFHPPNRNLRKSEQRLKRLQRAVSRKQKGSRRRKKAVRQLQKAHLRVANQRRDQAFKATYSLLHKYDALAMENLQVSNMLQNHHLAKSIADASWGIFKNILGAKACEWGRQIIFVDPRYTTQECSRCSAIVHKPLSQRQHVCPHCGLSIQRDVNAAVNILKRSGLVQAFGDSQALAG

SEQ ID NO: 29554 - protein, 334 aa, Calothrix sp.
MFGKQLNCATLQSHIAKLRKRNFFWQSVGSQAVQDICQRIEKAYQLFFKHNKKGVRPPGFKKVKKYKSFTLKQAGYKFLGGNRVKIGSRVYQFWKSREIEGTVKTLTIKRTPLGELFMVIVVDDGHNSEVEVKTGRIAGFDFGLKTFLTCSDGTKIESPQFFKQSLNTIKKASKQHSKKLKGSSNRERTRKNLVRKYEDISHRRRDWFWKLAHELTNKFDVLCFETLNLKGMQRLWGRKISDLAFGEFMAYLEWVAKKKNKLVVFIDQWCPSSKTCSNCGHILESLDLSVRGWRCPSCHSVNGRDENAARNIQMVGASTIGLGDVSRATPAITV

SEQ ID NO: 29555 - protein, 403 aa, Haloferax sp.
VEYRRTAVIKLDTPEGADPLLRETVEQFKHCANTASEWCWHGDDGYHVTSKAKAEQALYDQLRDETNLTANLVQKGIRRAVESVKSGVERLKRGENTSQPYFSANSAVYDKRSATFHRDHVSLSTVDGRIECDYILPDDSEKPPTKYISDEDFEFRMAHLQYRDGDWYLHASMRNVEADDEPESDSKHRTVLGVDLGVNNIVVASTGRFWSADEFNHWRNEYEKRRGSLQQCDSRYAHENIESVGRKETGRFEIYLHTVANELITEAVEHDCSHIVFEDLTHIRENIPKATWQHVWAFRRLYEYVEYKVEEYDVEVVQVDPRNTSKRCSTCGFTHGDNRSGESFCCQKCGYENHADYNASKNIGLQYLRRRQNANDGGAPVDVRLNRGMLNVNGEYSPTALSS

SEQ ID NO: 29556 - protein, 366 aa, Haloferax sp.
  misc_feature (56)..(56): Xaa can be any naturally occurring amino acid
LVRQTTQRRHESEPTEVPQTRRRTPPKHGDVQSRRFQTRHPVQPSPTLQRLESQRXPRSTVTFKAAGFKLDTQYNRVRLSKGSNLKEYWSDFILCEYKTRPDVDLSTVESVQQVRAVWTGDEWELHFVCKVEIEVAEAPGEKTVGVDLGINNFAALAYEDGHSELYPLNCLKQDDYYFSKRLARCDDSDSDQATRLNQKKSARRTHYFHTLSKHIVQRCVDEEAGTIVVGDLSGIREGEGNGESKNWGKHGNLDLHSWAFDRFIDLVEYKSEMEGITVERVSERDTSKSCSCCGRNRKSNRVERGLYVCDDCGVVANADVNGAENIRQKVSPSPSEDRSNGWLAQPSTFLFDKETGAFAPQEQVTS

SEQ ID NO: 29557 - protein, 332 aa, unknown
  TnpB Polypeptide
MLNRMFGCVRVVWNRTLAARRARYAAEGKGTGYAETDRALTAMKRDPELEFLNEVSAVPLQQALRHQQAAFAAFFEKRARYPRFKSRHGRQSATYTRAAFRMKDGTLHLAKMDIPLRFVWTWPGVDVASLDPTSVTVARDPAGRWFVTFHVDVPHPAPLPATGQSVGVDLGLGDLAVLSTGEKIPHPRDWERHEKRLRRYQRRLARCRKGSANRAKARIKVARAHARVADARRDFLHKVSTDLVRRFDVVAVEDLQARAAPLDEGGRRRAGWPPERGGQRRLRLLVPGHVHPGDPPDDRVGQVRGAGRGRPPGHRPAVVTCAPGTSGARRVG

SEQ ID NO: 29558 - protein, 223 aa, Okeania sp.
LLVIEAKLKGSQNQYKVLDEMILTGQFIRNSCLRYWMDNKDVKRNDLQKLCSQLAKDANFPWAKKLNSQARLASADRAWQSIQRFYKNCRLKLPGKKGYPKFKKFTRSIEYKTTGYKLSPERKKIEFKDGFKAGVFELWTSRDLVWYSEQQISRVRIVRRADGYYCQFLVNAERKETHNFEGNVVGIDLGLNAFYTDSNGNFVENPKYLRKSEKRLKKLQRKV

SEQ ID NO: 29559 - protein, 491 aa, Cylindrospermum sp.
MSPAKGGIRRKYGGTGFSQGVTTRLYKPPTSVGLPILDRFFPKGDPKTLLANQFRTDWVSGDIDKPISVSHDLNYQSNYANYDSIRQEVKAGGKRMLVFEFKAYGKSAQLTAVDDAIRTAKFIRNSCIRLWMDVKDTGKNDLQKYCAVLAAKFPFANELNSMARQASAERAWSSISRFYDNCKKGISGLKGYPQFQKDCRSVEYKTSGWKLAPDRKSITFTDKKGIGRLKLKGTRDLHQYQINQIKRIRLVKRADGVYVQFCINVNRSEDIEATGNTVGLDVGLKEYYTDSEGEMVENPKFLHRGEKVFKRSQRRVFRKVKGSKNRDKARQILGKRHLKISRQRKDHAVKLARYVVQSNDLIAYEDLRIKNMAKNHCLAKSINDASWYQFRIWIEYFGKVFKKVTVAVNPQYTSLECSSCREIVKKTLSTRTHVCKCGCVMDRDENAARNILSRGLSTVGHKGTFALDASNAWGDETSTLCGESLIEQVMS

SEQ ID NO: 29560 - protein, 466 aa, Streptomyces sp.
VAEAAEQETRVIGAEAKRVKREVLGIPDQRKHRERAAKPLTSRAKEPGTQQRVYRYRFYPTGVQAQQLVQTFGACRWVYNEGLALRANAWRDHHVSVGFAETSRALTGWRQTRETSWLQAVSSTVLQQSLRHLDAAFARFFKGTAEYPKPKRKHRSRDSATYVRTGFRWREDPERPGTGLISLAKQTEPLDVRWSRPLPAGVLPVKLTVNRDRAGRFFLYVLVEERIAPLPAAFVPGSTAPKAVGLDLGLAALVTTDDGSTVEHPRLLKKYEKKLARLQKELHRKQKGSSNRGKVREKIARLYALITDVRKDGLDQLTTRLVRENQVLVVEDLAVANLLRSPSGAGRRRKAKLNQSISDAAWGQLLRMLRYKCEWYGRTLVIVDRFFPSTRRCSSCHAKGERLDVSIRSWTCRECGAVHDRDANAAVNLRDEGLRLYWLVAMALPPGRATPTVIRASELPGCVVAA

SEQ ID NO: 29561 - protein, 362 aa, unknown
  TnpB Polypeptide
MPVKLVTDETQKRQLSVTMRAFNQAATHAARIAFDEGLRTKRLIHNRCYRELRERFGLSSQMSILAIWKVAECFARDKKTCPQFGDTSAMTHDVRTMSFKGLDKVSILTLEGRIIVSILMGDYQAGYLPRQKGQCDLVYRDGEFYLYCTVDIPDGTPIEAERYLGVDLGIVQIAADSDGHTFSGTDIESVRVRCATHRASYQATGTRSAKRRLKKMSGKESRFRRWVNHGISKKLVDYAKGTRSVIVLEDLTHIRERVTVRKRQRNRHHSWSFSQLRQFITYKALREGVPVITVDPRNSSRACSKCGYVDKRNRKSQAEFSCKRCGFQGNADLNAARNLATRGQVTAPHLVTPRHGQLAFSW

SEQ ID NO: 29562 - protein, 514 aa, unknown
  TnpB Polypeptide
MRAQTPSYVVSTKVQLPESITNRLEKSFRISNSAYNEALSFGLNRFETLKRNSEYQELLKARRPVAAKLAALKKAKKKDKALTKQVKDYDNALFELRKAYSLTEFGLSAHLIQQRRKPGSPYQQMSASEIQVIAGQAYKTLEKVLFYQIKPHKVRFRSKFDLDVSYRNRVNTEATRLVPSDRKGIAYRLYIHKKSTFVDIPDKAFNKYQQLSLMRSEKIKYVQIVRKTIRGKKVYYLQIVCQGFPPSKTSKGEGVVGIDPGISTVAFASPTEVALVDLVPTTITQKEKLLKKLDRKIERSRRVNNPECYDECGEIKKGARFKRPSNRQLHLRNRRRNVYRSLSEERKKIQGQLINRLISQASSIRIEELGVKGLQRRSRDIRINPKTNRPYSKKRYGKAIFRAAPSAFRTALETRASQLGIGIEVISPKDVKPSQYNHITQTFDKKSLSTRVYDLSDEYTGVQRDLYSAFLIEHIENGHYQQEQLEQNFPVFYQQMKDFLHQPTETERLAWYLN

SEQ ID NO: 29563 - protein, 465 aa, unknown
  TnpB Polypeptide
MFNDILGKGKMSMSENSKGMNIITSYTVPIKCQMEVESGKAMSTHKVDDSLMKSTRDVCMEALRFCVDVYLREWNEIHGTIYKARMRKCDVLVHSTVTNKAKYPEFDKMFPYMPSYTRRAIVKKALGIVSSYKTNHGKWEKTDVSKRGKEPTLGMPTVFELTFYDQERKLDFDESIISLKLFDGCTWEWYHFRIQNSDARFIRNMASGRKLLSPVIDKTRRGYSIRFGFKEKKALVQNEDQLEHFVLAVDLGINAPGSWCVMTSDGSVHARGVIHLACDEDRLRHLINRKRMFQKSGKKHHYVFRQINNANKKLSVDTSREIMRIAVLYNVDVIVFEHLDKKGRKHGRYRERIHMWRSSDVQRRVELQAHRNGMRISRVCAWGTSSLAFDGTDKVKRGRDSEKTNDNYSLCEFQTGKVYNCDLNAAYNIGARYFLRAYSRLPDCPELPNASKRTYNMLRDLMMVS

SEQ ID NO: 29564 - protein, 444 aa, unknown
  TnpB Polypeptide
MSDKLQTVIIFPLSGLSQSMTTRIRNGRLEAAKVWNLCRDLHLEARKTGTKWPGRDSLQQAVKGGTFALHSQSAQMVCHAFLANVKTTRELRKKGNKQIRYPYRDKMFYPLAWPAQAMCLTEKSIVLPMGRNNPSLVLPKPVWLNKKRACKLVWNGSANELHITVETDAAQEPPGENKAAVDLGQIHQAAVATDTGYALIVSGRGIRSEKQRLNKLHGKMGKMLARCTRGSRRWKKLRRKRSVLAARTRRRIRDLRHKGTRKVIDFCIDQKVGQLYVGNPKGVRKKKSGRKHNQRMSQWEYGKDIAYLRQKAAKAAIECFTGTERGTSSRCPECGRLKKPQGRVWTCPACGFTGHRDIVGAINIFTLAFDTKIVFPSLRDLTYLRPNGQKHCSIGSSSRLDTGRGHKARVAVEGMIPTKPNFGVSQETGQGYVLFNRSSSPSGD

SEQ ID NO: 29565 - protein, 382 aa, Escherichia sp.
MRRFAGACRFVFNRALARQNENHEAGNKYIPYGKMASWLVEWKNATETQWLKDSPSQPLQQSLKDLERAYKNFFRKRAAFPRFKKRGQNDAFRYPQGVKLDQENSRIFLPKLGWMRYRNSRQVTGVVKNVTVSQSCGKWYISIQTESEVSTPVHPSASMVGLDAGVAKLATLSDGTVFEPVNSFQKNQKTLARLQRQLSRKVKFSNNWQKQKRKIQRLHSCIANIRRDYLHKVTTAVSKNHAMIVIEDLKVSNMSKSAAGTVSQPGRNVRAKSGLNRSILDQGWYEMHRQLEYKQLWRGGQVLAVPPAYTSQRCAYCGHTAKENRLSQSKFRCQVCGYTANADVNGARNILAAGHAVLACGEMVQSGRPLKQEPTEMIQATA

SEQ ID NO: 29566 - protein, 392 aa, Sulfobacillus sp.
  misc_feature (296)..(384): Xaa can be any naturally occurring amino acid
LRYDRSHECWGASATVLTLTAKVPWYSNPDQVTLLQQTVEAYRQGCNWVSGVVDTTHGLQQAALHTETYRPLRAQFGLRSQMAQSVIKTVIAPWTRVRFTKPAFDLVWNRDDSLKAGAFSLNTLAGRVPIPFARQGMERFFDGTWQCGTAHLVHRHGRWFLPVPMTKDVAETDWAEIRQVVGLDFGINFLVTAYDSQGQTTFFPGRAVKARRAHFKLLRQTLQRRQTPSARRRLKRLGQRENRWMTDVNHRVSKALVVRYGVQTLFVLEDLTGMRGATERVRRRDRYTSVSWAFYXXXXXXXXXXXXXXXXXXXXXXXXXXXXXXXXXXXXXXXXXXXXXXXXXXXXXXXXXXXXXXXXXXXXXXXXXXXXXXXXXXXXXXXXXQAPAFRPG

SEQ ID NO: 29567 - protein, 414 aa, Firmicutes sp.
VSRCKNSAIKKHKQSKEQPADVLVEKFPLRLTQDQVLLARSLQMEAAKVWNAVCNIHRTVYRRYRYWLQEGAIKTMLKGKYGVHSQTAQVVVETYFECCERTRKLREQGYTDWRYPYRKKKFFTVTWKKLGIKHTGRIIKLSSGRGRKTLIITLPERLSSAKIHQAQLVWHRNQYWLHVTVEKPALLKVQGNVSAAIDPGEVHAVTITDGNEALVISGRLLRSLHRLKNKKLRSFQRAISKTRRGSRKRRRLLDRKYRFLNWFNRRKEHLLHTISANTVRWCLARNIKTVFIGNPVGVREKECGRKHNQRISQWAFGKLRSLLEYKLKRHGIKLVAVDERGTSGTCPVCGKYTKQSGRIYRCSSSCGYKGAHRDVIGASGILDKSVNGGFTRGRKLPQKVDYLRPRVVAPKKVA

SEQ ID NO: 29568 - protein, 430 aa, Microcoleus sp.
MVTTRRITFKLNPNRQQEKTLHYWRKLHCALYNATLYNRKTQYQKFGHSVNYLEQQNCLPDFKEVWTEYKPLGSHALQATLKRVDFAFSRFFKGLGGYPKFKASRRYGGWTYPCKSGWKAETDGKNGHLNITNLGKIQMRGQARTWGVPTTCTIMFRNGAWFVSITVQCSPVRNTGVDSVGIDLGCKDAITLSTGEKIAKPDFIKKGQRQIKAASKNLRRKRAPNRNKRVKASRRWNRERQKVSQLQRKVARQREDWLHKTTSNIVSGNSLVAGEKLNVKGMTRKAKKGKRKAQKSGLNRSILDVGFGMIGQMLEYKLSEAGGFYVESPTQTLKPTQRCAKCWELTPKTLADRVHVCSNPNCNNVEDRDVNAAQVNLIWARGLERASLVAESPSSTSCGSMRQLGAKKRQKQLSAAEGVGNSDLSVSRSE

SEQ ID NO: 29569 - protein, 321 aa, Oblitimonas sp.
LERAYSNFFAKRADFPRFKKKGQSDSFRYPDPKQVKLDQANSRVFLPKLGWLRYRNSREVLGAVKNITVSHSCGKWFVSIQTERAVEQPLPQGGAVGIDMGITRFATLSDGTCYAPLNSFKRHETALRRAQQSMSRKTKFSNNWKKAKARVQRIHSRIGNARRDYLHNATTTISQNHAMVCIEDLQVRNMSKSAAGTTEKPGKKVRAKSGLNKSILDQGWYEFRRQLDYKLAWSGGYLIVVPPQNTSRTCPACGHVSAENRTSQAKFACVECGFEENADLVGAINILRAGHARFACEVSDAVRSPAAGTHRSDSEAAQCRT

SEQ ID NO: 29570 - protein, 390 aa, unknown
  TnpB Polypeptide
MLSTAHQIELNPNNKQANYFARACGVARFSFNWGLEEWQTQYQAHVQDNSLPKPNEQALRKQFNAVKKQEFAFVLEVTKYAAQQALKNVGTAFKRFFNGEAAYPQFGKKGHHDSFYIGNDQFKVKDKQVWIPNLGWVRLKERFKYQGEGKINNAVISRQADRWLVSISVSLDKKSPRQAVEKQDCVGVDLGISRLATCSDGHQADNPKALSKKLKKLKRLSQALSRKVKGSHNRQKAKMQLSKLHQRITHIRHDALHKLSYYVTTQFNTVVLEDLNVQGMMKNRKLSRAIADVGFYELRRQIEYKAKYYGSKVVYADRFYPSSKLCSVCGFKHEGLRLTEREWDCPECGNHHDRDVNAALNLRQLGLTHCTAISAFDEAKIVKNDCKANQ

SEQ ID NO: 29571 - protein, 408 aa, Streptacidiphilus sp.
MQLRYAFRVYPNGPQRSALARAFGCARVVFNDGLRAREDARAAGLPFVSSGELSKRLTTAKVTPERAWLGEVSAVVLQQSLRDLDTAYRNFFDAVNGKRPKVGPPRFKSKRDTRQSIRFTANARWKITPGGDLSLPKIGDVRVKWSRPLPAVPSTVTMIKDSAGRYFASFIVETDAAVDLQRMPDTDSVTGIDLGLSHFAILSDGTKIDSPRFLRRAEKRLKKAQRDLSRKEKGSKNREKARAKVARAHATVADARREFHHQLSTGIIRENQAVAVENLVVKGLARTRLAKSVHDAGWSQFVAMLEYKAARHGRTFVRIGRFEPTSQVCSACGVKDGPKPLGVREWACGACGTVLDRDVNAAVNIAKAAGLAVSTCRAQVSPGPVPAQREEAGTHRDGYPTVAGIPTL

SEQ ID NO: 29572 - protein, 608 aa, Lambdina sp.
MSSCKSCGGESHSCRSSKSCANYLPPIRQRRNSGDVVHCTQDFDVGVVKRGLDGTICPLLQEGVRQRLTAEIRSDVVELSKLYILLGVFVNHCWNAYPDDESNSVRTFQDMMNYVYAIKGKGPHAQKFDDMVRYHGDIRRYDGRLRTFIVQELVKTYWTVLKTNITTHAYSRLARYFGVKRNDPTLFAAYYHKEFGEDDNISRVCRFINVSSDWHTTIPMWIEIQRDLYTRGEQSFVVFPQPSHGLKHVTYTSRGWHELLRRVDPSNITSSWPSITDHKKELWSPYLDTSVVDMKKFGCCIQTDGVAVSISMNRPKRMPIGRNKAASMLPKSYTIDAFFEDRIVAVDPGSRVPVAACDSRTGFRRITKRWVRSHTLEWKRDRYRSRKLRRVELDEAADRQRVELDRGVQLTCRNGEQVKLYTDFRLKWFDARQRPFERTRKLTRLSFNKYIMMARTNERIVKETFLNDAPSDRVLVLYGAGVNFVNVACYSGRKFKHTDLLRRLRSKRNIRVRLVDESYTSKACSDCNELRNGTYTRLRMNHRLRRGVCPDCNADVERDYNAAKNILVYYQRFAVCRPSPSRSSGVATDTDSHSVRSLFQCAVSEFGS

SEQ ID NO: 29573 - protein, 455 aa, Helicobacter sp.
MVFSHSSIPIHYLYKHCIIIQDKDKELFLLNAIKFRIYPNAQQKELISKHFGCSRVVYNYFLDYRQKQYAKGIKETYFTMQKVLTQIKRQEKYHYLNECNSQSLQMALRQLVSAYDNFFSKRARYPKFKSKKNAKQSFAIPQNIEIKTETQTIDLPKFKEGIKAKLHRDLPKDSVIKQAFISCIADQYFCSISYETKEPIPKPTIIKKAVGLDMGLRTLIVTSDKIEYPHIRFYQKLEKKLKQAQRRLSKKVKGSNNRNKQAKKVARLHLACSNTRDDYLHKISNEITNQYDLIGVETLNVKGLMRTYHSKSLANASWGKFLTMLEYKAQRKGKTLLHIDRFFPSTQLCSYCGFNTGKKHERITQFTCPHCKITHHRDYNASVNIRNYALGMLDDRHKIKIDKSRVGIIRTDYAHHTDERIKACGASSNGVSSKYGNILDLASYGAMKQEKAQSL

SEQ ID NO: 29574 - protein, 410 aa, unknown
  TnpB Polypeptide
MIREALNIVIENDVRSRKRAHELCYRVLREKYPHLHNKFVQEAYKRALTIYRSYRKLMNKWKRLPKKKRRRISPPSLPTVEDNRVIELHIDTYKLDRIHGFLVLTVSKGDGVYLRFLVMEYGYARRELKGAKLGNSKILVNGNEIYLLLTIRKNVEMNEYRNMLFIDINEGSVDCLLVNYDRYEAVLFSVRHDIRRIRTNYRRIRKSIQRKVKNPKLRDKLLAKYGSHERKRVEDRLKKITTLLAEIAKEYNADLVRENLKNLRLNGRKRSKQLNYRLSTFPYRRFIEYIDYKFYERGLSILDVNAKKTSIICPKCGYVDKRNRIDKETFRCRKCGFSFNAQYVACLNLFSRSNDGKVAIRSGRLILITRKTAQVVAVNVAPNEPPTKMRWLREKPVPELIINNQSTISV

SEQ ID NO: 29575 - protein, 441 aa, unknown
  TnpB Polypeptide
MKKKDSTTNLLTERIVIRKGHDWFDGSKYSTQISRRIRNATTYLMRHEKKPNGKHLSHRDADKWLKQNNSELYTKMPSAFSQRTTQIVGQDFSSYFAALKDYDKNPSAYKKKPRPPHYAGKASTVTVGRNGFCLKQGNLHLAGEKFPVPLKTSFSFDQEHNAKVNDVIVHEVRIVPMGSCFVVELIYNPAKFVELGSFCPILDKERKAGIDLGINNLVAIASDQHDVRPALINGKPLKSINAWYNKRAAKLRSTGKYQHLPEIANKRYHRTRDFLHRASRFVANYCVSNNIGTLVIGLNKGWKQDSNIGKVNNQKFVSIPHTVLIEQIKYKCYTLGINVIVREESYTSKASALDNDVIPSYGDKSIPKFSGRRVKRGLYKSPQGVINADLNSALNILRKETGEALNALACRGCMFQPEVVTLGNPRVTASKREADSLPKAA

SEQ ID NO: 29576 - protein, 401 aa, unknown
  TnpB Polypeptide
VDVVGFAFDFSDRHPQAACNPWYTGVEMVQGGLVQTLSSELGHENHMERQTIDTVVVTNKALVGHEFDSSLDVLLVKSRIVVKRMLANRTQTSSKFYHDVPCVVAKSLITKYQKNRKCKKVRNPVIPICGDKGTQVKLESNNQLRIPAITKKQSIQIHPLKPIIGHVRSVEFFKRDGRWFLSYTYNTPVNTVECHGFIGVDRNAVGNVATLADPENGHVERLGPDIKQWKDNLRNRKAKLQSKKAFGACKKLKRKQSNRTRDINHKVSKQVVDYAATHCKSIVLEDLGKIRDSKKCGKYVQKSNWSYFQLEQYVKYKASLRGITVIYIDPRNTSKGCSRCGHVNTVSGKKFKCKQCGHIDHRDANAAFNIALRGQTDNERELSARLIDDPQTSKGVTQCIV

SEQ ID NO: 29577 - protein, 239 aa, unknown
  TnpB Polypeptide
VSDTFRAFQPVTVPDSRLDSPLASHEAALDVGANNLVACSTTTGNQYIYDGRELFGRFRETTDEIARLQSKLREGRYSSKRIRRLYRQRTKRRDHAQNALVRDLVERLYDEGLATVYVGDLTDVLDTHWSVRVNEKTHNFWAFKKFIHRLACVCEGYGISLEAEPEAWTSQTCPECGDHETTVRHRDTLTCPCGFEGHADLTASETFLRENSDTEVRPMARPVQFEWDDHEWSGETIPS

SEQ ID NO: 29578 - protein, 405 aa, unknown
  TnpB Polypeptide
MWKLALEDALYTLERQWEAAIEAVKDLVARHEGFVEEEKHYAFWLLYRPRKGSRDWRRIQAIFTGEDVKGQNIDLDASGRSRVRKYLKRVFRRVLGGRPRVRQARSFALDPQMYRVFSTGKRQYIAVATLTPGERAVIPLAGVHAISGNLRIVLLPDERAVEIHISLDPQVYPPGEGEVGIDLGVTEVFTDDTGRKYRSEYGEALREMSDYILDKGRKRQKLWALYRRNREEDPARARRIRRHNLGFAKQHRKHGKYRRRCENEINRAFNELFKTRRPGVIAYEDLSHLRGKAKSRGLSRKVSLWMRRITKERLEYKSCIYSVADLGPVNAAYASQECPVCHWVDPQNRNGDVFKCRKCGFTGDADQVNAVNVKGRLHDEEITRYTPYRKVKEILLRRYYEKDAV

SEQ ID NO: 29579 - protein, 429 aa, Burkholderia sp.
MLEIVSRGYVYRATPISQEVEIYLHQCFGADRKIYNLHVAHLYDYLEKNNYQIGDKLPSLKKMGMPTVSAFKKQSVSDDNVDYLYLVDAFASNEAKQHFNKAITAFNKIAYKKQYKKSALKRQKTLGIEPTFRDLKGMPKFHSRKGSKASYTTFNQNGNIYIKDEILYLPSAQKSSVKVVGLKLNTHRPLPQGSKIKNVTVTMNTKGQFDVSICVEFPLEMASIGTPTHILGLDYSQSHFFVDNEGKKANYPQYYREMEERLAKEQRVLSRRKKGSKRWEKQRLVVSRLQTKVANQRKDWLHKKAYTLANRYDMIVVENLDLRAIGQNKYYAKNQQDNGFGNFRLYLKYKLVQRGRYFVKAPKDFASTQLCSTCGHKNTALKGNVDIRKWDCPSCGKHHDRDINSAFNLKQYGERYTKEEILPQTVVVV

SEQ ID NO: 29580 - protein, 468 aa, unknown
  TnpB Polypeptide
MRMSDQSQRTNTLAADAATERYRQCLFDWLAAHAPLWNQITYRRRQQYFAEDGDVWDAEYTDLYDEYAPVLGKATCQQIARKNSEAWRSHFTLLEKYHDDSNPAVTDKPSPPGYWGNRDEGYELHGLVRNDLYTFDWDEHTSTLEFGVGDVLEDRYDFEHNERITLEVRGNPQWDGDDSRLELIYDEHADQLRVQHPVRIHPDDLRQQRQDSFTHTLDTENTTRSAAIDVGANNTLAVVTETGETAVYHARPEFKRFQSYSERIATLQSELPEEAYTSSRIKRLYDARSRTRDHSRDAAVKHAADWLLSQNVDTVYIGDLTDVLDTHWNADVNEKTHAFWSHRELLERIEVTFGDVGITVEEISEEDSSSECPECGSSDVTRDGDAFRCHDCGLEGHSDVIGAWNMLQSEVGPMARPAALSVERGRDAPTDGAYWQWNEHDWTPADFGEQSRSPDQPSLSKPVSSQPG

SEQ ID NO: 29581 - protein, 191 aa, unknown
  TnpB Polypeptide
MKTKYFPSYRRIFLDWILLCTGCMLLPMRTMPIIQISYGKPKRDWPRHKENSPRVAVLHEKIANQRRDFLHKKARYLADRYDAIGIEDISVKAMAKRKKGGKFSFGKSISDNGWSMFTSMLEYKLAWQGKQLIKIDKWYPSSQLCHVCGYQNNDTKDLSVREWDCPKCGSHHNRDKNAAINIREEARRISA

SEQ ID NO: 29582 - protein, 397 aa, unknown
  TnpB Polypeptide
MYQVQIQTIKPNDERYARLDELCFFSKNLYNATLYNVRMQYFKDKQYLDYNHMDVLFNSTDNPDYRALPAKVLKFTLQLINQAFQSFFHLIKLKKAKKYNKPIRGPKYLPKNGRQVVHFTKQALSFKKAGYVKLSKEDIEIFVGELPVTFVKIVPRGGHIDICVGYNVEEKSHFDNGRYASIDLGVNNLATITSNVFSPFIINGKSLKSINEKYNKLIGEKKSKLPKKNYSSNLINNLYGKRSRKLNDYLHKSSSYLVNYLVSNQVNTLVIGYNKEWKQNINLPTKTNRIFTHLPFKRFIELLKYKCKLVGIKVILQEEAYTSKCSFLDNEKIEKKKTYVGRRITRGLFKPGDTLINADVNGSYNIIKKGLTKLKAWNEAIFSDCVKVNSMPKIYNF

SEQ ID NO: 29583 - protein, 483 aa, Vulcanisaeta sp.
VAVELEVPKDVSKLLYSVESVYLSIVREVVTYAVANNVLSATELQGIFYRKYRLEYQGLHAHLIIQAIRQAVQIARSFITRRRRGLVDKPYPEVRSVSIRFTEDAWSYEQFIRSTAPVRVELSLLGGRREVWLRLHKRFWLYWWRVLTGEAELASTLMIKRRANKWYAIFVFELKPRVERPQSIVAFDINENTVAVSRVDLPSTVGKVADWNSQYLMPQLYMIRTDFGRLARRYERIRNTIIERLKPHFALPNGKYLNVTNTREYRKLVRRLREGNRKIGRVRQIANELTKTPAIIVTEELGERPQDEMIGDLESRELRHRIKQTPFKSIEEAVEGKALERGSRIFHVSAYRNSRVCPIHFTRLEKTDDWHTLYCPKGHYVDRDYASVMNMAWKITPESWTKGVWWDLRKNMNWREYEGKTNPSIPYETVSHLWAHLKTFAASEESPAMLARGKPMNPTGEADEGGGEETTHAPQGREEVGYN

SEQ ID NO: 29584 - protein, 314 aa, Clostridioides sp.
  misc_feature (3)..(55): Xaa can be any naturally occurring amino acid
LIXXXXXXXXXXXXXXXXXXXXXXXXXXXXXXXXXXXXXXXXXXXXXXXXXXXXXTNFTNGNIMYCGQHIKLPKLGMVKIRDKQVPQGRILNATISKEPSGRYYVSLCCTDVDIEAFENTNNQIGLDLGIKEFCISSCGDFIENPKYLKKSLNKLAKLQRELSRKTIGSLNRNKARLKVARLQEHIANQRNDFLQKLSTKLIKENDLICIEDLQVKNMIKNHKLSRLISDVSWSEFIRQLEYKANWYGRKIVKVGKFFASSQICNKCGYKNEEVKDLNIREWICPSCNETHDRDINASINILKEGLRLITIQNK

SEQ ID NO: 29585 - protein, 402 aa, Escherichia sp.
VKRLQAFKFQLRPGGQQECEMRRFAGACRFVFNRALARQNENHEAGNKYIPYGKMASWLVEWKNATETQWLKDLPSQPLQQSLKDLERAYKNFFRKRAAFPRFKKRGQNDAFRYPQGVKLDQENSRIFLPKLGWMRYRNSRQVTGVVKNVTVSQSCGKWYISIQTESEVSTPAHPSASMIGLDAGVAKLATLSDGTVFGPVNSFQKNQKTLARLQRQLSRKVKFSNNWQKQKRKIQRLHSRIANIRRDYLHKVTTTVSKNHAMIVIEDLKVSNMSKSAAGTVSQPGRNVRAKSGLNRSILDQGWYEMHRQLEYKQLWRGGQVLAVPPAYTSQRCAYCGHTAKENRLSQSKFRCQVCGYTANADVNGARNILAAGHAVLACGEMVQSGRPLKQEPTEMIQATA

SEQ ID NO: 29586 - protein, 267 aa, Herbidospora sp.
MRTSTPGAPDVRRSSPRSDHDARPLPAGAEPSTVTVSRDPAGRWFVSILVEETIDPLPTSSGSVGVDLGITTLATLSTGEKVLNPRNGHDERRLVKAQRALARKAPGSANRAKARLKVAKIYARITDRRRDHLHKLSTRLVRDNQVIAVEDLTVSSMIKNRHLARAISRAGWHELRSMLDYKSQWYGRELVIVDRWFPSSKMCSSCGTHRGPLPLDIRSWECACGASHDRDVNAALNILAAGLAERRNACGADVRPQREPSRAGGRR

SEQ ID NO: 29587 - protein, 414 aa, Herbidospora sp.
MGTITFCYDSNVRTAYKVRLCPTPEQAAVLNRTFGCVRVVWNRTLAWRRARYHGECVKTNFTQANAYLTAMKAFDDLAWLNEVSSVPLHQAIRHQQVAFSNFFADRARHPRHKSRNGRQSAEYTRSGFRWRDGTLTLAKMNVPLAFVWSWPDVDPAALDPTTVTVSKDPCGRWYASLAMDVADPEQAPAAGAAVGVDLGVTDFAVTSDGEKIANPRHLARRERNLAHYQRRMARKQRGSANRGEARAKVARAHRKVAAARADFLHKTSTRLVRDHDLIVIEDLNVRGMVGNRPLAKAISDCGWGAFRRMLEYKTAKHGRRLIVVDRWFPSSKTCSACGHLLASLSLSARTWQCPSCGTRHDRDVNAAKNILAAGRAVSACGADVRHSGSSRVRSAVKQEPRPARAGAPVLRRGE

SEQ ID NO: 29588 - protein, 379 aa, Sutterella sp.
MTTTVCVKLEMTQEVSLKLEKTRQLYRDACNFLVPFARTNPKERNWQRFNLHHKAYYALREAIPSLGSQLACNAIRSVSSAYKTKLSNQPRQKKEEELKTIVFKNPSIHLDKNTIRYSDDLSTATIFTVEGRVCVKLCPGNHQLNALNKGKMKESNLVLRRSKRGTYWALHISVESETGIEELKQTLSKSAVLGVDVGENNIAAISNGQIWKAGQLKFKREKYLGLRARLQRNGSQSARQHLKKASGRERRHVTHENHVVSKQVVEQAIKQNASVIVLEDLTHIRERIKAGKRVKARLHRWAFKELQQQIEYKAHRKGLSVMYVDPRYTSQTCSTCGEIGKRTKHRFVCPSCGLRAHSDLNASQNLQGLGYQLIAQGLL

SEQ ID NO: 29589 - protein, 393 aa, unknown
  TnpB Polypeptide
MSAGDEGELTLTVRMKVSPEPESEQALLDFLRRYRDALNYSIRVIIASKALSLGKAHRLLYKELRERYGLPSNIAIGCYREAIAIAKSWLRNQRRGKVPIPRRLNIWLKHKLGYRVKGDHVELAGGYRLRVIGWDRRYDDFPNREARLVFRDSEFTLYVYKRVPRPAKYAPKGVLAVDANERQVVVGNSHVEQRIETLVERALRYRRLAERLQEKYSSPKYNAWRRRSRIRKRVKHFYRKARNIIEDWARKTSHIIVSLAKQSQLAVAREDLTGLIENLRRLPKDHRVALIALGYRRLGYWIDWQAEKSGVPLLVVDPAGTSSTCPKCGTKLVEIGYRRLRCPKCGFEADRDTIAVLNIEKRALSKMGGTLTSPTAPQMTDVNPNRWGEPSAF

SEQ ID NO: 29590 - protein, 253 aa, Okeania sp.
IKVKPPTFKSKRSKQTARFVGANYQVSQDKIYLPKVGKIKIVWSKPLASKPTSLTIIRDSANRPSIASFVVEISPESLPKTDNSIGIDLGISTFATLSSGEKILAPKPLKKNLKKLAKFQRKFAKTELSSNLYERRRLKIARLHAKIKDISYGMLRKRTDFLHKLSTNLVRKYDTIALEDLNVSGMISYGMLRKRKRNRKLAKAISDLGWRQFRTLTEAKCEKYGREFRVINRWEPTSQKWCDSFSRNLEIGG

SEQ ID NO: 29591 - protein, 521 aa, Bacillus sp.
MKITRICTLQDENDSELEKLHQLVKIFCTSIRYSFNRLLEGEKAGELIKKVNVLFNLNKRYAEDAAMQAQAIISSQKELLPIRIEGVKGKIQKTTQKIEDYQTGKKKPKKVPLQLCLEGLHARLVKLQEKETVLLKHQENQTIPTVIFGGKKQFYQRLKQKISKEEWRDLRSNTLYSRGDKTKKGNLNIRIVFDEQEQQFYLEVANPVLSTGKNSPRLRFKLHIPNKYFNEIVDVVMPTIVGFNSKGKPIEEYKVYSIELKRRNGTYYVHITYDRETYGSELGWNDKIDSDIIAGIDVNIDKIAVSILTKQGNLLKSKTFYCHEMEYVKSNRRSNVAGEVAKEMIEYLLDWNVGAIVLENITLKQTHDTNRKFNRLTHSFAKNKLQKAIISRGLKFGFKIKKVNPAYTSVIGRFKYSKMYGLSVHEAASLVIGRRGLDLEEKLPKKLLNQLRSLVKPHLIRILGSMEESEKQSNHGKQRRKYIGMMLKNIDHFKENHSWKLWNVIHKTLIIKNQKLQLKEV

SEQ ID NO: 29592 - protein, 301 aa, Bacillus sp.
  misc_feature (296)..(296): Xaa can be any naturally occurring amino acid
MIINKAYKFRIYPNKEQEILIAKTIGCSRFVFNRFLARWNGTYQETGKGLTYNSCSAELTQIKKEFVWLKEVDSISLQSTLKNLADAFTRFFKKQTDAPRFKSKKNKVQSYTTKHTNGNIAIAGNKIKLPKLGFVRFAKSREVEGRILNATVRRNPSGKYFVSILVETEVQPLEKTGSSVGVDVGLKDFAILSTGEVFSNPKWFRKLEEKLAKAQRILSNRVNGSSNWNKQRIKVARIHERITSARTDYLQKISTEIVKNHDIIGIEDLQVSNMLKNHKLAKAISEVSWSQFRTMXGMEKK

SEQ ID NO: 29593 - protein, 345 aa, Bacillus sp.
VEIMTKEKEYATYQIWIKKGHKLYSYFLEMCQNAKNLYNTTNFYIRQVYTALRAGKSLHPLQQEVLHTLQTHIEVMNENQFHAYQKRVQKQKEKPVKEQNEMKCNLFTFPTQEKSFLSYHFLDCLFKTMKQQDYMNLPAQTNQAVMKKLYQNWKSFFASIKAYKKHPSTFTGRPRIPKYIKSSMKEIVFTNQVCKLQDKYIRFPKTSMKLNIGKLFGRIENLKEVRVSPAYGKFKVEIVAEQPESAPEHVDNNRYMSIDLGIDNIVTITTNTGAIPVLVKGNVIKSINQYYNKQKAYLLGILRRGKEPKEGPHTSKRLGRLHEKRFLKIKDLFHKMSYHIVQLAI

SEQ ID NO: 29594 - protein, 383 aa, unknown
  TnpB Polypeptide
MQIQLMKQFCGCARYVYNRTLSLEKSLYKKDSKHSFKYTEAANRLPEWKKKNPFLKECHSQVLQQSLKDLEQAYINFFRKRANFPKYKKKFQHDSIRFPQGVQLDEAKQQIRLPKIGWVGYRKSWDIIGAIKNVIVSRRGEKWDVSIQTEYKVVSSAPNSSEIGIDMGVKRFVTMSNGDFVEPLNLFKQELEKLAKLQRKLARQKKGSRNSRKTKRKIARLHRYIADSRRDFLHKTSTKIAKNHSIVYVEDLKVSNMSTSAGGTKESPGKNVKQKSGLNRSILDQGWYGFFQMLSYKLEQRGGKLIKVDPKNTSRTCPRCGLVSAENRKSQATFACIGCGYRSNADEVGAINILRAGRVRLACGTSGAVRPLSAGTQRDLLQH

SEQ ID NO: 29595 - protein, 262 aa, Corynebacterium sp.
LVKALQNHPDAKISNFTISQKGGYWYVAVMVKSAQRQPSLTRRQKQADTLGIDIGIHNYLSLSDGSTVIQLPPLLQRNIKRSKNLRKKLARSQKGSNRRRKLIATIKRVDHELKLQRDGFVHQITAELARNYALIGIEDLNVKGMTRSARGTVDAPGTNVRAKSSLNRRMLEGIPGEFRRQLEYKTKRTGAALEVIDRFYPSSKTCSRCGWKNENLSLSNRQFTCLECGLSLDRDHNAALNIAAEAERKHLKDTKSPKPSHD

SEQ ID NO: 29596 - protein, 533 aa, unknown
  TnpB Polypeptide
MKGLETMRSQTPSFVVKVKLHLQDNIKAYLNKSFHIADSAYNETLSFGLKRFSSMKKNERYQELLELRREVVKVQENIKKKIKEETKKEIKQKLKEEAKQIKTQLKEVNEELGKIQMNYGLTKYQLSSWLLERRKQTKAYQHLNTGELQVIGENAYKTLSQVIFYKTKPENLKFRSKYSLEHSFRNRENSTGTRLVESKKTDIAYRLYIHKKSTFIDIPVRAFTKYQQVQLLRADKIKYVQIISKTIRGKQFFYLQIVCQGIPVSKIQKGEGTTGIDPGISTVAYVSKNSCELVDLVPEDFARKERLIQNLSRKIERSRIVNNPEAFNEDGTRKKNVRFKPLSKRAKRLAIRSQTAYRKLTENRRKIQGELVNHIVSQSSVIKIEDLDVKSLQKRKRETRINPKTGRPFSKKRYGKAVFKAAPGYFKTLLLQRANSTGCKVDVISPKKTKPSQYNHITDEFDKKELKTRIYNLTDEITDIQRDLYSAFLIAHIENDKYLTEQLEKNFENFYKNMKEQLQILRQKPSRLSWYVE

SEQ ID NO: 29597 - protein, 358 aa, unknown
  TnpB Polypeptide
  misc_feature (322)..(354): Xaa can be any naturally occurring amino acid
MIITYKYRLKGSRVARTLRHHAWAVNQVWNFCTASQRKAQEIYRLGSTSKWPSRYALQGLANGTSKELGVHAQTVQGACERFARSRDQHKKCPKFRRSSGSKRSLGWVPFQEQSRQITPSSVTYLGRTYRFFGAKRRPLPSNAKGGCFAEDSSGKWYACFQVEVGTLPTGTGQVGIDLGLKTLATTSDGEKIAHPAFFRATEENLAIAQRAHNTSRVKALHAKAKNQRKDYLHKVSAKLADANRLIVVGNVSASKLAKTSMAKSVLDAGWSMLRGFLAYKASRHQATFIEVNEAFTTQTCSACGDRSSEGRPKGIAGLGIRXXXXXXXXXXXXXXXXXXXXXXXXXXXXXXXXXASTG

SEQ ID NO: 29598 - protein, 447 aa, Ruminococcus sp.
MEGGLPMKVYSTYSVKIKHYNKIFAETVAVYRSAVDYLINVVADEWDVVKDVEGSQARMRCVESLCHGTKNRLPKYDFDKKFYKFPSYLRRGAINEAIGKVSSYMSNLTNWNAEPKGKAPSRPKAGYVYPCLYRDNMYEQTDTYVARIKVYIRNTWDWLTVSLRKTDVDYIRRRCSDRKQCAPTLMKRGHQWFLDFPFEENVKLNNANVIEQTAVAVDLGINSSATVSVMRSDGTILYRRFLTLRKEQDSLTHAVNRIKKAQQNGDYHTPRLWAKAKGINNDIAVKTAQFIMDIAILYSADVIVFEHLDRSGKKRGSKKQRLHLWKSQYVQKMVTDKAHRLSMRVSHICAWGTSKLAFDGSGFVLRGRDAELKSYSVCKFQSGKIYNCDLSASYNIGARYFIREIIKSVPARVRLALEAKVPQVAKRSTCTLSTLISLNAELVSYAS

SEQ ID NO: 29599 - protein, 337 aa, unknown
  TnpB Polypeptide
MTFADKRGYTSHRIQGNGLSSILPSIPRPPTASRSFWLSSGFILKFSYLLDKTIIMFRDILHKLKIFFCDDDVEKIYVRDSTVIRNNEIHRMYNEILDELGDLATVVSRNCSGQYFVSVLVEIEQCYKQKTGKTVGVDLGIKTLATLSDGMTVENPHFLRENQAKLKRMQRHLSRKELGSNRRNKCRLKVSRLHCDIANKRSWYMHNLTTMLVNNYDVICIEDLNVSGMLQNHKLASSVSDTSFSMFRNQLEYKCRWYGKELIVIDRFYPSSKTCSRCGWKNKDLKLSDRTFVCKDCGLEIDRDLNAAINIQAVGVDAAIRTQSSRVAGCVEASKME

SEQ ID NO: 29600 - protein, 219 aa, unknown
  TnpB Polypeptide
VVGVDRGVRVSAALSTGELLTVAGLRPAERRRLQLLERRLARAKPGSNRRRQVKLGINRLKAREADRRRDWTEKVSTDLARRFDLICVEDLDVRAMTRTAKGTLQRPGRGVRQKAGLNRGILASGWGRLVDRLEDKAPGRVQKVAAAYTSQTCNACGHIAWESRESQPIFRCVACGHEAHADVNAARNIAAAGQVVAARGGQGWPRPVNREPSTLGAVA

SEQ ID NO: 29601 - protein, 443 aa, Cylindrospermopsis sp.
VYNREANKNIGGRTVLLSFKTALIPNNKQETLFRKASGVARHAYNWGNAYIKEVLELRQQDKSIKIPTAIDLHKKLVAEVKSQHDWYYEVNKNVPQKALADCRVAWDRCFKKTSKQPRFKKKGQRDSFYLESGTKAVPKIQNDGKRIKLPSIGWVKLAEPLPVTAVHNCVISRQANKWFIAIKYEIEKPTVAVDRPTVGVDIGIKELAVCSNGKVFSNPKAYGRMSKRIKRLQRSVSKKQKGSNNRKKAVSKLAKMHARIANIRKDAIHKLTNYLAKNHSEIKIEDLSVKSFLKNHKLAGAIADCGMYEFRRQLEYKTEKFSSKLMLVDRMFPSSQICSNCGQHRHKMPLKNRVYVCPECGHIEDRDLNAAKNIERWFEGIFIPSRSDLAVSSTVSACGVDKPLKNHLETTMNQEVNAEDDTWFWTAEETDALWFWSASSTIV

SEQ ID NO: 29602 - protein, 137 aa, unknown
  TnpB Polypeptide
MALIAKKLGRLLAESKNYQKQRIVVASLHEKVANQRNDFLHKLSIELIKNHDLICLEILIVKGLVKNRKLAKFIHDALWSLFITKLRYKAKWYGKQIIQIDTWFPSSQICSDCGYRDGKKALAVRERTCSNCDTHHD

SEQ ID NO: 29603 - protein, 366 aa, unknown
  TnpB Polypeptide
MNKSFKYRLYPTKEQEVKIQKNFGCVRFVYNYYLAKRIEIYEKYKETFNYYECEKDLTQLKKELTWLKEAESTSLQSSLKNLDRAYQKFFKEHKGYPKFKSKKTHKFSYRYNCVSNNIEIIQNNKVKLPKLGTVKIKNNLPIRGKILSATISHTPSGKYFVSICCDNVNVEPFEKTGSVVGIDLGIKDFAITSDGLKIPNPKYLKQSLDKLAKLQRDLSRKTRGSSNYNKQRIKVAKLHEHIANQRKDFLHKVSTQLVRDYDIICLEDLKVKNMLKNHNLARSIADVSWSTFTSYLTYKSLWYDKQISKISTFFPSSQTCNKCGEKFPFTKDLGVREWICPNCNSKLDRDINAANNILDEGIRLIT

SEQ ID NO: 29604 - protein, 241 aa, Halogeometricum sp.
MSVIVRVNTSNHRGIIMVQRRNIDITGMSCPGCERTVETALKSVDGVRRADANRESGTVETVVEDDVGDDDLGDAIHSAGYKIARQIVEDAEERNAVIVVGDLGGIRKDNHKGRYVNDKTHKMPFARLLNYIEYKAHDAGIDVRLVEEYDTSKTCNRCACEGVRETQGRFECPECGLDDNADKNGALNIGKRALGKFSKPLSEAGAILAQPETQVIVPRDDEPANLSVSVGSTPSGGTPRL

SEQ ID NO: 29605 - protein, 455 aa, Halogeometricum sp.
MSAVVRRTNTFAVRPLSDADERLLLDLLDASASLWNELNYERRQQFFDGDSVWDTADYRKQYVDVLGSATAQQVIRKNKSAWQSFFAARENGEDTAPPGYWGNEDDGRELRTYIRNDQYTLETGDRSRLEIPVGQQLKDEYGLGYHDRLRLEVAGDPKWDGEQGRLEIQYDEIDDTFRAFQPVTVPDSRQDSRKIEDFPEVENASRFRNSPLASEEAALDVGANNLVACTTTTGQQYLYEGRDLFARFRETTDEIARLQSKLREGRYSSRRIRRLYRKRTRRRDHAQDALVRDLLERLYAEGVATVYVGDLTDVLSTHWCAEVNAKTHQFWAFQAFIDRLSDTAEEYGITVEVRSEADTTRTCPVCGEQDDTDRDGDVFRCPCGHEAHADLCASRTFLERQAGKIKVGSMARPVRLKWDDHNWSEIPHSPERESPNEKRTNQSTSDGKIASVDAA

SEQ ID NO: 29606 - protein, 200 aa, Halogeometricum sp.
MLVIDFPEIKFERHRYFTMRKRVQNAGKDSTHDTLEGREERFVRDRLHKVSRHIVEWSRQFEKPCIVFEDLKEMRDSIDYGTRMNRRLHHLPFRALQFYTSYKASFKEIPTAWINPEYTSQRCPMCGNTERANRNKKRFKCKDCSHQDHSDRSASVNIAVKGVKKLDWNVPALNSLPVVRKVRRSQERSSCAARKVASRL

SEQ ID NO: 29607 - protein, 438 aa, unknown
  TnpB Polypeptide
MNKEKNIGTTETLEMKKVSRVERHKIKRNSNFFSLIDDYCLKSKNMYNYGNYIIRQRFIETSKEKEQGLRENAEWIRWVELYHLVKDSEAFTEFKVGARGTIRKLDKAWKGFFKSIKDYSKHPEKYTGMPKMPKYLDKEKGRYEFDLENNRFKIKDGYIYIGVKNLKVMNNHFKTRIDAEKSKLLQIRFIPRDKEYIMEVVYEVEVPELKNITEPQRVASIDLGLNNLMTITTNCGIAPVVINGRSLKAINQYYNKMLAEKKSVLKKVYGKDWSNELQRITTKRNNKLDNGIHQATRKVIDFCIENKIDTLLCGYSTGWKKNVEKGNDTMQSFAYIAYELILNRLEYKCEDAGINFKAIEEKYTSGTSYLDNEQPIEKNNNKDRRVYRGLFISNTGKKINADVNASYQLMRKELPEKLLPNVSEIALHPTIINLSIVY

SEQ ID NO: 29608 - protein, 472 aa, Micromonospora sp.
VKRYEPPAGWAVQAYKFALDPTEAQVGGLRRNTGAARFAYNHMLRRTCAVKAQRAAEVSYDVAEADLTPWQGWSLPDLRRTWNEAKQWVAPWWHECSKEAYNTGLANLSAALGNWHASRTGARKGRRMGWPRPKRKHARRSARFTTGAIRLDPDNRHVVLPRLGRIRSHESTRKLSRRVQAGTAKILSATVTEAAGRWFCSFQVAVRRTVGRPTHAPRSGRVVGVDVGIKRLAVLSTGEMVPNPAPFTAALKKLAKAQRRAARKVGPYDPVAKRKRTPSNRWCRAQATVARLHGTAQAVRADSWHQLTTRLAQQFDTVVVEDLHVAGMVRNRKLARSLTDAAPATLRRHLAYKAGWYGATLHIADRWYPSSKTCSGCQTVKPKLSLAERTFDCTACDLSLDRDVNAARNLAALVRHVDLELPGDAKTGRGACVRPVRPAPAGRAVGREASRPVQPVNVVRQRTAADHALSNA

SEQ ID NO: 29609 - protein, 468 aa, Micromonospora sp.
VKVTRIAYSHRLNVGKYQALAEQAQRLGAVRGEVWQRYGSIAGSGLTDRQVRDRWLAEGIHHRFGVLANAWKETVRDAMADIAATRESAKVPVRRAILRHISDQKEQKRLFSLLKADRWADDPYLSRLMRSHWRRGHNRTHNQIVVRADQHHTQADEGGRLWLAVPGLVRRQMVRIPLNTTVAPTGTLRLILRGGRVEIHYQIDAASMKTSQRPCGTATLGVDKGYTEVLTDSDGNHHGDGLGHLLSAESDRIRERNRRRAKLRSIANTAARRGDQAKAERIAVNNLGTIKRDRQAARHQARVRTEIFTAVHRVVDKAAVVVAEDLTRTFTGRKQLGRNTNRRLAAWTKGVTAQALKNVSERRGSALVHVNAAYTSQVCHRCGCFGRRAGDRLHCTLCGVVWQADVNAAINVLRRHGDPDITLHTPHRAVRQIVQARADRHRSRLPLPDSSPARRAESESSALPISEQ

SEQ ID NO: 29610 - protein, 538 aa, Micromonospora sp.
VADLRSIDEPFVALGPTGVAIRDRLKGLTARDEEILRLVGAHLGSLAAKDLKVRCADRLEHSTHGWAARKRDLTPGSSARWAGAITKATHDQWALARRCQLVHIGNFEAGVAMIRRRLSLPVGQRGTKGVPGGYRSRQEWFAKSRRLHVLMQRLERERADREAGVVHVVRGGKRLARNRHNLAQAGLTGAQWRDRWEAQRWFLQADGESGKRYGNETIRVTPGGEASIRLPAPLAALANAPHGRYVLAAKARFPHRGQEWVERIETNRAVAYRIHHDARRGRWYITASWQYAPTKTVPLQAALADGAIGVDTNADHIAAWRLDVHGNPVGNPRRFHYDLSGTAEHRDAQLRHALTRLLNWVKVCGVKAVAIEDLDFEAEKTREKHGRRKRFRSLISAMPVGKLRARLTSMAEAPGIAIVAVDPAYTSKWGAQHWQKPLTSRTRTATRHDAAAVAIGRRAQGHPIRRRTAPPPAHQSDGQGHRTVQAGPGDPEREATRPRNFGPRTRSVRAGYGANAGDQRAQHRSGHAAEHTQLVLSP

SEQ ID NO: 29611 - protein, 484 aa, unknown
  TnpB Polypeptide
MQLAERHIIKSTENRFVEIDGLAFKSKNLYNVANYVIRQSFVYGWGYINYNEMNRLMKSHQAYKDLPAKVSQQILMILDKNWQAFFEAVKADNIEQTKFTGSPKLPKYKDKVKGRNLVYTIQAISSKQLKKGIIHLSGTNILIKTLVKPEQICQVRLVPKCDSYVIEVIYNACAEPCDYAQGKLRRSKPESTDENQKELVASIDLGLNNLVALTSNQPGFVPLLINGRPLKSINQFYNKRKTDLQSQLKGSRKTSCRIQRLTRCRNQKIENYLHQASRLIINLLIERNIGTLVIGKNLEWKNEINLGKQTNQNFVTIPHARFIEMLKYKAELVGIKVIVQEESYTSQSNFLNLDPIPVYGSIDALDVTFSGQRIKRGLYKKSCGQLINADVNGSYNIMRKAIPNALCNGIESCVVQPRRVNPLEVKAKGEGCNASHGTVIDDYTFTSYLCPVVQGCVTIVYSFGKSSRNFKLRQSWNCFINTLG

SEQ ID NO: 29612 - protein, 372 aa, Clostridioides sp.
VIAVKKAYKFRIYPNKKQQELINKTFGCCRFVYNKYLAKRIEVYKSDKETFTYKQCSSDLTNLKKELNWLKEPDKFSLQNALKDLENAYNKFFKEKAGFPKFKSKKTNRFSYKTNFTNGNIMYCGQHIKLPKLGMVKVRDKQVPKGRILNATISKEPSGRYYVSLCCTDVDIEVFENTNNQIGLDLGIKEFCISSCGEFIENPKYLKKSLNKLAKLQRELSRKTIGSLNRNKARLKVARLQEHIANQRNDFLQKLSTKLIKENDIICIEDLQVKNMIKNRRLSRLISDVSWSEFIRQLEYKANWHGRKIVKVGKFFASSQICNKCGYKNEEVKDLNIREWICPSCNETHDRDINASINILKEGLRLITIQNK

SEQ ID NO: 29613 - protein, 387 aa, Escherichia sp.
VKRLQAFKFQLRPGGQQECEMRRFAGACRFVFNRALARQNENHEAGNKYIPYGKMASWLVEWKNATETQWLKDSPSQPLQQSLKDLERAYKNFFQNRAAFPRFKKRGQNDVFRYPQGVKLDQENSRIFLPKLGWMRYRNSRQVTGVVKNVTVSQSCGKWYISIQTESEVSTPVHPSASMVGLDAGVAKLATLSDGTVFEPVNSFQKNQKKLARLQRQLSRKVKFSNNWQKQKRKIQRLHSCIANIRRDYLHKVTTTVSKNHAMIVIEDLKVSNMSKSAAGTVSQPGRNVRAKSGLNRSILDQGWYEMRRQLEYKQLWRGGQVLAVPPAYTSQRCACCGHTAKENRLSQSKFRCQVCGYTANADVNCARNILAAGHAVLACGGCQQTG

SEQ ID NO: 29614 - protein, 420 aa, unknown
  TnpB Polypeptide
LDIRKEIVAGGFYASLDVDGTIRNETTKDVVNDILLYKAAAKGKVRKAIALRTDDKTERKRLYTLLKSDKWLEDSFLHRQMRKHFKHGVSHTKNQFVVRSDQFKIKHVAGYLTITIRIARKYGDNIVLTTTSNGTNVDLSGCNLRVIVKDDVTEIHYSMDKGEGRTHGSQTLGVDKGYTEAFVDSDGEHHGEQFGAVMTEYSDKVSKTGSARNKLHALEKKHRQGGNLKKADNIRTHNLGRKKIDARRQLAQTQLRGIAFKATHTIVDKAAVVVSEDLTSPIAKKRPWKRFNRRMSGWAKGALAEALDSVCTQREASHELVNCAYTSQMDSVTGLLQGKRVGDKFHRINGDVIQADHNAALNVLVRLSDKDIGRFTSYQEVRRILLARSPAELTVKRHELQSKGYQPCADKPSRSEVINF

SEQ ID NO: 29615 - protein, 232 aa, unknown
  TnpB Polypeptide
VVIPTKSTAHINKMLSNGWKISKSIRLGRRNDDLYIDLLLEKPKAPKRKIGKILGMDSNYKAGLVFSDGQQIADEPYALIQQFGRRRKHTRTYIKSVVGHALKSLDLSGVQELCIEDLKHVKRGTRGKFPRRFNRRLSHWLYAYTADLIERKCEEEGVRLERKNPWKTSQFCRVCRRWDRRNRRGDKFKCVHCGHSEHADLNAAKNLELLGLAGVYGLRLLPNPLPVYAGSG

SEQ ID NO: 29616 - protein, 416 aa, Caldicellulosiruptor sp.
MDKTYILPIPEEYQVLARELSKQSGKIYSKAVSFLKRMNKKGIKISQKTFDRYMEWWIHQKDFVLHSQSKQAAYQQVWINYIATFRKIQKAKKKGKDTSRIRLPYKNKKYNKVVFKESALRLKNNILILSNGKEHEAIVLRDVVIKTAPKYAELIYHHSKKKYYLHVVIEVDEMKSEKGKGVLAVDLGVIHPMVCFDGQNVLIYNGGVLNSKLRYRNKKIAEFQQKLSLCQKGSKRFRKLENAKRKVLRKLNNQIRDVLEKYTSHLIGYCVKNNIGTIVLGDLKGIRNRAKHGKVSNQKIHQWMFRKVARRIEEKAGFAGIDIVYVKENGTSQVCPVCGSKNKPRNRNYECSKCGFRYHRDGVGAINIYKKYTGTKSLVVGRLACPAGVRFKSHLCCPVEWNTHLWEKDHSTEKTA

SEQ ID NO: 29617 - protein, 405 aa, Caldicellulosiruptor sp.
MYKTQKNHIRCDKQTYRLLRMLCHFSKNLYNYALYQVRQHYFKTQEYLRYESVYHLVKENENYRLLPSQVAQQTLISVDETFKSFLGLLKAKKEEKTDKKVSIPKYLPKDGMYQIVFPKDQFKMEGKKVRLSLGRGFAKEFGVRYLYFELPQIISDKKLSEVRIIPKFCGRWFEIEYVYEEKEQMNILDPSRYLAIDLGVNNFAAIVDTIGTAFLIEGRFLKSVNRWYNKQRARLQSVYSKQGIKMGSKLAKISLKRQHIIDNFLNQTVNFVIKHCLEKRIGNIVVGQLEDIKQGINLGRVNNQNFVSIPYDKFKRKLEAKCKHYGIRYMEIDESYTSQRCSRCGIVDKSNRKHRGLYVCRRCGHVVNADINGAINIVGKVAGESVKKQITSSGCVNHPVRIRVA

SEQ ID NO: 29618 - protein, 405 aa, Caldicellulosiruptor sp.
MYKTQKNHIRCDKQTYRLLRQLCHFSKNLYNYALYHIRQHYFKTQEYLRYESVYHLVKENENYRLLPSQVAQQTLISVDEAFKSFLSLLKAKKDGKVDERVSMPKYLPKDGMYQIVFPRDQFKTEDKKVRLSLGRSFAKEFGVRYLYFELPQTVSGKKLKEVRIVPRLNGRWFEVEYVYEEEHKLSIFDLSRYLGVDLGLDNFAAVVDTIGTAFLIEGRYIKSVNRWYNKQRARLQSIYSKQGIKCGRKLAQISLKRQHIIDNFLNQAVSLIIKHCLNNQIGTVVVGKMKGIKHKIDLGVVNNQNFVGIPYDKFKRKLKSKCMYYGIRYMEVDESYTSQRCSRCGQVCKSSRRYRGLYVCRKCGCVVNADVNGAINILAKVAGESAKEQITSSGCVSHPVRIRVA

SEQ ID NO: 29619 - protein, 190 aa, Streptomyces sp.
VNIVTTSDGEIMAGREINHLRVRERKLRTELRKKNTPSAKRRLKKRWRKGARRAKDINHKIAKHVVAEAERTGRGIALEDLTGIRERVRLRKPQRVTHSSWSFAQLGAFIDGANRGSQARFACRSCGFVDHADRNGSRNVRARARELWRCGAQSIAPAPPPRQRSGAGRKRSVTASDARCASLGPRVSGG

SEQ ID NO: 29620 - protein, 414 aa, Aphanothece sp.
MFVLEFKIKAKAQQYQAIDDAIRTAQFIRNKCLRHWMDNQGVNKYDLSAYCKVLAHDFKFAGELNSQARQASAERAWSSISRFFDNCKKKVLGKKAENAVLGSPQVKQFSKTGYPQFKKFSRSVEYKTTGWKLLSPKTINFSDKKGIGTLKLKGTWDLGHFNESDIKRVRLIKRADGYYCQFVLSVDIKEDVNPLGKVIGLDVGLASFYTDHEGNKIDNPKFLRKSEKRLKRLQRRLSKKKKGSNNRRKARQRLAKAHLKVSRQRKNFAVKLARCVVTSSDVIAYEDLRIKNLVKNHCLAKSINDAAWYQFREWVEYFGTKFGKITIAVSPQYTSQNCSSCGEIVKKSLSTRTHVCACGCTLDRDENAARNILKLGLSTVGHTGSKAWGENASTLMEEILSKQAVSVNQESFSL

SEQ ID NO: 29621 - protein, 477 aa, unknown
  TnpB Polypeptide
  misc_feature (391)..(407): Xaa can be any naturally occurring amino acid
MEVRRTVPVTLNVDSQDAALLEDTIDEFLWAAQYVTDHAFHGEYVTTSKTTLNDETYEDVREATDLHSNHVQSARNKAAEACKGVVERWKQNKKASKPQFRSPHLVYESRTATFHDEYVSLATVDGRIEADYVLPENPEGTPHQQYLFTDDYDITSAELHRQHGEWQLHICCTADAEVDTSAQAATENGTVLGVDLGVNNLAVTSTGRFWTGNEFDHWRREYEKRRSDLQDHGTRWAHENIQSVGRKEEGRFTQTLHRISNELVTEARENGCTVIAFEDLTDIRERTGGSWGHKWAFKRLYEYVKYKAEAYGLRVKQVNPKNTSRRCSECGFTHPDNREGAQFECLKCEYQNDADYNAAKNIGLRYLRQNQTGADGGALVGVRSNSGMVNXXXXXXXXXXXXXXXXXPRRSSGCTSACSRRCVRGRSRGPPPTVRRAVGSLESPCTPAVPTWRRPPSRGWTSLPRRSPRYTSGRSTS

SEQ ID NO: 29622 - protein, 391 aa, unknown
  TnpB Polypeptide
  misc_feature (391)..(391): Xaa can be any naturally occurring amino acid
MEVRRTVPVTLNVDSQDAALLEDTIDEFLWAAQYVTDHAFHGEYVTTSKTTLNDETYEDVREATDLHSNHVQSARNKAAEACKGVVERWKQNKKASKPQFRSPHLVYESRTATFHDEYVSLATVDGRIEADYVLPENPEGTPHQQYLFTDDYDITSAELHRQHGEWQLHICCTADAEVDTSAQAATENGTVLGVDLGVNNLAVTSTGRFWTGNEFDHWRREYEKRRSDLQDHGTRWAHENIQSVGRKEEGRFTQTLHRISNELVTEARENGCTVIAFEDLTDIRERTGGSWGHKWAFKRLYEYVKYKAEAYGLRVKQVNPKNTSRRCSECGFTHPDNREGAQFECLKCEYQNDADYNAAKNIGLRYLRQNQTGADGGALVGVRSNSGMVNX

SEQ ID NO: 29623 - protein, 422 aa, unknown
  TnpB Polypeptide
MNVIRTEHIELNPNETLSELCHYSKNLWNEANYTIRQEFFANGRWIRYGELDKKLKSSENYKALNAQSAQQTLRLIDKSWKGTFEGIKERTKNPDKFLGKVKLPKYKPKDGETILIFTNQQASIKDGNLTFPKNLSLNPIKTRLPNNMNLREVRIIPKGTGYTCEIVYKTLNEEGEINKRWYARRHNENRIAGIDLGTVNIVTIGNNIGEQPIVIKDDGTGIKSINQFYNKSRAELQSIYDLQGIKHGSRMDRLNFKRNLKINDQMHKISRYVINYCKLHNIGTLVIGHNDNWKQKCDLGERNNQNFVSIPYYKLIQMLQYKAEEAGITIKMQEESHTSKCSFLDNESIEHHDRYIGKRIKRGLFRSAKGILINADVQGAYNIIRKSEPNAFQKWNADGVGGCGLHPERANIKKILSFAEVC

SEQ ID NO: 29624 - protein, 446 aa, unknown
  TnpB Polypeptide
MRIQKTIKVPVHYDTTNTKLGILDRLTARITYCIMLISELITEETEIDRHTIRKLVKDNNIALRTGLSAGFIDQCVDKVIWAWRSYKKHHKKWEAKVKRAEERVASSRDEKERAKREKFLEKLFKREPSKPSFNEKTPCRFDYRTGNVEMGKGKFSPLWIHISTLEKRKTIDIPLNPSQYHLNQLKNAEINDFEIIKHGKKYYIHISITKMVEDKPISSIGGIDQGLNRTVAVVLLRGPFPREEHLLDAAKRDLLDKYDAIIASLQEAEKWDKLRELRNKRANVSTYYDWCLANQVAEFTEGSMIAIGDTNFRQTQFRGNGMPSLRKRIGKWSYSRQREFIALKRAENGYPTLMTDEYNTSRRCHICGSMLTTRKWVYGYSYILCHSCKAKIDADFNAAYNISHKIDATAIWMYNSSIERYNALQCRDDWLKVQMNMEGEKPHASA

SEQ ID NO: 29625 - protein, 376 aa, Methanobacterium sp.
  misc_feature (120)..(120): Xaa can be any naturally occurring amino acid
MLRAYKYRMYPTKNQKEMVNKHFGACRYVYNWGLEYKIRTYKETGKSVSRFALNKEITLLKQSEVWLKEINSQSLQGATLNLDNAFTRFFREKKGFPHFKSKKNRVQSFNVPQNYKVDFXKTKLHRQFKDKQQTATISMTNTGKYYISILIDDEKSLPEKVKFNQKTTVGLDMGLTHFLINSNGVKVDNPRPLKQQLKRLKREQRKLSRKQKGSNNRNKQRIKLSKIHERIRNIREDFQHKLSKSIVCENQAIAIEKLNIKGMLRNHNLAQSINDVGWAGFMDKLEYKCEWYGKTLLQLGQFEPSSKICSNCGYHNSNLKLHQREWICPKCEKRHDRDVNAAVNIRDFALDKQNLISTVGTTEIKASQKKPQKWIQ

SEQ ID NO: 29626 - protein, 317 aa, unknown
  TnpB Polypeptide
  misc_feature (312)..(315): Xaa can be any naturally occurring amino acid
LRKELTILKKTELNWLSGVSNNVAKQAVKDACNAYKKFFKGLADKPRFKSRRKSKPSFYNDTDKLKVKEKLVLIEKVGWVETVEQIPMNVKYTNPRISFDGKFWYVSIGVEKEESISKNTDISIGVDLGLKDLAIVSNIDKPFKNINKTKEVKRLKRKLKRKQKQVSRKYEFNKTLIGKEGEHRYKFTKTNNIKKLEREIKLIQRRLLNIRLNHIHQATTAIVKTKPNRIVVEDLSVKGMLKNKHLSKAIQEQCFHKFMCILEYKSKFNGIEFVKADRFYPSSKICSCCGAIKKDLKLKDRVFICPSCNNKXXXXEI

SEQ ID NO: 29627 - protein, 164 aa, unknown
  TnpB Polypeptide
LQKRLNRKTKGSNNYVKSRIKLAKEYEKITNRRNDFLHKISTNIVRENQTIIVEDLNISGLMKNHNMAKSILSASWYSFFKMLEYKCGWYGKNFITIGRFDPKMCECGYINDELKLSDRLWSCPNCGIVNDRDFLAAKNIKKFGLQRRNLIGYSPRVAGVELVE

SEQ ID NO: 29628 - protein, 459 aa, Asanoa sp.
VKTIQAFRFALDMTPRQERDVLAHAGAGRVAHNWALAQVKAVMDQRAAERSYGVQAELLTPSLSWSLAGLRKVWNVAKPEVAPWWGEVSKEAFNTGLDALARGLKNWAESRNGKRAGRPAGFPRFKSRRRTTPSVRFTTGAIRVDPDRMHVVLPRLGRLKLHESARKLARRLDNGTARIMSATVRRDGGRWHVAFCVEVERADRTPALPGSVVGVDVGIKHLVVLSTGELVDNPRHLSVAQTRLRALGQALSRKSGPDRRTGRRPSKRWERAAARVGRAHARVANLRRDGLHKLTTELGATYGTVVVEDLNVIGMLANRRLARYIADAGFAEIRRQLAYKTAWNGGRLLVADRWYPSSKTCSGCGAVKAKLALSERDYHCQACGLVIDRDRNAALNLAALAAKFDTAGSGPVAARGADRKTRARGQVAVKREPGTASAGQAGTVPPQGRTADRVLTRAL

SEQ ID NO: 29629 - protein, 350 aa, Proteobacteria sp.
MSMLTYRYRIKDSTSGTHLARIASAINYVWNYCNEVSLLAFRSDKTFLTAYDLHTLTAGTSKDLRLSADTIQQVCTEYVTRRRQSKKITLKWRSWRRSLGWIPFKAAYIRLHAETITCCGHRVRVWLSRPLTGTMKMGSFTQDARGRWYVNLHCEVPDAAEPTGQRAIGIDLGLKNQITCSDGIIYSRENLTRQHAQPLAMAQRAQKKRRAKALQAKMANIRKDWTHKATTAIARRAKLLVISNVSSTKLVKTPFATSTYDAAWGIVRHQLTYKAKRLAGVCVAGNERFSSVTCSGCGIRSGPSGLSALGVRAWVCSGCGVEHDRDVNAARNILALRSGRATPIKGIPVR

SEQ ID NO: 29630 - protein, 375 aa, Proteobacteria sp.
MKTFEYRMRPNRQQAQNLMSVLIASRKLYNCGLEELVSHYAETGKHLHLYEQDKKHGKAEHPDLPEVVGDTTLKRLHRSFANFFRGCKEGKKIGFPRFKGAHRWDTIQMRDAGPSLKGNSFGAPRQCGGKIRVNVHRPLQGTFKYARFVLRPSGWHLQCVCDIAPSPLPVQANAVGLDMGITYLVADSTGRQLKNPQNLQRSAEMLAKAQRRLAQCTKGSNRRRKAQRVVARHHKRIVHQRQDTLHKISRAYVNGYQVMAIEDLRPAHMVRHHALARAISDASWGQLRQMLTDKAADAGRQLVAVPPHYTSQNCSVCHTRVQKSLAVRTHVCPHCGYVADRDVNAAQNILHAAQAARARTGPSPTGGEGLRGHTR

SEQ ID NO: 29631 - protein, 450 aa, Moorea sp.
MQLGYSYKLKPNRQQEATMKKWLDMLRSEYNYLLRDRNDSYDQVKAPRLGNYCDLRSGGEVCPLTCSVSRNHSVGYPWKNSKKNPRRSAYEAHSSNLPILKKERPWYKIIHSTVLQQTLRQLDVAFSKFFKGETGYPKPKRRSRFRSFKYAPGQVKLDGNKIYLPGIGWMGFYNSRPIPEGFTLKSVTVRKKARGWFVSLQIEDKSVPTTLGKDKSEINPIKVKGCDLGINKLVSISDGTTIANPAKQEFFKRRERRLKLRQKAASRKRKGSKNRGKSYVKVASLHEQITNKRSAYHWDVANKLVNGTDALIFEDLNIKAMKSRCKPLPNENGGYDRNGQSAKRGLNRSISNAAWGELVKKVEVVAAKSGIPVVKINPKYTSQKCPKCHHVSKNNRKKEKFVCTNCGHYDDADVNGAVNIKLRGLKKLGIDPNQLPPVRGKVTPMEITVS

SEQ ID NO: 29632 - protein, 412 aa, Mycobacterium sp.
MAKFEIPEGWMVQAFRFTLDPTAEQARALARHFGARRKAYNWTVATLKADIDAWQATGIQTAKPSLRVLRKRWNTVKNDVCVNIETGVVWWPECSKEAYADGIDGAVDAYWNWQNSRSGKRDGKRMGFPRFKKKGRDPDRVTFTTGAMRVEPDRRHLTLPVIGTVRTHENTRRVERLIAKGRSRVLAITVRRHGTRIDASVRVLVQRPQQPKVTDPGSRVGVDVGVRRLATVATADGAVLERVPNPRPLDAALNELRHVCRARSRCTKGSRRYRERTTEISRLHRRVNDVRTHHLHCLTTHLAKTHGRIVVEGLDAAGMLRQQGLSGARARRRGLSDAALGTPRRHLSYKTGWYGSQLVVADRWFPSSKTCHVCGHVQEIGWAEHWQCDSCSASHQRDDCAAINLARYEDTT

SEQ ID NO: 29633 - protein, 417 aa, unknown
  TnpB Polypeptide
MEKRRTVPVKLDVDSGDTTLLRDTVDEFLWAANYVTSYAFHGEYVTTSKTTLHDETYEDVRDETALHSNHVQAARNKAADACKSVVKKWQHGKKASKPRFTSPHVVYDHRTATFHDDYVSLATTDGRIEAEYVLPDTERDTPHAEYFFSDEYETTGAELHYSNGNWMLHIHCKTDVASDTSEQDTTENRTVLGVDLGVENLAVASTGRFWTGDEFDHWRREYEKRRGDLQDHGTRWAHENMQAVGRKEEGRFKITLHRISNELVAEAREYGCSVIAFEDLTDIRERTGASWGHKWAFNRLYTYVEYKATEYGIDVEQVTPENTSRRCSECGFTHPDNRDIEDFECLKCGYENHADYNAAKNIGLRYLRRNQTGSGGGAPVGVRLNSGTLNANGEYDPPAEESARAEVHAESPPFRVG

SEQ ID NO: 29634 - protein, 403 aa, unknown
  TnpB Polypeptide
MLKAYKYRLYPNKSQQILIEKTFGCVRFIYNKMLADKKEYYEKEKKTLWITPAQYKNEFIWLKEVDSMALCNAQINLQSAYSNFFKSISKQRKRTVEFPKFKTKKKSKLSYTTNNINNSIRLQSINHIQLPKVGTIYFEQHREFNEKIKSCNISRNGNKYYISILVDQLPKIVEKEVGNKVVGIDIGFETFATLSTGEKINHPRFLDKSAKKLARANRTLHKRVLGSKNREQQRFKVNTIHHKISNQRKDFLHKLSRRLVTEFDVIVVEDIDLTIWAKRKKGRKFSFGKSVADSGFGMFRTFCGYKAEEELKTFIKAPRFFASSQLCSICGYKNAEVKNLSVRNWVCPQCGKEHDRDSNAAKNLELWYRNTVATTGIHGCGEITSTLDLSNASSFVETSSPCL

SEQ ID NO: 29635 - protein, 500 aa, Moorea sp.
MPRKVGATKKISTQVVPVVGMTKSVEFELLQVMKKLGIVRSESYNKLGSINHWGLDWKKAIPEVKSFRTPDTLGLPAKLMDWTVNDVAKAITASQAACIDAVVRKIYKRFPGKDNQKTRKELCKQLKTLAFLENPLLHRLVRKEFKRGHSWVKNQIVYQQIGYKCRRLSRNTYQLELAGLRRGKRNRIIVRSNRKISGQIRLIYNQTLQRFEIHFLVDYGTVEVPANRHPIGIDKGYTEALYDSNGQAHGKNLGKAATKKSNRICAKNRNRGKLWAIHRKLEKLAPAKSARILKNNLTRKTENKRYRQNQAELTAIIGAASKSLFNGESLLVFAEDLTQPIKNKRQSKAMSRKLNSWMKGKMRDSLQKWADWTGSVVTEVQPSYTSQVDSVTGTLLGERNGDNFTRFNGVVLQADYNAAKNILNRGTDKEITRYMSKTEVQAVLLRRTARFLEGMGLSLLDAVELGWINCKHSKTKAFKELLVEMPGSPRKMSGRLNSNC

SEQ ID NO: 29636 - protein, 380 aa, Thermoactinospora sp.
VRLVVQVKPLPTPEQAAALEATLHTVNRAATLVARIAHQQRCFRNFDLRKHAYARIKAEFGLAAQAAQHVIKKVADAYRTLHANLAVGNLGKPGSRRRRAAETRPIVFRSRAAQPYDDRCLSWQHATRTVSIWTVAGRLKAVAFTGSARQLALLAEHRRGESDLIWREGAWYLYATVEVPDRPVAAPDGFAGVDLGIANIATTSDGIRHSGKHLNALRHRHRELRRRLQAKKTKSAKRLLKRRRRKEARLAAQVDHAIAKQIVTEAERTGRGIALEDLGGIRERVRLRKPQRVTLHSWSFHQLGAFITSKAARAGVAVIFVKAAYTSQECSACHHIDKRNRPDQATFSCTSCGFAEHADVNAARTIASRGETGWAVSHAA

SEQ ID NO: 29637 - protein, 476 aa, Mycobacterium sp.
VARFEIPDGWAVQAFRFTLDPTEDQAHSLARHFGARRKAFNWTVATLKDDIEAWHETGVETEKPSLRALRKRWNQVKDEVCVNVEDGAVWWPECSKEAYADGIDGAVDAYWNWQSSRAGTRAGKRVGFPRFKRKGRDADRVSFTTGAIRVEPDRRHLTLPVIGTVRTQENTRRIERLISKSRARVLAITVRRNGTRLDASVRVLVQRPQQPGVAHPDSRVGVDVGVRRLATVADADGTVLDRVPNPRPLDAVLRELRHVSHARSRCTKGSRRYRERTIEMSRLHRRVKDVRINHLHALTTRLAKTHGRIVVEGLDAVGMLRQNGLPGARARRRGLSDASLGTSRRHLSYKTGWYGSQLVIADRWFASSKTCHVCGHVQNIGWDEQWQCGGCSARHQRDDNAAINLARYEETPSVVGPVGAAVKRGADRKTGPDPAGGREARKGRSRTAAEQPRDGVQVARPLQVTRSQRLFSTNQV

SEQ ID NO: 29638 - protein, 371 aa, unknown
  TnpB Polypeptide
MEYSYKFRIYPNSAQESLIQRTFGCVRFVYNSYLALRVEAYKEHRETMNYVACSNNMTLLKKKLEWLREVDATALQSSLRDLDTAFQNFFRGVKQGKHVGYPKFKSKRDNHKSYKSKRVGTNIRVLDNKHIQLPKLGSVRCVVSKQVCGRILSATVSQAPSGKYFVSLCCTDVDIEPLPSTGAAIGVDLGIKALATTSDGDSYANKKHLYAQDKKLRRLARYLSRKQKGSKNREKARVRKARLEEHIANQRRDDIQKATTDLIRKYDVICIENLKTKGMMKNHKLARSVGDASFSEFRRELEYKASWYGRTVSVIDTFYPSSQLCSVCGYRNAETRNMSVREWDCPNCGTHHDRDINAAVNILNEGLRLLA

SEQ ID NO: 29639 - protein, 497 aa, unknown
  TnpB Polypeptide
MGRCQPTPPTFVAEFRLDATPRQRAVVQRRLRAGAQVYNRCLQVGLERLAAMRADPRYEEARRLPASRERGAAFAELRREHGVREYDLQGVGSAVRGCYLGEQIGAHEAQTVATRAFRAVEEHAYGKRGRPRFRATRRGLDSVEGKSSDSAVRFGRRVIDGEERPVLCWGRSLAMPLRIEAGNPVQLWAAIHVAGGGLRHARLVRRRVKGREYLYAQLVIQDRPCPRHQVGTGLVGADLGPSTIAVVSDSEVALERFCAELEPQWQRVRRLQRRLDRQHRAGSPACFDERGRHLRGRCAWTRSRRARLTQVALAEAHRRTAAQRRSLHGNLVNRILSHGTDIRIERLSYRAWQRGHFSRSVRDRAPGLFVSELKRKAASAGGSVVEFDTRTTALSQVCVCGRRERKPLQLRVHGCPCGIRAQRDVFSALLARHVDPRTQALDARAAQRELSMRHDIAARTASIPGPNRQLGWHPAARTEASVRAGRPQPAATTGEAA

SEQ ID NO: 29640 - protein, 497 aa, unknown; identical to SEQ ID NO: 29639
  TnpB Polypeptide

SEQ ID NO: 29641 - protein, 377 aa, Atopococcus sp.
MLKGIKIKIYPNQEQIQFLEQNIGNARFVWNQMLNMWNTRYQNNPNLPALGKYDLSSLLPTMKKEYEFLKKSESTSLQFVCETLHGSFVEFFKKARRHPRFKSKKKATPSFTVKNNKNIELKKNAIKLPKIGWMKARWSDNVSFDKIKQVTITRTPSGYYKASVLVESESQVLDKIGKQIGLDMGQSDLMIGSDGTRVETRTYKKYERKLKQWQRKASRRLRLAKEKGTPLEEAKNYQKSKRMVAKYHEKIRNCRQDYLHKATKKIVIEYDFIAVEDLRIKGMLNKKNSKLNNHAIANQSWYELRTMFEYKSDWYGKTFVKVDPKYTSQDCSNCQKRTGPKNDLSVRQWVCPNCKTKHDRDINAGRNILNKALIQVG

SEQ ID NO: 29642 - protein, 456 aa, Weissella sp.
MLNMATYQYIRRYNAVLTEEQQARHATNRAAMDAVFNHIVAYLEKRYPYNGKRRFPTNVGGKRVLRNELIKSLRTKLAWLKKFDGVRNIYSQSLQIFVDLIITNFGEYQKKLNKARSMTDQDKADYKANKGRHKNPQHRSWYRKGSLAFLRGGKQAFKTVTYSNNGKFRVISDHEIFVQQYGLIHVRQNIRKFRGNEKQIAQVKIKMRRHGDYEIQFVLNAPRVKSEGLRAQGVDMNMKHNKIFHTTNQDNVQKRYYLSRDISGRADKLSDLVDALKSQRDTSKLSKQSKCYRALCNSIRYWTRKRENILNNTFRHIVRDLMSNYDITVMERLTAFDMRKKRRENRGFNKKLTEVRFGMLIEFAQQYANHYNKRLILVKPDMTSQVERGTSYVKKHALDETVVFDGVEHRGWFSEIDGQFVSRDGNSSGNVLDWGLDPKSHFLYPKYPVSKLVFEK

SEQ ID NO: 29643 - protein, 463 aa, Bifidobacterium sp.
LSDNDDPGSARLYSKDPDQVMTWLCDAWRTRFNQLRSRRKKYGPNKKLQPITDRVDERTHAQARHDCSWMAAVPSLLLNSPEKLEKQDWYAAVKRRKTLRGKHLDPGRMPRFKSRRKSDLTFACWYDDGRNARFVKYNRHHGAVIINGQNPTGYRHEDDTGVRFSIVIRVRLSQPIRDYSSVRVNWTRRELVFVNDPLPIRRSRTAKAVGVDRGCVHNMADSDGHYYDLPKAKLKRIDGEIRRRQKAQARAIRLSEASSWKAYRMKGASKRFRQREQEIRSLYAKAHRIIDDCQQKWTTSLIRDYDLIAIEDLNLRGMGRKPQPKPDPLHPGRYLSNGRAAKRGLNRTMRTAGMGGIGFLLEYKTKLAGSLLLKVNPAYTSQTCYACKYVAKENRESQAVFHCVNCGHEDNADHNAALNILDRAFQPQPSTGRGTARRGSGTLVSPEGTSRGRAVSTKRETTH

SEQ ID NO: 29644 - protein, 439 aa, unknown
  TnpB Polypeptide
MVACSKAKRLQIKATRQATRERRKSQTIKTYTLKVNNQKLSKQQQEYLHKIFIEAKWFYNFLLQNDISMKYNDVKDILKQDIVKIKKKDVFEDRKLEYLSSSLKRQLHQRICNSIKALSVLKAKHIQSVGRLKFTPQINSIDYPQYKITWRFAGQNKIQIQGCKKAFRVFGYSQLKNVKEFSNLKLVRKADGYYFQITSMEDKIQRKPTNQAIGLDFGIKDTITTSNGDKYKFDFPETKRLKRLQRHESRKLLDKNNKKSKNRLKLRNKINIEFQKINNRKKDATNKLVSKLVKENDIICLQDELVSQWHKGIFGRSVQHSNLGAIKSKLKDLQSTHDIRVIKSEIATTKKCFCGRKNAVSLNDRVFKCEKCGFEYDRDIKSAIYILVCGLQQQSTSSGTGDYTCGENVRIIVDGDVKVKINNNQFSMKQEAQSSLAAG

SEQ ID NO: 29645 - protein, 385 aa, unknown
  TnpB Polypeptide
MITNIAYKYRLKPNKQQKQLLEHHFGCNRFVWNYFLHQRQTFYQTNKEDIEAKRIKGTKTYYDDEKELVKLKKTEEYKWLKEVNSQSLIATLMHLDTAYKNFFKKKSKFPHYKKKGDNQSFTIPQFIRVENNKIYFPKFKEGIRLKEHRKLEGKICNATISKTSTNQFYVSIIVEKEIEPLQPNNDAVGIDLGIKDFCILSDGTRYENIKPLKNHLKKIKYLQRQLSKSKKASKRKEKKRLKLAILHQKIHNQRLDYLHKITKAITDENQVIVIEDLNVSGMMKNHHLAQAISDVSWHEFKRQLEYKCKWKGRQLVIIDRFFPSSKTCNHCGYINQELTLDVRQWDCPQCKSKLDRDLNASINILQQGLNMVQGTGIKSEGSCRR

SEQ ID NO: 29646 - protein, 416 aa, unknown
  TnpB Polypeptide
MLEPENTQGITIKVKLVLDESSDETKFIRTMEQYRKACNFISEHIFLNDFPMNQLKLQKEIYSDIRTKFGLKSMMAQSAIRATIARYKTLKEQYKQHPYKFQDKNTKKWYSVQRDLRWLKKPIQFRRPQVDLVRNRDWSKRADGKLSLNTLDGRVIATPVCKGFDKFFDGTWKFGVAKLLRMKGGWMLHVGATKQLNPLENADVQHVVGIDRGLRFLATTYDERGECQFFSGKEVMRKREEFSAARERLQKKHTWSAKRAMKRLSGRENRWMADVNHRISKTLVEKYGKNTLFVIEDLQDVSFDEQNLSHRRKSGRKQLRSWAFFQFEQLLAYKARLKGSAVVKVAAQYTSQRCPKCGGIHKEYRHHHTHEYICKSCNSYRANDDLTGARNIYLLGTMYVSGIEQPKFEKLEPTAN

SEQ ID NO: 29647 - protein, 485 aa, unknown
  TnpB Polypeptide
MRTKFKGSLSSSFYWEIYTQLFTCYQNKFKNIQRNLVFEISAFNGFEYYKRDTKKYKKGYLKRVIFEKKQTKLSSCLTYLARYGNEGTIAYIQSNVDKCDANKREFYNNIIRCCEKYGFERLYTLALSKRKRIMSKYANNPIEFSSLTFSGRCRKKRIIDYNHRFGSVINSFISLSGINRKSFDIPVSFNKGWYGNMKDYRKNNTDYEYTITFNEKKHQVNVNLCKDGERYIPEPNGKTIGIDVNCKHNLFSLSDETTYDYDRKLVNDFCKLSLEIDKLKEDRAYVIGKRKQWKLNKLKEKVIKNEQQTIAIMCKNEKAKGTGHIVMENLNNGFGKCYAKDGDNEDINYNRKVSFLGLSSLKQEVEHISRKYSIAVSTVQASYTSKMCPICGCIEDGNRPNQETFECVECGHKDNADFNAAKNIQNRVLVTVLRDKLLKQVDNGAFEPIMLSRDKVKEVLLSFRRSLSKLGSECIESSNTTFDYV

SEQ ID NO: 29648 - protein, 215 aa, unknown
  TnpB Polypeptide
VDLSEKELQEKRLPPSKEEAGLDVGLKTFAYLSTNEEIANPRFFREDEAKLARAQRKLSKAPKGSHERTKKRKVVARTHERIANRRKNFIEQEACKLVARFGFIAVEALVVRNMVKNPKLAKSIADASWSMFFTRLQAKAEEAGRQVVRVNPAYTSQTCSACGHRQPMPLSVRVYECPHCGLVIHRDHNGSLNILENGRQACGRAGRVIPEAPGL

SEQ ID NO: 29649 - protein, 515 aa, unknown
  TnpB Polypeptide
MPTPEQQQYIKAPLNPELLVPFTPTPTPTPTVTPTPTPTPTPTVDTNLENIRKVFGQEWVPSPTFTPEMQKQGVYGAVRIAGTPSVYTIGSGGKELTADEYKQQFGTLSQQGIVGEVTEDQASKLGIVLPTKKSEQDQPETPAFTSSEESRTEEKSLMDELKDMLAKSQDNTGAKQATDDIIAETDKQISALEKRRAEETKLINEQFDILSRQQEEEQYKEVGTTTSTLARIGGFLGQSASSQGAMLNLAQSHRNEETVLEAKRSSALQAANNAITDKQFELARSKVTEAKELNNEIEKRRNNFFDQTMDIVQENRQQNQEKRVQDKYVYDSAIDTIETTLPTIMDELTGKTRAEIEDTLIKRAGELRVDPNLLIGKYYAQLQKEKERTQNEIVSLVTKYPSAGIDPNTDTFATASEKVRNSKEYKSDIAKAEADLANTYSLIKERATGGKQTIEEIKITRMSNASQAFEEVKGTDGFISPSDWIILRNTWLQQGGILKDFVDNFSIYQNPTNTY

SEQ ID NO: 29650 - protein, 141 aa, unknown
  TnpB Polypeptide
LGETEAAHRQARRQGREPASDFLHKTANRLAARYDCVGVEDLDMKNMSQSLTLGKSTMDNGYGMFRTMLAYKLERQGKQLVTVDRFYPSSQLCSDCGYRNKDTKDLHIREWTCPDCGVWHDRDVNAATNIMHETRRLMQER

SEQ ID NO: 29651 - protein, 300 aa, Enterococcus sp.
MLNLLRDVFCMSEIHYGRGYVYSIQYHLVWCVKYRHDILYGHVDIDLKKLLKQIADDNDVKIVEMESDKDHIHLLIECTPGKFFVSILCEEEMIEYPKCNSAIGIDLGITDFAILSDGQKIDNNKFTSKMEKKLKREQRKLSRRALLAKEKGINLFEAKNYQKQKRKVARFHEKVMNQRTDFLNKLSTEMIKNHDIICIENLNTKGLLRNHKLAKNISDVSWSSFVTKLQYKADWYGREIIKIDKWFPSSQICSECGHKDGKKPLDIREWTCPICHTHHDQDTNASINILTEGLRIQSLV

SEQ ID NO: 29652 - protein, 388 aa, unknown
  TnpB Polypeptide
MRKTVRRAYRYRFYPSPEQETELLRTFGCVRKVWNLALDARTTAWYQRQERVTYVQSSALLTGWKRSADLAYLNDVSSVPLQQALRHLQEAFAAFWDKRARYPRFKSRRKSRQSAEYTRSAFRYRGGTLTLAKMTEPLDIRWSRPLPQGAEPSTVTVSRDAAGRWFASLLVEEAIEQHLDTGAAVGIDAGITSLVTLSTGEKIVNPRHERRDRARLAKAQRKLSRKQKGSANREKAQRKLARVHARIADRRHDFLHKLSTRLVRENQAVVIEDLSVRNMVRNHSLARAISDAAWGDLRSMLEYKCDWYGRELVVIDRWYPSSKTCSGCGHLTARMPLGVREWNCGNCGARHDRDVNAAKNILAAGLVVTACGGSVRPKRELSRAGSSR

SEQ ID NO: 29653 - protein, 286 aa, Streptomyces sp.
LAVGGVGGGIAAGAAGCRARLHQLLCLPQGCPARGPGGAPRFKSKRDARQAIRFTANARWKITEAGRLLLPKVGEVRVRWSRTLPSFPSSATVVRDAAGRYFVSFVIETDPDTDVARMPDPEDLPGAGIDLGLTHFAVLSDGTKIDSPRFLRRAEKKLKKAQKELSRKQKGSRNREKARLKVARAHAQVADARREFHHQLSTKLIRENQGIGVEDLAVKGLARTRLGKAVHDAGWASFLAMLEYKAQTAAGLAVTACRAQVRPEPLVPAQREEAGSHGIRSGACAA

SEQ ID NO: 29654 - protein, 310 aa, Bacillus sp.
KEFVWLKEVDSIAIQSSVRNLADAYTRLFKKQNNAPRFKSKRNNVQSYTTKQTNENIAVVGNKIKLPKLGLVRFAKSREVKGRILNATVRRSPSGRYFVSLLVETEVQELPKTNSYIGMDVGLKDFAILSDGTTYKNPKFFRSLEEKLAKAQRVLSRRTKGSSRWNKQRVKVARIHEYMTNARKDYLDKISTEIIKNHDVIGIEDLQVSNMLKNHNLAKAISEVSWSQFRTMLEYKAKWYGKQIIVVSKTFASSQLCSCCGYQNKDVKNLNLRKWDCPSCCTHHDRDINASINLKNEAIRLLTARTVEIA

SEQ ID NO: 29655 - protein, 301 aa, Bacillus sp.
MEVKRMMINTAYKFRIYPNKAQAILINKTIGCSRFVFNHFLSLWGNAYKETGKGLTYGTCSAKLPAMKKEFVWLKEVDSIAIQSSVRNLADAYTRFFKKQNSAPRFKSKKNNVQSYTTKQTNENIAVLGNKMKLPKLGLVRFAKSREVKGRILNATVRRNPSGRYFVSLLVETEVQELPKTNSYIGMDVGLKDFAILSDGTTYKNPKFFRSLEEKLVKAQRVLSRRMKGSSRWNKQRVKVARIHAYITNARKDYLDKVSTEIIKNHDVIGIEDLQVSNMLKNHKLAKAISEVSWSQFRTML

SEQ ID NO: 29656 - protein, 361 aa, Acrocarpospora sp.
LGGAVGFEAVGHLDHDVFAAASSSSSDIPTDIDSVSGKRRGPRMGLPVFKSRRDRRQSARFTGTAFGLPGDGTLYLAKIGKVEVRWSRELPAVPSSVTVILDAAGRYFASFVIEVEDAGQVLPEAEAEIGIDLGLTHYAVLSDGTKIPNPRWLRRRAKRLARLQRALSRKQKGSKNQEKARIAVARQHTKVADARRDFLHQTSTSIIRENQTVAIEDLAVRGLARGRLAKSVNDASWGAFRTLLGGKAARYGRTVITVGRWFPSSQLCPCCGWRNGKTPLQMREWDCPTCGEHHDRDLAAALNILAEGIRLRRQAEEASPAGENMVAAGLADTRNDCGGRVRPGEAIPTLAPPTTYDAQAA

SEQ ID NO: 29657 - protein, 366 aa, unknown
  TnpB Polypeptide
MTLKAFRFRIYPTEEQKFYFAKTFGCVRFIYNTMLYDKIEHYKANGEMLRNTPAQYKKEHSFLKEVDSLALANAQLNLEKAYKNFFREIKKGNKDQGFPKFKKKSYNQSYTTNNQKDTVTLLNDKYLKIPKLKSNIRIKLHRQLPKDAKIKSATISRSSSGKFYVSILVKTDSIKPLPERSEVVGIDLGIKTFAVTSNSGNIEAPKALLKHEKRLAFLQRALSRKVKGSNNYYENKKQVALLHEKIVNIRKDFLHKESSKLINKNQVIKVENLKVKNMVKNPNLAKHILDASWSKFIDMLSYKADWYGRTLIKIDTFFASSQLCSVCEYKNKEVKDLSVRTWICPICGAKHDRDVNASINILNYSG

SEQ ID NO: 29658 - protein, 548 aa, Streptomyces sp.
LLDVLPHHRERGAAARGGEVGRRPEVPVHERPVHAAGEVPAQDAGGHALEAVHEAGHGDLRRVVDQQVHVVVLAVELDQLGLEVLAHLPHGRLAHGQHVVVEHTTPIPGHEDQMHVHRRNHVPATPQLAIGSHRPNGRVTAVQLRYNFRVYPEPAQRHALARAFGCARVVFNDGLRARQEAHAAGLPYIKDTDLQKQVITAAKRTGERAWLGEVSSVVLVQSLRDLHTAYRNFFSSVTGKRKGPKAAPPRFKSKRDNRQSIRLTANGFSLRENGRLYVAKVGDLRVRWSRPLPTAPTSVTVTMDAAGRYRASFVVDTEPEFLPETTAEAGIDLGLSAFAVLSNGQKIASPRFLRRAERKLKRLQKDLSRKAKGSKNRTKARVKVARQHARVADRRRDWHHKESTRIIRENQAVYVEDLAVSGLARTRLAKSVHDAGWSWFLGMLEYKAARHGRYFGRIGRFEPTSQVCSACGIKDGPKPLHVRAWTCKECGTVHDRDVNAARNILAAGRADRLNACGAPVRRASVPAQRREAGSHQKGQTAQAGIPVL

SEQ ID NO: 29659 - protein, 413 aa, Streptomyces sp.
MLINQLCIVIRVQLRYSFRLYPSAGQRSVLARAFGCARVVYNDALRARETARSEGMPFPKTADLSKALITEAKNTPERAWLGEVSAVVLQQSLRDLDTAYRNFFDGLKGKRPRMGAPRYKSKRDTRQAVRFTANARWSITTGGKLRLPKIGDVKVKWSRSLPSAPSTVTVVKDSADRYFASFVVETGPEEVLPEVTPELGIDLGLGHFAVLSDGTKVDSPRFLRRAEKRLKKAQRALSRKEKGSSNRNKARIKVARAHAKVADARREFHHQLSTKLIRENQAVAVEDLAVKGLARTRLAKSVHDAGWSAFVNMLEYKAARYGRTFVKIGRFEPTSQVCSQCGVKDGPKPLHVRVWTCGACGAVLDRDINAAVNVAKAAGLAVPACGAQVRPGLVPAPRSEPGTHPTPQPSTAR

SEQ ID NO: 29660 - protein, 403 aa, Calothrix sp.
MLVFEAKLEGTKQQYQSLDNAIRTARFVRNACLRYWMDNRDIGRYQLSAYCAVLAADENVPWVAKLNSMARQASAERAWSAIARFFENCKKNKPGKKGYPSFKKEQTHSSVEYKTSGWKLSIDRRHITFSDGFESGTFKLWGTRNLHFYQLKQFKRVRVVRRADGYYAQFCINQERVEKREPTGKTIGLDVGLNHFYTDSQGNTIENPRHLRKSEKSLKRLQRRFSQTNKGSKNRVKFRNKLARKHLKVSRQRKDFAVKTARCVVQSHDLVAYEDLQVGNMIRNRHLSKSISDAAWTQFRQWVEYFGKVFGVVTVAVPPQGTSQNCSNCGEVVKKSLSTRTHVCPDCGYTQDRDHNAARNILEIGLRTVGHTGTQAASGDIDLCLCGATPANKPSRRKRKPKE

SEQ ID NO: 29661 - protein, 409 aa, unknown
  TnpB Polypeptide
MTKELRTVEFVVLPATGAKARKMFQIAGACRYVWNHFREKNLADYQAFKNGKGERPQTSYFSLGLEFTKLRHETKWMQELPANPVKHTLKYFADALKEAMAGKKGFPKPRSRKKTTPSFTIPSSAGVRIRKVNKRYSSLLIPLVGWVTLVRRGGNPWEDGTPKQVVLRHDGHRWRAFVSYEVEVEQKSDDGEFLGIDMNTRQVATSDGHFYFLPDLKKKEARRRRYQRRMARQVKGSNRRKDTKKKLAKMSRKIANIRKNWIHQTTREIADKCETIVIEDLKVKNMTASAKGTTENPGKNVKQKAGLNRAMLDTAFGEIRRNLEYKCGRLVEVNPAYTSQTCSECGHTDKENRKTQARFQCVSCGFESNADTNAAMNIRRLGMAQLHGEGSGISTVPMNREIDARLSHG

SEQ ID NO: 29662 - protein, 390 aa, unknown
  TnpB Polypeptide
MMASHKVAQRIPFTPSKTQAALLEQCFGARRFAYNKQVEAFNSYDKDANPHPSYPNVTDMKSENEWLRDSPIPSNALSNAIQDFRRAQSAYFRQAQYGKNRPRFVSKSDNVQSFRNAVPMRRMEGNRYPLSKKLGSVRIRRRDRIRYPLESLSSWTVKRENGVYYLVLLFNVDVQPKPPVSGEVGIDVGVKDFLTLSTGEKVNYPDRLCQLEERVRWEQRKLSHRVKGSSNYRKQKKAVTKAYAKVRHYRENFQHQLSHKLIEDNQFIGMETLAVQNMTRRAKKKLGTDGKYVCNGQSAKRAMKRSILRNGWSGFAEKLAYKAQWYGRTLVQVDRFYPSSRLCHNCGHKYDGLRLSEREWVCECCGVLHDRDVNAARNILGEALRLSQTE

SEQ ID NO: 29663 - protein, 406 aa, unknown
  TnpB Polypeptide
LLKAYKYRLYPTKQQSILLDKHFGCCRLIYNLALETKINAYQSNKINLSKFDLIKQITDLKKDYPWLYEVCNQSLQQSICNLDVAYQNFFRTKKGFPKFKNKKSKQSYRINQSIKIDFETSKVHIPKFQDGIKFAMDRSFDGQIKQSTVSRVPSGKYFISILVDNKQEPPLKQQIKEETTIGIDLGINSLLTLSDGTKFDNPKHFNKSLKRLNFFQRKHSNHRGKRTKHKITLLHECITNQRKDNLQKISTKLIRDNQSIALEDLNIKGMSSKCKPKQNEVGTYLSNGQSAKSGLNRSIQDAGWGMFVQMLEYKAEWYGRNILKIGRFEPSSKMCSGCGYVNQDLGGKREWECPSCGVEHDRDINAAINIKNFALSKNKTVCGVHTENQKELPGLLGAMTSEAHKE

SEQ ID NO: 29664 - protein, 406 aa, unknown; identical to SEQ ID NO: 29663
  TnpB Polypeptide

SEQ ID NO: 29665 - protein, 228 aa, Deinococcus sp.
VPDQLIEVSQHAQLPSIEQRRIGMSARGRELQAVAWTVHVLPQEDLAPRFLKAPGPVKRKRTSAFRPAQRAVSRKRNKRSNRRRKAVQQVAKLHRTVARQRLDFHHKTALKLVRENDLIAHEDLNVGGMGRGNLARSIHDVGWSQFFSLLSQKAEWSARKVVRVDPRHTSQRCNACEHTCREIRASQSRFRCVACAHVDNANLNAARNILGRAAPSGSNVAVVNASVA

SEQ ID NO: 29666 - protein, 367 aa, Lentibacillus sp.
MIMKKTYKFKLEPNQEQEANMNWVLMMCRQLYNAMLEQRIFAYKTRGVGIHYYGQKKELPLLKQEVPEYKQIQSQVLQDVAERLDKAFQAFFRRLKAKQKAGFPRFQGDNRYHSFTYPQSGFALSGKCLKLSKIGNVRIKCHRQIEGTIKTCTIRRQNNKWYACFSCEIDVEPAPATGEEIGIDLGILNLATASNGDLYENHRFLKQSEKKIHYWNKILSRRKKGSRRWHKAKQQLTKAYEQLANRRRDRAHKVSRQLADQYDLIAFEDLNIQDMVKHKTLSKWILDASWRSLVVYTTYKAEEAGKCVIQVNPQNTSQECSNCHLIVRKSLGERTHCCPDCGYTVDRDVNAARNILSRAKGKLETAS

SEQ ID NO: 29667 - protein, 414 aa, Thermogladius sp.
VSYPVRGGEPVVEALKTRALPEGGCDKLLESLRLYRDAVQLVVNRVWNINKKLSKRELHKLFYSELVSMGFRAHHAKEIYVYAKSIVESARSNGGRKPVLRKLSVRVDKYDYKLDLDDMTLTLKLHSGNEVRLRLITSRNRVEKFKSWSNYEIVVKYEDGNFWVSVYFKRSIKPLKPKTVMAIDLNFDNVTVALFALDGRLTGLKRFKTPHRKLLTHRIWVERIQRRYPRSWRFIKGVRRAIERHGEKIKNISRDYSHKIGDLVARSALKYRSVIILENLDELRENNKKSKRFNKKLGLWFYHRIQFCVEYEAWERGLGVVEINPRGTSSKCPRCHRKLAEYEYRVLKCGKCGFIGDRDVTATLNIYRKYVFKHSRCGVSGVALNAPKPGENPSGMQGNRDEAMASSHINLYES

SEQ ID NO: 29668 - protein, 391 aa, unknown
  TnpB Polypeptide
MLTYRFRIYPTKAQEGLLSDTLETCRHLYNALLSDRNENGASLWELQGSLPKLKADNKFLRAIHSQVLQDVNFRLDRAFQAFFAGIAKHPKFRRKGRYSSFTYPQYGGFRVAGNWLRLSKIGAIKMKVHRPIEGTPKTCTIVRDIDQWYACISAEVPEGRERALPGKPAIGVDLGVTNLVTLSDGTMIPNPRILAKSVCKIKSLQRNLSRKQSGSNNREKTRIRLAKAWRTVRRQRDDFAHKLSDKITKEHQTIVFENLRTKNMVRNRNLASAIMDASWGQLRRLTAYKAERRGGRVILVDPRGTSQKCSGCGEVVPKELYERVHRCSRCGLTLDRDVNAARNILKAGLEQARAEAEPLSVIRDGQVRPRKQEAHELQPWVVHIIGRAPSP

SEQ ID NO: 29669 - protein, 391 aa, unknown; identical to SEQ ID NO: 29668
  TnpB Polypeptide

SEQ ID NO: 29670 - protein, 443 aa, unknown
  TnpB Polypeptide
MKTMISAKLKLNTTPEQFAQLRATQLAYRDALNFVSKYAFENGKMSNNRNLQKGTYDEIRSRFRLPSQMACNVPRQVGSTYRGLWTKVRKNAEHRKSGRTKKRYRGLDKAPKYVSPTLTYNYGYDYSFKRDQHVSVLTLDGRVVVSYTGYDKHIAFIKSGAEIGAAKLFYDKPKQQFYLLVALAIDTPDPDPETHTGIAGVDVGVRYLAVSSDTRGNHTFHSGKQVVARANHYARLRKRLQKKGTRSATRRLVVISGRERRLKADANHRVSKRIVTQYPNSLIGLEYLTDIRERTPRRKRDKKGKRVGPKQRKANVTYSKWSFAELQSMIAYKALLAGSVPIKVDANYTSKACPCCGHTSEANRANNGLLFICQKCHYTLHADLVGARNVTMRTLLIRQDWVSTGTLSECPDVADKEAKAARLSRFAELRWSLATSSSSHDGD

SEQ ID NO: 29671 - protein, 410 aa, Parageobacillus sp.
MHKAFKFRIYPTKEQEILINKTFGCCRFVFNHFLEKWNEAYEQTGKGLTYHTCANQLTQLKKEWEWLNEADSTVLQNALKHLDDSFQRFFKKQNDSPRFKSKKNPVQSYTSQCNYPKKGKPTVEVVGNQIKLPKLGWVTFAKSREVEGKILSATIRRNPTGKYFVSIVCETEIEPLPTSKKAVGVDLGLKDFAILSTGKKINTPKYFRKYEKKLVRWQRILSRRQKGGSNWNKARLKVARIHEKIVNARRDFLHKLSTKLIDENQVICLEDLQVKNMVKNHNLAKSIADASWSEFVIMLEYKAKWYGRTIVKVGKQFPSSQRCSDCGYQNKEVKSLKLRVWTCPNCGAQGRKRSYKHLTRRDKTIHRWAGGWSLVHFSSVEGITQESPAFRHGEWSNYMYHIGIEEGLLF

SEQ ID NO: 29672 - protein, 419 aa, Holophagaceae sp.
MRDNQAMQLLKGHRFRLDLAESQAEFCSRTAGICRFLRNLALEQRSMAWKHGKHSVGYNAQAGELADLKVLAPWVAEAPHHCLQQVLRDLQVAFQNFFAGRAAYPAFQKKFAHDSFRFPDPKQFQVDEVRQRIKLPKLGWVPYRNGKGRHALKLQGTIKSITVSREGKHWFISILCEAEVAEPVPVLGPAVGVDLGVAQTITLSSGQGPIQIPGMTKAESCRLARIQRAFDRKRKGSINRAKARTRLAEFQARIARRRRDAVHKATTMLAKSHSLVVIEDLRIKSMTKAPEPKPDPDKEGSFLPNGAAAKAGLNKAILDKGWGEIRRQLEYKCRWYGSKLVAVPPAYTSQRCSAPGCGHTEEGNRTSQAEFRCLKCGHAENADLNAAKNILSKGTTDGPSVSACGARALAGRRSRKVAA

SEQ ID NO: 29673 - protein, 280 aa, unknown
  TnpB Polypeptide
MPKFYQDNVKIRFSNTHVKFEGFSSSRKANKQKMNWVRLAEHGRIPTNAKYMNPRISFDGLNWWISVCVEFPDCRETLNDDGVGIDLGIKYLAVCSDGTKYKNINKSQKVKKSEKQKRRLQRSISRSYEKNKKGESYCKTNNVIKKEKLLLKRNHRLTNIRKNYLNQTISEIVNRKPRFICIEDLNVSGMMKNRHLSKAVQAQGFFWFRKQLEYRCSDKGIQLIVADRFYPSSKLCSCCGNIKKDLKLSDRVYRCACGNMIDRDFQASINLKTYGEQFAS

SEQ ID NO: 29674 - protein, 204 aa, unknown
  TnpB Polypeptide
LLSCGWQGSHFKRLSNRALRLVNRRKKAYRSLSEERKKLQGQLINQLVSNASVIKMEELNVKGLQKRAKDLRINPKTNRPFSKKRFGKPIFRAAPSAFREALKTRAVQLGIEIIMVSPKNVKPSQYNHILQTFEKKHLSTRIFDLSPEWTGLQRDLYSAFLIGHIENNQYQQTELEQDFPTFYQQMRDFLQQTPQTSRLAWYFS

SEQ ID NO: 29675 - protein, 380 aa, unknown
  TnpB Polypeptide
MKTVLKIKLEPTKEQQEMLRQTMSQYNAACNYIAEVAYEKKISSKFKLQKLVYNTVKKDFNLSAQMTVRAIAKVCEAYSRDKKILPKFRLDGAIVYDDRIMSFLADEKVSLWTINGRQKIQMIFGDYQRDNFQYRKGQADLVLVGNTFYLFATLDIKELPKTTPQEFIGVDLGIVKLLVDSLGYEASGEIIERVRLKYLKLRRDLQKCRSKNAKRKLKKIARKEKEFRRQINHIISKALVKRAKDTNSAIALEELKHIRSRTTVRAKDRARISGWAFAQLQSFILYKARIAGVVVIFVDARNSSRECNVCHFVAKRNRPNQSTFSCAKCGRSDNADHNAAKNIADRGKILWASVNMPIAVHVDPTIAASLELQARLFKAE

SEQ ID NO: 29676 - protein, 401 aa, Burkholderia sp.
MQRFQAFKYELIPTGEQQRQMRCYAGACRFVFNKSLALQQERYERGEKKLDYAGLCKLITEWRNSSQTPWLKDAPTHPLQQTLKDLERAYANFFAKRAAPPRFKKKGQSDSFRYPDPKQIKLEQSNSRIFLPKLGWLRYRNSRDVLGVVKQVTVSASSGKWHVSIQTERTVERPVPNGGTVGIDLGIVRFATLSDGTCYAPLNSFRRHEAALRRAQQAMSRKLKFSNNWKKAKTRIQRIHARIGNARRDYLHKATTTISQNHAIVCIEELQIRNMSKSAAGSIVQPGKNVRAKSGLNKSILDQGWFEFRRQLDYKLAWNGGHLVAVPPQNTSRTCPRCRHMSADNRRTQARFECVNCGFKENADLVGAINVLRAGHARCACEVSDAAKSPAAGTHRSELSA

SEQ ID NO: 29677 - protein, 491 aa, Ruminiclostridium sp.
LGLRTIHLKLHKPGKLKREIIQKAFENYSNAFNYLLRTAFDNIDEIESNYKSPKGTYSTLSLSKWIDSKISNELNKFDVQPFKDSLKLDFGMTLASYFVQKQTKHDMVFPNFKQDNAQVQEKLRPIYFCRYDTKRSFCLLYDPDSNTYFAKLFLMNIKNAKVRKISANKRELVYISKNPEPAKSLKRETFIIVPLSFGKWQENMLRQAIDRPEILRTARLLSKNNEYFLSMSINLPEEQEIQTTTFMGVSRGIRNDINYTIVDEKGNSVKKGSLENCRNTNDRKQIICKMANTIADIAFKNKSMVILQNLVGKGDKLSWREEGTVHKPAYGCKMYNDLVRVLEYKLPQKGLPVPAKVSSVDIFHTCCVCGSNTRKNRFSETMFICTTCGASYSMDELGSRNLAVKLIKYEKTTFKLKARKTTEGMYLNNELIGLDMFVHKNENPYERLKEEVKRLLEKKEDNYINSKLNFKDIKSILDKLVKSDFSNIEII

SEQ ID NO: 29678 - protein, 346 aa, unknown
  TnpB Polypeptide
VQQIAEDKGFTVHLFECGKGDHVHCFVSAPPKLSITAIVRYLKGIRHEKGSDRLWLSLSEGLKKYMEETYGIHEQFLYLENKIFRNMDQIKQLRICPPENGTCDLIVIYEMEEPEQLSLNGHYLSVDPGLHNLVTCYDSGNGRTFILGRKYLSLERYFHKEIARVQSVWYAQQSEKGIKYPGSSKHIRKLYRKKQNAVKDYLHKVTRWLAEYCKKEEISCVVIGDIRNIRREKDMGNKTNQKFHRLPYNKLYIMLEYKLKLYGIQLVRQEESYTSQCSPFTPEVSKLYAEASNRKERGVYITDGVRFHADAVGAFNILRKYLSVSGTPKELFVTGLKNPEIIKVAA

SEQ ID NO: 29679 - protein, 398 aa, unknown
  TnpB Polypeptide
VSNISGHRSTSVSDLDQTPTVQTLLKSWHGYVMATEHADKQARQQYSFLATIPAMILQAPEKKENEEWFAAAKRKKRSHGKMPRFKSRKVEDQKFVCWHNKGSNAVFRKTGKKTGIVVISGQNPQGKRTRGTRWKIQIRVRITQKIREYTSILVNWTRKTIVFTNQPKRIPGVQHTSKATGFDRGGVAPLATSEGELLTPNKKVLRKYETKKKYYQKQMGKARSRAEKQGGASAVKSVMKGSNYQRNKKKARAYSRKCASYRKSWIQEITTHIIRNNGVIVMEDLSVHSMTRKGGERKKGMNRSFLEASPTMIAQRLEYKAIINGRRVVYIPAHYTSQRCSKCGYTNTLAYDLHGHKNGSGEVIRPTAPQGVFKDFYVFEQGNFSDAVDPVNAISVTS

SEQ ID NO: 29680 - protein, 417 aa, unknown
  TnpB Polypeptide
VGVVRNIQIKLDVPEDAHTVLDETFEQFRYAAQYVSDYGWAGDPTEIVTNQGDLNSATYDDVRSNTDLHSNHVQSARSLAAEALDNCQGRIFDGKKASKPTFRGTVVVYGTRTITYNDDHCTLAAVDGRVRAEYVTPEDDEGTPSEEYWDSDEWERKEATLHKRDDDYYLHVAVEKDPDTDASTVENGAVLGVDLNVDGYLAVTSTGAFLGNADYLNHKRNEYERRRGSLQQTGTRSAHLTIQSIGDTFARWSDDYLHRVSKAIVQEARRNDCSAIAFEDLENIRERISNASKFQQWAFRTIQEYTEYKAEEYGILVADVAPKYTSQRCSHGECGFTHEDNRAGDKFECLNCGTELHADYNAARNIGWRLVQHWLTSGAGRANCQVALKSGMLNANGEYSPAESIGQSGSPLASPPL

SEQ ID NO: 29681 - protein, 499 aa, unknown
  TnpB Polypeptide
MNQNKNTINTNTTNNENEKILKRVSTYHINQVHPLFTYCDDMTFKSKNLKNLANYHVRRCFIFHNRENIPTEVQDYFNEMNQYIDQFNKITNQSFRSKKLNKLIELRKKRNELKYSSKQKELDDIKKDIQKELNKKYIPQPNISKDSGLLFYDFLNYYFRYCLNTEDNPYKLLPAQAAQQVLRNVNKDWKGFCKSIKEYSISPSKFTGKPDLPKYKKKNGRCKISFTNQQCKIIDGFVTLPFTKLKLKVGFDCSDLKLKEVRVIPMGVNYKIELIWDIKIFVKNDDLNKNAYLGIDLGVSNLATLTNNIGLNPIIINGRPLKSINQYYNKKRAELQSNLPFIRKNDGSFEQLHLSKTLSELTQKRNNKIENAMHTVSKYIINYCKTNKIKTIVIGLNNNWKDQINLGTKTNQNFVEIPFKTLINQITYKSEEVGITVIVREESYTSKASFVDLDDIPTYQKNKKINCNFSGIRKYRGLYVSKNRKYINADVNGSYNILR

SEQ ID NO: 29682 - protein, 445 aa, unknown
  TnpB Polypeptide
MDYSPRFRLLPTRDQRERLGWQRNTVRQVYNHALYRLDQLPENDDQTVRQRVWKVRDELPDWKQKWDEWNTVYSTVLQAAVERIYHSIKGLAQLRNNGHKIGELNWKKPREFQSFTYRQRGFELDKKSGPNGRGHLILKKVRGETLEIPIRLHRDIPDEDIIKHVTVKQEATGAWYASFSVEHDEPEKPAVEDIDPDDTVGIDLGVLNFIHDSDGRSIDRLDLSDERERLKREQRSLSRKQYESNNWHKQRQRVAEIHMDMRNKKRDYKHKLAHAYTTEYDAVSVEDLDVKSMLESDENAQNKAEVGWRDFIRILKHHGRKHGCHVVEVEPEGTTKECASCGVESEKPLWVREHSCPACGFTLDRDFNASLNVLSRGLAKLGVGHSEATSPEREAFWCANESQSDSLTPVETATTVDTTRVSASRVIESGSPALKEPATRASRAG

SEQ ID NO: 29683 - protein, 489 aa, Shigella sp.
  misc_feature (340)..(394): Xaa can be any naturally occurring amino acid
VKRLQAFKFQLRPGGQQEREMRRFAGACRFVFNRALALQNENHEAGNKYIPYGKMASWLVEWKNATETQWLKDSPSQPLQQSLKDLERAYKNFFQKRAAFPRFKKRGQNAAFRYPQDVKLDQENSRIFLPKLGWMRYRNSRQVTGVVKNVTVSQSCGTWYISIQTESEVSTPVHPSASMIGLDAGVAKLATLSDGTVFEPVNSFQKNQKTLARLQRQLSRKVKFSNNWQKQKRKIQRLHSCIANIRRDYLHKVTTTVSKNHAMIVIEDLKVSNMSKSAAGTVSQPGRNVRAKSGLNRSILDQGWYEMRRQLEYKQLWSGGQVLAVPPAYTSQRCACCGHXXXXXXXXXXXXXXXXXXXXXXXXXXXXXXXXXXXXXXXXXXXXXXXXXXXXXXXNDSGDSLNVAGNHVFQGVEDVNYPQSSPCGELENPASRSSVNIGVCRTGRSFTSVSVKRSLGSRRSAVVSAWKISGASNSSFSCQTSIFLPPCAR

SEQ ID NO: 29684 - protein, 367 aa, unknown
  TnpB Polypeptide
VEKAFKYRIYPNKRQQELIQKTFGCVRFVYNYFLDLKISKYKDGQKPLSYNDMSKLLTQLKQENDWLKEPDKDSLQKSLKNLDMAYQKFFKEHAGYPKFKFKKDRYKSYRTSCTNNNIRLEHRHIKLPKIGLIKIRDKQVPQGRILNATISQEPNGHYYCSLCCTDVEMPQYQKTNANVGIDLGIADFAIFSDGNKIENPKFHEKSEKKLAQLQRGLSRKTIGGANWNKARIKVAKLQKHISNQRNDFLQKLTTNIIRTYDAICIEDLDVKSLKETNNSNRNKRVGDVSWSEFRRQLTYKSNWYGKVVSIVDRYFPSSQICHVCGQRDGKKSEDIRNWICPHCDTELDRDINAAINILNEGLRLLYV

SEQ ID NO: 29685 - protein, 386 aa, Bifidobacterium sp.
LKKIDGWEWIMVVQTLTYGIRLHPSPAESDLLDRTCTAYLSCCDHVSRVAKSNRTLSQRKLNDLAYRHLRETYHVGSQMAQSAIIRVIGNYRTVKESLGDPWKTKRPLQYTSSGYDLVWNRDYSILSDGRLSVNTLKGRVKLQVDWKGMPEQYRHGRFGTARLLKKRGKWMLLIPSTVELTDPQRPQNVMGVDLGMRFLATSYDSSHKTTFHSGKEVTHKRAHYKALRTGLQKRGTRSARRRLKSIGNRENRWMRDVNHQVSKALVDECEQPTLIVLEDLKGIREATERVGKSRRYVQVSWAFFQLRQMIEYKALKAGHSIMLVDPAYTSQACPRCGLVRKANRKHRAHEYVCAGCGYRSNDDRVAAMNIRRLGYAALVESQTGTS

SEQ ID NO: 29686 - protein, 338 aa, unknown
  TnpB Polypeptide
MQKAFKVTLIPNRAQAVLINKTIGCARFVYNRFLTMRKELYSTEKKTLNYGGCSQVLTQLKKELEWLREVDKFALQNSLKNLETAYKNFFADLKKPKAKRRFGFPKFKKKQGFKQSYKTNLTNGNIQILKNYLKLPKLGWVRFHESQEITGNIINVTVTGTVTGKYIASILCETEISVHPHATENVGLDLGIKSYLVTSTNEVVDNPKHYRTQQRKLRKASKNLSRCQKDSSNRVKAKIKLLAFTNGLFIKEKTFCTNSLLVWFEKMLSFVSRTWLLVIWSRTTNSLKALWMLVGLCLLPCSNTKLDGTIELFRKLVDSIPHLKSVAAVGILILKSRI

SEQ ID NO: 29687 - protein, 522 aa, unknown
  TnpB Polypeptide
MFVSLQFKLELKREDKEKLIQLMRKQSSAIRVAYNMLKELEKEKTKNPHAQIYHRLRQLFPDLPTKYIDSAISKAKQYPTDKPVVFGGRRLFEKLCKNHLTGKAREGLKKQWRELRQGTLVSIGSKADKGNRLTRFEDLNGQLHLRITIGNKEFMDAKVLREPSNSKDKWITFIAMLLEGWQTHSYFPYTVGLKLRDGEVYGSVSFELPTPKVKYTKENGVIAVDTNASPIHLAIAEMSKTGELLSYQTINLHHLLGLSQNSKDHQEWILAHQLLDLAIEKGKAIAVENLRKLKRGMRGDGKATLRKRLHHWNAKKFLQKLKRVAMLKGVEVVEVNPAYTSVIGMLKYAPQLSIDKDIAGAYVIGRRALGFKEDMPENYEKLLKDKTYLEFALKRYEKREKELRELLEEETNQYKRNALESELRNVENARKLLANLIQSLQSESSSCEGANGRNPEQGRVAKTTLQIAWQVLKVALLFPILGKVLPRDLSPLKPVLVEGAWDRVRSRLVPLEAGGTVPIRDF

SEQ ID NO: 29688 - protein, 278 aa, Peptoclostridium sp.
MCSIRQHRIFDGLIKSCTISRTPSGKYFVSVLVETETEKLQQTDVKVGIDVGLKEFAVLSDGTAYKNPKHLRKSEKRLAKLQRELSRKQKGSSNRNKARLKVAKLHEKIANQRNDFLHKTSTKIISENQAIVIEDLKVKNLMQNHKLAKAIFEVSWSMFRAMLDSARLRKLVADTYQIDPKSVTGYMLGEYGSTAFLVLSHVNVSGIPFIELNKYFEATADIKDSEVVKTSIVGAAYKVLNGKGWNNAGVSQAAITMAKAVLLDEKSVYPVCATLRCQ

SEQ ID NO: 29689 - protein, 380 aa, Fusobacterium sp.
  misc_feature (345)..(378): Xaa can be any naturally occurring amino acid
MANYVLTLALKTELWHKHILEKRLNIARMIYNACLCEILKRHRKMLNSLEYKEINNLDKKEQSKRYKELDKKYFISKFELNKYMKHMTQKFKKNIGSQMGQELAERAFATYEKLKYGKAKKVYFKSYGDFYSVREKGNITGLRFFKEDCCISWLGLKIPVIINKNDKYSQSCFLDKLLYCRLIKRVVNGKNKYYVQITFEGTPPKKHKIGEENEIGIDIGTSTIAIVSDKEVKLQILAENIGINEKEKTRLQRKLDRQRRANNPNKYNTDGTIKSNNKEKWKTSNSYLKTQLKLSDMQRKIAEKRKQSHTILANSILEIGTIVKVENMSFMGLQKRSKKNEYLKXXXXXXXXXXXXXXXXXXXXXXXXXXXXXXXXXXNI

SEQ ID NO: 29690 - protein, 146 aa, Paraburkholderia sp.
MILGHRIALDPNNAQATYLARAAGTARFAYNWALAEWKHQYEAHKADQTQPKPSQMALRRQLNAVKREQFPWMLDVTKCAPQLAIIQLGEAFKRFFSGQNRYPTPRKKGVDDRFSVSNDQFSVDGSRIRIPNLGWMRMREPLRFKG

SEQ ID NO: 29691 - protein, 340 aa, unknown
  TnpB Polypeptide
MTGKSFSVWLNNEYIPNNSDKVWIKETYSKAVKKSIEDGCSAFTRFFKHKSAFPKFKKKGKSDVKMYFVKNNPKDCRCERHRINIPTLGWVRIKEKGYIPTTKDGYVIKSGTVSKKTDRYYVSVLVEVSDDTDIVNNNNNNDGIGIDLGLKDLAIVSNGETYKNINKSARVKKLEKKLRREQRCLSRKYENLKKGESTQRASIQKQKLKVQKLHHRLDNIRTDYINKAIAEIVKTKPSYITIEDLNVSGMMKNRHLSKAIASQKFYEFRTKLKAKCDDNGIELRIVDKWYPSSKICHCCGAIKKDLKLSDRIYRCDCGYIEDRDFNASLNLRDALTYEVA

SEQ ID NO: 29692 - protein, 272 aa, unknown
  TnpB Polypeptide
MPIRRMDGNRYPLTKKLGSVRIRKRDRLRYPIENLSSWTVKRENRTYYLVLLFNVDIQPKMRAEGRIGIDLGVKNLLTLSTGEKIDYPNRLRRLEEDVRWEQRKLSRRTKVEQPPQAEGDRSQGVRQAPPLPRQLPAPTVPQADRREPIHRHGDLMVRNMTRKARKRLDADGKPMRNGQSRKRAMNVPYSATGGAPRGQALLQGGMVRARVRPSGQVLPSSKLCHDCGHKYKGLRLSEREWTCENCHSRHDRDVNAALNIRDEAIRIGQENQ

SEQ ID NO: 29693 - protein, 244 aa, unknown
  TnpB Polypeptide
MILSSFFMRCAVKPTALAGGYKALFLLPFYLIFVKNVCYIGNMSTKTVKRAYRFRFYPTTEQENMLRRTLGCCRKVYNMALDARSTAWTLHREKVGYADTSRMLTAWKKTEEHSYLKEVSSVPLQQSLRHLQAAFKRFFDKTGSYPRFKAKHEGGSATYTVSAFTWDWERRALTLAKMHDPLPVRWSRTLPRKSRPSSVTVSLDAAGRWHVSILVEDEIRTAHQEREHGRHRHGIGTLRHPQQW

SEQ ID NO: 29694 - protein, 376 aa, unknown
  TnpB Polypeptide
MEQAYKYRIYPTKAQERQILKTFGCTRWVYNHFLTSRKTAWAERGESSTAYTDMYGIPKLKRTAGTEWLAEADKFALQNAVRDLDKAFQNFFRGCRTGKHVGYPKYKSRKRSRSSYRTNLTKGNIEVSDNCVKLPKLGHVKASVHRKPEGRILSATVSRDPSGEYYVSVCCTEVEFEKYPTTGKSVGIDLGITSLATLSDGTVIENPKRLKQMSKKLARAQRAFARKQKGSKNRNKARMQTARIYRDVANARRDAAHQATAKLVRDNGVIAAETLSVTNMQKNHRLAGAIADAAWGEFLRQLRYKSERHGRLFVQVPRNFASSQTCSVCGTKNPAVKDLKVREWNCPACGTHHDRDINAAVNILNEALRQEELKAG

SEQ ID NO: 29695 - protein, 430 aa, unknown
  TnpB Polypeptide
LTLYAKPCILNIYQSFKRLAEREVNKILITRTEQHQINKSHLMFKVIDEFCFRSKNLYNVANYIIRQEFIKNHNYIKYREMDKMLQQTKEYKLLMSQSSQCLLQVLDRNWKSFFVTIKDWTMHPEKYLGKPRIPKYKNKDGRYAWFLKNNQTFIKDGYLNFRLRIFNGYKFKTNCNGRLISVRFVPKGNIYIMEIVYETEISENIPEVNNICSIDLGINNFVTMVNNIGLQPIIINGKGVKSINQHYNKRKAKIQSELKLRNNKYWSKRLNIITLNRNNKVKNYIHHVSHYIVDYCKQHSIDTLVVGLNKTWKQECKLSDKVTQNFTFIPYDMLIKQLEYKCQDIAIRLIMTEENYTSGTSFLDNELPIKESYDKSRRIQRGLFKSNNGQLINSDVNGAFQIMKKVFPNAFVDGIKGCLTPVIINVVKTA

SEQ ID NO: 29696 - protein, 459 aa, Crenothrix sp.
MSTMKPYTVTQIADAAKNDIVEIQKARELAYRLGDLRGDLWNKFGGVQAWGEKPDGLIRDFKLTNPPESYSLDFKNWDKTASQVLDDIQMTHAAIREQVIRKIYARYPEKAERSALCKALKTLAYQENNVLHRWVRDASGRGHTQVDNHIVLCHNNGAKFNRKNRITEVVFNGLPMEGKNNRYEKITLKFKTGKVNLAGYATIIFHEDGVIRLHYPIKKPATVNASHEIIGVDKGYTEALYGSDKVVYGAGIGKLISQQSDWLKAKMQNRHKLHALYKKTGNEAIRKNNLGRKALDKRTNATQAQLKSIIRRDVRVIFSQFGTVVCEDLSGKFNGKSRGKNTNRKLSAWCKGEIHQALTEIADRTGSTIKIVNPAYTSQVDHLTGTLLGTRKGDCFIRYTGDVVQADYNAAMNILARDNDKDINRVTPYQKVKQILLKRTACFMETMKLGGGVPIEGLA

SEQ ID NO: 29697 - protein, 563 aa, Acidimicrobiaceae sp.
VTSKLSPVPVGGTPRSNPAKLCPASHCRYRSPPSDSDRVSHEAKPAWGFLSLSEVRPSPSSEGVCVRTTDASHLATTVHHVDQAYRMRAVLVPLDPTPAQEQLLRSYCGASRFAYNWTVAIAKANLDKRVEERLAGIDEARLTKSLNWSAWSMTPLWNSVKNEVAPWHRDVTKHAFCSGVTNASTALKNFNESQRGSRKGRTVGFPKFKNRRSKQSFTLIDFTRIGSWFSEDSRHVRLILPHFATDPRITRRREQLQWMHTTESLCRLKKKVMYGEWTVQAVTISFTGGRWRASFSVRQFVIPAPSAIRQRGPLVGVDLGVKHLATLSVPVKDVSDEHGHVENPRHLECDLARLAKLDHQLSRCVKGSKNNAMFRLRRQRLYGRVTRTRNLYLNRLTTTLAGSFDTVVLEDLSVADMVKRPKENITKALRRSILDAGWGELRRQLTYKTDDRGHRVVVVNQFYPSSKKCSHCGETKAKFDRSERVFECSNCGITLDRDVNAARNIRDEGIRLLTNEAPTVAGHQPETLNADSRDRKTKPPRRGRGDRYQSRTTQPARDLSPLA

SEQ ID NO: 29698 - protein, 452 aa, Lachnospiraceae sp.
MGKRKNANKWKSKMFSKFQDMVLIKGEDRTDGIYRIEKRKDDFYGCLVAFFVDDYDACDVEYYTLDEIKILQHPVSERIEDKRIYMGNLMLSKVSQLLYFGNNVRIIYENGDYQTVDAKLLKKGQKETKQQKWRERDKKEYTSNIDKGNIIDKSSYNSYSYPLKPDKMQREKLDLKIKDSNKKDRFGNPVYAYEPEELVEEIIKYKGKTKFVEIVEVGNVKMDSSEFPTGNCHEIRVKKKGEDYKVEFDCYKKVVGIDLGKRAVICSTGEKFTLPYIKLNETANFWDIKEQWKESVAMQLLLKYDILFLEYLENNNDTDSGFADMKNFPDILKEKAKLFNESDSVNGSYSGQKNEKEIYTLREKFASTQICHICGYKNQELGNNIYIRNWRCPYCGTKHDRDINAAINILRRGMEEKISKNKIDLDVEEKVSDKTIEIDWEKYDLSRVRFDI

SEQ ID NO: 29699 - protein, 388 aa, Puia sp.
MLKAYKYRLYPTKEQAAQIDRSIGVCRLVFNLALEVKTWAHRNGTTLSAFDLCYQLVDLRDTFEWIREVNSQALQAAVKKVDVAFKNFFHGGGFPRFKRKRNGGSFQCPANTRKIDWEKATLTIPKIKDIPIVLSRRFEGKIKTVTISKTATGKYFAAVLVELLQEEIMPAKTEQAIGIDLGLAHFAVLSNGEKIDNPRSLTKMLARIKVLQRRASRKKKGSQNSRKANRRVAVLHEKIANQRNDFLHKVSTRLIGDNQTDTICVESLRVRNMVKNHRLSRAIVDVGWSKFIAMLEYKGRWYGKKVIRIDQWFPSSKTCSYCGHILTELDLSVREWTCASCQATHDRDVNAARNILAKGIESGVGSPAEPVEPRRMRRTRKQESIPQG

SEQ ID NO: 29700 - protein, 474 aa, unknown
  TnpB Polypeptide
MPRKRAPGSARVVYRTARCGLRVTGGQRRRLFGLLWSAGDVWCCVLELNAWRRCRQDAPLAGYQELCRELAASGPGTFGELDTTGARSVLRRYSDAWFAAAKRRKQGDKAARFPRRRRALVPVRWYAGTFALEGQVVRLPVARGCPPLVVRLDRDLPYPPEQIRCITLLCEAARLYMDVTAEVPVTIYPEEEEPDRRRIAGVDLGVIHPYAAAGPDGQMLLVSGRAIRAECRQHLRDCAARAAAMARRAPKPGQRGSRRWRAYRRRHRAVQARHRRRVRQAQHEAAKTVIGWAIRQKIGALAVGDPRGVLGLDAGRRHNQRVRAWRVGHLIAALRDKAEAAGIAVTLIDERGTSSTCPWCARRVPKPAGRVFACLHCGQSGHRDLIAAANIAARAGGGTIPVVAMAGITHRRAGAHLPGVSPARRDPRRRHTSRPAPRSPGRHRPAPPGTRRARSRSPRGEEPGMHRCIYGQVH

SEQ ID NO: 29701 - protein, 402 aa, Escherichia sp.
VERLQAFKFQLRPGGQQEREMRRFAGACRFVFNRALARQNENHEAGNKYIPYGKMASWLVEWKNATETQWLKDSPSQPLQQSLKDLERAYKNFFQNRAAFPRFKKWGQNDAFRYPQGVKLDQENSRIFLPKLGWMRYRNSRQVTGVVKNVTVSQSCGKWYISIQTESEVSTPVHPSASMVGLDAGVAKLATLSDGTVFEPVNSFQKNQKTLARLQRQLSRRVKFSNNWQKQKRKIQRLHSRIANIRRDYLHKVTTTVSKNHAMIVIEDLKVSNMSKSAAGTVSQPGRNVRAKSGLNRSILDQGWYEMRRQLEYKQLWRGGQVLAVPPAYTSQRCACCGHTAKENRLSQSKFRCQVCGYTANADVNGARNILAAGHAVLACGEMVQSGRSLKQEPTEMIQATA

SEQ ID NO: 29702 - protein, 575 aa, unknown
  TnpB Polypeptide
MSSTHLSLPLCLPDEEQERYTRLAELTTQTANTLIEQYWTPDHLTEIDESSYQAWKYFDEHESFAEFDIYLPSRYKRCLLQKVGETLRSHADKRDAFQTIQPLLPDHKIRRIHTRRIKNRLWESDEYLSSGYVDLLIDQLNAYYDVHGEYPDTYFDFQECPEYSSGVLPYSADDGPTSGQAVKYQYDESTQELTVELKTPDMLEPETYGDWTWTEYTIDGYESFHELVDHGDLSAPSFQPNTSKRGDEYHELSFPVEVEHTDTPDDVDTVLAIDGGLRKDATAVVVDKDGEQLSTPYFIQNTEREKMRNLNRERNQLNSKLADLRRQGRDHTDEFKHVQSEYERVNNKIRHKREQLVHDVSNQILALALVYDVDAIVHEDLRSLSPPRGEGQLSWELSSWARREIVENIEYRADISGIRVERVYAGNTSRSCPRCGSAGHTTKSPDHYHEVWHGGHFRCDNSRCGFQGDRDYVAALNVARVFFAESATLDSGFTSSYIGDCEIELASRSAGSRPTFGTSLIAYVGRSRVTAGGGSAYIAPAVTPIGAKNNSSKSSVSSPATHSYSRFLRDTAVCC

SEQ ID NO: 29703 - protein, 163 aa, Moraxella sp.
MVSIVAPLVVSKQKQSKNHQKQKLAVARIHEKVRNGHLDLHHKITHSLICENQATSYAIEDLAVKNMVKNRKLTKVINDVGWGQFVTLLTYKANWYGKNILKVNRFFASSKICSHCHHKLDNLPLSVRNWTCPSCQTQHDRDINASNNIRKQALADALGLSAV

SEQ ID NO: 29704 - protein, 417 aa, unknown
  TnpB Polypeptide
MAIGVTRTYVGSIQNHQQVCDGLDSLGDSASKIWNVARWTADRIWDQTGKIPDEGTLKAYMKNQSCWKDLNAQSSQKVIEELSDAFQSWFDLRYNDDGTANPPGYRKQGDTRPRSTVTFKTDGFEHDPENDRVRLSKGSNLKEHFSDFLLCEYQTRPDVDLSEVNTVQNVRAVWNGEEWELHFVCKLELETNESAGDEVAGIDLGITNVATVAFPDEYVLYPGNSLKQDKHYFTRAEYDTEGENGPSKQSMWARRKLANRETHFYHVLTDAIITECVERGVETLAVSWPEDVRESDWGEPGNKKLHSWAFDRITQYLAYKGEMRGVEVLKKNEWNTSKTCSNCGDTTKSNRVERGLYVCSSCELVGNADCNGAENMRQKITPSPHGEDRSNGCVAQPSTYLFDRESGTFTTREQTVS

SEQ ID NO: 29705 - protein, 411 aa, unknown
  TnpB Polypeptide
MQVKRIERHIINRQNKWYKLLENKCYIAKNIYNHANYLIRQTFVKTNKYLTYEEVEKLLHDDVEYPDYWNLGLANSSQQILRVLDKNWKSFFKSIKDWKLHPEKYLGRPKLPKYKKKNGLKEFALTYNQFRLKNDNLIHFPKTLNGFTIKPNFINNPYDTIQQVRFIPQNDRIVVEIVYLKTIADISIKSDNYIGIDLGVDNFATIVSNNGIAQIINGKGLKSINRYYNKLIAENKSKLDLDKSETEYSHKLNSITNKRNDKVDYFMHNASSYVVNLALANNISTIVIGKNEGWKNECNIGKVNNQKFVQIPYNSFIAKLEYKCQEVGITLITIDESYTSGTSFLDNELPIRDFYNKKRRIKRGLFKSNQGKYINADINSACQILRKVFVNAFNKPDNIGFVMNPVKVNVI

SEQ ID NO: 29706 - protein, 428 aa, unknown
  TnpB Polypeptide
VLDILYYPILFFYFKLKVVSEVLVRRVEKHIIKENNEYFDMLIEFCYKSKNLYNHANYIIRQEFIFNHKWIRYDELNTLLKVDTEYPDYKEMPTAQSAQQTLKLADRNWKSYFKSIKDWKKNPEKYLGMPKIPNYIKNDRYILVLTNQNCRLKNNNIYFPKVFNGFTIKPIFNNRSDYHSFQQVRIIPHKHRIVIELVYNIKINTKEITDYDKYISIDIGINNLATVANNISLPAFIINGKPIKSINQFYNKQIAHYKSICDVVNNIKYSNRMYRITDKRDSKITDYLHKASRYIINWCLSNNIDAIIIGQNKGWKQEVNLKSQTNQNFTQIPFAKFIQLIQYKAEEKGIAVILTEESYTSGTSFIDNEEPVKEFYNKSRRKYRGMFKSNKGILINADLNGAYQIMKKVVPIKWNRGCALQPFVVNIA

SEQ ID NO: 29707 - protein, 396 aa, unknown
  TnpB Polypeptide
MLARTFGCVRMVWNRTLAARQARWQTERTGTSYAETDRALTAMKKDPALAFLSEVPSVPLQQVLRHQHRAFTAFFAQRARYPRFKSRRSRQSAHYTRSAFTMRGGQLRLARMSTPLRYVWSWPEVDVTALDPAMVIISREPDGRWYVTFTVDVAPHPLTETGHAVGVDLGVTDFAVTSAWEKISNPRHLEGRARALARYQRRLARCQNGSANRRKAAAKVARAHCKVRHARRDFLHRASTRLVRQHDVIVIEDLNVSGMVRNRHLARAISDCGWGEFRRQLAYKCQRYGRRLVVIDRWYPSSRTCSECGNRLAELSLSTRYWTCPSCGARHDRDINAAKNILAAGRAVARGFPGDACGAGVRHSGSSRVRLAVKQEPRPVTAGIPSFRVGSSQGLT

SEQ ID NO: 29708 - protein, 520 aa, Thermus sp.
MPEAKAPKLFLGVHARLVFLNEGDKAAVLDLMRRFSSAMRFAYQRLLQGEDRKELKREDGPLCALFGLNTRYADGAIEKAQAALDAARELGQDPRKVVFGGREVFEQLKRKHLSGKALLALKREWRAKRRGLLYSRGDKSKRGNANLRLEAQGGALWLRVNLGKGGHVHALVKTSHPHLKTLLQRVYASLPYNVTLRLRDGQVHAHFTWSEELPKPVHTRANGALGIDVNSDPYHLALAVVSPDGNLVRYLTLSLEEVDRAPNKGAKEIALWKIAHRVVALAEEHGVAIATERLKHLRKSRRGDGSGKRFRQKQHRFAYRSLLEKVHSLARRRGVEVLEVDPRDTSTIGMLKYAPQRSLSKDVAAAYVIGRRALGFEERLPKGYQVLLKDEGFLKEAQGFYEGRIAQLRRKRHGEKNPYLRRRWSRELKRAQSALALLSSPWGSPGSRKGSTEGRNPSGANPWRVLRVGLCLPLLGLEVPRDLSPLKPVLNLAQGSWEGWKVGPGPHPGGGPGCTNVHFC

SEQ ID NO: 29709 - protein, 505 aa, unknown
  TnpB Polypeptide
MQVRWNYKLQPNKEQQALMSEWLVTLRKHRNYCLAERLRGFETNNQDSDQPVMYGYAAYSDIESRIEYGSFCPLTCPVVKHGVMSAGLTKISKKHGLVWGNATDVQGKKRTELRSENPYYARISSDVLQGNLTKLDTAYSGFFKHKKGFPAFRKASNFKSFQYFPGRAKFAINHHSGTDRNGNRKGCYSHIYLPGIGSMRYIDSRAIPENADIRTVVVMQEADGWYISVLLDLDEQLPDIPDIETVKSAVGIDMGINKLISLSDGSFIENPKFSTNKKTRRQLRIRQRRVNRKVKGSKNRSKAGLQVAKLHKKIRDKRSDNQWKAAHKVVKTAAAVIREDLNISGMKARCKTKRVNGRAMPNGQSAKRGLNRAISDASWGELFSKIAWVALKSGKPVLAVNPKHTSQECSNCGHISKDNRDGEKFICSSCGHIDHADTQASRTILSRAKLTFVSKDTKILPADCGKVTPVRNDPASNGKRDQGRNRTSKVIPEKRIFFEQLSLFN

SEQ ID NO: 29710 - protein, 384 aa, unknown
  TnpB Polypeptide
MLIPNNKQNTKLFQSSGTARFIYNWTLARQQENYKNGGKFISNNDLRKELTQLKKTDEFKWLNLISNNVAKQAVKDACIAYDKFFKKLAEFPKFKSKKKSPPKFYQDNCCIQFTQTHVKFEGFSESKKQNKQKLNWVRLAEVNRIPFGDNVKYINPRVSYDGLHWWISVGTEVEDIITTPANEPIGIDLGIKDLAICSDIDVPYKNINKSKKIRKLEKKKRRLQRQVSRKYENNKDGVKFVKTKNIIKLEKTIKSVQHKLNGVRDNYIHQTTSEIIKREPSFITIEDLNIKGMMKNKHLSKAIQQQNLYEFRKQIQYKGKWNNNEIRIADRWYPSSKTCHDCGSINKDLNLKDREWICPSCNNIVDRDKNASLNLRDTEKYKIA

SEQ ID NO: 29711 - protein, 425 aa, Streptomyces sp.
VFCVKIVAQVKLVPVAAHDADALAATLRACNRAANHASGVAFAKGLKRRNVLQKEVYFALKADYDLGAQPSVRVVKKVCDAYATLKGNIKAGNLGPEGSKGRRRAESKPIVFREDAAQPFDDRILTWNLDQRTVSIWTVAGRLKGIPFVCSEQTMKLLASRKGESDLVMRDGMFFLIATIDVPEPEVFEPDGFLGVDLGIVNIATTSDGQIMAGRGLNRYRKRQRDLRTKLQKKRTKSAKRVLKRVRRREARHAANTNHIIAKKLVATAERTSRGIALEDLGGIRQRVTAKKDQRARLHSWAFAQLGAYVEYKARRAGVPVVFVDPRNTSRQCSECWHTHRTNRVDQARFVCRSCGTVRHADHNGSRNIAYRGEAAWQRGAVNRPRTGASRFRTQGNHAVAGRAPLVINALPTEPAGPVPSGPRS

SEQ ID NO: 29712 - protein, 251 aa, Escherichia sp.
  misc_feature (251)..(251): Xaa can be any naturally occurring amino acid
VKRLQAFKFQLRPGGQQECEMRRFAGACRFVFNRALARQNENHEAGNKYIPYGKMASWLVEWKNATETQWLKDAPSQPLQQSLKDLERAYKNFFQKRAAFPRFKKRGQNDAFRYPQGVKLDQENSRIFLPKLGWMRYRNSRQVTGVVKNVTVSQSCGKWYISIQTESEVSTPVHPSASMVGLDAGVAKLATLSDGTVFEPVNSFQKNQKKLARLQRQLSRKVKFSNNWQKQERKIQRLHSRIANIRRDYLX

SEQ ID NO: 29713 - protein, 440 aa, Escherichia sp.
  misc_feature (251)..(254): Xaa can be any naturally occurring amino acid
VKRLQAFKFQLRPGGQQECEMRRFAGACRFVFNRALARQNENHEAGNKYIPYGKMASWLVEWKNATETQWLKDAPSQPLQQSLKDLERAYKNFFQKRAAFPRFKKRGQNDAFRYPQGVKLDQENSRIFLPKLGWMRYRNSRQVTGVVKNVTVSQSCGKWYISIQTESEVSTPVHPSASMVGLDAGVAKLATLSDGTVFEPVNSFQKNQKKLARLQRQLSRKVKFSNNWQKQERKIQRLHSRIANIRRDYLXXXXQLSRKVKFSNNWQKQKRKIQRLHSCIANIRRDYLHKVTTTVSKNHAMIVIEDLKVSNMSKSAAGTVSQPGRNVRAKSGLNRSILDQGWYEMRRQLAYKQLWRGGQVLAVPPAYTSQRCACCGHTAKENRLSQSKFRCQACGYTANADVNGARNILAAGHAVLACGEMVQSGRSLKQEPTEMIQATA

SEQ ID NO: 29714 - protein, 368 aa, unknown
  TnpB Polypeptide
MNKTLIRTIGIKLDIGEHEAALQETQQQFNAAASWIASTCWEEGITNTNTAHHRVYGETRTRFGLGAQLAVCARAKAVESIKATKSKKSETCPQFGPRGSLRYDARTYRLLSLDRVSLNTMQGRVTCRLILGQRQHDMLVDSTWKIGGADLVWRRGTYYLNVTQSKDAPLLTETNETLGIDLGIVQLATDSTGESFSGTKVHEVRMRYQKRRQILQSIGTRSAKRRLKQMSGREKRFQKNTNHVISKAMVQKAVHTRKALALEDLTGIRERATVRRENRYERHSWAFYQLRTFIAYKAAWASVPLRCVDPRNTSRTCSQCGHCEKANRQSQASFTCKQCGFCLNADINAAINISRASVKVPMVSASNG

SEQ ID NO: 29715 - protein, 431 aa, unknown
  TnpB Polypeptide
VFTTYEYRILPSDDQAALMSEWLELLRRQWNHALGERLDWLNATRCPIDRCSLVSCPLPLPEVPLEPNYYRQAASLKPIKQLFPAYKNIYTDVLQQNLLRLEKTWRAWREPDSTGKRRGRPRFKKPGELRSFTFPRINNPKAGAHLEGETLRLSKIGSMRVVLHRPLPEGFVPKTCTVVRKADGWYVCISLEDKTVPEPEPVPIQRAVGIDVGLDRFLTTSDAEVVPIPRYYRQAQRRLARLQRQLSRKVKGSANWQRQANKVARLQLHIARQRKAFHYLVAHWLVERYDLVVVEDLNIRGLARTPLGKAIVDAGWGQLLDILQAVAVKRGKRVLKVDPRDSSQNCCVCGERVPKTLAERVHNCPRCGSWDRDLNAAIEILKRGLRAVGLPLSGCGGSWVTSPIALAGRSPLKQQIREVIPGSSRLKPVRA

SEQ ID NO: 29716 - protein, 286 aa, Megamonas sp.
  misc_feature (154)..(187): Xaa can be any naturally occurring amino acid
MEKAYKFRIYPNKTQECLLQKTFGCVRFIYNHFLDRRIKAYEQNKKTISYNECSKELTQLKKEKKWLKEPDKSSLQNALKNLDTAYKNFFNRQKAGFPKFKSKKNRYKSYKTNMTNNNIVFLENKIKLPKIGKIKTRDKYRQIEGRILSATVSXXXXXXXXXXXXXXXXXXXXXXXXXXXXXXXXXXQVENMMKNHKLARNIADVSWSEFMRQLTYKAKWFGRVIVKIDKFYPSSQLCHICGYKNIEVKNLNVRKWNCPKCKTHHDRDVNAAINIRNEGLRILNIA

SEQ ID NO: 29717 - protein, 389 aa, Megamonas sp.
  misc_feature (327)..(360): Xaa can be any naturally occurring amino acid
MIKRQVIVVKTYCFKLYKAKRNRKLHKVINIAGIIYNHCIALHKRYYRLFKKSLNIYKLQKHLTKLKKIGKFSYFKEVGSQAIQDITQRIDRAYKLFFRNLKHKIRTAPPSFKKIRKYKSFTLKQAGWKLLKSNIIEINKQKYKYFKSRDIEGIVKTITIKRDTLGDIYLYFVCETNENKVLARTGKSVGYDFGLKQFLTASDNEDIKAPLFFKQNANDIKKANRILSRKKKTSNHRRLAKIALARLHKKISNQRKDFHFKLANKICSEYALICIEDLNIKGMQKRWGRKISDYGFSEFIKILEYKAREIGSIVQKIDRYYPSSQIXXXXXXXXXXXXXXXXXXXXXXXXXXXXXXXXXXWGINLLWRDIVRPAILVGKYRLYPRIPCL

SEQ ID NO: 29718 - protein, 429 aa, Mycobacterium sp.
MIVRMRSCAQAAKVAEATGGVQLAGKPKPDGTPTFSRYVEIGVDFEAHRPGVESVSVLFELYDGDANSYAATGGPGAQLPSGWMVTAAKFEVEWPADPQRAGLVRSHFGARRKAFNWGLAQVKADLDAKAADPAHESVDWDLKSLRWAWNRAKDGVAPWWALTQPTVRAGMDLGVRTLATVATLDTVTGEQTIIEYPNPAPLKATLVARRRAGRELSRRIPASHGHRAAKAKLARLDRRCVHLRREAAHQLTTELAGTYGQVVIEDLDVAAMKRSMRRRAFRRSVSDAAMGLVAPQLAYKTAKCSGVLTVADRWFASSQIHHGCTSPDGTPCRLQGKGRIDKHLLCPVTGEVVDRDRNAALNLRDWPDNASCGPVGTTAPSAPGPTTTVGTGHGADTGSSGAGGASVRPRPLRARRGEAKTQTPQGDAA

SEQ ID NO: 29719 - protein, 335 aa, unknown
  TnpB Polypeptide
MQVNFVYNYVNHLSYTHLKRTGKFFSAYDIHSYTRGATACGLDLHSQTIQSITEELVRKRIQFRKPKLAWRVSKGAKRSLGWIPFKASSVSYKNGQIKYSKHFFGLWDSFGLNNYIIKTGCFSQDARGRWYICLNVVNKEPKQIPNNENKSAIGIDLGLKDFLTTSDGLKVSAKQHYRNSEAKLAIAQRANKKQRVRIIHAKIKNQRLDFQHKLSSKLVNNHSAIYVGNVNASALSKTTLAKSVLDAAWSQFRTLLRYKCEFAKVMYKEINEKYTSQMCSCCSCIGTSSPKGRADLRIREWSCLSCTTRHDRDINAAKNILALGHERPVVGIPLL

SEQ ID NO: 29720 - protein, 452 aa, unknown
  TnpB Polypeptide
MIVQEAHKTFYDDLCKDISSHLLSHTEIDCAVSDLNCSNTSSSAMVAKSWFSTRQVTAHNENSQKTYWQFYTSSHAECMVSDAIQTKSRRIRIYPSQHQKQLFKQWFGVERKVYNTCVNHFNEKDIVFKGWMKLSTVVLAELTEDYIKDVPYQIKKIAVKDSYTARQTNCKKTKKTGKPFKLRYKSRKNPLQSCYIPKSAVSESGIYYTISGKLKFSERKWLKNDICDCRLVNDHGRWYVSVPQKLATMPTENQGGIVALDPGVRNFLTYFSEDGRFGWLGIHAFDRILNLNLKRDHLLSRLALTKDKKKKGKLKRTLNRTYHRIQDLVDELHWQCINYLVHNFSVIIFPPFEVKGMTKKGRKLRKSVVRSMLSLSFFEFKERLKQKCNECGVVYVEQNESYTSKTNSFTGELITNLGGKEWFVYDGIKVHRDLNGARNILIRAMRDSSAAS

SEQ ID NO: 29721 - protein, 273 aa, Arthrospira sp.
VTSLSTPTKLLSPSLIFNEQKRTCHLSVPFECHPPQREGEGRVVSVDLGINTTATVAVVNFDGTVTYREFIHPARDIDEVAAAARTCVQRNGDRRDKRLKSVSKRASKTMGLGGSLQKGFCSHTYRKCRNINRQIGQIVSKRIVQIAQQFNADAIVFENLKGWKAKGGRKRSNLRQRFHGWLKGMIRDLTEMKWQEIGGKVIDVVAPPKSWLMTVVESKGRDSKNYALAKFSSGKRYNADLNGALNIAARGILQLTRRKDSEEPSIQRSRAIA

SEQ ID NO: 29722 - protein, 339 aa, Arthrospira sp.
MAKTFVAQVNQLPNDPPLRAALEFLCTASNNLYNCTVYLARQLYFKAGKFSNGQWLSSQMKHNAHMKALYTSAAQQTCISVGEAFNGYRELLKLWRSGGLAEKPKPPNYRRSGGLFELSYPQRWLKLVNGQVRVPMGRSCKVWFDLPEIFLPFPSNLDWTKVRELQIVPRAGYFDAVWICTGKPVEPVALDTEKSLAIDHGINNWLTCVDSEGHSFIVDGKHLKALNQGYNKRVATIKEGKAQAFWCRLLDKLTGKRNRQMRDAVNKAARLVINHCLKHGIATIVFGWNQGQKSGANMGHKANQKFVQIPTAKLKSRMARLCEAHGILFIEQEESYTPR

SEQ ID NO: 29723 - protein, 249 aa, Arthrospira sp.
MYGCQQVLIHTSRDIEAIIEYLCSESNKIYNCALYYARQMLFKKHVFVNRGAVCSEMSKSANQHFKAMYVSSAQPTCNSVVEAMSSYKELLKLWRGGKLEEKPRPPKYRKPGLFTVSYPVRWLKLTPGGIRIPLGNQVKAWFGIDSFLLPMPSNLNWDSIKEVRILPRNKCFYAEFIYQVQAENIKLDKNQVLGIDHGIDNWLTCVSNVGTSFIVDGKHLKSFNQWYNKQVAYHKNGKPQGFWSNALSH

SEQ ID NO: 29724 - protein, 418 aa, Arthrospira sp.
VLVFDARASAVKMFVLEYKVKPKPRQIEAINEAIRTTQFVRNKVLRYWMDNRGVGKVELFRYNTRLRKEFNFVNDLNSHACQAAVERTLRAITRFYENCQNNVKGKKGYPQFKKHSRSVEYKVSGWKLSDDKRHITFTDKKGIGQLKLIGSRDINYYQPEQIKRVRIINRADGYYVQFCIKLDPRDTIKPLNPSKQATGIDVGLKFFLVDAQGNQVDCPQLYRQSEKQLNRLNKRKSKKYRKGQKQSRNYHKARQGYAKKHLRVSRQREEFVKSVALRLIQSNDLVVCEDLNIRGMVKNHRLAKSITDAGWATFRRWLEYFGEKYGKLVIAVPPHNTSQNCSNCGQKVEKSLSTRTHVCPNCGYIDCRDRNAAINILQKGLSMVGRTKSQASGDLSSSCVGEILLNYGESVNEESPRL

SEQ ID NO: 29725 - protein, 252 aa, Arthrospira sp.
MLVFEFKTYGKSSQFIAVAEAIRTAQFVRNSCWRYWVDNPKKNKYDLNKYCAVLAATFPFTDELNSQARQASAERAWSAISRFYENCKKNIPGKKGYPKFQKDCRSVEYKSTGWKLADDRKSITFTDKKGIGKLKIKGTRDLHFYQVSQIKRVRLVKRADGVYVQFCINVDRKENTAPTGNTISLDVGLKEYYTDSNGVTVENPRFLRKGERVLKRSHRRVSKKVKGSKNRGKARQILGKHYLKSARRSGMK

SEQ ID NO: 29726 - protein, 378 aa, Arthrospira sp.
MVNSIESVRAMLVLEFKVKGKSHQYAAIEEAIRTAQFVRNKALRYWMDNRGVNKYDLNKYCRVLAREYDLVRELNSTARQASAERAWSSISRFFENCRQQVPGKKGYPRFKKNSRSVEYKNSGWKLLDPKHIVFTDKKGIGRLKLIGTWDLAFYGTEQIKRVRLIRRADGYYAQFCVKVDVREEIEPSGNTVGLDVGLKEFYTDSNGQSEPNLRFYRNAEKKLKRAHRRVSQKQKGSANRKKAVNRLGRAHLKISRQREEHAKRLARCVIQSNDLVAYEDLRIKNIVRNHCLAKSIHDALWYQFRKWLEYFGVKFGKITVAVNPAYTSQKCSSCGTIVKKSLSTRTHICQCGCELDRDYNAAINILNAALSTVGHTET

SEQ ID NO: 29727 - protein, 541 aa, Streptomyces sp.
VRELADPFVAPGPTGVAIRDRLRVSETDTIVLRKAGIFLGSLATGDLANRCRQGREHDAAAWAVRKRELTGHSSARWAGSITRHVNDQWALARRGQAAQIAWLRGQIGQIEARLARPLGAKASKHEGSPKGYASRSEWHAKSRRLQTLKDRLVRVEADWTAGRVHVVRGGRRLVHTRHHLAEAGLSEQAWRARWEAARMFLSADGESGKRFGNQTIRITETGQISIKLPAPLAHLANAAHGRYVLDATVAFRHRGEEWRDRIAADRAVAYRIHHDVLRDRWYITASWQRAVVPVLPLEVALARGAVGVDMNDDHLAAWRLDQHGNPMGEPQRFYYDLSGNAAHRDAQIRHALTGLLHYTRRSGVAAIAVENLDFAGDKGREKHGRNKRFRRLISRFPTAKLKARLLSMAAEQQVVIVAVDPAYTSTWGAQHWQKPLTTPRREITRHDAASIAVGRRAQGFPIRRRTAPPHRDQSDRGGHRTIQARPDARGREGTRPHPPGPRTRCASPVVERKRVTSLPNTVRGSATERQSWQQDSLPLSD

SEQ ID NO: 29728 - protein, 168 aa, unknown
  TnpB Polypeptide
LKSNLFENKGVSLEKYDENLKKGEVTQRANIQKQKRKVQKLHHKIDNVRTDYINKTIAEIVKTKPSYITIENLNVKGMMKNRHLSKAVASQKFYEFRAKLQSKCNENGIELRVVARWYPSSKMCHRCGCIKRDLKLSDRIYRCECGYVEDRDFNAALNLRDAITYEVA

SEQ ID NO: 29729 - protein, 508 aa, unknown
  TnpB Polypeptide
MVTITYCKALPEPAEELNAIGITHFEAFLTAYAPIFRSAVCETVQHLLSGNDFKKSTWNTHLQEAYQINKRHANGVIASASCQVESAKECRKNHIKQLEGKLKSANDWLKKSEKKLKDARKFYRKKNWENSKTGCGFPLSCSLKYVPRPGKFSDSDVAGAEGQKKDTNWQNLRFQIHQKKRYIYHLTKKIEHLKLAQVKVKVPLNQVFIVGSKTESYGNQVCQWDGQTLKFRVPYCLEKRFGKHVETEFGGFKRNINRMPIDGSKTWHFYYKQSKWVGAVRFTPEPVFQVSRPIYYGAIGLDINPGSIGWAYCDADGNLRKHGQIPLEMGLPPNKQDAQITNACLKIKQLADKYVCPVVRENLDFSKKKEMLREQGKKYSRMLSSWAYNLFSERLEAILSNRGIELIKVNPAYSSLIGLVKYTRMYGLASDEAAALVIARRGMRLSERLPRFNSAYPLVKKGKHVWSAWSQLNKLVKSWDAIESRHDYYSVSVPNWESLVKPQCEPFG

SEQ ID NO: 29730 - protein, 450 aa, unknown
  TnpB Polypeptide
MQQIITAKLKLLTTPTQGQALRQTQLAYRDALNAVSQYAFMHGKTSSVTTLHKGMYRTLRTRYHLPSQLACSVERQVAATYKGLWTKLKKNVEHRRAKITKKRFKGLDQPPHYSSPTVQYTYERDYTFQKEQQVSIGTLNGRISVPYQGYDKHTALIREGATIGDAKLWYDRPKKQFYLLVSLTLDLPEPTCEQFTEVVGVDVGIRYLAVTSTSTGKASFHPGKQVRHQANHYARLRKRLQRKGTRGSKRRLRRIEHRERRLKAQANHCIAKQIIMQHPHALIGLENLTDIRERTKRKKRKRKKNGKGSEPVSSKARKANRVYSQWSFAELHNFISYKAALAGSLAIKVDADYTSKACSMCGHTADENRPRKGLLFVCQCCHYTLHADLIGARNVTMRTLLVRHDWARTGFVSMAPDASDKEAKAARLRRYAELRWSPGVTNKPPVSDRR

SEQ ID NO: 29731 - protein, 166 aa, Clostridioides sp.
VEKAYKFRMYPNKKQQELINKTFGCCRFVYNKYLAKRIDVYKNDKETFTYKQCSSDLTNLKKELNWLKEPDKFSLQNALKDLDNAYKKFFKEKAGFPKFKSKKINRFSYKTNFTNGNIMYFSQHIKLPKLGMVKIRINKYLKVEYLMLLYLKKQVVDIMYHYAVLM

SEQ ID NO: 29732 - protein, 367 aa, unknown
  TnpB Polypeptide
MKAHRAILVELPRDECDVEYIKRLTALTNLAYYDFEVFVPDILKNIQYQLYGFKDYMESLVFGTEPKRWFAKTWVPLKTLRVYADGSKKGDKSAPVVLDFRSDVIRLRQACKNELRYVVEVPLPKWVVERVKEGGDIKFAMIGLKGDEPYLALVAERVVEPYLPSNYMLVIDVNAWNNGIVWGLIRDGKLVKWKPERPKLSEVESLYKLSMRLSKKYGKLKRLGLDKTEEGRRLWLEIRRVRRKLYARLRDYVQKLVHRLVRKALRHKALVIIDDMIEESRRELLEMKIPSGLRKLYLAYTRRFVKLLITQLEWYGIPYKLKRLPSTVCPICEHELIQEEGRTMVCPNCGFKAPRDLVPIHWATKVY

SEQ ID NO: 29733 - protein, 385 aa, unknown
  TnpB Polypeptide
MKTFTYLLRPNKTQEAALWSVLIGSRRLYNALLEECVTHYQETEKHLNIYEQDKRHGSKEHPTLPAVVVDTTLKRVHRSFRNFFEGRKEGRRVGFPRFKGATRWNSFAFRDAGNCLDGRYFKAGKLCGGRIRTVAHRRLEGTFKFARIVRRPSGWYLQCVCETEPHPLPVRSAAIGLDMGITYLVADSNAHMVRNPKNLQKSAARLARAQRVLCRRHKGSARRKKAGRRVARIHETIANQRKDTLHKVSRQYVNAYQMIAIEDLQPANMVRNHALARAISDASWGTLRFMLSYKAEYAGRHLVAVPPHYTSQRCSRCKEHVQKSLSVRTHVCPFCGYVADRDTNAAQNILFAAQKGGDAAVGDQGKKAASGQWISPGENREAAGL

SEQ ID NO: 29734 - protein, 206 aa, unknown
  TnpB Polypeptide
VDVGIASLLTTSTGERVEHPRWYRTEQQKLRVVQRRVARRKIGGSNRRKAVRQLQKQHERIANRRKDYCNKLAHGLIQRYDTIALENLRITNMVRNHHLSKSILDAGWGYLVTHLTHKAEEAGRRVILVDPAYTSKICSRCGALFEHLTLADRWVICPCGLSLDRDHNAAINILKRAGTPPLGANVAKRQPSGCGYVCVAQEAAGL

SEQ ID NO: 29735 - protein, 405 aa, Caldicellulosiruptor sp.
MYRTQKNHIRCDKQTYRVLRRLCHFSKNLYNYALYHIRQHYFKTQQCLRYESVYHLVKENENYRLLPSQVAQQTLISVDEAFKSFLSLLKAKKERKIEEKVSIPKYLPKDGMYQIVFSKDQFKIEDKKIRLSLGRKFAKEFGVRYLYFGLPQTVLGKKLKEVRIVPRFNGRWFEIEYVYEERQQFKVYDLSRYLGIDLGLDNFAAVVDTIGTAFLIEGRFLKSVNRWYNKQRARLQSIYSKQGIKCGRKLALVSRKRQHIIENFLNQAVNLIIKHCLNNQISAVVVGRMKGIKQGIELGAINNQNFVGIPYDKFKRKLKSKCMYYGIRYMEVDESFTSQRCSRCGIVDKSNRKHRGLYVCKGCRNVVNADINGAINILLKVAGESAVKQIASSGCVNHPVRIRVA

SEQ ID NO: 29736 - protein, 387 aa, unknown
  TnpB Polypeptide
MKTFEYRLRPTRAQEQALMQVLIASRKMYNACLEELITHYQETGKYLHLYEQDKRHGKKEHPDLPAVVVDTTLKRLHRSFTNFFRGRKEGRKVGFPRFKNAQAWNTIQFRDTANCLDNGRFKAPVQMGGRIRVIVHRPMKGTFKVARIVLRPSGWYLQCVCETTPEPLPKKENAVGLDMGIRYLIADSNGHIIENPKHARKSAKRLAKAQRRLSKCKKGSNRRKKAKQQVARIHEHVANQRKDTLHKASYQYVKHYQTIAIEDLKPANMVRNHRLALSIADASWGMFRQFLENKAESAGRQVIAVAPHYTSQKCSQCGEYVQKSLSVRTHVCPFCGYIADRDENAARNILQRGLQVLARTGPSSREREGPEQSGESPLPLKREATGL

SEQ ID NO: 29737 - protein, 410 aa, Caldilineaceae sp.
MPSVSLPPTPPTDGARGLVKGHRIALCPNDRQASLMAEHAGWARVASNWAIDRFAEAWFTGEGEDNEWLSDMELRRQFNAVKQDLFPWSKPLSQTVAKNAIIHTGKGLDAWGAYKKALKKGQRPRRVGFPKHRKRGKHMAFTPTNGRNTIRVEGCRVRIPAIGWVRMTEPLRFAGDILSATVSLEADRWHIAFQVDTGEPAPPKRPGPTVGIDMGIQVLATLWDGDERTKILNPRPLQEALAELRRIDKAISRSIKVHGKHLPPPGSPVHPAETAVCPCLPSAQRPPPPDHHGDRQAWGHGEGGDPAHRGDAAQPETGARPLGCRPGGVRAPAGVQVRLVRDRLREGGPLVPVLEDVQCVRGREAVAAAVGAHLPLSAMRLCVRPGRERRPEPPGVRPGGQVGRRRRGDP

SEQ ID NO: 29738 - protein, 381 aa, unknown
  TnpB Polypeptide
VNLGAVDSAYASIESNPLCDGEIVLKMVIQGAWYRLIFDFDNTRFTEGKVTLPIVKVQDGHPVFIFTVVTDNPVIQFSGDYTIGVDVGINDYATVVVRATKTGRIAHETTLSQRVHSLWNSVRASEAQVRALRKKAATLLCDRQARMSALDEAKLHREAASRKKRELAILAAQEIADLSHVWGNAVVAVEDLSWVRNTMQNGRWNRGAFVRWLTHYVSQNGGWVVAVNPANTSQQCHKCDQRVTHPTRKVSVCVTHGAMDRDVNAAANIAARAVPRVAKARVTRAKNRKLRPQAPLKTPVARNSLKYPGRDRTKNKPTPKRKNHRLVSREVILPVCPARAQAPCLAASVLADRGACNNLGTVQAALKQGNIAHECRLCSLI

SEQ ID NO: 29739 - protein, 405 aa, Saccharomonospora sp.
MLTGRKYRLKLTTAQAAQCEEFGNVCRAVWNTALDQRRQYRQRGGWINYNEQAGQLADAKTEHEWLKVAPSHILQQTLRDLDRACKEHGTFRVKWRSKQRWNPSFRFPMGKLIEVERLNKRWGRAKLPKLGWVQFRMTRQLGGEVRSATVSRDGQDWFVSVLVEDGEKTPEQHAMPNTGVGVDRGVAAAVATSDGKLIDRDFVSTGEVKRYRRLQQKLARQKRGSQNRKKTLTAMRRLKRRERDRRTDFCYQVAAELTNRNALVALEDLRTRSMTRSASGTIEEPGRHVAQKSGLNRAILAKGWHKLELALLSAARYTGSEIVKVPAAYTSQTCAVCRNVDPDNRNSQAVFRCTGCGHTAHADINAAKNVLAAGRAVTACGDLADGRSVKQEPQPASALVGISRL

SEQ ID NO: 29740 - protein, 402 aa, Saccharomonospora sp.
LRYRYRLYPTPGQRQALARAFGCARVVFNDAVRARRDAYAAGDKYPASTVLQKRLITDAKRTDERAWLSEAPAQMLQQAVRDCDTAYRNFFDSLKGKRAGRRMGAPRFKSRKDNRQTMRFTRGAFKARNGKKLALAKIGDVRVAWSRNLPSAPSSVTVIKTADGRYFASFVVEVGDETLPPAVDEHGDDIELGLDLGLSAFAVDQHGRVIDNPRFLRRAERKLIRLQRSVSRKQKGSNNRNKARKRLARQHAKVRDTRQDWLHKETTRLVRENQAIVVEDLAVSGLARTRLAKSVHDAAWGTFRKLLEEKATRYGRDLVVIDRWLPTSQTCSDCGRVDGPKPLHVRSWTCPCGSVHDRDVNAARNILAAGRAERLNACGDQVRPRTGAQVDEAGTHRNAVPA

SEQ ID NO: 29741 - protein, 192 aa, Acinetobacter sp.
MGSYGLSKYSIKTGSFVEDSRGRWYVCLVVDSPKQDKPTATKAVGIDLGLKDIATCSDGTIISNPKFYHQYEQKLGIAQRARNIKRVRALHAKIANCRKDHLHKVSTQLVKDNALIVVGDLSASKLVKTKMAKSVLDTGFSALTTMLKYKCENAGVMFEEVNERFTTQTCSSCGAITASSPKDRFANKSMEM

SEQ ID NO: 29742 - protein, 428 aa, unknown
  TnpB Polypeptide
MKDDRGGESQMYLTQSNVIRGLAKQDYTMLREMCQYSNNLYNVAVYTIRQHYFDTHQFLRYEESYPICKENENYGLLQAGVAQQILKIADRSFRSFFGLLQKVKVGDYQSKDVRLPHYREKGGWFHLVLSTNAINIKNGFLTVPMSRKYAKIHNGHRIRIPVPDRLKEKTIQEVRICPMYGGRYFKIQYCYLEDPEPVKASPDRVLAIDLGLENLAACVTNTGTSFLMDGRKLKSINQYWNKRKARLQSIAAKQGRKTTNQLCQLAKKRNFRMQDILRKTARYILDFCIDHQIGTLVCGYNRDFKRGLKLGKVTNQHFTQINLSYLRSTLKYLCERYGISYMEQEESYTSQASCLDLDDIPVYQPDTPYTGTFSGQRVRRGLYRFADGRTANADINGAANILRKSKQNFDFEGLCKGLLDSPLRIRLS

SEQ ID NO: 29743 - protein, 438 aa, unknown
  TnpB Polypeptide
VLKRKKGFNIVTKSKRCKLLRNGFDLLETKKVYNDVVLWFFLVINEDPQGVVIPVSKDGGWRYYERKILGDEPEYEFPWDRFPSPLRRSAIRKAIGAWTSWHSSFVKWKNRPKRQKHHRPPKHPSSFNFSPSFDVGTRKNDDGYSICLKILVKGQWKWIKFSYQAPPVSDEWVKGSPSVICFGKGAYITFPLEKYIPATGGAKKLMAADSYRVCGVDMDLNRHIAILSILEIDAKGQVCEIARHFINQTDHIKRRKRDLGLIATRMRSTGIVHKGFCSTRWQKISRREVSVARYFARRLVNFAHHYGACLIAFEHLGNLKPIKGKYSRLSNQKRAYWLKSKLFEQVRNIAYNDYGLLTLRVNPKDTSRQDPWGNLLWRGNDFPTSLLEYLDYQQGANYVATTGGYKAHSGLNAARNIGLKAIRRHRTNPTLLRRRGKP

SEQ ID NO: 29744 - protein, 493 aa, unknown
  TnpB Polypeptide
MPNRKKKSGTIKKLSTQVVPVIGMSMTVEAELFAMMDRLGVVRSESYNKLGSVSHWGLDWRKAYPEVRAFRTPESLGLPSKLMEWTVSDVAKAISAQQAACIEALGKILHQQFPGKENEKRRSQCYKQLSSSSFLEDPFLHRIVRKTFQRGHSWVNNQIVYQQNGYSCKRISRHTYQLEMAGLRRGKRNRILVRSNRKITGQIRLIHNQDFQRFEIHFLVDHGIVNIAKESRFLGVDKGYTEAFYDSDGRAHGLGLGKLASNKSDRITQKNRHRGKLWALHRKLKKIDPAKSARILENNLSRKTENRRYRKDQAGIIAIIGAASRSLFNGESLKVFAEDLTEPIKGKRQSLAMSRKLNSWMKGAIRDSLQKWANWTGSVVLEIQPSYTSQVDSFSGTLLGVRKGDTEPIFNGVVLQADHNAARNILGRGTDHEISRYTKREEVQAVLLRRTARFLEGMDLSLADAVKLGWVDSKHSRTQAFRDLLVGMQGTLR

SEQ ID NO: 29745 - protein, 201 aa, Frankia sp.
VPARPVCLQCRLAQARRGSNRRARLRARIGRVKAREVDRRKDWVEKTSTDLARRYDLIRVEDLPVGTMTRLARGTIAEPGRGVRQEAGLNRSILAHGWGLLVQRREQKAPGRVEKINPAYTSQTCDTCDTCGTRDRQARENQAAFGCRGCGQQANADVNAACNIALGPQWATTWVTARGGDGPSRPVNREPPHCAPPPADG

SEQ ID NO: 29746 - protein, 396 aa, Frankia sp.
MSRFRLYPAPEQVAVLESHCGHARFVWNLAVEQQSWWTPRRGPAPNYNEQSRQLTEARREFPWLAEGSQTVQQQALRDFAQAMANYFRGSHRKPTLRKRGRSEGFRNVAVKPSDIRTVNRRWSEVKVPKAGWVRFRRLRTVPDAKSYRVTGDRAGRWHVAFAAIPEPIDASGTGETVGVDRGVAVSAALSTGELPSCPGLRPAEAGRLLRLQRRRAKAKRGGNRRGRLTAQIARVKAREADRRKDWVEKTNTGLARRFDLIRVEDLKVKNMTRSARGTVEAPGRNVRQKAGLNRAILANGWGLLVQRLEDKAPGRVEKIPAAYTSQCCSVCGHVAAESRESQARFACVACGYEDNADVNAARNIAAGHAVTAWGGVGLPKPVNREPQLTAPPPVAA

SEQ ID NO: 29747 - protein, 412 aa, unknown
  TnpB Polypeptide
MNYNYRYRLYPTDEQREALAWTLDTCRQVYNHFLKRLNDADEVPSEYAEKNTLPDLKREWTELQNVHSKVLQVVVERLYDNLRTLSAQKQNGYRVGALRWKGAGWYKSFTYSQSGFKFIETDTRRDRLRLSKIGEIPIAYHRNVPENATIKQVCIKRDASGKWYATFGIEIDEQPEKPAPETIGPEDAVGIDVGILKYAHDTDGLAVESLDLSDERERLRREQRTLSRKEKGSNNDEKQRMVVARWHDRIANKRRDFLHKLARYYVETYDMVAVEDLNVRGMMEQDRNSRNTAHSAWRTFIEILRYKAERAGTHLVEVNPHGTTKECSNCGVETDKPLWVREHSCPSCGYEDDRDANAAKNILQRAFSELGMGQAESTPPETATATDTRVVSASRVIERGSPALNAVRRRAG

SEQ ID NO: 29748 - protein, 425 aa, unknown
  TnpB Polypeptide
MYALKLELKLNNKERSKLKGCAGFSRFVYNFGLDMLKQSWNFQAVKATDTARLLKIEKLFTNVVKPKAEYSWIKEYPSAIYSNAFRNLAKALVKWRKGTSGFPQLKSKKNGDSFTVLKKAGIYDQTVKEGGKLLPFTNRQVLQPGKKITIPGLGEFRLKRAIPFLCSSQTFTISRTADKWFVSFTLDIDRVPPIIHPVKQVGVDLGVKCLATVSDGTKYEMPLTTKTAKTKLDKLQWHNRNKVMGNKKLKVRASNNAKKQYVKVSRLHARIASIRIDTVHKMTTDLSRRVYNIRIEDLNVQGMIANHKLASAVSNNCFYEIRRQLTYKQAHYGTKVELVDRWYPSSKTCSKCNQIQPLSLSERVFQCQNAECGHIQDRDENASINLENAPDNKVRPAGSELNACGDEGADSHQRSKKQTSKRRVR

SEQ ID NO: 29749 - protein, 406 aa, Halomonas sp.
MQRLQAFKYELMPNGEEVRKMRQFAGMARFVFNRGLALQKARYEAGDKKLGYAALCKELTGWRNSTETPWLKDAPIHPLQQSLKDLERAYANFFAKRADFPRFKKKGQRDSFRYPDPKQIRLDQGNRRIFLPKLGWLRFRKSRELLGTVKNVTVSQSGGRWFVSIQTEREVDVPMPKGGAVGIDMGVARFATLSDGSDLAPFNSFKRHQTALRKAQQSLSRKTKFSQNWKKAKARIQKIQARIANARRDYLHKASATISQNHALVVLEDLQVGNMSRSARGSVEQPGQNVRAKSGLNRSILDQGWYGFRRQLDYKLAWSGAHLVVVPPHNTSRTCPECGHVAAANRRSQACFACVECGFEANADHVGAINVLRAGHARLACEVSGAARPPAAGTHRSDSAAADGCR

SEQ ID NO: 29750 - protein, 438 aa, Enterocloster sp.
VKVVSSYAIKIKNYNQIFNDTVKIYQQAVTFFIQVLDSEWENLVSLSGKQKNGALEKLTHKTILNPSPKYDFDSAFYKFPSYLRRAAIQFAIGSYSSYQSALSNWEKSDRSTKKPKLSINRNIMPVFYKKNTYNRLDDYSAEIKIYHQKDWVWLPVTFRKSDVDYIKHHCTDMKESSPVLEIKGKSSSLRFSYEESVILSEEPIETRIVLSVDLGINNAAACTAMLSDGTVIGRKILSYPIEKDRLNHQINRIKKQQQHGNYKARKAWIFANHTNRHISEMTANAVIGCALEYHVDVIVFEHLDMKGKKQGSKRQRLHLWKKQAIQAMVTHKAHREGIRISRVNPKYTSMLAYDGSGFVQRHKNNYSLCTFQTGKEYHTDLNAAYNIGARYYIREIIKSLPERDRLEIQAKVPELSKRSTCTLSSLINLNVVLKELAL

SEQ ID NO: 29751 - protein, 468 aa, Frankia sp.
VRSALRPPGRREPRPARGRRRDRGCRMKTTQAFRFALDPNDVQLAGLRRHAGAARFVYNWGLGFVKAALAQRDAEQSYGLAGEALTVVPWTLPALRLRWNQVKNDVAPWWGECSKEAFSAGLDQLARALKNFSDSKNGKRRGRRVGFPRFKKRGKARDSFRYTTGAYGPAGDLHVKLPRIGRVKVHEPMGALTGRWADGRGRLLGATVSRTAGRWFVSFTVEAEREVPEAPSPRQRAGGPVGVDAGVKHLAVLSTGEQVDNPKPLARSQRKLRKASRAYSRSKPGSAGSRPRATRLGKIHAHVANQRRDGLNKLTTRLATNHDVVVVEDLHVAGMVRNRRLARAVADTGMAEIRRQLDYKTRWYGSRLHIADRWYPSSKTCSGCGWRNPSLTLSDRTFHCQSCYLVIDRDTNAAVNLRNLVAASTSETQNARGADHKTPLAGPVAVKREPGTAAAGQTRGAPPQGEAA

SEQ ID NO: 29752 - protein, 429 aa, Streptomyces sp.
VKLVVQVKLLPTPGQAAALEATLRACNEAATWVSEVAFERREFKNFALRKHTYDTVKSRWQLGAQAAQHVIKKTSDAYATLKANLRAGTFGRPSSHRYRKAAGKPVAFRPAGAQPFDDRMLSWQIPGHTVSIWTTGGRMKQVAFTAAPEQLATLALYRKGESDLLYRDGMWFLNATCEVPEQELNTDPVDFLGIDLGIVNIATTSDGEIMAGRELNRIRLRERGLRQKLQKKSTPSAKRRLKKRRRKEARRAKDINHKIAKHVVAEAERTGRGIALEDLTGIRERVRLRKPQRATHSSWAFAQLGQFIAYKARRAGVPVVYVDPAYTSRTCAECGHIDKANRVSQAWFACRSCGFVDHADRNGSRNIRARAWQLWRRGAPSTAPAPPPRQRDGAGRKRSITASDARCASSGLQSRVVGYSPYPSRYPLP

SEQ ID NO: 29753 - protein, 563 aa, Escherichia sp.
  misc_feature (244)..(247): Xaa can be any naturally occurring amino acid
MAQVINTNSLSLITQNNINKNQSALSTSIERLSSGLRINSAKDDAAGQAIANRFTSNIKGLTQAARNANDGISLAQTAEGALSEINNNLQRIRELTVQASTGTNSDSDLSSIQDEIKSRLDEIDRVSGQTQFNGVNVLSKNDSMKIQIGANDNQTISIGLQQIDSTTLNLKGFTVSGMADFSAAKLTAADGTAIAAADVKDAGGKQVNLLSYTDTASNSTKYAVVDSATGKYMEATVVITGTAXXXXERAYKNFFQKRAAFPRFKKRGQNDAFRYPQGVKLDQENSRIFLPKLGWMRYRNSRQVTGVVKNVTVSQSCGKWYISIQTESEVSTPVHPSASMVGLDAGVAKLATLSDGTVFEPVNSFQKNQKTLARLQRQLSRKVKFSNNWQKQKRKIQRLHSCIANIRRDYLHKVTTTVSKNHAMIVIEDLKVSNMSKSAAGTVSQPGRNVRAKSGLNRSILDQGWYEMRRQLEHKQLWSGGQVLAVPPAYTSQRCACCGHTAKENRLSQSKFRCQVCGYTANADVNGARNILAAGHAVLACGEMVQSGRPLKQEPTEMIQATA

SEQ ID NO: 29754 - protein, 368 aa, unknown
  TnpB Polypeptide
MLLIRTVPLKINLNEDVYFPLMEQCSQLFNEYIDWSYQNKTYNKVKAHHQLYSKFRLEFPQLPSAMIQLVRDCAMEAVKRSKFKTKKPRKKLHSAIRYDSRTMTLRGNQLTFSCIGPRQKVILEIPEYFKSYFKNWKFKGGTICYKNSQFWVHLNFQTDKPTPFENSEILGIDQGLYNILAFSNGEIIKAKPIRKQQRKHLYNRKKLQAKGTRSSKRKLKKLSGKEKRFNRDFNHCLSKYVVSLPYGIFAIENLKHIRKQKFSKKLNKLLSSWTFGQFEQFLTYKAESLGKQVVKVDARYTSQKCSCCGIINKDNRNKSKYKCIKCGYTNHSDINAAINIKNNFLSSISLEESDEQVVVNQPIVSTIY

SEQ ID NO: 29755 - protein, 386 aa, unknown
  TnpB Polypeptide
MFTFNFKLFRAPRNHHLKRKTWIAHTIWNYFLGWQCTRYSLGLPYLSYKEMSGEFTILRKSHPEIFAHWRELDSWAARQILKRLDEGYQRFFKKIAKRPPKFRSFRKPYSFTMCPSGYKFADPVAGDKGFGLYDDRVAIMGRTYRFNLSRPIFGTIKTVTIKADALGDFYMSVVTDHVESHLKPMTGNAAGFDMGVKTMLTCSNGKQYQSPQFYTESIDNVRTANRNLSRKKRGSNNRERARQHHARMHRKITRQREDHHWKLALELVRRFDVLFFETLNLDGMKRLWGRKVSDIGFYAFLQKLKWQAKKRGKRVETIGRWEATTPICHQCGRKHLFIDLDVREWYCHSCKIYHDRDVNAAINILKVGASTFGVEGVRLAIASTPC

SEQ ID NO: 29756 - protein, 353 aa, unknown
  TnpB Polypeptide
LEVDLSKKPLTSIYGTILTLKSQMACNVARQVSGAYKTLQSQIDKRESEWQFLDFDPTSATFSFERDFGLSGDTLSITTLAGRRRYKILNYQYAQRYLDGSWKYLASKLCLHKNGAYFFHLACAKDIPDKNIVDASTFMGVDVGINCLAVASTTDKQCKFFAGGEIKNHRNIRSKERQRLQKAGGRYLGTRSSMRTLRKIAGRETRFMTAVNHKVSKDLIEFAVDNGVSAIGMEDLTGIRKRTENKVSTEFRYEHSSWAFRQLQAFVEYKAKETGIAIIYVNPEYTSQTCPRCNHISRNNRCGVAFRCEKCGYETHADRAGAMNIEHRTRDLRYILESQGGNVSPPDATRLFA

SEQ ID NO: 29757 - protein, 247 aa, unknown
  TnpB Polypeptide
VKTLTVKRDNLGDIYIFAVTQEECNEVLPRAGKAVGMDFGLKHFLNLDDGSVIDSPQWYKASLKELKTIQRHISRCKAGSNNRKKAIKELNRIYRKMCNQRTDWFFKVAYQLIADCAIICIEDLNLAGMQKLWGRKINDIAFGEFVQILEWAASNCGTEIVKIDRFAPSSKCCSRCGYIYTKLTLKQREWDCPSCGAHHERDVNAAINICRMGLVQMGYPAQKCSCGWGTTPLPRGVRLGQPAASLK

SEQ ID NO: 29758 - protein, 450 aa, unknown
  TnpB Polypeptide
MSNVFTITTELKINREYNQLVGKYISDYIELFNKIQRLTFHRIKNYYIKSGRVTQKDKNIIHAQLKEEFNLTSRAVDAILSNMFGRYESIKELKNFERKSLERKIHNLEKEIIKLKDERALQRIDLKNNPSAFNSTKYKNLKIKIYWKQNRLNTKKQKLNNILNEIKTGKYKVCFGTKKLLQKDYKEFVKRRDSEIYFIGRSGDITCNNNFQVKYSSKTNQFYFKIRKEIDLENDKFVYGKFYFNNKSYTNLLKNLLKTKESALTYRIKIKDNRVFLQIMYNFKHNKDLCITRNSYGVVGVDFNKGFVSVSETDKYGNLINNFNIYYKYGKGNQTIIDFQYIATKLKDYCLKSGKDLVIEKLNFNKKKDDLISKKGMKYNEMLSSLAYSKFDSIITSKCVKNKIFLHKVNPAWTSWIAKQKYCPKMKLNIHSGASYVIARRGMSLTDKIK

SEQ ID NO: 29759 - protein, 396 aa, unknown
  TnpB Polypeptide
MIVLEFKLDGIAAQYAALDDAIRATQFIRNKCVRLWVDGRGVKPYDLNTYCAVLAKEYDVAAKLNSQARQAAAERAGAAILRFYKDCRAKKPGKKGYPRFQKDCRSVEYKQTGWKLDAGRTRLTLTDGFKAGTFRLRGTRDLVGYALGQIKRVRILRRADGYYAQFGLDAQRRVAVEPSGASVGIDLGLTHFYTDSSGAVVEHPRPLRRSERALKRLQRRVSSKVKGSQNRAKARGRLGRKHLKVGRQRRDFAVKTTRALVMSNDVIAYEDLTVANLLKNRRLATSISDAGWRAFVTWLGYLAQVYGKVAVAVPPQHTSQDCSGCGERVTKTLSERTHLCPRCHTVLDRDHNAARNILMLGLRQVAETTAGHAESHAWGQPALCPTEETQADKAAG

SEQ ID NO: 29760 - protein, 443 aa, unknown
  TnpB Polypeptide
MEKRKFTTVTQLHEKQNRELITYVESVLPFYAQAFRETFHTIKRDTSFNKSNYNTYLQDKYDITKRTASSIISGAQGRLNALYELKRYEQKHLENKIAYLEKELIPKLVLKREENASLLREGEFVSLIQQRNLRLKIVSKKNKLNKLKQKLSNLDYQLKTGKLKLCFGTKHLLQRDIPAFMERRDSQLSFVGTKTEKAGNNLLQLSYLPKQNQFSIKLRKDFGFKKVKGKEKYVSGQVYFRHHKDKILSILKHKNSPLSYKIIKKKNRYYLYCTFEIQVEKEDYLTRSSYGTIGLDFNKGFITLSETNEYGHLVRTQFLPYRFRSGNKTKTDLQKIACHVVKFSRSKGKDLCIEDLDFKKTKSKADKREGNKYNQMIHSLAYRQFVDIMENAAYRQLVHLVKVNPAWTSWLAKQIYCPVMKLNIHVGASYVIARRGQGLKDSV

SEQ ID NO: 29761 - protein, 374 aa, unknown
  TnpB Polypeptide
LIVTSQNEAELSARFQAGRQLYNALLNESMARMNLVRQSDLFQEAKKLPKGKTRNQAFQSAREAYRYSEYDIQAYATVVANQSGWIAQKVDSNTQQTLAKRAFQASIKVMLGRAKKVRFKVSSRFNSMEGKTNKQGIRWVDGQLVWGKLRLNAMINPENPVMMHGLTSFIKYVRLLKKEIHGSRRWFAQLVCEGVPFQKFANLVTPGIVGIDLNISNVAYVANNNAGLLPFAQQVPTFEREIASIQRQMQRSQRTNNPDNYEPDFKNRLGRQIVTKKGKAKKGLHKWNKSKRYLKLATKKRELERRKAAYAKSQNRKLVNDILRNGNQVKTENVSVRGWQKRYGKAISAKSPGYFQSELKRKAESAGGCAIRSV

SEQ ID NO: 29762 - protein, 424 aa, Chloroflexi sp.
MKTFEYRMRPNKQQEQALMSVLIASRKMYNACLEELIMHYKETGKYLHLYEQDKHHGKEAHPDLPAVVVDTTLKRLHRSFTNFFRGLKDGRKVGFPRFKNVQAWNTIQFRDAVNCLDNGYFKAPQQMGGRIRVIVHRSLEGTFKFARIVLRPSGWYLQCVCETTPQPLPKKDNAVGLDMGIRYLVADSNGHLVENPKHAKKSAKRLAQAQRTLARCKKGSKRRKKAKHQVARIHEHIANQRQDTLHKASHYYVDRYQTIAIEDLKVANMVRNHCLAFSLADASWGIFRQLLEAKAESAERQVIAVAPHYTSQKCSQCGEYVQKSLSVRTHVCPFCGYIADRDKNAARNILQRGLQVLARTGPSSSRREGPEQSGESPSARRAKGRENTSTRNWGTLRLLDPKGTRECQRAGQRAEAAESPNTIL

SEQ ID NO: 29763 - protein, 386 aa, unknown
  TnpB Polypeptide
MLKSFKYRLYPNQYQKELLSKIFGQVRFVYNLGLETKITAYTGNKTHLSCFDLNKQITELKKTECDWLKESPSQALQSSIRNLDNAYTNFFRGAGFPKFKNKYRKQSFQLPQGVWLSDNNKQIFIPKLKFTDIDLHREFKGEIKNVTVSRSVTDKYYISILVETNISKPEKQSIKLETTVGIDLGIKDFVITSDGKKFKNHDFFKSSMKKLRVQQRSLSRKQKGSNHYLNQKIKLSLFHEHIKNQRQDYLHKISKYLVDNYDTICIENLNVYGMVKNHNLARAISDMGWGEFKSMLDYKCEWCGKNLSVIGRFDPSSKTCSNCGSINKELTLNDREWICNSCGKEHDRDINAAINIRNFGLRNKPSVTQSGWLHRACDVEIITSLI

SEQ ID NO: 29764 - protein, 260 aa, unknown
  TnpB Polypeptide
LVYESEAKIPEPAKPFISPVGIDLGLKSLIATTDGVKIPHPQFLTKAERHLKRARQRFSRARNGSQNRDKARRLFAIRSSKVSRQRADFNHKLSAEFVRKHDLIAFEDLRVRNMVRNHALAKSINDAAWSQLRLFTEYKSNRAGRFTVKVRAAYSTQECYFCGALNQLPLSVRIFECGGCNRTLDRDLNAAWIVLKRGLAQVGQGMPDLKPVEIGPLPPRTTGVASLVDEAGTKRDENHVITRDSSLEAHDFSRGRMSPL

SEQ ID NO: 29765 - protein, 425 aa, Atopobium sp.
MIEAVKVALDPTPRQARMLLSHAGAARFAYNAGLAHVKEQLEAGEKPDWSHYALRRWWNRNKDVLAPWWAENSKEAYSYGLECLAKALRAFSDSKRGRRKGRRMGFPRFKGKAKATPRFAYTTGSFGLIADDPKALRLPRIGRVHCMEDVARRVGGAHVTRMTVSCRAGRWSASLTVERPDAASPQPKGPSVGVDLGIAHLATLSDGTVVENPKHYQKSLRRLRKAQRGLSRKQADSKRRSRAKRRVQRIHARIASQRRDSLEKLMTRLARSCSEISIEDLNVAGMASNHHLAQAVEDASFGEFRRELEYKCARSGCVLHVVDRFYPSSRACSACGAVKAKLPLSMRTYRCDVCGLAIDRDLNAAINIMVAGSASETLNARGGDVRPRAHLSLTQTPAKREPGGHGGAARPGAGGGNPAMQARTK

SEQ ID NO: 29766 - protein, 447 aa, Bacillus sp.
MAKKKPVKVLRKRKKTETIQRFTQKQNIGRTSLTAREFRLLRRMSHSSKALRNVGLYTMKQSYLTNNRMATVKEVDAAMRADVNYWGVQSNSVQAIRRTLHAEVKSFFEALKKWKENPEKFTGRPKFPNYSPSTEKRVIEIYQVPKVDENGYWAIPMNNEFRKRFCSIKIRMPKNLLHKKISYIEIVPKQKGRFFEVHYTYEVQIAQMKRQPTTTVRALSCDLGVDRLLSCATNNGDTFLVDGKKLKSINQYFNKTISNLQQKNRENGISKRIVTNKIAKLWNDREAQINGYFSQTVGLLFKKVKDFNIDTIVVGYNTGWKQECDMGKKNNQQFVQIPFQKLISAIENKCLKEGILFKRQEESYTSKASFLDRDSMPVWSKKDKTTYLFSGKRVSRGLYQSKSGRGIHADINGALNTLRKSEVVQLDDNIKVKTPILLNVQKRKAVA

SEQ ID NO: 29767 - protein, 522 aa, Bacillus sp.
MVIHRSPSFVLTLELDSHPKLFSAADKELEILRVLYNTVLGNYLKLENQMKRLKEYKRCIRQLHGVKRKLALDEENPFLLNELECIREKLQDLREQYQLTEYASHAWAKGIRKHFGDRVNAAVAQKTASRAWLAFRNKLFGKAKKVVFLRKGEMVSFEGKTNTTGWRYSNNHLVYKDMSTPLKWSGLDSHVSEILSHLEKKTPFTYSIKKKGETLTITDFYHVKYVRIVRKTIRGKVRFFADLIIAGYPSPKGRKLGKGKVGLDIGTASLAVSSPDKAALFNLAEGVKDLAREIKLAQRKMDRSRRTTNPGNYHENGTVKKGRKVWQLSNRYRKQQARVRELNRKQAAIRKLSHQRLANSMLALGDAFFIETMNLKVLQKKAKETKVSEKTGKYAKKKRFGKTIGHRAPSMFVGILEQKVKSLGGSFKRVNTKTFKASQYCHVRNGFFKKPLSERWHVIDEETRIQRDLYSAFLLMNANSSGTKPKRIACMETFPGFKSLHDDEIHKIKIEKRKILNSGILL

SEQ ID NO: 29768 - protein, 402 aa, Escherichia sp.
VKRLQAFKFQLRPGGQQECEMRRFAGACRFVFNRALARQNENHEAGNKYIPYGKMASWLVEWKNATETQWLKDSPSQPLQQSLKDLERAYKNFFRKRAAFPRFKKRGQNDAFRYPQGVKLDQENSRIFLPKLGWMRYRNSRQVTGVVKNVTVSQSSGKWYISIQTESEVSTPVHPSASMVGLDAGVAKLATLSDGTVFEPVNSLQKNQKKLARLQRQLSRKVKFSNNWQKQKCKIQRLHSRIANIRRDYLHKVTTTVSKNHAMIVIEDLKVSNMSKSAAGTVSQPGRNARAKSGLNRSILDQGWYEMRRQLEYKQLWRGGQVFAVPPAYTSQRCACCGHTAKENRLSQSKFRCQVCGYTANADVNGARNILAAGHAVLACGEMVQSGRPLKQEPTEMIQATA

SEQ ID NO: 29769 - protein, 380 aa, unknown
  TnpB Polypeptide
MKSVVTIKLRIPANKLLIETMKQYSKVVSYIADKGYNEKFTNRYKLHHLCYYECRDRFNLPSQFIINANRVASQTPKSVKTNKGSKPVFKELMPLDFDKRTFIFLFNKVSITTLNGRTDIPLDIPEYYWKYLDWNPQTAKLIMIKDRLFLHITFSRAINIKADSNPIQLGVDVGINHIAVTSNRQFFKGTKIKTYRLKFKRLRARLQSKGTRSSRKLLKKISGRERRFKAYWNHVISKHIVNNCNAGTIVLENLKGIRKARKGKRFNFWLNGWNFHQLQGFIAYKAMQRGINVIKVDPFHTSQICSYCQELGTRSKGYFVCSHCSYSLNADLNASYNLAKHHSMTDGVLGSVTNPYIQSVDAKGDYCATAVELMDKSPTL

SEQ ID NO: 29770 - protein, 276 aa, unknown
  TnpB Polypeptide
  misc_feature (256)..(264): Xaa can be any naturally occurring amino acid
LKGTKKLLKSYKTEINPTPEQKQIINRTIGVCRYVYNFYLAHNQEIYKNDKRFVSGMDFSKWLNNEFIPNNPDLHWIKEVSSKSVKQSVMNAERAFKNFFKGKSHFPEFKKKAKSDVKMYFVKTDAKVIIPCERHRIKIPTLGWVRLKEKGYIPTNPNTHTIKSGAVSYKAGRYYVSVLVDEQEQQKPVLNEFGIGIDLGLKDFAICSNGKTYKNINKSSQIRKLEKKLRREQRSLSRKYESYKKLNKNLKGEATXXXXXXXXXAKAKGTKTLSEA

SEQ ID NO: 29771 - protein, 467 aa, unknown
  TnpB Polypeptide
MSKLELNVPYLKTVNLGYKYRLYPTIEQQTILNHQMFIYNQSYNICLNLWKEEQEKNRTLPKEKQTHKKLKEIDQEVKDILKAKKLEFKTVVTQQARINFQKAVNRAFSEEVVSERKKAITKALTPKEKAKAINLGFPKFKSSKDINQSFNWNNQGYTILEHDNDRFEILRLIRENIKIRYHRDLPKNYKMCSITISKDATGYFVSFGIEFEKEIDLVVTSENLDRTKSIGIDLNVNNFAISKPLNEEQLLDNGSLDRRAISFGKVIKTLQRKQSRRDSKSRKLKVKRGKNYQKTQRRINRLKKQQSNKKSDLYHKISKTLTDKFESIAVEDLKIKNMSKSSKGNEINHGKNIKQKSGLNRSILSASFYQFVAMLQYKQTMLNEKLFVKVNPQYTSQICNRCGYKDKNNRKTQSKFKCLKCHHEINADINASENIEQRGLESLGLGISLQDYKSESLSNSDSLESAS

SEQ ID NO: 29772 - protein, 267 aa, unknown
  TnpB Polypeptide
LSRVNSWFKGKGRYDSFTYPQSGFKLDGDRLHLSKIGDVKIILHRPIEGTIKTCTVSRSSTGKWYACFSVEYDPPPASQKEMVIGVDVGLESFATLSNGEKIENPRFFRTDEKALAKAQRKLSKAEKGTPEQKKARKNVARIHERIAHRRLDFAHQTSRRMVDQYGTIVFEDLNIKNMQKNHCLAKSIADVAWNQFITITENKAEEAGSRVIRVNPRNTSQMCSRCGMIVAKTLSDRVHTCPHCGLVMDRDQNAAINIMRLGLQSLG

SEQ ID NO: 29773 - protein, 368 aa, unknown
  TnpB Polypeptide
MFWNHIGAARFIYNHMLAEQQRRYDFGEKHMSAFDMNKAITALKQREGMEWMSEISVHTFYRACADLAAAFTNFFVGRARYPRFKSRKHSKPSFPVQDTAGVLWFSETHVQVPKVGKVKYQTNYDIPKGRQCKFSNPRIQLTPNGKWILTVGVERESQALELTSIPMGIDVGVKELATVSFGDESFVFHNINKSRMMRQQERRLKHLQRNIARKYRQHGNYEKTSNILKAEAKVRRAQYRLANTRNDYRHQVTHELVSKLPGAVVMETLNVQGMMKNCHLSKAVAQQGFFEFITQMKYKCEERGIAFIQVPQFYPSSKTCSNCGAIKRDLRLSERVFVCPECGHTLDRDLNAAINLARYADQITQAAA

SEQ ID NO: 29774 - protein, 369 aa, unknown
  TnpB Polypeptide
MFWNHIGASRFVYNYMLAEQKRRYEAGEKHMSAFDMCRMISLLKQRDGFAWLKDISIGTLQRICADVAAAYANFFSKRARFPRFKSRKRSKPRFPAKDGVGALWFSKTHVQIQKIGKVAYQTNCDIPLGRECKFSNPRVQFVKASGKWILTVCVERESQAPVLTDKPMGIDVGVKDLAIVAFGDEQFVFHNINKSKRVRTLERKQRHIQRAISRKYHTNGSYEKTRQIQKYERILRDIQFRLANIRSDYTHKTTHALVSMLPQTVVMEDLNVSGMMKNRHLAKAIKDQRLYEFIRQMQYKCEERGIEFVQVSRFYPSSKTCSNCGAIKRDLKLSERTFVCPECGLRIDRDYNAALNLMRYADQETRAAA

SEQ ID NO: 29775 - protein, 361 aa, unknown
  TnpB Polypeptide
VAQRIDATMTAFADACNLVADWGNDNKCHRQYDLHKGCYRDVREQFGLSANLTVRAIARVAPRLANAKTRHSRFKPTSIDYDARIFKLNVETETVSIRLLDGRCILAMQLGDFQREGLAGQTPKSATLSRKRGTYYLDVQVKEDAPPAQDAEDTLGVDLGLRSIACDSVGHQFQGEDLSDYRQHRADVRARLQAKADTGNKQTRKACRRALKRLSGRERRHQKQINHEISKKLVVFARDHGLAIVFETLKGIRDRCRFGKGQRRRFHSWAFYQLQQFVEYKAKREGVRVVYVDPRYTSKTCADCLHVGTRRQDDFSCKNCGHGSHADVNAARNIARWGLAVIRGEYSLLSCALPSGGRVGG

SEQ ID NO: 29776 - protein, 307 aa, unknown
  TnpB Polypeptide
MAQSSIIRVIGNYRTIKETHGTPWATSQPEYHSPGYDLVWNRDYSILKDGRLSVNTLEGRIKFPIDWTHMPEPYRHGKFGTARLLNRNGKWLLLIPSTIELPHPSQPQQVVGVDLGIRFLTTTYDSDGHTDFYNGKEVKNKREHYKRLRTTLQKKETRSARRRLRNIGNRENRWMRDVNHQVSKALVNRQSKPTLFALENLEGIRHATEKVRRQDRYTQVSWAFHQLRQMIEYKALKAGHSTIAVDPHYTSQTCPKCGMIRKANRNKRLHEYQCSNCGYRSNDDRVAAMNIQRLGYQSLVESHSDKL

SEQ ID NO: 29777 - protein, 371 aa, unknown
  TnpB Polypeptide
MRKAFKYRIYLTSGQRHILEQQLEESRWVYNETLAYRKRAYEEEQRTATWYETKRLLPIWKASRPALKLVHSMVLQNVTERVDLAFRSYFRRVREGAEDVGYPRFKSFGRYDSMTYPQYGNGVRLEGERLILSKVGAVNLVLHRPVEGTPKTVTLSRSATGKWYACISCETEAHPLEPTEQITGVDVGLASFATLSNGEQIENPRFYRKDEADLKRVQKRKDAAKNAQDWPENTKQQLILSRIHERIGNRRADFAHKCSRELVNAYQVIVFEDLAPLEMGKRNGHGMRKSIMDVAWTQFISMTRGKAAEAGRTVILVDPRNTSKMCSDCGTLVQKTLSTRTHTCPNCGLLLDRDVNAALNILHRGHQTLRL

SEQ ID NO: 29778 - protein, 335 aa, Mycobacterium sp.
  misc_feature (5)..(29): Xaa can be any naturally occurring amino acid
  misc_feature (279)..(323): Xaa can be any naturally occurring amino acid
VSTPXXXXXXXXXXXXXXXXXXXXXXXXXYWNWQNSRSGKREGKTMGFPRFKKKGRDQDRVTFTTGAMRVEPDRRHLTLPVVGTVRTHENTRRIERLIATGRARVLAISVRRNGTRLDASVRVLVQRPQQPNVAQPGSRVGVDVGVRRLATVANEAGAVLEEVPNPRPLDAALKELRYASRARSRCTKGSRRYRERTTEISRLHRRVNDVRTHHLHVLTTRLAQTHGHIVVEGLDAAGMLRQKGLPGARARRRGLSDSALGTPRRHLSYKTGWYGSALXXXXXXXXXXXXXXXXXXXXXXXXXXXXXXXXXXXXXXXXXXXXXRVTTKDRSLATA

SEQ ID NO: 29779 - protein, 578 aa, Mycobacterium sp.
  misc_feature (98)..(215): Xaa can be any naturally occurring amino acid
  misc_feature (462)..(568): Xaa can be any naturally occurring amino acid
VTEVGSALNGHRRKFLALLRDPSVKRIVVEHRDRFCRFGSEYVEAALAAQGRELVVVDSAEVDDDLVRDMTEILTSMCARLYGKRAAQNRAKRALAAXXXXXXXXXXXXXXXXXXXXXXXXXXXXXXXXXXXXXXXXXXXXXXXXXXXXXXXXXXXXXXXXXXXXXXXXXXXXXXXXXXXXXXXXXXXXXXXXXXXXXXXXXXXXXXXXXXXXXXYWNWQNSRSGKREGKTMGFPRFKKKGRDQDRVTFTTGAMRVEPDRRHLTLPVVGTVRTHENTRRIERLIATGRARVLAISVRRNGTRLDASVRVLVQRPQQPNVAQPGSRVGVDVGVRRLATVANEAGAVLEEVPNPRPLDAALKELRYASRARSRCTKGSRRYRERTTEISRLHRRVNDVRTHHLHVLTTRLAQTHGHIVVEGLDAAGMLRQKGLPGARARRRGLSDSALGTPRRHLSYKTGWYGXXXXXXXXXXXXXXXXXXXXXXXXXXXXXXXXXXXXXXXXXXXXXXXXXXXXXXXXXXXXXXXXXXXXXXXXXXXXXXXXXXXXXXXXXXXXXXXXXXXXXXXXXXXRSLTCNGNDA

SEQ ID NO: 29780 - protein, 481 aa, Mycobacterium sp.
  misc_feature (359)..(462): Xaa can be any naturally occurring amino acid
MPKFEVPDGWTVQAFRFTLDPTEDQAKALARHFGARRKAYNWTVATLKADIQAWHASGTVTAKPSLRVLRKRWNTVKDDVCVNTETGVAWWPECSKEAYADGIAGAVEAYWNWQTSRAGKRAGKRVGFPRFKRKGRDQDRVSFTTGAMRVEPDRRHLTLPVIGTVRTHENTRRIERLIKAGRARVLAISVRRNGTRLDASVRVLVQRPQQPKVVHPGSRVGVDVGVRRLATVATADGTAIEQVENPRPLGAALRELRHVCRARSRCTKGSRRYRERTTQISRLHRRVNDVRTHHLHVLTTRLAQTHGRIVVEGLDATEMLRQKGLPGARARRRGLSDAALGTPRRHLSYKTVWYGSALXXXXXXXXXXXXXXXXXXXXXXXXXXXXXXXXXXXXXXXXXXXXXXXXXXXXXXXXXXXXXXXXXXXXXXXXXXXXXXXXXXXXXXXXXXXXXXXXXXXXXXXXKITHLQRSPRRCSSSASSP

SEQ ID NO: 29781 - protein, 303 aa, unknown
  TnpB Polypeptide
MVKKAVSVFKENMFAFLFFTLCYPAMYLEVQGNTLILPTGGGGSWGPKRYSNIVAHLTEEPPEQFREVAVSRDARGNYFCSFVYEQQEQQVAHDGIVTFDLGIKTLATGYTDQGRFYHIGGFKGYRWYNKQLDKIRSKRDRCKKKSRRYIHLSRVYKRVSEQKRNKQHDCLHKASHLIAGTLAERAVVIGDLSQQQMVMHKHENETPKERRKRHIRNRMVYNDWGLYSFVQMLTYKCLLYGKELYLISERDTSKTCHVCKQKQAMPLWKRTYRCENCGLVMDRDDNSAVNIYQRFVAGLPPHA

SEQ ID NO: 29782 - protein, 388 aa, Streptomyces sp.
MIVMKIVTQVKLMPEADQAAALLTTLRTVNDLACWVSEVAFVNDVPREYELRKHTYAHLKAEGLGAQAAQHVIKKVRDGYTTLHANLEAGNYGKPGSTHRTKVESKPIAFRPDAAQPYDDRCLSWQYEQQTVSIWTTAGRIKNVRFVCSAEALKTLQQYRKGEADLIERDGVLYLVATCEVPEAEQYEPDGFVGVDLGIVNIATTSTGYQAAGRGLNRYRKRQLALRATLQKKRTKSAKRRLKERSRREQRHAKNTNHVISKTIVTEAERTGRGLSLEELKGIRTRVRLRKPQRVALHSWAFAQLGEFIVYKAKRAGVPLVFVDPAYTSQTCAECGHVDKRNRVDQGLFICRGCGVVAHADRNASHNIATRGETVWNAGRESRVPATP

SEQ ID NO: 29783 - protein, 402 aa, Escherichia sp.
VKRLQAFKFQLRPGGQQECEMRRFAGACRFVFNRALARQNENHEAGNKYIPYGKMASWLVEWKNATETQWLKDSPSQPLQQSLKDLERAYKNFFRKRAAFPRFKKRGQNDAFRYPQGVKLDQENSRIFLPKLGWMRYRNSRQVTGVVKNVTVSQSCGKWYISIQTESEVSTPAHPSASMVGLDAGVAKLATLSDGTVFEPVNSFQKNQKTLARLQRQLSRKVKFSNNWQKQKRKIQRLHSCIANIRRDYLHKVTTAVSKNHAMIVIEDLKVSNMSKSAAGTVSQPGRNVRAKSGLNRSILDQGWYKMHRQLEYKQLWRGGQVLAVPPAYTSQRCAYCGHTAKENRLSQSKFRCQVCGYTANADVNGARNILAAGHAVLACGGMVQSGRPLKQEPTEMIQATA

SEQ ID NO: 29784 - protein, 411 aa, unknown
  TnpB Polypeptide
MRAYKFRIYPSKKQEKEMQRHLWLSKELWNEMLAFTKEIYNNYQRFPTKRTLREMVKQSGLFSQVGQELVDRLIDALHKKIEMKKKGEKGGFPRFKSLDRMKSLHYPQYETGFWLDEKLKVTPFGEIAIKKHREIKGRIKTLTVKRESSGKWFAVFCVDTPKEIPKENRGTAVGIDLGLKTFATLSNDEMIKNPRHLMKHEDRLAFIQRKFSKKKKRSKSRKRAKVRIARLHEKVADTRADFLHKISTELVNTYSFIASEKLASQEMAEENYGKQINDAGWNMFANMLAYKAEGAGCRVVFVDPRNTTQECSNCHEIVRKDLTERMHNCPFCGLSIDRDLNAARNILIRATGGHLGSNACNSFGSEMVQEALSVKQEARTLQGGSMSHGAIILHQIPIHKGCEGAHGLIKG

SEQ ID NO: 29785 - protein, 413 aa, unknown
  TnpB Polypeptide
MSRYVVRTYKVPVPLELYPLCSELNKTAARIYNKTMSLVKKIKRKKGFWLSQNTVQKYILRWADNIDIHTHSKQAILQEYFQALDSYFSAVKSKPDLRPPHKKKRFPPFIWKNTAIKLIPDGKLKLSMGRKQQPIIIQTSLPAGTIIRQAKLVYENGKYYLHLGIEVKIEEENRQPKTKVMSIDLGIIHPITCFDGSETIIYRGGILNSVLRCRNKKLAEFQKLLNRCKKGSKRYRKLSKAKKRMLTGTQNQIRDMLHKITSNFVGLCIQKSVGTIVVGDITNIRYGANGNDNYNQKLHQWQYRKIVNMITDKSKLHGIKVVSISEAYTSKRCPVCGSRNHPNNRNCKCQNCGFEYHRDGVGAINIYARYPGKKSQVVVKLAPARGVRFNPHLCGHGVSVSPSLGDWECQIIN

SEQ ID NO: 29786 - protein, 368 aa, unknown
  TnpB Polypeptide
MTTHTKTLKVRVKDKHTKQLSKMAASVNFVWNYCNEISSRIIRERGLFLSNYDFHQYTTGASKELGLHSQTVQCISKEYTTRRKQFKKSKLKWRKTFGVGRSLGWVPLNTGAAQWKNGQIFHHGKYYGVKDSYGLSQYKFRSGCFVEDARGRWYFCVVVSVEAKQSTATGSVGIDLGCKTTATTSDGDKLNGRHYRSMEKRLGIAQRARNKKRVRAIHAKIKNQRADGQHKFTRKLVNNNALIVVGNVSSSKLIKTTMAKSVLDAGWSQLKVMLEYKCQQAGVIFKEVNEAYTTQTCSCCGCISSNSPKGRAGLGIREWTCVECGTKHDRDINAAKNILALGHKRLAVGIPSKKLVECLVGEDVNNED

SEQ ID NO: 29787 - protein, 381 aa, unknown
  TnpB Polypeptide
MCNMAIKYRIYPDKKQSILFAKTFGCCRRVYNLMLSDRIESYKLTGRFEGRAPADFKKLEEYSYLKEVDSLALANVWTNLNSAFRNCFGKTRKKKTGFPKYKSKRHSRKSYTTNNQHGTVAIIDDRYIKLPKIGKVKAVIHRIPDSSWIIKSATISQEADGSYYASILFEFNDHVNAYVADVTNAVGLDYSSPNLYVDSNGDIGTNHKYFKESYKKLAKLQRKLSKKIGSRKGELKSHNFYKQLHKVNKIHSKIKHQRLDNLHNISTGIANRYDIVCVEDLNMKAMSNKGFKNGRSTMDNGYSLFLSMLEYKLAARGKMLVKVDRWYPSSQLCSCCGYRNTEVKDFKIREWACPACGVIHNRDVNAAVNILNEGLRMLGTA

SEQ ID NO: 29788 - protein, 310 aa, unknown
  TnpB Polypeptide
MNVVLTEQIKLTFTSEQDQIQADHAFSEVTRRYADACTYVSEYYFRDGCVDSFQSLHHLLYKDVRFMFGLKSQMSISVFKTVLARYKTVEEQVKHQTVSYSDENGTNYLFRKSLDWLQYPIHFRRPQADLVRGRDWGFLSGMAKVSVNTLSGRVKCMYECRKDSRLFDPSWKHGGAKLVFHESDKNWYLHISVNKVFPETDRSKIRAIDGHDRGLINLTTSYKEDGTVLYQDGQHVCKVKGRYTKTRASLQSKRTKGAKRVLRRISGRENRMMQDKDHCMSRNKRLKTFFRLQKMSLLNKFSQSVKKFQN

SEQ ID NO: 29789 - protein, 101 aa, Halomonas sp.
VIRAELVRQFDHKSPVVRTGFRLDRQGYPSSNLKRCFHCGHITDKMPLNVCTWNCPSCHTQGIDRDINAARNILQTVKAILVGVDKLRQHEQKITLGLTER

SEQ ID NO: 29790 - protein, 157 aa, Hydrocoleum sp.
LQSRKDKQGIKGLTKKQISITVNRNNKIRDYLNKVARYLINWCSKNRISTLVVGVNPAMKQNINLGKKTNQKFVQIPHHSLRLKLKAMCDRYGLIYKEQEESYTSKASFLDSDLIPVYNADNPTEYSFSGKRVKRCSAVLGVSPMSDCIKTAWFVQN

SEQ ID NO: 29791 - protein, 381 aa, Saccharomonospora sp.
MQLRYNFRVYPTPGQRIALAKAFGCARVVYNDALRVRQDAYEAGERLSDTDVQRRVVTEAKKTEVRAWLSEVASVALVQACQDARAAYRNWFDSMSGKRRGRRVGRPRFRSRKDNRQAIRLTRNGFSLRPNGRLYAAKIGDLDVRWSRDLPSAPSSVTLIKDAAGRYFASFVVNVGPEPLPETDSEVGIDLGLATFAVLSNGKTIESPKFLRRAERKLRKAQQNLSRKQRGSNNRAKARLRVSKAHAKVRDSRTDWAHKNTTALIRDNQAIYVEDLAVSGLARTKLAKSVHDAAWGTFLRMLDGKAVRYGRVVHRIDRWFPSSQTCSECGRVDSKKPLDVREWTCPCGTTHDRDLNAAKNILAAGRAERLNACGETVSLSA

SEQ ID NO: 29792 - protein, 484 aa, unknown
  TnpB Polypeptide
MPRHKKASISFIEACEEHYRLQYTVANTMPVCSLFDVINGNFVIPEKAKPNKKTSSRRAVKEDSTFMAYRFRGYPTKEQESMLKQNIGAGRFIWNRMLSDYNTLWKETGISYQITPADYKDVSGLEWLKDMDSSGLANVQLHLERARSDYFSGEKGKPHFKKKHVCVNSYTTNCTKNNIRIENGGVRLPKIKDPIKLSMHRPIADGGKLKNVTVTHEPDGKWYFSIAFEYPAKEMELSVGLQEFFATGDASSICRIGLDMSVPFLYVDSSGRRPSYTLNGHEIRFIKQYRKLEKRIAREQRRRSRMVKDSSNYTKQCEKIARLHAKAKHRRDDFLHQIAVRLVKAYDMIAIEDLDIAAMKKGLKLGKSVSDVGWGKFVQILEELCNKFGKLLIRTDRWYPSSKTCHHCGYIKDDLDINDRTYICPKCGHVMDRDKNAAINILEEGFRILNDNMIKPPYGAFTRASMTRPSVEGYIKPSLISTIA

SEQ ID NO: 29793 - protein, 357 aa, unknown
  TnpB Polypeptide
VNTIQLTVKLKLLPTEQQRVLLRETMREYISLINDILDYAIAIDELPRLTSATVHAALPSVLRAQCCRDIRSIYAKAKKHRGCKFPVLRKPVAIWNNQNYEILDGCIRLPLWVDGQCRRVSLKALVPDDALAALRNAKLGTLRVTEKNGKLIAQVAYEAQESAASGTKAMGVDLGILCPAVVVHEDGKTRFIGNGRQNRFVRRKHHARRKKLGKAKKLNAIRKSEDKEQRWMRDQDHKISRAIVNEAIANGVGIIKLETLSGIRGKTRKSLKNKYRCKSRKYNRSLSSWSFYRLASYIEYKARLAGIEAEYIDPAYTSQICPHCGCIHKAEGRSYACPHCGYRGHRDRVGAVNILAA

SEQ ID NO: 29794 - protein, 341 aa, Escherichia sp.
  misc_feature (25)..(25): Xaa can be any naturally occurring amino acid
  misc_feature (27)..(27): Xaa can be any naturally occurring amino acid
  misc_feature (29)..(29): Xaa can be any naturally occurring amino acid
  misc_feature (31)..(31): Xaa can be any naturally occurring amino acid
  misc_feature (34)..(34): Xaa can be any naturally occurring amino acid
  misc_feature (46)..(46): Xaa can be any naturally occurring amino acid
  misc_feature (304)..(304): Xaa can be any naturally occurring amino acid
VENSPEMQWLKDAPSQPLQQSLKDXEXAXKXFFXKRAAFPRFKKRXQNDAFRYPQGVKLDQENSRIFLPKLGWMRYRNSRQVTGVVKNVTVSQSCGKWYISIQTESEVSTPVHPSASMVGLDAGVAKLATLSDGTVFEPVNSFQKKQKTLARLQRQLSRKVEFSNNWQKQKRKIQRLHSRIANIRRDYLHKVTTTVSKNHAMIVIEDLKVSNMSKSAAGTVSQPGRNVRAKSGLNRSVLDQGWYEMRRQLEYKQLWRGGQVLAVPPAYTSQRCACCGHTAKENRLSQSQFRCQVCGYTANADVXGARNILAAGHAVLACGEMVQSGRPLKQEPTEMIQATA

SEQ ID NO: 29795 - protein, 409 aa, Natronomonas sp.
MNYNYRYRLNPSDDLRERLAWTVDTCRQVYNHFLHRLNRHDDTSSYSEQKRLPDLKDWWADLRDVHSKVLQKVVQRLYDNLSTLKGRKQNGYSVGELKWKAPGEYQSFTYSQSGFKLKNTSGRTRLWLSKIGDIPITFHRDLPEGATIKTVTVKREPTGKWSAILGVETPDDPPEKPDEVTDAVGIDVGILKYVHDSDGTAVESPDLSDERERLERAQANLSRKEHGSNNWEEQRKTVARRHADLKRKRRDFLHKLSAYYAREYDLVAVEDLDAKGLVELPGNSRNRAGASWGTFLRMLEYKCEREGTHFVAVDPRGTTKECASCGVETDKPLWVREHSCPSCGFEADRDANASWNIRSRGLEQVGTGCPESTPVETALPTDTDSVSAKRVVEAGSPTLKKRTASAVSE

SEQ ID NO: 29796 - protein, 396 aa, Chloracidobacterium sp.
MAKDNLAIKTFEYKLRMNRKFQLACKRELEHSRQIYNAALAERIDCYKVTGKGLNFIEQSRHLTEARTLPEVKSHLRTIQSDALERVEAAYQAFFRRVKEGSAAPGFPRFKGFDRYHTFSLKLEAVRPCPIKGNKLTVPGVGSCRVRLSRPLEGKVKQMRITRRADGWYVLLVSEIPKPEPLTATGESAGIDVGIKSFAVLSTGEEIENPRCIGKAEKELKKQQRRLARKKRGSRNRGKARQKVQLAHLKVARTRKDFHHKASTYIVRRFDAIAVEDLNIFGMLKNPKLAKAIVDVAWSAFFTMIEVKAENAGRRFEKVPARFTSQDCSQCGHRQKMALAIRVYQCPSCGLVIDRDHNAAINISSRAGQQARINACGESPGSVKQERHRLNRPEAL

SEQ ID NO: 29797 - protein, 496 aa, unknown
  TnpB Polypeptide
  misc_feature (394)..(399): Xaa can be any naturally occurring amino acid
MHQENTMLPRRISVSLFIDQSIIWPVKRLQAFKFQLRPGGQQEREMRRFAGACRFVFNRALALQNENHEAGNKYIPYGKMASWLVEWKNATETQWLKDSPSQPLQQSLKGLERAYKNFFRKRAAFPRFKKRGQNDAFRYPQGVKLDQENSRIFLPKLGWMRYRNSRQVTGVVKNVTVSQSCGKWYISIQTESEVSTPVHPSASMVGLDAGVAKLATLSDGTVFEPVNSFQKNQKTLARLQRQLSRRVKFSNNWQKQKRKIQRLHSRIANIRRDYLHKVTTTVSKNHAMIVIEDLKVSNMSKSAAGTVSQPGRNVRAKSGLNRSILDQGWYEMRRQLEYKQLWRGGQVLAVPPAYTSQRCACCGHTAKENRLSQSKFRCQVCGYTANADVNGARXXXXXXRSCLWRDGAVRPLVEAGTHRNDSGDSLNEAGIHVLQGVEDVNISVWFPPRHWKPDVRSSKRQSLAGFWLTLHLPRTNKTAIRLAGKQDLLIIPRING

SEQ ID NO: 29798 - protein, 413 aa, Dictyobacter sp.
MLLCTKIRLEVSDQDAATLEFMQGKCRGLYNWWVMRLRDGEKWNLYEAKKSLQESKQHDPELRQVYGKLLHEVYFRLDGAMQAFFRRVKAGETPGFPRVRPRHSFFTLCYPAMYIKIEGKVIILPTGGKGKKKHYPNVQARFTEEPPPNFKEVAISRDARGNYSASFVAEQPEETCNTDGVVAFDLGIKTLATGVNTDGTFYHVGGFKGGQWYNRQLDKIRSKRDKCKKKSRRYKHLSKVYKRVSQKKRDKQRDSLHKASHLVARRMVERTVVVGNLSQRQMVMKQHVERKKYLNRAVFNDWGLSTFIEMLKYKCSLYGKELHFIDERNTSKMCSGCEHLQAMPLWKRTYCCVECGLVMDRDDNSAVNILTRFLAGLPPHTPIVECGVLQADQNSVEVKEASCPVQVQQLSMF

SEQ ID NO: 29799 - protein, 313 aa, Enterococcus sp.
MKVLKAYKFRLYPTEEQQRFFIETFGCVRFTYNMILMHRQLGGEKSEKLTPAKLKKQYPFLKKTDSLALANTQKNLERAFTNFFQGRAGYPKLKSKKSPSQSYTTNNQQHTIYLKEGKLKLPKLKTLVAVDVHRPINGVIKSATISARNNRDFYVSILCREEIQSLPATGKSVEISYCPEQLAELSADVSIEPFCQAELARKTAKAERKLKCRWKSAKRRKVKLAEAKNYQKQKQKVQQLYEQQLNQKKAYIDELSIRLMRDFDLIYVEAEPQIDDTNDFTNADWARFTQKLKYKADWYGKKVIIAAPSSSKG

SEQ ID NO: 29800 - protein, 393 aa, unknown
  TnpB Polypeptide
MLKTYKYRLYPTKSQISKLENTFSICRALYNYALEHRIGEYQRKGKTVSYYEQSASLPEIKKEFPWYKSVNAVVLQNVLKRLDTAYQNFFRRTKNNNIKSNEKGYPKFKKRGQWNSILYSDKNKIKYPTNKLIVPSIGEIKIILHRPINGTIKNMSIIKEANNWYVSFSVELNTITTELNVNTSKAVGIDVGLIDYYYDSNGNSLKAPRLLRIAEKNLKRLQRKLSKCKKQSKEFFDTLKALKTSYSKVKYKRLDFLYKTVYKLFSDNDLIVREDLNLKTLIKRAKPKLSDDGKTYLRNNANAKSGLNKSFCDASFGNFFNILDEVSIKLGKMIVKVNPAYTSQDCSGCGNRIKKSLSTRTHICNECSLTLNRDLNASINILRLGLQSLGENP

SEQ ID NO: 29801 - protein, 448 aa, Acidiplasma sp.
MIEARKNKIKDSLNKTKIKRKSQSAVIIKAKLDSDKLNTSTLRILRRIFLEAKWLYNYIINKEFNNDIFNMDYKVNKVPVYVKDHYEIRDLKYLSSQMREEIIDRTMDNIKGLSKLKEKGYKIGKLKFKKYITSIPLKQYNNTYKIINNNYIKIQGIKQKLKVNGLYNLNILEPANALLINKNNNYYIYITAYKNKYILDKPINNQKIVSVDLGIKNQLTLSNGLIINYGIPKSKREKRIQRRLSKKIKNSNNYYKLKNKLNIEQTKTVNRRKDTVNKIAHYLSSNYDIIITQDDNINSWKHLFGKRTESTNMGGIKEALKHKASTFILLDRFLPTTKECSKCHNKYNINLNDRIYKCPNCGFIINRDYNSTLNDLYYGIIKINELLRNKYNKLKRYFNELNLNINVPVDHREFTPVETFTSVPEGINISPYVRISVVNESGSLIALA

SEQ ID NO: 29802 - protein, 381 aa, unknown
  TnpB Polypeptide
VWFVRAVKAVWQRYTPTLELPWLLEQFRQMLNDCIRIGLETNATSLKTLSLKAYKQLKGYKVPSCYKLCAISRATGILRNYRRAKRKGKVKEPYAKRLQLISCYGLKIKDGVLLLPFKSKQPIQIPLNQRTQRVLSEPGLAVRSVTLTADRLVIAYAKEVAEIQLKGLIGIDRNLDNLTLANSSGRVERFNLANITEIKSKYRAVKARFTRNDVLVRKRIFGKYGAKERNKVQHILHNVSKHIIEDAKVNQLGIVMENLKGIRKLYRRGNGQGRFYRGRMNSWSLHELQQQIEYKAKWEGLPVIYVKPHGTTSKCSICGRRLKPEENRTMKCQNCGLTIDRDVNAARNILALGLRFRPAAQPLEAMVAELQPERNPQSRWL

SEQ ID NO: 29803 - protein, 413 aa, Streptomyces sp.
MCCRLTVIGMQLRYQFRVYPTPGQALRARRVFGCRRVVWNDALSVVKPRKASNKLLGNPEQRIAEGPYQQIPKNPDLSKTLITGAKKTQERAFLSDAPVGVLQQTLRDFDKAWTAHEDSKTGKRKGPKAAPPRFKSRKDNRQTARFTRSDRWSILRDGTLRLPKIGDIEVKWTRDLPSAPSSVTLIKDRADRYFVSFVVESDPAADILPPADGDQGIDLGLTRFAVLADGSHIASPRYLRRAEKKLKKRQRELSRKKKGSNNRDKARIKVARAHAAVADARRNFHHQWSHKLTRENQAVYAENLNVRGLARTRLAKSVHDAGWAQFVSFLNYKATRRGRSFAKVDRHFPSTQICSGCGHRDGPKPLNVRTWTCPNCETWHDRDWNAGKNVRYEGRRIVAAAEPPTPGPGARRR

SEQ ID NO: 29804 - protein, 406 aa, Streptomyces sp.
MQLRYSFRLYPNGPQRSALAQAFGCARVVYNDALRARETARAAGEAFPKTGELSKLLITEAKKTDERAWLGDVSAVVLQQSLRDLDTAYRNFFDGLGGRRPRMGTPRFKSRKDNRQAVRFTANARWKITAGGALSFPKIGDVRVKWSRSLPSVPSTVTVVKDAAGRYFASFVVETAPDETLPGTDAVVGIDLGLTHFAILSDGTKIDAPRFLRRAEKKLKKAQRNLSRKAKGSNNRDKARIKVARAHARVADARREFHHQLSTKVIRENQAVAVEDLAVKGLARTRLAKSVHDAGWASFVAMLEYKAALYGRTFIRIGRFEPTSQVCCACGTKDGPRPLHVRVWECRGCGTVLDRDINAAVNVAKAAGLAVSACGARVRPVRVPAQRVEAGTHRDGRPTVVGIPGL

SEQ ID NO: 29805 - protein, 421 aa, Streptomyces sp.
MVKRQFGHRARLALTPAQARLVDDQAHAARGMWNLLHEWWQMLPKHQRSPVAADAAIRQARKEIDWLGVLPAQAAQTVLKTYLVAWRNCWDGRTREPAFKTRSRLVLSVDIPQGRDLHVSRVHRRWGMVNIPRIGRVRFRWTKDLPVGKWANQENRITGARLVKDALGWHITFRVTTLEAAPALHQGSEVGIDVGVSVPIALSDGSVYTHGSWLTEEEQSSLLRLERRAAHRRASRKQGEKISGRLHRTYDRIQGLRARAKRRHLDWQHKTTTEIARKYGIVVVEALTIPNMVKSAKGTMDRPGKNVAQKSGLNRSIYAEAWGRTIRLLTYKTALAGGSLHEVPAPGTSQRCSACGHITPGSRESQAVFVCKNPDCGWTGNADHNAGRNVLHLYRMGLALVPAAGRAVVRRACRVKPATVR

SEQ ID NO: 29806 - protein, 415 aa, Streptomyces sp.
VKGKRVRRAFKFRFYPTDAQAAELSRTFGCVRKVYNLALQARTEAWSQRCERVNYVQTSAMLTNWKKAEGLAYLSEVSSVPLQQALRHLQGAFVNFWEGRAKYPRFKSRKKSRATAEYTRSAFRWRDGRLTLAKLSEPLRIVWSRALPPGAEPSTVTVSRDGVGRWFVSLLVEDPEVRPLPPADSPAVALDVGLTTLATLSTGEKIANPKYERRDRKRLARAQRKLARKQSGSRNRQKAQLKVARVHAKISDRRRDYLHKLTTRLVRENQMIVIEDLNVRGMLKNRSLARAISDASWSELRAMLGYKCHWYGRRLVVINQWYPSSKTCSNCGYVLAKLSLGVRHWTCPGCGTTHDRDENGAKNLLAAGLAVTACGAGARPRRERSRTGRPALKQEAKRVTAGDFSDYRCGGIGVN

SEQ ID NO: 29807 - protein, 389 aa, Streptomyces sp.
MKLVVRVKLLPTPSQASALEVTLRTCNEAANWLSIRAFEHGRTSRSALQVLAYTGLKARGLSAQPSLHVLRKVADAYTTLKANLRAGNLGRRGSRRYTKATSKPVAFRPGAAQPFDDRCLSWQLNNRTVSIWTTAGRMKDVTFTGQAEQLATLAAYRKGESELVHKDGDWYLHAVCEIPEADVNRMPDGFVGVDLGIINIATTSTGTRHSGRHLNRRREADRTLRTKLQRKGTKSAKRRARRHAGKEARRARDINHKISKCIVAEAERTGRGIALEDLSGIRERVRLRKPQRATLHSWPFHQLSTFIAYKAKRAGVPVVYVDPAYTSQECSRCHHIDRRNRPSQAVFACRACGFVEHADLNSSHNIAARGWWLWVRGAESQAPALTLTA

SEQ ID NO: 29808 - protein, 386 aa, Streptomyces sp.
MKLVVQVRLMPDAVQAPALERTLRTVNQCANRISERSFECYGLRGSVRDLRSVWYRELKARGLGAQAAQHVIKRVVDTYAALRANVRVGNLGKDGSERRRKAESKPIVFRADAAHTFDDRCLSWNYAQRTVSIWTMDGRVKSLRFVCSQGALKQLADFRRGESDLVHRDGKWFLVATIDLPEPEVFDPKGFIGVDRGISNLATTSDGANYSGRRLNRYRRWQARKKAELQAKRTRSSVRRLKKRARREARHATHINHRISKDIVAVAQRTGRGISVEELAGIRERVTVRRDQRATLSSWPFRQLGSFLEYKARRAGVPFVEVDPAHTSQRCPRCGHTERANRPIRDHFHCRRCGLAGPADHVAGVNIAKRGALAWGFVNSPAPDPA

SEQ ID NO: 29809 - protein, 473 aa, Streptomyces sp.
LTGKSSARWAGSITKATHDQWALARRGQVSHLVRLRGQIASIEARLARPLGAKADKRQGIPRGYACRAEWHAKSRRLSVLEDRLARLEADWAAGRVRVVRGGKRLARLRHHLDEAGLDERAWRERWEAARMFLAADGESGKRCGNETIRITDTGQVSIRLPAPLAHLANAPHGRYVLDATVAFPHRDREWLDRITANRAVAYRIHYDTMRGRWYVTASWQRAPAPVLPLEAALARGVVGVDMNDDHLAAWSLDLHGNPVGEPRRFFYDLTGPTAHRDAQIRHALTRLLHYARRCGAAAIAIEDLDFTDGRTREKSGRNKRFRRLISRFPTALLKARLVAMAAEQDMAIVVVDPAYTSRWGAQHWQKPLATPTRKTTRHDAAAVAIGRRALGHPIRRRTAPPPHDRRDRAGHRTAQARPDTRRREETRPRIPGPRTRCVLPGCGANAGDQCAQHRSGHAAEQQSWHQDPLPLSL

SEQ ID NO: 29810 - protein, 360 aa, Richelia sp.
MLLSIKTKLNLTPDQKIIMSKHAGIARFTYNWGLAIWNDMYKSGLNPNKFILKKFFNNHVKPEYRWIKEKGICQKITQYAFDNLGKAFDRYFKKLGERPTFKKKGKHDSFTIDASGKPINIGGTRIKLPSIGWVKIYEGLPHRTTKSITISRTANDWFIAFAYEVDCQPSKKEFDVVGVDLGVKVLASLSTGVSFPNPRNYKKQLSKLQRLSKQLARKEKGSNNRYKAKNKLAKLQAHIASLRKDILHKITTYLCKNHAKIVVEDLNVSGMVKNKKLSQSISDCGFYEFRRQLEYKCKKFGSKLIIADRFYPSSKTCSNCGQKKEVITLSERIFECDNCGFSLDRDLNAAINLMALGCSV

SEQ ID NO: 29811 - protein, 381 aa, Bacillus sp.
MTTENQINYKTLQIWIKKGHRMYSYFQESCQNAKNMYNTTNFYIRQVYTGLTQDKELQPLQKEVLDTIDKNIGKMNDTQLLTYQKKLEKEKTKPKEKQKEVKCNLFSAPTTKKPYVDYNFLDALFKVMIQNDYRTLPTQSSQSIMKNVFQNWKSFFASLKDHKKNPNKYTGRPRIPKYICSSEKEILYTNQDCVIKNDKFLKFPKTKLQLNIGKLGFTEGKLKQVRVIPKYNEYVVELVVDVPSEQQSVEENGRYMSIDLGIDNLATIVTNTGMKPVLVKGKHIKSINQYYNKMKSHFTSVLRKGKQTKEGSFTSKRIEKLHQKRYLKIKDIFHKASHHIVKLAQEEEVCKIVIGQNKSWKQETNMGKRNNQIFCHIPHSL

SEQ ID NO: 29812 - protein, 435 aa, Salinigranum sp.
MPMEVIRTVKVKLDVPTERCDDLHQTKDQFLYCANTAAAWAWRYPNDCCVTSREKAESALYGRLREETDYLHANLVQKGIRRAIEAVTSGVARLEKGENTSQPHFDAWSVVYDKRSATFHRDRVSLSTVNGRVECEYVLPGNAEGTPIGEYLLNEHYEFRTSTLQYDRRTKSFYLHARMRRTTDEQGQSTASREDAKHRTVLGVDLNVDGSLAVTSTGAFIGNADEMNHRRREFEKTRGSMQQAGTRSAHLSSQSIQDREHRWMQDELHRVSNRILDEARDYECTHIAFENLTDIRTRMAGVKRLHAWAFRRLFEYVEYKTEMVGIEVEQVNPAYTSQRCSSCGFTHETNRRSKHQFVCQTCGYELNADYNASKNIARKLLKRLHSRQTSSSGGAPCQCALTSGTLTLNGEFHASVNSTAEGESTDKPTKSAVGN

SEQ ID NO: 29813 - protein, 243 aa, unknown
  TnpB Polypeptide
MYLTVKQQVKHLSKEDYRSIKELCHIAKNLTNQAIYNIRQHYFAEGKYLNYEKNYALLKSSDNYRTLNSNMAQQILKEVDGSFKSFFGLLKKAKQGKHALKDCRLPRYLPSDGYTTLVIGFVRLKGNKLILPYSNSFKKTHKAVEITIPPILLDKKVKEIRIIPKADARFFEIQYIYEAECIQRNLNTTNAPALDLGINNLVTAVSNRGETFIIDGRRLKSINQWFNKENARSQSIKEQADLR

SEQ ID NO: 29814 - protein, 556 aa, unknown
  TnpB Polypeptide
MLINWKKRMVTLIMISKIIRVFQIAFPPFLKTRYDFLQAELDRIINDPVFRPQIDQLDPDEFYLAEYYRELKRICQRIDQTDWKIGDYIINNPAWHWRILAENIRSTMSSLTLRRKIYSILEKYDFVLTKDCQLELETLKNKFYFSPFVIENIQRSKSWPSMPTHIGFKLDYAFSSEQMFKMSDDYLCSFQNEDKTWTDVQLIVPGTVREEFTGKLLKPVFIKRSDGQYIGHARYCIEPKFNSNAKNILGVDIGDVKPYSAVILYPNKTVSSELLPSRQVFKLSKKISQLLSIIKETSEKVKRVNAYITDDIWVRPETILKQENRIDYKNNVRSKITHLKETLVTQEAHELVALAWENNCKEIHIENLKWAKDLRTYWNFAEFRRRLEEIAEVYGIKVVLVNPAYTSVTHPITGEHGQKKNRDIHFSTGEVFDRDYLAAINIARSKSKGLKYKPLVVKSYKHKSHISKMYKVDNNNSRKGRIRKRILTIYNDCLTNKNKVPQTVVYLPIFDVTDNVTTKLVLMSYMTKQQSYALCQKQCDGYSLTGYPFNTVFGGI

SEQ ID NO: 29815 - protein, 343 aa, Marine sp.
MELKEEEPWLYEHHSKMLQMVAVQVDGAQKGLLQLRKNGHNTGPLKFAKFLEYNTFTYNQSGFQVGNGFLYLSKIGKIKLKQHRQISENSEIKQVTVTKSKSGKWYACITYEIDVVIPTLSFQKSVGIDIGVKNFAYDSDGFVTPNPLNLQKMLKPLRRIQRKISRRQPGSNNRKKALKWYQIIHERIKNRRKDFLHKVSTQYARKYDVIFVERLAKLNMVKNHRMARSIMDSGWGIFTNMLDYKVMTMEVSAKNTTLKCSGCCSAVPKSLAVRTHRCDECGLILDRDHNAAINILKKGLDLFGITLDCGRQNDQLPQELRELTPVEISKRSRKQEASRFAEG

SEQ ID NO: 29816 - protein, 417 aa, Salinarchaeum sp.
MNYNYRYRIEPTDVVEAELARHIDTCRQLYNHFLYELRNTDEYLSYTAMQNMLPDLKDWWDDLNDVYSKVLQLVARRVSDNLDRLKDQKANGRNVGMLKWKPPREYRSLTYNQSGFELKNTSDQPLLSLSKMGEMPIHLHRDIPDNALVKQVTVKQEQTGEWYAIFGIETETDAPKKPALDEVDRDEMVGIDVGIIKYAHDTDSTMVGSLDLEDEYERLAREQRALSRKQEGSQNWHEQRRRVARIHARIVRKRRDFLHKLSNYYAREYDLVTVEDLNVHGMMQLPSNSQNRASASWRTFVDFLVYKCERAGTHFVKVEPKGTTQACAECGVEVEKGLWVRGHSCPTCGFETDRDENAAYNVLQRGHQELGLGHADVTPAETALPTSTTGDSSTVVDAKCVVETGSPTSRTSRVSGE

SEQ ID NO: 29817 - protein, 416 aa, Mitsuokella sp.
MLRGYKYRIYPTEEQQVLLAKHFGCVRFVYNWALDTKSRAWKEEHRNVTRLQLQTLLASELKVNNAWLSEVNSQSLQFAIKQMDDSYQNFFKKNANFPNFKKKFGVQRCNFPQNNRADFLHGLLEIMKFRGKNAIRCRFHRRFSGELKRVTIIKECDGRYYATCLVEDSFTPLPQKKVLRETAIGIDTGLTHFATLSTGEKIASPKMSKNASLRLARLQRSLSRKKKGSSNYAKAKLRIARLYSKVAHRRSDFLHKLTYRLTHENQVSCICVEDLNVKGMMKNHHLAYSIADAGIGEFYRQLAYKCEWYGVAYRVIDRFAPSSKLCHHCGHRMNKMPLSVRKWTCPECGTHHDRDINAAQNIKELGLMALPVQRGEVNPVEKPPVDYRATRHLRSDAPVKQEKSVRTISQAAKSLA

SEQ ID NO: 29818 - protein, 374 aa, Bacillus sp.
MMFLTKKIRLKPDEYQEKQLWKSAGTARWVYNWTLARQNENYKQGNKFLSDNVLRKEITQLRKQEDFKWLNDVSDNVAKQAVKDACNAYKNFFKDLSKYPKFKSKKKNKPSFYNDNVKLKVKNYLVLIEKVGWVKTSEQLPMNVKYNNPRITFDGKYWYISVGMEQEIDEIELNSHVVGIDLGIKALAVCSDGKVFKNINKTVEVKKIEKRLRRLQRRVSRKYEINKEGSRFVKTSNIIKTEKQIRLLHRRLSNIRRNHLHQTTNAIVKTKPCKVVMEDLNVQGMMKNRHLAKSVVKQGFCEFTRQLEYKCGNYGIEFVKVDRFFPSSKTCSSCGKMKHDLKLSDRVYRCECGNEIDRDLNAAINLANYDKLTA

SEQ ID NO: 29819 - protein, 391 aa, unknown
  TnpB Polypeptide
VRRAYVFRLRPTARQHVVLAACAESHRELYNAALQERRDAWAHKTRISYGDQSAQLTEMRSVRPDQAVWSFSSQQATLRRLDKAFAGFFRRVKRGQKAGYPRFKATARFDSVEWPKDGDGARWLPERRRVYLKGVGEVKVNLHRQVEGQVKTIQIKRQGRHWLLVLSCDDVPTRPLPATGRQAGVDVGIVSFATMSDGERVANPRWGRVAGRGLASAQQRLARANRGSNNRERKRETVAARHRKISNQRKDFHHKQARALVERYDLLVVEDLQIVNMVRRAKPVPDPDNPGQYLANGARAKTGLSRSFSDAGWGRFVSILRAKAEEAGRIWIEVDPRHTSDRCEHCGHADSRNRVTQAVFECQRCSHRAHADEHAARNLLRAGLALHAQAA

SEQ ID NO: 29820 - protein, 429 aa, unknown
  TnpB Polypeptide
VKVCQAYRFALDPSPVQQRALVSHAGAARFAWNWGLARCQERYEAEGKWYSAAELHKLWNAQKKADPGLAWWGMNSKCAYQEAFRDLDRALREFIMSKNGQRAGRRLGFPRLKKRGRCRDSFRLTGVLRCAGRNVTLPRLGTIGTCESTRKLARRLDNRSARILSATVSRTAQRWLVSFTVEVDRDVPDRHARPGSAAGIDLGVTRLLTGVDDTGTVISVAGPRPLRASLRRLRRASRAHSRKQPGSANRRKSAARLARVHARVANVRADALHKATTSLAARYETVVAEDLNVAGMTRNRTLARAISDQGFGRARRMLAYKTRWHGGKLLVADRWYPSSKTCSGCGAVKAKLALSERVYRCGQCGLVLDRDVNAARNLLHLAVSGTERLTACGGSVRPVPDGQRPLNQEPGTAHAGKTRTAARQQAAAA

SEQ ID NO: 29821 - protein, 546 aa, unknown
  TnpB Polypeptide
MAEKIKQLKTFSLHEKNMKYVVMMKKAVLRYKHLENMLNIILGKEVESIFALPKEKRDFSFFNLLTNSIIMKAVISGNSGGEKTQESIKKCKSFLSENHNDIYQQLLSEGQQLNDKNISQIVTRLAKDWKNSFKKLSLYYANSRKFTGKPEIPKPKKLSKIFNYSVPLEVSKFSLKKKNRLGINIWKKMEYVFFRDNDYIKDKRINNVTVALSHGHIYYQISYESKNEPKKNKQQSNEKGQSSERKKIAGLDIGVYHLFSLFVNDRNTASVVYRNTKMIHYNCSFNKHMAKLNKELTKHVAEYRNITKKDGSVSLVPEKYTSYGHHIKKQMSNMFNARNLFMQGEMNKLSSALLSYLKSNGVSDLVISKNLSFAKIKGTIKQHKKTKQKFYQIPFGRLLNLLEEKSIKYDVKITDIDESYTSKTSSLTADVNKVKQMALIKEPIIPAELNGVRGVKRGKITRGLFRDNVLNTVINADINAAVNHIKVAFPDLICAKRLLENRIKLNNPKKIKSANEFSFFVKENSVSKKKEVDVESQPALYVHNLI

SEQ ID NO: 29822 - protein, 311 aa, Mycobacterium sp.
VWNPARRHLPLPVIGTVRTHENTRRIERLIKAGRARVLAISVRRNGTRLDASVRVLVQRPQQPKVVHPGSRVGVDVGVRRLATVATADGTAIEQVENPRPLGAALRELRHVCRARSRCTKGSRRYRERTTQISRLHRRVNDVRTHHLHVLTTRLAQTHGRIVVEGLDATEMLRQKGLPGARARRRGLSDAALGTPRRHLSYKTVWYGSALVVADRWFPSSKTCHACRHVQDIGWGEQWQCDRCSVVHQRDDCAAINLARYEETSSVVGPVGAAVKRGADRKTGPRPAGGCEARKGGSRMAAEKTRDGVQVA

SEQ ID NO: 29823 - protein, 488 aa, Acidimicrobiaceae sp.
MDATLHVSSYAPLNVTSEVNDETVTSRRNGAPLSHTDQVLSRAVTFQFTLDPNAEQMVLFAKCAGARRFTVNHHLARVKANLDARSGERESLSEGGDSCEPSTPSLSWSGFTFINEFNAWKNGESEDSPVNEDGSCGLVWRHELPNDVFECASVDAARALENFSASRRGKRGGTPVGFPHFQAKGKVTPSFRLRNRATPGMAPSSQPIRFTDSSHLRLPKFGPVKICGPTRKVRRMINAGRFHIYSATLTERAGRWTGSLTGVAAELHQTERSRTNRHAVPVGVDRGITSLAVAADANGVPSESFEGVKTLKQAQASLKAANQALSRTTPGSKGRQRARSRLAKRHRKVANTRRHLVHQASKTLVDRCQVLVIEDLNVAGMVRNRHLARSISDAAMGELSRQILYKARWHEVEVRVSDRFYPSSKKCSGCGEIRNELDLSTRTYSCGICSLVIDRDLNAAINLARWQPIEPSVEQFPTPTCAPLLSTA

SEQ ID NO: 29824 - protein, 457 aa, Massilia sp.
VPGKAGRSGHHQPGRRHQFRRRAGQRCARDRHCLLGPSLWKPQSPQPEVDRWRACSSQGVAMYLAHRIRLDPNNVQATYLARAAGTARFAYNWALVEWKRQYEASKVDPEVDKPHEAALRRQLNAIKREQFPWMLEVTKNAPQMAIIQLGRAFANFFKGRARYPAFRRKGRDDRFTLSNEQFRIEEKRIHIPILGWVRMHEFLRFSGRIVSASISRIAGHWYASITVDIKDRPQPPAETQGAVGVDLGVSALATLSTGDVFIGPKALGTLLARLQCLSREVSRKVKGSRNRAKAKARLARLYARIADLRRNGLHQLSTYITRRFHTIGIEDLNVKGMLGNRCLARAIADMGFGELRRQLEYKAARRGGQVVVVDRWYPSSKTCSCCGYRMGVLALTVRHWRCPGCGALHDRDVNAAINLRNMAVSFTASACGGAGAGLARQVRGETGPCEAGIQQQS

SEQ ID NO: 29825 - protein, 649 aa, Acidimicrobiaceae sp.
MTGAIAEEYLTRAVVFPIDPTPAQERLLQSDCGAARFAHNWALGQVKGNLTTRTGERESGIAEADLTPSQSWSAFSQSKAWNAAKDEVAPWWKEVSKHAFQSGVTAAAAGLDNFRSSKKGTRKGRPVGFPRFKSRDRSKLSVTFTEINHQGSWFEDPDVLAGRVSPNGHRIRLMLPQSTPDRDVQRRRAILAWIHTTESTRRLAKKVADGTATIQKVTISYVGGHWQAAVLVRYLVRCLVRPVARHGAPGQSGTTTAIGVDAGITHLATLSRPVPGLTDEHGHIANPRVLEKQLGRLAKVDHRLARCQKGSKNRTKVTQRRARLHGAIAKTRALELHRVSNALTNQFDVIAIEDLHVKGMATKKRHLGRSLADVSLAELRRQLTYKISDRGTTLVVVGRFYPSSKTCSACGAVRAKLPLAVRVFECSTCGTSLDRDINASLNIEAEGRRLLEAKLESVQPMPSPHDVAGLRPETKNADPRTEKTGMRSLSRETRGCIRFGGPVRMCLFHYIHLTKLANLALDFGQHLCRVPVGLDVVPGTDDGAVGSDQEGRADDADHLLAVHGLLAPGSEGLACGMVGIGQQGDLQAVLLPELAVLLGGVSRHTEDRDLRLVEGGQVLVELTSLLGAARSVVPRVEVDDELAAGEVRQ

SEQ ID NO: 29826 - protein, 152 aa, unknown
  TnpB Polypeptide
LAKVKNEQQVRGSRKRRKAKKVVSRIHERIRNRRHDFVHQTARKIVNRYGVIAVEKLNVKGMVKNHCLAKSISDASWSMFRNVLSQKAARAARTYAEVNPAYTSMTCSGCGHIERKTLAQRQHDCPMCGLSLDRDTNAAINILSVGQYRVAA

SEQ ID NO: 29827 - protein, 390 aa, unknown
  TnpB Polypeptide
VIKSIKVRLRPNNKQLTKLFQYANCARFAYNWAINRERENHDSGNKFLSDNDLRKDFTRLKKREDYKWLNHVSSNVPKQAIKDACSTYKRFFKGHCRYPKFKSKRRSKASFYQDTIKIQFTDTHVKVEGFSMSKRRNKQKLNWIRLCEKGRIPTDCKYMNPRFTYDGLYWYVSVSIEVPDTTDITTNDGVGIDLGIKDLAICSDGNRYPNINKTQRVKKLEKRKRRLQRSVSRKYNMNKRGESYKKTSNIIKREKELLKLSRRLTNIRRNHLHQTTSEIIKRKPSFICIEDLNVRGMMKNKHLSKAIQQQGFYEFRRQIQYKSEWNNIQVIIADRFFPSSKICSCCGEIRKDLKLSDRIYRCDCGNVIDRDFQASLNLKQYGENVLKQNL

SEQ ID NO: 29828 - protein, 408 aa, unknown
  TnpB Polypeptide
MSDIMILCERHLIKSTHPFYDECDKLTFLAKNLYNSTLHYQRDSFFQRDFKSYYDVNRVFTHSNHKDYRALPAKVSKGVQQLVDKSFKSYFALVKKKIAGDYSPKVRIPKYLNKTSGRCVVPYSKDALSLKNEGFVKLSKTDIVIKTKLSRSDIKAARIVPKGNHFVIEILYKATVKPLKSEIPTRVAFIDPGLNNLLTITSNCFNPILYNGKPLKSINQLSNKNIATLKSKLSEHGLRNSSLMKSIYSKRSRRLTDLTHKITTQLVNQLDSYNIDTVIFGHNIGQKQDINLGKVTNQNFVQIPFTQIMKLLKYKCELRGVRFITIEESYTSKCSFLDNEEIKKQSNYQGRRLRRGLFETSSGTLINADVNGSLNIGRKYLTKVNMYTKELHEDLVKFMVNPKVVTIR

SEQ ID NO: 29829 - protein, 390 aa, unknown
  TnpB Polypeptide
LYPNKSQEDLLQKHFGHCRFIYNHFLAVKIKHYKETKKTITWVDLANRLPALKTEFDWLSEAGSQSLQQSIRNLDNAYTAFFRSGAGFPKFKSKHKSRKSFIVPQTNNNIKLDYTSNKLTIPKFLKLKTKDNRIKCIFHREIPNDEAIKQATVSQDKDGKYYVSILVEVNKSFPTKPDRNRNNAIGIDFGVKTFLTLSNGDKIENPKYLKQSQDKLAKHQSDLELLDKDTTKCKSKREQITKLYSKITKQREDFLDKLSFQLTNDNQISSIAIEDLSIKDMQQSNYSPTNRIINDYAWGMFVNMLQYKSDWYGKNIIKIGRFEPSSKTCSICGNVNRQLKLENREWKCVKCNVQHDRDINAANNILDFAFPNMYFKKGRNCPIEAPMALA

SEQ ID NO: 29830 - protein, 365 aa, unknown
  TnpB Polypeptide
MKRLSLLSYGDLRQRYGGYSSYALCAISKAAGILSARKKSIKRGFRTRTPYLSRRVLVSSYGFKIKDGNLVIHLDAETLESVPLNSHTKLLLSDAKMLVRSFTLTEDSVSICVSKDVKELESVELAGAVGVDRNLRNLTVGNGLRVTNYDMTKVVDIGENTRSVICSFRRSDARIRRRLTAKYGSRRTERTRQLLNLVSKNVVTEAKARKQAIIFEDIRGIRNLYKRRNGSGRPFRARMNSWPFGEIKRQIQYKASWEGVPVITLSRGETRGTTMDCPRCGERLQVPVRDDKSHHRQLWCKICEKWRDRDLVAVLNISRKGWLKFDHSQKEGQAKEAMKGNAEHDGEPPILRVDASKLRQSRQAQ

SEQ ID NO: 29831 - protein, 259 aa, unknown
  TnpB Polypeptide
MDETLKRGSVTMTDSSIVIAFSKEAPTSEPSGRVGYDLNEKSIVGSDGTTYDLSEVARLHTLYGIRRSRFFKRHPRDRRLRKKFASSQREKERVNQALHRVSTLIVKKARANKEAIVLERLKGIRYAHQKGNGEGKAKRRRIALWPFSQLQSYIDYKARWAGVPVECVSPSFTSKKCNVCGSINRKLKLTDRSWLCPCGAVLDRDLNAAINIEHRGKIRCLGEVRPGARGTDEAVKGNETTRAPILRAEVPNSSLRHLP

SEQ ID NO: 29832 - protein, 416 aa, unknown
  TnpB Polypeptide
MALARKSIKQRYHPGNQMLLVMECFRRMTNDCIRIGMEFEKENGYVQSPSMKKPSLLSYRQLRDRYGGYSPYALGAISKAAGILSARAKSIKRGFRTRTPYLSRPMLVSCYGFKIQRGNLIIHLDAEKCESIPLNSHTRALLSDATLRVRSFTLTQESVSLCISKDVNAMEHADITGTAGVDRNLRNLAVGDEQLVTYYDIGKIVDIGDITRSIIRSFKRADVRITREIASKYGKRKSDRTTQLINLVSKRVVENALTKRQAIVFEDIAGIRKLYRKGNGQGRSSRARMNSWPFYEVKRQIQYKAAWEGVPVITLTKDETRGTTMDCPRCGERLQVPIRGDKEHHRQLWCEGCKTWRDRDLVAVLNISRRGWLRFDHSSKEGEAEEAVKGNAEHEGEPLILRVDASKLRHEARRTQ

SEQ ID NO: 29833 - protein, 334 aa, unknown
  TnpB Polypeptide
MILTYKIKHGRDFSEELRKAKKIAKFAIQTHSLSSKDVKNFGLKSMISNQILRKYSRSNTVKSAKSVKLAIPNQGIKVDRDAKTISVPCLKLSLRYEFPDNFDKINQIEVGEDYTYVSVSIPELELVKADKWIGVDRNTVGHIAVVSDPESGKVVKLGKSAFHIHHKYKNLRKGFQKKGKYGKVKQIKDRESRIVKDINHKVSRKIVDTARELDRGIKLEDLTGIRNGKNTAKSFRYAKNSWSFYQLQTQIEYKAKLPGVEVAYVDPAYTSKSCSRCGLIGDRNKKSFKCLCGHVDHADANAGFNIAKRPCIDRLHTDRDVCKGTTDSPKTALA

SEQ ID NO: 29834 - protein, 383 aa, Haloferax sp.
VATYRCALSEAFESGANTQTAVNDVVTPYTLTSYAKDALKSYVPKLRRTYNASELGDDHPVRFTNRGFRIDHSEDRKHEFCWRVPQAGRNNAFWIPLRINPAQESLWADLLDGQVSVGEFRLQEHRSNWVLHVAVKYEVIEPEVSDESTPVGFDIGESKLLTGCACQNGTPTQPYIYDGGRARQLRKEMFTTLRRLQKRDAEWRIQERFDHYQNSLTDIVEKASRQAVEYAQGFENPVIVLEDLSYIREHLNYGKWINRRLHNWAFARLSGRIEDKALDAGIPVRFVNPAFTSKTCHACGHIGSRSSQAAFQCQNPECWVTEYQADINAAANIASRLNPWGERCTLKPHADDSPRDGSACDSTTGHHEQSRKLRQTTLATFQS

SEQ ID NO: 29835 - protein, 439 aa, unknown
  TnpB Polypeptide
MEIKRCLKIRLYPTPEQFQMFIKTGGCRRFVYNKYVEVREQFYADNIKGRNLNKDEKNKIYKAFKYQTEKQLCEQFPFLKEVSSVALQQARRDAQKAYSDFFAGKKGKPHFKKKKDGCSFREIDLSKYLFSEHEMWLKFPKIGKVTFRHNHIPAWFHNKWIKRKNLTVEVTKSGRCYASICCVYESLNDKEKSFSGSDNQAIGLDFSPSKAYIDSNNHSAHNYVPFKQEAKRHLAHLQRNFSRTKKGSKNREKARRRLAKFEEHIANKRRDWMEKETLRLVRSYEVIGVETLNIKGMMRFSHNAKNYNDVSWNKFVNMLEWKSTFHNCSVVKSDKWFASSQLCSHCGFKNEAVKNLSVRKWICPSCGLEHSRDHNAAINLRNDAISKIKGTVGTIGTYACGGQGSRTKSFGDVDCSLKQEVQFVRMDKSNSNEFEAHRL

SEQ ID NO: 29836 - protein, 389 aa, unknown
  TnpB Polypeptide
MLKSYKYRIYPDQNQKELLLNIFGQVRFVYNLGLETKIQAYTANKKHLTCFDLNKQITDLKKDLTWLNDCPSQALQMTMRNLDNAYTNFFKGQGFPKFKSKYGKQSFQLPQGVKLSNDKKQIFIPKLKMVDIDYHREFKGDIKTITISKSVTNKYYISILVDNKKSFPEKKPIRLETTVGIDLGIKDLVITSDGKKFKNQDFFKSSMKMLRVEQRSLARKQKGSNHYLKQKLKVALLHEHIKNQRLDYLHKISKFLVDNYDTICIEDLGVSNMLKNKNLSRSIGDMGWYTFKSFLEYKCDWYGKNLSIIGRFDPSSKTCSNCGSINKNLKLNDRNWTCQVCDYQHDRDVNAAINIRNFGLRNQPSVTQSEWLHCACGVETNKSLPIRVQ

SEQ ID NO: 29837 - protein, 414 aa, unknown
  TnpB Polypeptide
MRRVEQHVIERSHPKFQEIDEMAFAAKNLWNLANYYVRQSYIFQEKYLNNAALYPLLKGTEAYKALPAKVSNQVLIQVDTAWTAFFEAMEAWRAHPQTLTGQPKLPKYKHKTQGRNLVVFEMGAIWKADLAHREIAVSQLGRLVETKQHPKSIDQVRIVPKADHYVVEVVYQVEAKPAPVDKDLFVALDPGVSVLAALTSNKEGFVPRLVPGGPVKAANQLYNKHREHEQKKLAKGKEQRFTSHRLDRVTTKRNRRVMQYLHTASRRIIDLLVEEGIGTLIIGKNPFWKQNVELGKKHNQEFVQIPHATFIELLTYKAEQIGIAVIVTEESYTSRASFLDRDVLPTYDPNQGAEQEDKPRFSGRRDGRWYRVKGCAPIHSDVNGSYNIGRKVFPTAFDGRGIEATAVRPRRLAV

SEQ ID NO: 29838 - protein, 410 aa, unknown
  TnpB Polypeptide
MERKKYGTLISIGTKHKTHKGNLNLRFIPAEKGKNNLLLRIALRNRKFILARVKRDLSGKSDKWALFLAKILSGDKFSYTVELKLKDGQIYGFAKFSLDVPPQTITKEKGVIGIDVNARPFHLALAEVSPDGNLQSYKSIYLSHLLKYKNRNRKEYEEWLIAHEVIRFAKEKNKAIAIEDIKKLPKGKRGDGKAKLRKILQFFSYRRILKKIESLANQEGIEIVKVNPAFTSVIGMMKYCPQYFIDKDIAGAYVIGRKALGFKEEIPENYKKLLKSQIYIQYALWRLGKMEEELRNKLNQEKNKYKANGIKRDLRRLKREKKFLERFLMETNKNSQSEPETQKQVDQRKEPVRGPGSGQKLWRVPRLAFAIPLLGRLFVRDFSPLRPVVVQGKWEGVASRLGPDGFAGPP

SEQ ID NO: 29839 - protein, 415 aa, unknown
  TnpB Polypeptide
VQITYKFRLYPNAEQEQNLLWTLDKCRLVYNDMLEGMNEQENPDRLELQNSILELKEKYPELKGVYSKVLQYEVYRLFSNLGSLSELKKKGRKVGRLRFKSKGWFKTFTYNQSGFKIIKTDNRLDKLHLSKIGDISIRMHREIEGEIKQITIKHKQTGEWFAFITTSIEIEIEAETEIETENEEIEKENKLIQNPVGIDVGIESFSTDSEGRKIENPRYYKKGLKKLEKAQKKLSKKQKKSKNRNKQKKKVAKVSEKIVNQRDDFLHKLSRSYVDNYKVIAVENLNIKGMSRNHHISQSILDCSWSRFIQYMEYKAERADISVIKVNPKNTSQTCSECERELEEHLSLSDRTFRCPECGAEADRDINASRNILRRGLEKLPQGLREVTPVEIGPLQKLETISASSIIETGSLFQN

SEQ ID NO: 29840 - protein, 352 aa, Halobiforma sp.
VVTTTVTTTFHNPSRDRRREWQRATHLYRDTKQFCINGWESDRFGMNVTTASIDNPLYSAIQNQAIREAKSDYKKDGIVEYHASQPFAVNNQNWEIDRTENGSVVVGFPCISGWWYTPIDVYDDIADDVARLVDGEADKSRLQVYRRGDDWFCTFTVEYDAETGEETAIGVDIGHNHLLAADAETGESMLVSGHEAKYVRRKYRSLRESLQEAGALRARNRVGNKEERRIRDLNHKASRRLIDWAKQFENPVVKIEDLEGIREGSDWRGVHSWHFHQLQEFIVYKAEQAGIRVEQVDPFETSQRCSACGAEGSRDGDYFSCSDCDRGRHADLNAAENIRQREGEPCTAQHFG

SEQ ID NO: 29841 - protein, 167 aa, Halarchaeum sp.
MTLFGDDTVSLSTTESRVRCSLALPDADDGYQRQYLDSDTWSVTESTLTARDDDYFLHIGFRRHKNDTERNTAEDGTVLGVDLGIETLAVTSTAYFFSGRELTHGLREFEKVRAGLQQTGTRSAHRTLDQSSGRELRYVRDVLHRASNAIVDEALRYECDVIASCFV

SEQ ID NO: 29842 - protein, 459 aa, Streptomyces sp.
  misc_feature (459)..(459): Xaa can be any naturally occurring amino acid
VAIRARLKTLTPEDEKVLTLVGAHLGSLASKDLKARCVDGLEHSARTWAARKRELTAASSSRWAGSITKATHDQWALVRRGQSAYVQSLEASIETLQRRLSLPIGERGTRHSPGGYRSAHEWFHKTRRLHALEGRLVSVSADREAGVVRVSRGGKRLLKARHNLGKAGLTEAKWRERWEAERWFLQADGESGKRFGNETIRVTPEGEVSIKLPSPLAEHANAGHGRYVLAAKARFPHRGTEWADRVAANRAVAYRIHYDVQRGRWYLTASWTFPVAKTIPLDDALADGVIGVDTNADHLAAWRLDTHGNPIGHPRRFFYDLSGSAEHRDAQVRHALSRLLNWAKTCGVKAIAVEDLDFTAEKTREKHGRRKRFRQLISGMPTGRLRARLTSMADSTGITIIAVDPAYTSKWGAQHWQKPLTTKSRKTTRHDAASIAIGRRAQGHPIRRRTAPPPAHQSX

SEQ ID NO: 29843 - protein, 175 aa, Mycobacterium sp.
VARYRLLPTAEQAVVLAEHCRHARYVWNLAVEQQQHWQPGRRAPGYNEQSAQLTVLRADYDWLAAGSQTVQQQALRDFAQAMRNFFAGTHRRPTWRKAGVHEGFQQVAVKPHHVQQLNRRFGRVWVPKAGWVRVRLSRPVPDAVKSYRVTRDRAGRWHLAFAHTPEPIARATAPL

SEQ ID NO: 29844 - protein, 397 aa, Mycobacterium sp.
VRRGGPRTRRRPTTLAWTGWPAVWTGGRNPAAVTAPARRWGFPGSSRPARPARCGSPPAPSAANLIAVTSACRGWERSAPTNRPASWHAVSTPAPHAFCRPPPPKTAPGAGTARLRRWWPPRPGQRTPASHRTRSSAWTSGSKLTACSWLPRPVAPKCKRIPAPQSLIAAQHQLRMLQRRAARQQGPYDPVARTKQQPSKRWRATQTRIGRIHAHGAAVRRDVLHKATTTLAQQHHVIVVETLNASGMRAKGGAGKPGLNRALADAALAQVRRMLGYKTRWYGSRLVEADRFYPSSKTCSACGRRKPNLTLADRVFECDDCGMQIDRDLGAAITLARLGELHSGEQSPAGSGPVAGRGATRETEPAPAGQAAGAEASPPHHQPVDQTGTASPQGEAA

SEQ ID NO: 29845 - protein, 593 aa, unknown
  TnpB Polypeptide
MDIIRTVNADRRYYLDEDKIYNADSLVDTIRRFNDIKIQMYNHLYDLRYDNTGVFSDMTYSQWCTDTFGINAYYACAIYSAASGALASQSELNKIYIRSKEEDLKARDTKISSVKEQLERKQAVKKSLDLYRTTKKWKTPYTGCQLAIDNGTVHLSGKKTMDTGSFERMVEQNIRDLKHRLKMLISSRERAGKKLEDLKRFPPKRILFGTKKLYSRKDAVDKEGNPAVDREEWKQELNDKRHASISLPGRHTSKDCNFLVRRASVKDLKEKKYLKGDKDALIIRCMDGTEAVLYGFHPAQLGEEWLKALFTAPVSRKPVCYSIQLKRDPDGRLYLIPSVTLLLENHHCNESLEDGCVSIDLNYDHVALTDIDKDGRYISGEILKFDPENKTSGQISDEIGRVMSKVGKFCADIKKPLIMEDIDTVISRGGMRYGNAKGNRHASVFAYRKMTSCLENQAYERSFGLIKIDPAYTSQMGKFLFMRKMGISIHAAASYAIGLKGMGLLELLLPDKEMTERLSPSIREKMLQGKDMPSLMAAWREITKKFSGVYTHSFYRKIPYAHKEERTKTGKLKKPKSLGAIAREMKGWTVRYC

SEQ ID NO: 29846 - protein, 524 aa, unknown
  TnpB Polypeptide
VSPADEAVLRAAGTHLGSLAGRDLAARCGEGRLDAAGRARSRAARKRALTAESSSRWAGAITRTSEDQVRLAEHNLRAERASLRARIGRIMARLAVPAGGRSGRTHGYATAAERHSKSVRLQALQARLAAADRQLAAGAVSVVRGGRSLLRKRGNLAAAGLTEQEWRVQWESARLFLTADGEKDKAWGNETIRWHPDLGWLEIKLPAPLAGLANRPHGRYRLSAAVEFAYRGDEVAAQVATGAVRYDISHDPASGRWYIDASWKRTPAPVPCLQQLRRHPVVAVDLNHGHLAMAVVAPDGNVLGTPATIPLDLAGRPASTRDGRLRAAISALITSAGQHGARAIVIENLDFAATRAEGRERAGTRPSLGRRGRAFRRMVTGIPTGKFRGRLGQMASNAGLHVIVVDPAYTSRWAAEHWRGPLREHHPETTGHHAAALVTGRRGLGHRARRRAAGNRTAPEEAARPAPARPGKTRQPRLHKGRPPPHEAPGSHPAPRPAGLTGARQATRQPTTVRGRRLVRTTTC

SEQ ID NO: 29847 - protein, 374 aa, Clostridium sp.
MNISIKYRLYPDEEQKVYFAKTFGCCRKIYNLMLADKISLYKATKTFGRQTPAMYKDTYPYLKEVDSLALANVQMHLQTAFKNYFSKKRKAKNGFPKFKSAKRSKKSYTTNNQNGTVDLGKNCIRLPKVGKVKAVIHRVPEDDWILKSATVSQDSAGDYFVSVLFEYEKEITWVSKNSTNVLGVDYKSDGLYMDSNGNKAMVHKYYRESRNRLAKEQRKLSRKIGSKRNEIKSNNYIKQLKRVNRIHRHIANQRLDGLHKKSTEIANQYDIVCIEDLNMKAIGNKGFGNGKATFDNGYGMFINMLDYKLSGRGKYLVKVDRWFPSSQICHCCGSIKKLSLKDRVYRCECGYTGDRDHNAAINILNEGLRILQDS

SEQ ID NO: 29848 - protein, 560 aa, unknown
  TnpB Polypeptide
MGQDIRALPTMEQERQFYGFSRVTRWTFNRVLETYTVLNDAWKAAGCPESEAAEGHKAALAAHATALELWKSTVEKQHKEALKAWKSSGSRGPKPPRATPPPRRPKQDIDMETIFNRPVGERPDLELMKLQFNQLRPVYAPWTSETGHRDCWSQPFVDFKRAITSFMAGTTRFPRFKRYDDLPSFYVANDKLRIEGNYLHIPKVKKPIRLAENLRFNGAIQGVRIWQDSAKDWHVSISVDVETSTAIRIPKYPSDFIGPLTKADRKEQRADARKERVRQLSEGTETFGIDIGIAAAITLSSNETFQPPHSMMSDIEKKTLKKKERRLSRGISRKKETRKARRLALKAAGGDVKTIRRSKNEQRQQVALNKLKRREARKLRDWQHKTTTAIVRRTSPEHGLGMETVSPAKWMQSGMRGWAAKLATIGLGEIRRQIVYKMERASKPVTLFPESYPSTQLCGNPEGCDHRHVMRLDERIYTCEKCGFTTTRDHNGSLNLKPTTWNLTRLSQMTVPSSEPGLNRRLGGDGAKPERECGRSGGSERKPFGGRRKREASVDSHVLT

SEQ ID NO: 29849 - protein, 381 aa, Mycobacterium sp.
VALAEHCRHARYVWNLAVEQQQHWQPGRQAPGYNEQCSQLTAARAEYDWLAAGSQTVQQQALRDFAQAMRNCFNKSHRRPTWRKAGRHEGFRQVGVKPRHIKRLSRRFGQVWVPKVGWVRFRSTRPIPDTIKSYRVTLDRSRRWHIAFAVVPEAVPGPGDGSVVGVDRGVAVSVALSSGELLHIPGLGVHEAERLRRLQRRLSRARRGSNRRARSKLAVARLIARESDRRRDRVEKTTTDLARRFDTIRVDDLNVRAMTRSARGTNECPGINVAQKRGLNREIRRQGWGLLVARLKHKVQERLEFVPAAHTSQRCSRCGHVALENRKSQAVFQCVACNAGPCNADVNAARNIAAGRAVTARGDLGTSRSVNREPQLCSPAN

SEQ ID NO: 29850 - protein, 404 aa, Moorea sp.
VFNLTYEFKLKPTAKQRDLFENWLEQCRKLYNYGLAERKDWYRSRSCQINACSLRGEYIIPADAKRPTYASQCRGLTAARKAIEQLRSVQVHVLQQTLKRLEKAFVSMWEQGHGFPRFKKQGQMRSFVFPQLGVNPTEPGRVKLPKIGWVKMRQSREIPADAVVKQARLVKRSSGWYVMLTLSWDVDMPQVMPHGEALGIDVGISHFAAVSNGTLFSNPRPFKRLERKLKLLQKRVSKKRIGSSNRRKAQAKVSKLHEQIANLRKNYHWKLAHNLCDWAGMIFVEDLNLKGLAKGMLGKHCLDAGWGQFFQILEQCCFKRGVYFQKVDSKKTSQICPNCLTETGKKTLAERVHSCPNCGYTTDRDVAAAQVVRLRGLAAVGHTVKMLSEGKFVGIPLKKESSSL

SEQ ID NO: 29851 - protein, 488 aa, Agrobacterium sp.
LQGIRIPYETDQAGAKLIADIRRIQSCAVRTAYANAVRLDGSKLPEKDVRQIVKARFTRLGVVDSWALHCATRIGMTKRKTRPDGDVIFGGRAQLERRRKGLISNEQWRAARLGPFVSYGDSQKPFGNQNVQLVNELMLVVKIGRKEGGGRAGRTVTDKAHIKLTPMRGRQGEIIRQVVALCAQPDRKNRINVTFSIDETHVTVIVDPADLPRHPERRKPVDAVNGRALGIDLNPNWIGMAVAGNPTDPAKLSATTLLQHELVKLDLPKDASAELVRETLAAVCDRAIRLCRRWSVGTIAVEKGLGKLRSGGRNRSLNRLLNYWARTIFVAMLTRKARLAGIDVVEVWGGYSSTIGNLAFEAPDACASATELARRGIARLAGIKDVLPELEEGWSARLWKNERLPAELGSWKDIHRTIKSTGIGYRRPHPDPKDRGSDGRVSGHAVSRLRQRNRPGWKIIPQRTAVTKAGADSVALCSVAASATSYAT

SEQ ID NO: 29852 - protein, 412 aa, Agrobacterium sp.
MKERLGYKYRIYPDADQERLFRRTVGCCRLVYNLCLEQRSMAYAMAGRHRLSSYDQIKQLPGLKVEVPFLKQVPNHCLQQAVVDLDKAFQNFFKGRGKHPKARRRFQNESFRFPDPKQMKIEANRIFLPKAGWVNLVMHRPILGTVKNVTVSLSGDHWYASVQTERDIEEPIDLLANPDAVELGGDIGVVNALALSDGTVYDLPRMSDKEKRREAALAKRVSRRKKGSRNRLRAQRDLRRFKAKIVRRRRDAKHRMTTDVVRRCDILYLEDLKLRNMTASARGTVDDPGSNVAQKTGLNRAILDVSPGETRLQFEYKMRRKGGAVVLVPAPHTSQRCAECGHTAKENRPNRDTFLCVSCGHAACADANASANIYYLGRKSRTGGLPGLACGSNLVEGRKQEEDGSSQAAKAA

SEQ ID NO: 29853 - protein, 394 aa, unknown
  TnpB Polypeptide
MQTVRIYRLTHLSPTLFGRLKAAQMERAQVWNCCCELHKQARTTHSTWPGQNELQQATKGRFALHSQSVQMIVRAFLANIDATRQLRATHPKMRMKYPWKTKRFYPVHWPAQAVSKERGRVVLPMGRGRTSIVLPLDLPAGSGACTLAWNHGFELHVCIEVPQATHAPGTNRATVDLGEIHLAAVTTNTGAALVISGRGIRSLKRQRNMRHQQLARKQARCQKYSRRWKKLQRAKNKMAGRLERRVRDLRHKATRQVIEFCKREQVGTLFIGNPHGVCQENRGRHHNQRMSQWEYGKDIDYLTHKSTQARIKSFTGSERGTSGQCPVCRQRHKPRGRVWKCRNCGFVGHRDMVGSVNMHRLAYDKAVTFPCAVTYLRPGPARRSSRAGTPRVSS

SEQ ID NO: 29854 - protein, 218 aa, Streptomyces sp.
VKVTRIACSKNLNARKHGHLAEQAWRLGQERSLVWRKYGVLATDWKARAAGNTAKADRIARNNLGTAKRSRPQPAFEARVRSMAFTAVHAVVDKAKHIVAEDLTRPFVSRKKPGKNSNRRLAAWTKGVTAEALNSVSERRGSALTLVNAGGLHLTSRPLLPDPRHAQRRPTSLERDGDPDITLYIPHIRVRQIIQERADRRRTRLPVQDSSTLLRSAN

SEQ ID NO: 29855 - protein, 369 aa, unknown
  TnpB Polypeptide
MNKAYKYRIYPTTEQREFFLRTFGCCRFIWNTMLSDKIAYYEEHGKMLHNTPAQYKADYPFLKEVDSLALANVQLHLQTAYANFFADKSVGFPKFKSKKHSKKRYTTNNQNGTIRVTDGFIRLPKAGMVKAVIHRTAHEDWCLKSATVSMEGDGTFYVSVLYEYRNEPLFSFIDESKIIGLDYKSDGLYMDSEGMCCDMPHYYRDAHKRLAKAQRKLKHKTAGSCNYNKQQRRIAKIHRHVANQRKDYLHKCSAGITNRYDIICVESLNMRSMANKGFGNGKATLDNGYGMFLNMLAYKQAEKGHLLIETDKFYPSSQLCHVCGYRQKLKLSDRTYICPICHTVTDRDLNAAINIKSEGLRIYHAMISA

SEQ ID NO: 29856 - protein, 362 aa, Microcoleus sp.
MRLPGGNVAFQPPDVQDPIAKKRLKPRVDYKQTSGMLTEWKRQEDLQFLNEVSSVPLQQSLRNLQKAFANFFSGPTKYPNFKKKPSGGSAEFTRAAFKWKDGQLWLAKCSSPLLIRWSRTMPDTCEPSTVTVKLDASGRWFVSVLVEDATVKPLLHTDKAVGIDAGITSLIATSDGKKVANPKHFKRLRFKLRQAQKALSRKVKGSNNREKARLEVARIHAAIADSRTDFLHKLTTRLVRENQTIAVEDLAVKNMMKQRKLAQAIADASWSELIRQLEYKCQWYGRTLVKIDRWFPSSKRCGNCGHIAPVSNKDTRHRWAARAAIAFARSSMHFSLEGLVPKPLSKSALINTDLDSTIPPDR

SEQ ID NO: 29857 - protein, 288 aa, Microcoleus sp.
RVDYKQTSGMLTEWKRQEDLQFLNEVSSVPLQQSLRNLQKAFANFFSGPTKYPNFKKKPSGGSAEFTRAAFKWKDGQLWLAKCSSPLLIRWSRTMPDTCEPSTVTVKLDASGRWFVSVLVEDATVKPLLHTDKAVGIDAGITSLIATSDGKKVANPKHFKRLRFKLRQAQKALSRKVKGSNNREKARLEVARIHAAIADSRTDFLHKLTTRLVRENQTIAVEDLAVKNMMKQRKLAQAIADASWSELIRQLEYKCQWYGRTLVKIDRWFPSSKRCGNCGHIAPVSNKD

SEQ ID NO: 29858 - protein, 224 aa, unknown
  TnpB Polypeptide
LGIIKSAVVSQNPSGKYFVSVLIETEHHPLDSTGSVIGIDLGIKDLLITSDGEKFENIQTTKKYADKLAKEQRKLAHKVKGSSNYNKQRIKVARIYEKIHNTRIDNLHKISHKLISENQVIVSEDLNVNDMVKNHSLAKSIYDCSWYELTRQLSYKANWNNRQYVKVDRYFPSSQLCHVCGYQNSDTKDLTVRDWICPKCDTHHDRDINAAINIRNEGLKILNM

SEQ ID NO: 29859 - protein, 353 aa, Hydrogenibacillus sp.
MKIHRAYRYELDPNVEERILLAKHAGAARFAYNWGLARWIEIYEKEGRTKNAMELHRELNCLKKTDFPWMYEVSKWAPQEALRDLEKAFQNFFRGRIGAVRLKEKPVRRKKGVVKTHFPKGCILHATVSREADRWFVSLTVEEEILGPLPLKGPAAGIDAGLESFTTLADETGAIRKTDAPRPLRRALKRLRRLQRKLSRRGVRDEKGRLIERTKNYEKTRLEIARLHRRIRNIRLDFLHKLTTELVRTHPVIAIEDLDVAAMLKNRRLARHIADVGWGTFRALLEAKAKLRGVRLVKANRFEPTSKMCHACGYVLPELPLSVRAWTCPVCGAHHDRDENAAKNLLRFALVAG

SEQ ID NO: 29860 - protein, 205 aa, Anoxybacillus sp.
MNTSRSCLFSRVSVKNKHERKSTTSPIHSKTPPYHRRSRLQNPYSTAKQDYNRYISIDLGLDNFATIVNNVGKQPIVINGKGLKSVNQYYNKQMSHYRKVAKQMNGLDWTKRMSKMTEKRNRIVENFMHQASAFVMKHALSLDCDTIVVGMNKDWKREVHLGKRTNQAFVHIPYQTFLHQLQYKAKQHGIRVIVTEESYTSKCSF

SEQ ID NO: 29861 - protein, 423 aa, unknown
  TnpB Polypeptide
VILGHAIALDTTVAQEAHFRRACGVARFAFNWGLAEWQRMHAAGERPSAAKIKARWNAHRKAELPWSFEVTKCASGQAIIDLGTAFANFFRDLKKPNGKRRARFPRFKSKRSDNGFALWNDQFEIKGDRIRIPRLGWVRMREPLRFTGKIMGARVARIGNRWHVSVQIDVGNVTRPGAPGDVVGIDLGIATLMTLSRPLPDGRTAIANPRARRALMKRQRKLARRISRQELQRRKTNAKASRRQRIRQDAQRKLHYRIACVRKDAIHKATAALAASFSTIVLEDLNVAGMTKNHRLAGSLLDASFHEVRRQLEYKTAMRGGRVIVADRFFPSSKLCSDCGHRIDKLPLSKREWTCPGCGSVHCRDENAARNLESLVGPTWPEPPAGCLPDTRGEIGALAWPQGTVKLWSANRELNQPAAAGES

SEQ ID NO: 29862 - protein, 406 aa, unknown
  TnpB Polypeptide
MTARQGFRVELAPTLEQRARLGQHAGLSRVVENFCLEKVKAALAQREAEKTYGVPDAELTPVPWSAPALERLWRLEHPARFPWFGEDGLSSRVPKEACRVRAAAFKNFFDSRSGKRKGRKVGFPGWRKRKHGSRFRYDADRARPESARVVRLPGVGKVRTLEDMSWLTDRIADGRARVIGATVREQAGRWWVSFQLEIDRADINTKRAVAADAPACGIDVGVKTFATVVDDDGTVTEIHAPKPLKAALRKLRKAGKATARKKPGSSNRAKAVKRLGRVHLEVANRRADFLHKTTTMLARSKRAIAVETLNITGMMANRRLARAISDLGFGEFFRQLAYKSEWYGSGVWAADRWFPSSRLCGGCGSINRDLTLADREWTCGCGLEHNRDVNAARNLLEAMNLEQEAA

SEQ ID NO: 29863 - protein, 374 aa, Streptomyces sp.
MGAPRYKSRKDTRQAVRFTANARWSITPGQKLRLPKIGDVRVNWSRTLPSTPSTVTVVKDSAGRYFASFVVETGPEEPLPETRPELGIDLGLGHFAVLSDGTKIDSPRFLRRAEKRLKKAQRALSRKEKHSKDRDTARVRGARAHARCRGRAPRVPSPALHTADPRQPSDRRGGPGGQGTRPHAPGQVRPRRRMVGVRRDAGVQGCTIRAHAGEDRPVRADLSGVLAVRRQGWSKAPARPCVDLRGMRGRPGPGHQRGGQRRQGGRTGRVSLWSAGKTRARPGTARRSRNPLDTAAFNGAVGGNRRPSGRRGCQPACSMSPIPTTTRPAAAIRGAPKRSLKNRAPMAAPTRMEDSRSAAMGARSARVWAHSTRP

SEQ ID NO: 29864 - protein, 315 aa, unknown
  TnpB Polypeptide
MLREFCHRSKNLYNHGNFLIRQTFIDDGKWLRYGEVDRLLKGDADYPDYREMPTAQTAQQTLRILDKNWASFFAAIKDWKAHPEKYKGRPKLPKYKPKDGYFPLVLTNQNCKLKDGVIRFPRVFQGFTVKAIFSSQPDAVFKQARIIPHGGEIDLELVYEIPEVEEKENNGRYAAIDIGVDNLAALAWNTGERPVLLKGTPLKSVNQYYNKQMAKRRSICERMNGRHSSKRIARLTAKRNRKVEDYLHKASRKVIDLCAEQDVSVLVIGKNKGWKQEANLGRKLNQSFVQLPFARFIQMLQYKAESIGMKVVLTE

SEQ ID NO: 29865 - protein, 504 aa, unknown
  TnpB Polypeptide
MHTVQLLLKTSKYERHEIDRRFRALAHLHNVCVKHARKCMIRLQHDKRYAELRQLYNELVKKEKMSKEEKSQKKKLAKQLAACRTEQGLSKASLEHYLKVCGKQFSKLLSSQQVQSEADRVWCGVERCLFGNGKELHFKKLMDFDTIGGKSNKNGARFDLDAMYVNWLGLSLKCYLPKSENSLSYVWESLKGKISYCNIKRLMFSSGWRYYAEIVVSGDAPTRVSIGTSTMGIDPGVSTIAGVSENACVLEELAPNAIQYEKKIQKISQSMDRSRRISNPNKYNEDGTINRSNRDPWKYSKNYVKMCRLLKSLYRKKHAYIVDSHRELCNKLITIARYFPVEKMHFQALQKKAKETRRQEKKTEVKQKDGTVKVIQKYKRKKRFGRSINRRAPARFLLELKRKAEAVGGVYAEVDTKEFKASQYNHVTDAYEKIPLSQREKEIGNRKVQRDLYSAFLIRNADLDFKHPDREKCEYEFEHFANLQDQLILKMKESGLSMRQCFGF

SEQ ID NO: 29866 - protein, 398 aa, Frankia sp.
MSRYRLDPALEQVAGIEEHCGHARFVWNLAVEQQSWWTPSRGKAPNHAERCRQLTDARAEFEWLRVGSQTVQQQALRDFDQAMRNFFNGSHRRPTFRKRGRSEGFQIVGKNARVEKLNRKWSRCWIPKVGWVRFRVSRRIPDFRSYRVTQDRAGRWHVAFAVAPDPIPAPGTGEVGEVVGVDRGVAVSAALSTGELLSCPTLRPKETQRLRRLQHRFAKATRGSNRRGRLKTRIARMKAREADRRKDWVERTSTDLSRRFDVIRVEDLRITNMTRSARGTVDQPGRNVRQKAGLNRGILANGWGLLARRLEQKAPGRVEKIPAAYTSQCCSSCGHVAPGNRESQAVFRCVACGHTTNADVNAACNIAAGRAVTTRGGAASVTPANREPQHSTPPLVGV

SEQ ID NO: 29867 - protein, 409 aa, Clostridium sp.
MKAILINETEEQKQIINSMMLVFCTAIRFSFKRLLENKRNALLSKLDKRQRKANYFKKFIDTNTVPPVTFGTKEMFIRRCKGLISKEEWTDCRNNRFYSRGDKSKNGNPNLRVIIKNEISYLEISTFEKTSTNRAIKIQVPIYLPQKLSKKTGKVNGINYKEIFLSHLASGETYQVKILKRNNKYYCHITFEMLKKEIIYTWHNGIIGIDTNPDGFALTMIDNKGNYKWHTYLKQHELSYARANRRENLCGELAKQVILIAKIYNCGIAIEDLKFKNDKDIHGKFARIKYQFIYCKLLTMLESACIREGIEIIKVKPQFTSKIGLYKYCHQYGMVVHNGASMVIARRSYNFKERVPKILKDKLVKDLDRFNKKNEWSKWNEINKNLKRKVGERPDLWLVNRKKILGVVS

SEQ ID NO: 29868 - protein, 160 aa, unknown
  TnpB Polypeptide
  misc_feature (1)..(1): Xaa can be any naturally occurring amino acid
  misc_feature (153)..(160): Xaa can be any naturally occurring amino acid
XGTVLGRKFIDHPSEKDRMYRTLGRIRRSQREYGSAQTQGIWAYTKRLNTELGKKIAGAIVRYAEENHADVIVFEYLEMQGKISGKKKQKLHLWRKRDIQKCCEHQAHRKGMRVSRICAWNTSRLAYDGSGAVTRDWENHSLCTFQTGKRYHXXXXXXXX

SEQ ID NO: 29869 - protein, 172 aa, unknown
  TnpB Polypeptide
  misc_feature (135)..(166): Xaa can be any naturally occurring amino acid
MYRTLGRIRRSQREYGSAQTQGIWAYTKRLNTELGKKIAGAIVRYAEENHADVIVFEYLEMQGKISGKKKQKLHLWRKRDIQKCCEHQAHRKGMRVSRICAWNTSRLAYDGSGAVTRDWENHSLCTFQTGKRYHXXXXXXXXXXXXXXXXXXXXXXXXXXXXXXXXRQKSLL

SEQ ID NO: 29870 - protein, 378 aa, unknown
  TnpB Polypeptide
VRRAFKFRLYPNRDQSRELCIMLETHRRLYNVCLEQRKSAYEQDKISLGYCDQSSWFKNQRLVNEWFANLNFSSAQGTMRRLDKAFQSFFRRVKSGGKPGFPRFKAQNRFDSVEFPAYGDGVRLLADGKLRVQHVGQIKCKVHRPVEGEVKTATLKLEGEKWHVILSCDLGEVVVPASKNPPVGIDVGLESFLTTSDGHHEPNPRYLKAELPALRRACRAVSRKKKGGKNRKKAAKKLRRIYAKIKNLRRDHGHKTALNLCRRYGFIAVERLNIKGMVRNRRLSRAIADVSWGGFLATLGHKAESAGVSVVEVNPRGTSQACSGCGCEVRKVLSVRIHRCPHCGLVLHRDINAARNILSRALARTEPAGANGKTVAVA

SEQ ID NO: 29871 - protein, 399 aa, unknown
  TnpB Polypeptide
MRTAYRCRAYPTAEQARNLARTFGCVRKVWNEILYWRTQRYRANGLRTNYAEADRYLTELKTRSDLSFLNEVSSVPLQQTLPHQYRALNNFFERRARYPRFNARRSRKTATYTKSAFRYRRGELFLAKQTGALRFVWSWKDIDHTRIEPSLVTVSQDADGRWFVTFQLDIADPLPLPKTGNVVGIDVGLKSFAVMSDGEIIGNPRLLERRARDVTRYQRRMARKQKGSNNRRKAARKVAAAHGKVRRARQDFLHNTSTRLVQANDLIVVENLNVSGMVRNRRLAGAISDCGWSQFRHMLEYKAAKWGKQLVVIDRWFPSSKTCSACGHLLAELTLHTRTWRCPSCGTWHDRDLNAAKNILAEGLSVSACGADVSLQRNPFQQSAVKQEPQPVRTGIPVH

SEQ ID NO: 29872 - protein, 388 aa, unknown
  TnpB Polypeptide
VFRLRPTARQHVVLAACVDAHRELYNAALQERRDGWSHASKTRISYGDQSAQLTEMRAVRPDQAVWSFSSQQATLRRLNKAFAGFFRRIKAGQMAGYPRFKGKARFDSVELPKDGDGARWLPEQRRVYLQGIGQVKADLHREVAGRVKTIQIKRQGRRWMLVLSCDDVPTNPLPVTGRQVGIDVGIVSFATTSDGEYLDNPRWARVSAGRLAAVQRRLQRARRGGRNRAAKRETVAARHRKIANQRRDFHHKQARELAARYDLIVVEDLTIANMLRRTKPVPDPDNPGMFLPNGAQAKTGLNRSISDAGWGQFVSILRAKAEDAGRAWIEVNPQHTSDRCERCGHAARANRVTQAEFACQHCGHTAPADEHAARNILRAGLARHAHAA

SEQ ID NO: 29873 - protein, 355 aa, unknown
  TnpB Polypeptide
VNSVQLVEQHCIRKSDPRYSVIDEAAFKSKNLYNAALYEMRQAFIRSGIYLSYEEMDTRMQPHEAYKALPAKVSQHVLKQLADAWKAFREVKAAYEEDPSTFTGRPRLPKYKHKTEGRNLLIYTMQAVSRGKRSLQRGIIKPSMLPIEVKTHQDPKQIDQVRIIPRNGHYVVEVIYRKEPVQAQVDPAFCVAIDLGVTNLAAITANREGFIPRLVNGRTLKAMNQWYNKRMKELKLCLPKEERERVTRQMEQITTTRNRQVNHYLHAASKRMIDFLVKQGVGTIIVGKNPLWKQETGMGRKNNQNFVSIPHTRFIDMLTYKASLVGIQVEVQEESYTSQASFLDLDPYPHLQAER

SEQ ID NO: 29874 - protein, 388 aa, Calothrix sp.
MSIDYLHCQWYHNYMRSMKFKLYQHKRNRFLKGMINASGVIYNHCIALHKRYYRMWGKHLSCAKLQSHVAKLRKRNRFWQTVGSQAVQDICQRIEKAYQLFFKYNNTGARPPGFKKVKKYKSFTLKQAGYKLLGGNRVKIGNKVYQFYQSREIEGKIKNLTIKRTALGELFMVVVVDEGSSSQVKFTTGKIAGFDFGLKAFLSCSDGTKIESPQFFKQSLNAIKKASKQHSRKLKGSTNRERARKNLVRKYEDISNRRRDWFWKLAHELTDKFDVLCFETLNLKGMQRLWGRKISDLALGEFLQILEWVAKKKNKRVVFIDQWYPSSKTCSNCGYILESLDLSIREWRCPKCQSVNARDENAARNIQMVGASSIGLGDVSRLRAAITA

SEQ ID NO: 29875 - protein, 400 aa, unknown
  TnpB Polypeptide
MSYRTIDIAWIPHSSSEWRTFSAVRKEAARLWGDLVERHHRIRRRHLKWPSKQRWQQWAKGRYPGLSAQSTQQIIGEFCAAVQSARQLRKHGHEDARYPWRKPRYHDVIYTNQDARIYDGRLMLPHGTSGRLRIPVSLALPGRLMEVRLSMGTVRLVCELPETPIPQQTVIGVDLGVNTLLAATDGQQAILVSGRAAKALVQGRNKHLASLQQAQSHKEQGSRRWKRLQRRKARLLAKCRRRLNDLMHKATRKIVDTFPGATCYVGTPFNDAAQHLGRRHAQQVSSACNAKLRAQLDYKTCGAIQVDEAYTSQTCPVCGERNKNRRTYRCRQCGTQAPRDVIGSVNILTVGQHRALVPGRRVPNAVMWVHPLKYPGRKPGSTCGHHGDSSGPPREASARL

SEQ ID NO: 29876 - protein, 438 aa, Halohasta sp.
MHIHRTYRAKIRNYSQVERMLDLHGWSASKLWNVANYHSREVWEDTGEIPDDSDLKRELKGHDNYKGLHSQSSQRVLEELAEAFNSWYGKRKNDSRANPPGYRKRNYYDNDGNRVHEEHPRSTVTWKQKGIRHDTKHNRVRLSKGANHKDHPRDWDYILVKYEARPEVTVENVQQVRAVYNKSKGQWELHLVCKHEIETPDAPGDETAGVDLGICNFAAVAYSTEEADLYPGNRLKQDGYYFPKEIAKCDDSGGSEATRLHHKWSERRTHFFHSLAKHIVEKCIEREVGRINVGELAGVRENENGKSKNWGRHGNLDLHGWAFDRFTSILTYKAKVEGIEVVEVSERDTSKTCCVCGREDDSQRVERGLYVCESCDAAFNADVNGAENIRLDLNQSNSESPPGFGGNRCTGWLAQPGVYLHDLSHGFSPRDQVVDCKP

SEQ ID NO: 29877 - protein, 384 aa, Coleofasciculus sp.
MLTLTYACKINPTPDPVAVIEQTLDLCRKVWNYALRERKDWIDSRKCRVNSCSIHSEYIIPVDTPYPTKGFQEKALTVAKKTNEELKSINAQVLQQVLRKLDTAFEDMKRKGHGFPRFKKFGRMRYAVYPQMLKDPVGQGWVKLPQLGKVEVIMHRPIPKGFELKQARIVRKSSGYYIMLSLQLDVNVPDTPPSGHPLGIDLGLEKFLATSDGELIKRPRFFDALARKLKLLQRRLKHKKNGSKNKVKLAKKIARVYERIHDTRKDFHFKLAHHLCDQAGMIFAEQLNLKGMAKGMLGKHTLDAGWGQFLQLLSWVCWKRGVYFAKVEAAGTSQTCPECDAHVSKNLSERKHECTTCGYKTDRDVAAAQVVRNRGVWSRWTNGR

SEQ ID NO: 29878 - protein, 415 aa, Anabaena sp.
MEQVLTLVCKLNPSKKQVEEIELVLRAFADACNYANQKVKPQITSKMTIQNLVYNEISALFGLSANLAVRACARVGANRKTAKLKDKPVKTFKPTSADYDARIFSFREKDWTVSLTLMNGREHIKIDAGNYQRGKLKGRKPTSAQLCKHRDGNYYIHIQIKDDSPTPIKSNKVIGVDFGRRDIAVTSNGDKWDGKQINNVRDKFSRVRSSLQKKATKGTRSTRRRARNILKRLSGRERRYQQWLNHKISKSIIQSALKNHAVVAIEDLTGIRERTNQKPRSKTERRRSNSWSFFQLRSFLEYKGIQFGVEVIAVPPAWTSLTCHQCLHIGLRSDKRFKCTNEACSWSGDADFNGAKNIAAIGETVLREGFPPQATANPKGVNLVNSPRGSNCLCCNLSTDSSGLLKSLRSPLAGA

SEQ ID NO: 29879 - protein, 446 aa, Streptomyces sp.
VEGVVRVGRLVATATCTAFGGVVESSGERVGQRLLLERVSYLASLCQELTGAVVASRWDEGSLDVLAAGLGGQGKELPSKGWMALRRLHWAGVAAPAEGVYVSDRVRRAAEEYAARTLRLAVHRRTVVAAILATWPADPSRRTGAEWAALRALLPAGISGAEIRSRTRQVGAYLAEHGKLPAGLCELEEPPRVAAQVLLAAMDRQQVTLQRLDETTARLRVKLPLCAAPASGREWAWHVIDIRLPGTVHADAVLHTPTLRPTPAGRIAVDLPYSRPVPAARASGHRVAVGFDWGVNTLLTGALGRLTGRGESKRVVTDGRPLIFDATAISAKLHRLRGHREHLAAKRDHYRALANPLGAPHRAWGRLLHGAAVLQREHERVCARIRKLNDALAWSAARWAVDQTTALGATVIYLEDLATLEARGRRRGNARLSGQVRGTVAEAIQD

SEQ ID NO: 29880 - protein, 369 aa, Nocardiopsis sp.
VVRGGKRLLNTRHHLDRAQLSETAWRARWEAARSFLQADGESGKRYGNETIRITPDGQVSIRLPAPLAHLANAAHGRYVLSYRMAFAHRGTEWADRVEADRAVAYRIHLDTGRGPGQGRWYVTASWTPTPVPQVPWETALARGVVGVDANAGHLAAWRLDTHGNPVGNPRRFAFDLSGNSQHRDAQVRHALSRLLRWATASGVKAIAVEDLDFASEKSREKHGRRKRLRQLISGFPTTWLRARLTSMAHTLGVAVIAVDPAYTSRWGAQHWQKPLTTKRRKVSRHDAASIAVGRRAQGHPVRRRTAPPPHHQGDGAGHRTAQAAPGSHGHEGNRPREPRTTDEIRRRHTRQERGDPAHPEPFGMGAVPA

SEQ ID NO: 29881 - protein, 436 aa, unknown
  TnpB Polypeptide
MAVTLSHKIELKANNKLKSYCRKAFGVSRFAWNWALERVKDKRERKEKIDVLELKKEFNHIKRKRYPFVMEVTKYASQQPFIFLKRALSQFFDDLKSKKSPSKRKGFPVFKKKRYSSGSFYIGGDMAVVKKGSEIKDKRFGTSDNKPYLHVPKFGWVMLREEIRFPGKINSVTISQDGDKFFASFSIETSEIAYEGMHKENAQEALCGCDWGVKDLLTLSNGIKIKGSKHLRRSQRQLSRQQRKLAKKQHPRTKGDKTPISKNYIKQSRKVGKLYRRVKAQRRDENEKISSVLVRHFRVICLETLNVKGMMSNHRLAKAVSDNSPYALKAMIKRKAAQRERTVFEADQFYASSKTCRRCGAVKTDLKLDDRIFVCPKCGFTEDRDVQAAKNLAEVYINRVGSASPELLKNKPVDLTALLDDLAINGLATSRVEAGI

SEQ ID NO: 29882 - protein, 549 aa, Streptomyces sp.
VRTIATPFAVSGPTGVAVRDRLKHLTDEDDRVLRLVGDHLGSLASADLRARCADALEHSAESWAMRKRMLTPVSSSRWAGSVTKASHDQWALARRCQAAHIQNLEAGIGMLRHRLSLPIGQRGSKRTPGGYRSRQEWHAKSRRLGVLADRQTAAVSDWRTGRVRVVRGGKRILNSLHHLDEAGLTKAGWRERWEAERWFLSADGESGKRYGNETIRVSPDGGVSIRLPAPLARLANAPHGRYVLTSKVHFPHRGNEWADRIEANRAVAYRIHLDVTKGRWYLTASWQLSPTKTVPVEAALADGVIGVDTNTDHLAAWRLDTHGNPIGHPRRFFYDLGGSADHRDAQVRHALTRLLNWAKTCGVRAIAIEDLDFQAEKTREKHGRKRRFRQLISGMPTGRLRARLTSMADATGIAIIAVDPAYTSRWGAQHWQKPLTGKTRKTTRHDAASIAIGRRAQGHPIRRRTAPPRDDQSDRHGHRTVQARPESLGREEPRPRIPGPRPGVVSPDAARTRATRTPKTVRDVRSDQEWVQDSLLLTDQERFLGPWSE

SEQ ID NO: 29883 - protein, 452 aa, Anabaena sp.
MQLVERHIIQRNHPHYHEIDSLCLSAKNLYNYANFHIRQSFIFKNKYLDDNLLAKQLKSSETYQYLPDKVAKQVLLGLHDYWLRFLAAIKAYKEDKYKFLGRPKLPKYKHKEKGKYLLVYTAQAVGKTIMKAGLIHLSQIHIYIPTALDYSRLYQVRIVPKIDHYVVEVVYEKEELDYGLERDPIAAIDLGIDNLATLTANKPRFVPVLVKGRIIKSINRYYNPEKTKFQCLLPTHQKTSKRQQRLTKERNVRVDDYLPKASCLIIDQMVKNGIGNLVIGQNPLWQPNANLGGKNHQNLVFIPPDRFVQQLSNKAKLVGIKVLSAKKSYTSIASILAQDPIPTDAETDAHQIKFSGQRIRTKLYRAGNGLVIHANLNGSLNHLIQVFPKAFSLGIGEPLRWAGFPTCSKWRGVVVPPMPMAPASPRKLSARHSPNGGAIPTVRFANANALSG

SEQ ID NO: 29884 - protein, 431 aa, unknown
  TnpB Polypeptide
MKYNELMTQVLTVSCKLKASQSQAAKLDATMEAFGQALNWVNQNTPEKIVNAVKLQSLCYYEIRARFGLSSNLAQQVCRRVAGARKVARQRNRPVKEFKRRFVTYDARIFSFREKDWTVSLTTVEGRERFELAMSLRDANANGNYQRGMLAGSNPKSATLVQRKDGSYYIQICVQICVEKKPPKQQDTDKVIGVDFGRTDIAHTSEGDNWNGQQLNRVRDHYSRLRAVLQRKASKGTRSSRRRCRELLQRLSGKERRFQVWVNQRPPVRLRERISKAIVSRAKATNSAIALEDLTGIRERVNQQPRSKAERRRANSWAFYQLRQFLEYKARVAGVSLVLVPPAYTSQTCHKCLHIHPDPAQSYRSGKSFKCGHCGWEGDADLNGANVIALLGAVVNQPRGPGLFCSLVEQNRLRATVRTSGPEALSPLRTA

SEQ ID NO: 29885 - protein, 374 aa, Lachnospira sp.
MANKAIKYRVYPTTEQEVMFAKTFGCCRKVWNLMLSDKIDGYKATGKFPTVTPAKYKNDYPYLREIDSLALANVQMNLQKAYKNFFDKKRKKKNGFPKFKSRKARNSYTTNNQKGTVAIIENKYIKLPKIGKVKAVIHRFPEEDWIIKSATVSKERDGSFYISILFEFDRIITKVTKSDNVIGLDYKSDGLYMDSDGNIGSNHKYYRESHKKLAKEQCKLSRKVGSKKNQTKSNNYLKQLKKVNKIHRHISNQRLDNLHKKSTEIANQYDIVCVESLNMRSISNKGFGNGKATLDNGYGMFLSMLEYKLNDRGKYFIKIDKWYPSSQLCSCCGSRKKLTLQERIYKCNCGLTMDRDLNAAINIKNEGLRLLEVA

SEQ ID NO: 29886 - protein, 375 aa, unknown
  TnpB Polypeptide
MRMYRAYKTELDVNNAQKTNCLRHAGAARFAYSWGLSRKITAYQAGEKAPTAIDLHRELNALKKTELSWLYTVSKCAPQEALRNLDCAYDHFFRRVKQKKAGKKMKVGLPRFKSKKKGLGSFRLTGAIHVFEKSIQPPRLGVLRLKEAGYLPTNEVHILSATVSERAGRWFVSVQVELELPDPQPKEKPIVGVDLGISHLAVLSDGTVFENSHALKSSLERLRRLQRRVSRKQQGSANREKAVRRLSRAHVRVVNLRKHSLHQITTFLVRTKSGIVVEDLHVSGMMKNHALAQSIGDAGMAEFRRQLTYKGKWYGCEVKLASRRYPSTKRCSGCGEVKQKMGLGERVYRCPACGMVMDRDLNAAVNLEQCWTTQQ

SEQ ID NO: 29887 - protein, 389 aa, Lactobacillus sp.
MVLKGIKLRIYPNSYQREFIDYNFGANRFVWNNMLDMIIKRYENNPKVKSLCSYDLDKILTTFKKEHGWLKKAESTGLQSTNKDLCNAYKGFFSKKRKFPRFKSKKFPKQSYQCKSVNKNVEVLDGTHIKLPKLGIMRYKGRKNVSNTIKFVTLRKSSANKYYAILTVEEEIQKLPKTDNCVGLDMGVSDLVICSNGNKSKTIRFDKKLAKKKLYWEKRLARRRTRALKDIQLKKKHGLIDPKPLEQYSNYMKAKIMVAKYSEKIANQRKDYLHKISHELVTDNDVIVIEDLKIKNLLSNHKLSRAIANQSWRALRLMLEYKCEWYGKKLLAVDPFKTSQICSNCRYDDGKHTLDVREWTCPKCHSEHDSDINASKNILNHGLEQALVN

SEQ ID NO: 29888 - protein, 392 aa, unknown
  TnpB Polypeptide
MISSIHKVVRLMYKAYKFRLYPNDEQKILINKTFGSVRYTYNYYLDKMKNNTYVTPYNNIKDYEYNLKYEATFLQEIDSTIIKKSIYKLDDAYKRMFNDQGGYPKFKSKYGRNSYNTPAVYGKYKGIEQCNIELNLQTKQIKLPNLNWVKIRGYRNIDNINGKLKNATISKEPNDKYYVSVLYEMPDIKLIERPRTIVGIDIGIKKLLTLSDGTTIDNIHTQEKYQKRIKRKQRELSRKIKGSTNYYKCKKELAILYSKLANSRKYYIHKITKSITDEYDIITCEKLTTKEMIIKGKENKLSTKINDATFTEIIRQLSYKVKFKGKRFYQINTYYPSSQICSRCDNQDKKYKDLNEREYKCTKCGMELDRDFNASINIMFEGLKLYMKNYAK

SEQ ID NO: 29889 - protein, 126 aa, Bacillus sp.
LTEYENEIKSKEVHQVAGLDFAMDGLFVDSETGKKANYPRFYRQMLEKLAIEQRKLSRKEKGSSNWNKQRIRLAKIGEKVANQRKNFLQHKSKVLVTKFDAIIMEDLNMKGMSQALQFGKSVMDNG

SEQ ID NO: 29890 - protein, 419 aa, unknown
  TnpB Polypeptide
MLTLNYPYRLYPNAIQQSLIQEWLETCRGAYNYALGELKDWLASRKSLVDRCSLESEYIIPADAPFPGYQVQQDALPKAKKNFPRLAEVPSQVLQTTIRRLHDTWESFQKRGFGFPRFKKFGQFKSLLFPQFKESPVTGVHIKLPKLGLVPINLHRPIPDGFVVKQVRIIKKADRWYACINIQCDVSVPDPMPHGHPIGVDIGLEKFLATSDGVLVKPPKFFKNLQSRLKVLQRRLSRKQKRSKNYEKQRIKVARLHHIIDNTRKDFHFKQAHALCDSADMVFMEDLDYRVSAKGMFGKHMLDGGFGQFRSLTKYVCWKRGKFFAEVNARGTSLECPECGAEVRKDLSVRVHHCPECNYITDRDVASGQVIRNRGIALISTAGLAGMETACADDLPGVEATQSRQVSKSRKGTTRKSKK

SEQ ID NO: 29891 - protein, 510 aa, unknown
  TnpB Polypeptide
MRTQTPSYVVSVKLRLPENVKNHLEKSFHIVNSAYNEVLSFGLQRFEAMKQNPTYQELLDSRRELLQKPTTEQKTKAFKARKKELDKALTEIRKGYNLTEYSMEAYLGKQRRKSGSSYQHLNSGELQVIAKQAYKTLEKVLFYKIKPHKVRFRSKFDLDVSFRNKVNSTGTCLVESDKLGIAYRLYLHKASTFIDIPVKAFNDYQQMNVLRSERIKYVQIIRKTIRGKKVYYLQIVCEGYPHTKTSKGDDTIGIDPGISTVAYATPNEVALVDLVPNSINKKEKHIKSLERRIERSRRVNNNVCYNEDGTIKKGSRFKPPSKRAQRLLIRHQKAYRSLSEERKKLQGQLITHLVSQASVIKIEELNVKGLQKRTKDIRINPKTNRPFSKKRFGKSIFRAAPSAFREALKTRAKQLGIEVVMISPKEVKPSQYNHISQTFEKKPLSTRIFDLSSEWTGLQRDLYSAFLIGHIEDGHYEQEHLEKDFPTFYTLMKGFLQQPTQTDRLAWYLS

SEQ ID NO: 29892 - protein, 278 aa, unknown
  TnpB Polypeptide
MSRYRLLPSPAQEAVLRDHCGHARFVWNLAVEQHSHWRPGRASAPGYLEQCRQLTAARAEHRWLAEGSQMVQQQALRDFAQAMAAFFDPENPAGRPSWRKAGRTEGFRVVAVKPGEVRRLSRHVGEVRVPKAGWVRFRWSRAVPPGVKSYRVTVDRAGRWHVAFAAVPEPIPAPGNGQAVGIDRGVAVSAALSTGELLRVPRLGGAERTRLRRLERKLARARRGSNRRTRVKHAIARLKARETDRRKDWAEKASTGIARRFDMIRVEDLRIGNMTRSA

SEQ ID NO: 29893 - protein, 361 aa, Paenibacillus sp.
MRIAFKFRLYPTKQQKEKIEFTLERCRLLYNRLLEERILAYKNEGRSLNYYDQAKTFTERKVYIPALKQVHSQVLQDAANRLDKAFQSFFRRVKSGETPGFPRFKPQKRYDSFTYPQAGYSIIGNKVRLSKIGDVKIKLHRQPQGKVKTCTITVKNGKYYVCFSCETPAQKLPVSDKRVGIDLGIKHLAITSDGQIFDSPEYLRKSENKLKQLQRNVSNKIRGSNRRKKSVLLLAKLHEKVANQRKDYAHKISRKLVNQYGYIAFEKLTKIKMLKNHNLAKSIADASWNQLVQFTTYKAESAGRVVVQVDPRNTSQECNNCGQIIKKSLSVRIHNCSHCGYVEDRDINAAKNILQRTLAVS

SEQ ID NO: 29894 - protein, 405 aa, unknown
  TnpB Polypeptide
MTTVLKGIKLRLYPNKQQEIDLRQMCGNDRFLWNKLNEMLQSRYENNKRLYNGDKSKEAKKKRRHVMLSAYDMNYLLPLMKVEFPFLSYSDSSSLQIVTSNLNKAYSNFFKDSKQFGLPKFKKRGICKLSYTGKSTIDILAKRYLRLPKLGFIKTSKTGVLKDVKIKRYTIEQDLTNRWYITSQVEFHVDEFIKTNKTVGLDLGLTDMIIGSDGFKSGRFLVPELENEIKSKQRVYSKRRHYAKVKIAMDKNMKVINPRNFLDFINVEKARVTKAKLQKRLANKRKDFLHKLSTNIVKTYDIIVIEDLKSKNMMKNHKLAKAIGNASWYEFRTMLEYKCKWYGKQLIVVPPHYTSQECSNCHHNSGKKTLDIREWTCDNCGVYHDRDINAAKNILTKGLKTLQTI

SEQ ID NO: 29895 - protein, 424 aa, unknown
  TnpB Polypeptide
MTPSIGPENIEKENSANPCGNMDLRSAGKSFLRHDFLPPLYNTQFQNTSGGLLFMNQLETVLYRTYVYRLYPTAEQQTMLADRFDFEDENYNAMARRINELYGQHAHKADAETAIRQYSISCPGIDYQGSLDHTRKELFQAVQKLWQGSYNKIYSRPVTRNHRCFYFKTMAVSEFHIIVPTIGTILRDTHRPLPVGAKALSGQIFYSSYEGRYYAHILIVYTAKLPAPITPVLYDRAIGLDYAQDGLYRDSNGHSAEYPGFAAKSKPKREALQQALSRAHTGSRRWRALRAKLAKLDRHTQNQRRDWQYKQSKRLLQNHDLIATENLDFVGMKRQNPRLTPKIEDNQYPAFLQKLQSKAIMQGKRVVRVDRYYPSSQICSACGARLGKLPLAFSIFRCPQCGTQMQRDLNAAKNILHEGLRQAK

SEQ ID NO: 29896 - protein, 355 aa, Streptomyces sp.
RPSRNCSDSLADADAAIRQARRDVDFLAVLPAQAAQAVLKTYFQAWKNCGDGRADAPNFKARFRSTPTVDVPQGRDLNIVRVHRRWGMASLPKIGRVRFRWTKDLPVGKQAGKEHRITGARLVKDTLGWHIAFRVQTLEKAPETHQGPQVGIDVGITVPLALSDGETFEHGQWLTSREQARLLGLEQRAAQRKKHRKPGERTSRRLHHTYDQIAGLRAKAKRRALDWQHQTTTDIARTYSVAVVEALQITSMVKSARGTIEEPGKNVAQKTGLNRSISGQAWGRTVTMLTYKLARQGGTLAKVPAPGTSRRCSACGLTTPGSRETQALFVCKNSDCISLLQLGEHFKIRGHDDDD

SEQ ID NO: 29897 - protein, 331 aa, unknown
  TnpB Polypeptide
VLQYIIQEEPDMKKMADKAYHCGIRVKLYPSNEQKRIIAVNDGAARAVYNHLVAVGNERYRLSKTASFVPAYQDRLGYLDSVSGSLKNIKNALPYLYGPDVDDQAVANANKNYFASWKNRKDRHSGVPVFKKKSSLQSYQTNAHYYFKDTKEGHNSNVWFLDKNHVTLPKLGRIRFGGSSLKVAEIIRRQEVCDIRIGTITVRRDSVGEYWASFQLASDTPFFQPLPKTGYERGIDLNLIELVNGSDGQTSANMHFYREARTALAKQQHKLSRMAEHAKKKAGNCMTAETTRNSAGKSHISTGRWHGRGKITCMCFRSVKSRTKTSLRRKT

SEQ ID NO: 29898 - protein, 435 aa, Photobacterium sp.
MKNIRVVKINIGSPTPQQTEFRKESARLWNRLVKLHKYNRNRHWKWLGKFDLSSHFKGRFDLHSQSIQALCEKLSANVDTTRTNRKNGDHKARYPWRCKKTFQVCIWKQAAIHIKGNRISLSNGRGRKPLRFKLPRTMPMGKIVQAELGFRELRLTISNEIDKPSSAGLNTVAADVGIIHTAVMTDGVKSLGIVGRGMRSLTQGKNRKLAFYTQALSKCKKGSRKSRKLRIAKAKMLNRYENRTHNVLHHVANQMLDFCVSREAGTLIVGDIANIAKNKKKKQSKRSNQENSQTPIGRLYDYLRYKGQLRGVEIVKISEAYTSQTCPLCGHRHKPSGRIYKCTNKTCDFVAIRDNVGAANILNKHYNGKIVAGTLLPPSNVKYLRPVKLKQSVVDLLNRGKLLSTTHTKVTVSEEAGSKIRCDYDTGFDLETHTL

SEQ ID NO: 29899 - protein, 564 aa, Desulfotomaculum sp.
MKKQKKSSPDNGISYTVCGEFFPEVYPAFRSGKWSRGMEDPLTAEMRLFCSCERWAFNRLQEDNSRQELKKQGQGTFGINSRYCDDAILKAKAVIESQKELLKLETEETETKLARAKKKLSWAEKDLDKAVKASDTVRIEKAKRSRYGRRARVKKLTGKLNELQAHQDSGTIPTVVFGGRSLWKRVCKGRATCEEWRQARQNRLYSRGDETKEGNPNIKVRWRNGEFTLSVTISHLSVQKGMDSKGRPVMTRAPKVKGKLWLPEKRRQKVLELLLSGAPYTVEMIKGRDSRYRAHITFPITAPILAINSNRGYLGMDTNPNGVALANVGYTGQPEPWPAGFDVPYPKALHKFAGEFQVTVHPNGFLYLKVPELAYSRSFRRTYLTGVLAKVVVDIAKALGKPIAAENLDFGKDRLDTNKKFNRMASNFPFKKIVEAVTRRAIKESVGVKPVWPAHTSTIGYWKYMRRYGIIIHHAAALVIARRAIGFQERVTKELRQKIQAVREKLAQKANSLPGEGKGMTPKVKRLFNRLDDKISVHNGLTRFKQESFYSVWRDLKQLALSSR

SEQ ID NO: 29900 - protein, 501 aa, unknown
  TnpB Polypeptide
LQRDGADWLPWLFVGGFWWDDDMPRHSQPRSPAVVHRTARAGLRLSRGQRRRLVGLLVSAGDVWACVLELNAWRRARQDAPLAGYQALCRELAASGPGCFGELDSAGARSVLRRYSDAWFAAAARRKNGDASARFPRRRHWMMPVRWHYGTFALDGRRLRIPVARGCPPLLVRLDRNLPYPPESVRSVTLLYDAGRLWADITAEVSVTVYPPGEQPDPARVAGVDLGIIHPYAVAGPDGQALLVSGRAVRAEHHLHLKDTKARRRAVARRAPKPGQRGSRRWRHYRRRQRIVEARHRRRVRQAQHEAASAVICWAVARRVGTLVVGDPRGVLGIDAGRRHNRRTRDWRVGHLISALSDKAQQAGITLTLADERGTSSTCPACRARIPKPRGRVFCCPRCGLSGHRDLVAAANIAGRLPGGITPAVTAADVTHRRAGAHLPGVSAARRDPRRRPHHGDVRGSPGRHLPAPPDTTGRGVARPTARTRKSATGELTKMCTRTPV

SEQ ID NO: 29901 - protein, 383 aa, Psychrobacter sp.
MPKQILKAHKVRLYPTIDQQVFFAKSFGCVRFIWNKMLSDKIEHYKETKTTLKNYPAQYKKEFEWLQEVDSLALSKVERHLQKAYQSFFKNGTGFPKFKKKGQRDSYITNNQKGTVAITNNTVKLPKIGHISAKFPNKINGLIKSATISRTPSGKYYVSLLVKTIATPLPKTHSNIGIDLGLIDFIVLSDGTKVANPKFLSKLQDKLARAQKILAKRRAIAKVANRKLSDSRNYQKQKFKVAKVYEKITNSRTDFLHKLSFNLIKNHDVIAIEDLNVKGMVENHKLAKAISDSSWSTFTTMLAYKAEWYGKTLVKIDRWYPSSKICSGCNHLLTKAELPLSLRSWDCPSCLQTNDRDINASINILNEGLKLTTLKTVGATELA

SEQ ID NO: 29902 - protein, 461 aa, Mycobacterium sp.
MPKFEVPDGWTVQAFRFTLDPTEDQAKALARHFGARRKAYNWTVATLKADIQAWHASGTVTAKPSLRVLRKRWNTVKDDVCVNTETGVAWWPECSKEAYADGIAGAVEAYWNWQTSRAGKRAGKRVGFPRFKRKGRDQDRVSFTTGAMRVEPDRRHLTLPVIGTVRTHENTRRIERLIKAGRARVLAISVRRNGTRLDASVRVLVQRPQQPKVVHPGSRVGVDVGVRRLATVATADGTAIEQVENPRPLGAALRELRHVCRARSRCTKGSRRYRERTTQISRLHRRVNDVRTHHLHVLTTRLAQTHGRIVVEGLDATEMLRQKGCRVPALVGADCRMRPWALRVGTCPTRQSGTGRRWWSPTAGSRRRKPATPAGMCKTSAGTNNGNATDAQWSISVMTALPSTSHATRKHPASSAQLGPPSSVEPTVRPGLARQVAVKRGREAAPRLPNNPETGCKSRDH

SEQ ID NO: 29903 - protein, 458 aa, Helicobacter sp.
MVVIETNNGGDFLKATLLLHDPILNVFEVRASTDKIRRSLPIASLGYMNRLKHLGHSNGDDKKIIRQMELMSLQGYNGFRGESPDRLDAYVWGCYVLANLNFKDTEGSFFNQPLNIQERYFIHLNLAFNKFFRDLKKGLVSYPKFKKKREFQGSFYIGGDQIKIIQTANTDYLKIPNLPPIKLTEKLRFQGKIHNATITQKGDHFYVSISCGIDESEYKRTHKLQESHNKLGIDIGIKSFVSLSNGLNIYAPKPLDKLTRRLVRISRQLSKKIHPKTKGDKTKKSNNYLKHSKKLTHLHEKIANIRLDFLHKLTSSLIRHSNSFCLESLKVKNMFKNHRLAKSLSDVSMSVFNTLLEYKARYSNKEILRADTYYPSSKTCSNCQKVKQDLKLKDRIYQCLECGFELDRDINAAINLLKHLVGRVTAEFTPMDLTALLNDLSNNRLATSKVELGIQQKS

SEQ ID NO: 29904 - protein, 403 aa, unknown
  TnpB Polypeptide
MKYLSSYKFRLKPTSTQEVLLNKHFGCVRWIYNHFLNKRIEEYKTNNRTLRRSDNEKQLPTIKQEYIWLKEVGSQSLQYSVECLQNAYDNFFRRVKQKVKGKKGFPRFKKRHGKQSFKIKQNIYLVEGKLVFPKFLDGIPIIQHREMEGEIQFATVSKNKVGQYFVSITVSREMPELSPTNKSIGIDLNVKANVDSDGNFEINPRPAKQYQTRIKLLQQRVSRKEKGGKNRSKAKTQLAKLYLKVTNKREDHLHKLSKRIINENQVICVEDLSVESMLAKVSPDERDEARWKERNRHRDIQDCGWSSFVKKLKYKALWYGREFIQVNRWFPSSQLCNHCNYQNKELKSAEREWTCWNCREHNDRDHNSAKNILEEGLRIRTSGTEGIAYCPNVRPALSGLLIG

SEQ ID NO: 29905 - protein, 506 aa, unknown
  TnpB Polypeptide
MFYNETGTFTEDRGMVKAVETRIYRLHHDPQTSERIGYLASQQRLAYNIAAGILNRTPTIALRRSPRHPDGLLGQLTLWRHQDSRAQAPYIIHQAGAQHAWMANDLMKRERNSRLQRLENGLTRSSDHRQHRRTLARRSRKRGTSTLTSLTPPVRLEDSTFTIMGARDIVLRTKKPVPKDLDIRSFQLVEVRNACRGANGALRKRRYALHLQIAVEYPDPPAPEAIRSAEDILGIDDGVKRQLTLSNGDVLHHDDGDNINRQRRMRSEAQRKRRGSKRKARLLRKARADGRKTRANRRRVLLAEVKNIYESGKPKAIAVEDKSHRHLSASARGTRESPGTRVRVKSGLNRSLRDAALSERLSLLASEARKSGIAIYAVWPQGSSQTCSACGYRHRDNRESQAVFRCLSCGYAHNADMNAARILRNRAYHLVCSIVSRERDEGAPTGWRVKPSVSERLSPAKGVFKPEGGSMRHNAAGREAHTSGSAAQGRFVKDYEPRRSKTTYVR

SEQ ID NO: 29906 - protein, 412 aa, unknown
  TnpB Polypeptide
MINAVTENVKTEAETKVHHVRKMKLGRSETLDRLCREAGRIYTLSVVWFWRHVRRQGVWLSQYGMQKRLENGQPTILHSQSAQKAVECFFHALKTWRAERKTNPAIRPPHKLKKFFKVVWKKVAVRVINGDLVLSNAKGTDPFVVKDWKFDLPVQVEVGWDGDQYELRATYEQEAKAQEDGLVVSCDLGEVHPACVGTEDFHLLLSGGILRSKRRYREKLKAKLSSRIDRKKKGGKRRRKLIASKRRKLKRLDNQIRDIEHKLTSAAINALDERGARTLVIGDLRDIRIGYDKGKVQNQRMHQAPTGRIRHMLSYKAERLGWKVEPPQNESWTSKTCPACGARNTPTGRVYTCSACGFVGHRDVVGQVNILKKYHGNVEGCRVIGAMASPIGLRWYPHLRCSSLSSARIPGL

SEQ ID NO: 29907 - protein, 438 aa, Natronomonas sp.
MLEVHRTHRAKILNLSQVEDSLDRHGWAASKLWNVANYHSRNVWEETGEIPDHSDLKTELKTHTKYKGLHSQSSQRVLEELAEAFNSWYGSDDRRANPPGYRKNNYYDSEGRRVHEEHPRSTVTWKQNGIRHDTKNNRVRLSKGANHKEDPKAWEYILVEYETRPGVEVKNLQQVRAVYDNAKGRWELHLVCKDEIETPTAPGTETAGIDLGICNFAAVAYSTEEADLYPGNRLKQDGYYFPKEIAKCDDSGGERATRLHHTWSERRTHFFHSLATNIVERCVEKEVGRINVGELAGVREDEPGDSKNWGRHGNLDLHGWAFDRFTKILTYKAKVKGIDVVAVSERDTSKTCCVCGTEDDSQRVERGLYVCEECDSAFNADVNGAENIRLDTNKESNSESAPGLGGDRSTGWLAQPAVYLYDLSSGFQPQEQVVECKP

SEQ ID NO: 29908 - protein, 237 aa, Moorea sp.
SQKCDGYYLVLSLEDKTVPEVKPDINPDSIVGIDVGLKEFLTTSEGETIDIPRYYRKSQKRLKFLQKRVSRRKKGGSNRLKAIKQLGRQHKKVADKRKDFHFKTANYLLSKYDVIAHEKLNVKGLVKSRLAKSVLDAGWSSFLTILTSKALNAGLLAVPVSAQNTSQNCSSCGKKVPKKLHVRWHNCPHCGCSIDRDHNAAINIKNRAEGQSVLKAQRLLSNGRIGWEAYTEPNGSV

SEQ ID NO: 29909 - protein, 315 aa, unknown
  TnpB Polypeptide
MAAMKKTEEYGFLKEADSIALQQSLRHLDTAFQNFFKQPKTGFPRFKSKKRNKNSYSTVCINGNITISNGYLKLPKIGQVRLKQHRIIPEEYRLKSVTVSQTPSGKYYASILFEYEDQVQEKELQKFLGLDFSMHELYRDSNGKEPAYPGYYRNAEKKLAREQRKLSKMQKGSNNRNKQRLKVAKLHEKVSNQRKDFLHKQSRQITNAYDCVCIEDLDMKAMSRSLKFGKSVSDNGWGMFTTFLRYKLEEQGKKLVKVDRFFASSQTCSVCGYKNAKTKNLALREWDCPQCGTHHDRDVNAAVNIRNEGMRLVNA

SEQ ID NO: 29910 - protein, 374 aa, unknown
  TnpB Polypeptide
MSSSRPFAVRVLRLRVKDKHAKWLCGLAREVNTVFNYCNELSVKVFERERRFLSGFDFWPFLKGVTRGDCALNLPVQAVQEIAEEYARRRRQHRKIRLAWRKSGGVRRSLGWIPFKVRTIRYRGGQIYFAGRWLSLWDSFGLGKSELRAGNFSEDSRGRWYLNVCVPRAQRVRDERNKPSVKSILDRSVPSLGIDLGLRTFAAFTDEALPPIEAERFYRDLEPALARAQRAGHRNRTRAIHAKIANRRKDFLHKLSTRLVKPYGAISVGNVNASALAKTRLAKSVLDAGWSTFRTMLLYKCEDAGVWFDEVDEAFSTQTCSRCKSRAGPKGRKDLGIRGWQCTVCGAIHDRNVNAAHIILAAGHRRLAEGILGP

SEQ ID NO: 29911 - protein, 391 aa, unknown
  TnpB Polypeptide
MLINRGYKTEIDPNNKQLTLLAKNAGAARYAYNWALNLKKLAFDNKTKIPNSIELQRELNKLKKTELPWMYEVSKCSPQGALRNLDIAFTNFFRKCKQKVKGKKGFPKFKSKKNGIGSFKLTGTIKVSNKYIQLPRLGKLRLKEHDYLPLNAKISSACVSEKAGKWFVSIQVKETIEVPTKDEAIVGVDLGIKTLAVCSDGTTFDNPKALKSNLGRLQRRSRQLSKKVKGSKNRKKAQRKLARLHYKISCIRKDTIHKITTHLTKTKSKVVIEDLNVSGMMKNRRLSRSIHDLGLFELRRQLEYKGKWHGCEIVVANRFYPSSKTCSSCGWIKKDLTLADRIFDCDSCGLSIDRDLNASCNLESYTVSSTGINAYGEVSSGLASSKTKLTS

SEQ ID NO: 29912 - protein, 516 aa, unknown
  TnpB Polypeptide
MTGTKTSKPMHTVCLRLDTSEYEGYLIDQSFHALSHIHNVLVKHARKLLIRLKYDKDYQQLRTEYIAFLKKHKDKQKLSKAETAYKKKLSDRMKTIRQDMGFSEYSFQSYIKKCAKQYNKLLSSQQVQKEATRVWQSAEKYLFGDGKAVHFKKYRDFDTIGGKSTKNGMRFDTKTFSAVWMGHTYKVKRPKKSSMDYVYEALSSDISYCDVKHRMFPNGWHYYIVVVLKGPAPKKLTAGNKACGIDPGVSTMAAVSDEGVYLEELAPDIGKYNNEIVDTQYHMDLSKRASNPDKYNPDGTIDKSNHDRWKFSKTYIRLRNRLKYLYRVRSDYIKQSHSGLVNKLLKDARDFYIEDMNYKALAKRSKDTERLDGIFEVKTKDGSVKQVHKYKRKKRYGRSLNNRAPALFIHLLEQKASLYGGSVTKIATKDYKASQYDHSTDTCTKTPLSQRTRIIDGRTVQRDLYSAFLILNTDDTLTHPDRDKCMSTFDSFVRRQDKLISEMKKSNISMKQCFGF

SEQ ID NO: 29913 - protein, 443 aa, unknown
  TnpB Polypeptide
VEIITTYSVKIKHYNKIFKNTVVLYRQTVDFLINVCLEEWDSIQLIENIKFKKLYVEKLIHKTKQNQKVKYDFDKYFYKFPSYLRRSAIAEAMGKVSSYKSNYENWKLNKKGKEPGKPIAGNIYPCLYKGNVYKSTGTYTAKIKVFVRNTWDWLYLSLRKSDVDYILNHCSYREKKSPTLQKRGKEWYLDFPFKEYVKLNDTKIKDRRILAVDLGVNTPATISIMESDGTILDRLFCKLPKEQDSLNHSINRIKKAQKYGNKRMPRLWAKVNGINKDISVKTAQFIIDVATLYDVDVIVFEYLDRHNMKSKLKGKKKQKIHLWHSNEIQRIVADKAHRLGMRISRINAKYTSQLAYDGSGFVLRGKKGGHKSFELCTFQTGKIYNCDLSASYNIGARYFIRELLKTFCESKRLQMEAKVPSLCRRSTCTLSTLISLNAAMSSL

SEQ ID NO: 29914 - protein, 516 aa, Mycobacterium sp.
VCSAVRQASCSQQGQARDRRHHGQPRSAGRVMAEKFKVPDGWVLQAYQYALDPTPSQAAGLESHAGGARFAYNTMLRAVKANLSQRAAERSYGIGKADLTPTLSWSFQSLRNDFNRRKHVVAVGDDGAPWWGENSKEVHASACKNLSVALKNWDDSAKGARKGPRIGFPSFKSKRFTRAFAFTTGTIKVESDRHHVRLPRLGTLRVHESTRKLARRLEAGTARVLKATVRFERGRWLVSFICLVERAAKRPAHVKRLAPVVGVDLGVKDLIVAATPDGEELLRVKAPKELKRASRKLRALQRKAARQTGPWDTAVQARREPSNAWLRTQQLIAKQHVRVSNLRRDRLHKLTTRLAQSFDVIGTETLAVRNMMRSARGTVENPGRNVRQKAGLNRSIADAGMGAFSRQLDYKTTWYGARRVQADRWYPSSKTCSGCGSVKAKLSLSERLYVCDNEDCGFEIDRDLNAAINLARHARAEQSACFDSGGADRKTTAPAALVAVKPESSNGSASPQGEAA

SEQ ID NO: 29915 - protein, 433 aa, unknown
  TnpB Polypeptide
MIDYVYKFRLYPNKEQQDFLDKQIGCVRFVYNEILSRAKKEYEKNGKRWNIYEYKKFLPSLKEEYPFLKEANSQSLQQAIFNLDTAFKKFFTQQAGFPNFKKKKNSGSIHIPQFFKIEGNLLWVPKLKTPIRIKLHRKIEGRIKSLTIEKTSSSEYYASILAEKEIKGLPKVDSVISIDVGIKSFATVATAPLSNPNNRTHEHIENPKYLVKKEKKLKRLQKQLSKKQHKRNKTDTTRASNNYKKYAFKVAKLHEHITNERKDLLHKLSRRIIDENQVVILEDLNVKGMVKNHHLAKSISDASWSKFVDFLTYKANWYGRHTVRVDRFFPSSQECHDCGYRNTELTLKDRVWTCPVCGTHHDRDENASDVLMNEGLRILGQELPEFTPVEKSSVDDRREIYLKSTSSLKQEIPIPEVSKNKWHSKEATHFSEG

SEQ ID NO: 29916 - protein, 383 aa, unknown
  TnpB Polypeptide
LDRDRFINVFATFESVLAVKAAKQNIQIPQIGNLLDNFRRMVNETIRIGLERNITSRFRLQKEVYPILRNDLHTWYILTAVEKASAILRHYRKTKRKTSNIQKPYVEKPFLSVAKHAYKIIDGNLRLPIKPKQYFYIPLNKHTLSVLSEPNLKLGSVTLTANTVSISFSKETAEIEPSGYIGIDRNLDNVTTASSNGEIKSYDLSKTNRIKATYREVKSHFKRNDTRIRGKIFRKYGKKQSDKVNQILHRVSKEIVDKAKAHSFGIAMENLKGIRKLYRKGNSQGKQYRAKMNSWSFYELQRQIEYKAKWVGIPVIYVPARNTSKKCSICGLNLMPEENRLLQCSLHGTVDRDVNAAKNILARALRFKADGQPSEGMVAERQS

SEQ ID NO: 29917 - protein, 118 aa, Salsuginibacillus sp.
LLTAYEKEIASKKIENVVGLDFAMDGLFVDSEGEKANYPRFYRQMLDKLSQEQRKLSRKKKGSSNWNKQRIRVAKIHEKVANQRKNFLHYKSKELVAAYDAVIVEDLDMKGMSQALRF

SEQ ID NO: 29918 - protein, 387 aa, Clostridium sp.
LKKAYKIEIKPTKEQIVKIHQTIGVCRFLYNFYIAHNKEIYVKEQRFVSGMDFSKWLNNEYIPNNQDKDWIKSVSSKATKQAIMNGEKAFKKFFKGESGFPKFKKKKNQDVKAYFSKNNKTDWVIERHKVKVPTLGWIRLKEFGYIPVNSIVKSGTISQKADRYYVSILVEEDIKINNKAYSEGIGVDLGLKDFAICSNGITKKNINKTKTVKKSEKKLKREQRKLSRKYESLKIRNKNIKEGRATCQNIQKQIVKVQKLHQRLTNIRTDYINKTVNELIKQKSSFITIEDLNIKGMMKNKHLAKAVAGQKFYEFRTKLISKAKQNNIEIRIVDRFYPSSKTCSYCGAYKKDLKLSDRIYKCSCGVSIDRDLNASINLANAKEYKIA

SEQ ID NO: 29919 - protein, 390 aa, Nitrososphaerales sp.
MCNEICGERMLTYKFRLYPTIAQEEKLLSTLEACRYVYNYFIHNDYKTRNDMNYALTELKEQKSWLNNYHSKMLQMVSTQVAGARKALELKKKGHDAGILCRKRDEYNTFIYNQSGFDIDAPDSILYLGKIGRIKMRMHRSIVGTIKQIAVKRRAGKWYACITTDNNYRPVPSITKPIDIKKCVGIDVGIKNYTYDSDGNVTPNPENIKKMLKPLIRAQRKVSRRVKGSNNYKKARRWFQIVHERIANRRKDFLHKLSTHYAKYDVIFLERLRVNNMVKNHSLAMSIMDASWSAFKQMLQYKSKVMVEVEPVNTTIECSRCGKKVPKSLAVRMHRCDVCGLAIDRDYNASLNILKKGLQLLELPMEYREVTPVEILMGSRKQEANALRCW

SEQ ID NO: 29920 - protein, 441 aa, Sarcina sp.
MKITSSYGVEIRKADGALSTTLKVYREAVRVLALFYDSVWEEVSSVAGEKKRFNYAEHLVHGTKRNRAVHDFDSRFPKMPSYLRRSAITHALGAVSSYRTRLGQWEAGGRKGRGPVLGERTHAMPVFYRGNMYREAEGDTAFLKLYNGRDWVWVRASLLHTDMEYLRKHWTGVKASAPTLEKRHRKYFLRFSYEEGRELTGRPVQVQRICSVDLGLNTDAVCSIMEADGTVCARKFIDFADEKDRLWKVLNRIRRKNREHGPESAGSLWKYAVRCNGELSKKTAAAIVRFAQEGSADVIVFEHLDMQGKIRGKRKMRLHIWKKRGVQKICMHMAHRKGIRVSRVCAWKTSALAYDGSGKVERDPGNRSLCTFGNGKRYNCDLSASYNIGARYFIRELTKPMPATAWSVLEAEVPAVRRRSSCVHADLVRLSAVMRENGWTA

SEQ ID NO: 29921 - protein, 408 aa, Colwellia sp.
MKKTLRYNYRLKPTAEQEVKLVEFGAYARGVWNLLLSENMRRYRYDKTFLFYNEMASLIKDLKMFDEFSWLKDFDSAASQQVARDLETALKNSFNKGRVQKFPTFKVSFKQKKLHDDSYRSVNTNENIRLENNGITIPKIGTVKIALHRKLKSKIKSATFKMRHGKWYVSLTQKVECKSKKQVLSTLVGYDINSQYTVVGSNGLYVENPKVFKKSSTKLKQIQVQLSRRKKGSNRWHKTKSRLNKIHGKISSQRLAFAHEVSCSIAKSSDIIVFEDLNVKGMQQFNGQMVNDNVMGMITELTRYKAELNGVVYHEIGRFVKSSGICYGCKYEHKFDLSVREFSCVSCGLVQCRDLAAAKSVADTGEKELIANGILARALPKFQQKSPSKMKVFELSKFGVGSEKKEAA

SEQ ID NO: 29922 - protein, 416 aa, unknown
  TnpB Polypeptide
MYLTVKQQVKHLSKEDYKSLRELCHIAKNLTNEAIYNVRQYYFTEGKFLKYEKNYTLIKSSPNYKALNSNMAQQILKEADGSFKSFFGLLKLAKQGKYAFKDCRLPYYLPKDGYTTLVIGFVRLNGNKLMLPFSNSFKKNHKAVEITIPPILLDKKVKEIRIIPKANARFFEIQYIYETDCIHRNLNQSNALALDLGINNLVTAVSNTGKSFIVDGRKLKSINQWFNKENARLQSIKGKQHFGKKTTNRQKAIVRDRNNKVNDYMNKTARIIIDYCISNDIGTLIAGYNITFQRNSHMGKQNNQNFVNIPYGQLRSKLECLCELNGITYVKQEESYTSKASFWDKDDIPIYNDDNPKEYTFSGKRVHRGLYKRADGKYFNADVNGALNIMRKSSVVDMSILYSRGEVDTPVRIRIA

SEQ ID NO: 29923 - protein, 426 aa, unknown
  TnpB Polypeptide
VSVASGTISGVSRDAVTDKPSRVLISHTGMPLSRPTTFRFTLDPNREQHRRLLAHAGAARLAYNHHIVRVTANLHQRDAERSYGVAEADLTPTLSWSKVSLINHMNAWKDGRAPDSRVSLDENGQQVRGLAWRGEVSTDVFECASVNAATALANWSKSRAGQRASGPAKRPGSPGSKAGTKPPPAFRLRSKSKPGQTSPVRPAGPRALQLPKLGRLRVREHTGKLTTMLASGRFHVYAASFRLEHGRWVVAVTGVAAALHHLRRSPKNRARVGVDLGVKTLAVVADEHGRVLHTWAGVKALQNAQARLKLANQSYSRTKRDSGGRKKAAVRLAAIHARIAHLRTNLLHGITAELARGYTCVTIEDLNVAGMLQLRSLARHVSEAAFGAFRAQLEYKATWYGTQVVVADRWFPRPRRAPGAGPSTPI

SEQ ID NO: 29924 - protein, 426 aa, unknown; identical to SEQ ID NO: 29923
  TnpB Polypeptide

SEQ ID NO: 29925 - protein, 430 aa, unknown
  TnpB Polypeptide
MLRAIKIRLYPSKTQEGYISSLLGSYRFVYNQCLALKKEKYTEEGINYGLKDLGNYFHQDLTKNEEYLWLKEHNTKVLKQSVVNLLDSYKRFFVNGAGFPKFKSKHDNSQSCRFPSEAISKRNDYESGRLTLIKQLKGIKFKCSDRYKSYLNEFKSNIRSATLTKTKSGKYFLSILVDGDLMKGASNPSNDFIGLDLGIKDFIIDSNGNTVENIKIKRNNKKKLAKLHRELSRKDMLSTGEFKFNKKYDKEVEIKRPSKNREKARIKLAKFYEKLNNQKENYLHHVTNQLINENQVIVIEDLNVKGMMKNHNLARSIQELSLYRFKEMLTYKAEWYGNHIVQVDRFFPSSKLCNCCGYKNVHLTLKDREWICPECGVIHDRDHNAATNILNEGKKILNNKIPTRCGKLTPLETSGYTVDELGNKNMRSFT

SEQ ID NO: 29926 - protein, 383 aa, unknown
  TnpB Polypeptide
MIRNFQYRIYPTGKQTRQLESVLTTCMRLWNYFLEQRDTAYKTDKTSISCFTQIKEIPKLAIKDPSIKEVYSQTLQEVPRRLDKAFQAFFRRVKLGEDPGYPRFKHKDRYNSFTYPQNNGSFKLDEEGKIYLSKIGHVKINYHREAKGTWKTCTVKRTSTGKWYVVISVEQPDVVKKSVKPVVGIDLGLKEFAVLSDGSKIKRERFFKAEENALAKAQRKLAKQKKGSQERHKAKRVVSRIYERIINKRKNFTHQNSRKIANKYGTICLEDLNISSMLAEKTITIKGEKKPATGTHRSINDVAWNEFVNQLKYKAEEAGSSVILVNPRNTTKMCSVCGKLTGKDLSDREHNCSCGHSEDRDLNASKNILAVGLHSLEVLKKAS

SEQ ID NO: 29927 - protein, 511 aa, Moorea sp.
VYKTIPVKSNFSNEERVFWEFQCQQANSLFNCAIYYAKQKHYQWLEDQGAYITYWRGDELRSGWKTYKCSTKYPEIDKALKMSPHYKGMAAQSAQQTLKTVGEAIASYNKLVGLYYQGKVDKPKFPRYRKKGGFASVTFPKQALTYKEGLFYPSVSKESKPELLTQITLDPPDFIDPDWVKEVTIRPYYGQLWIDWIIDDGKQPVGINPKLDYSQAVGIDHGGDNWLTCVSTLGKSFIIDGKKLKSLNQGYFRLVAKYKQGKPDFYWDANLDRVQRKRNNQMRDGINKAARFLINRCLADGIGNIVFGWNEGQNNCSNMGRKGNQNFVVIPTKRLIERLKQLCSEYGINLIIIEESYTSKASFLDDDFLPKHGAKPEGWKPSGKRVRRGLYRTGSGKLINADSNGAANILRKVTTQSFDLTKVARGALTLPHRYDLFKSLSRSYRTKGVREASPSAIAARENRCGVTSFENPPRFSRGRCQHLRLADGDKSQICLRCLKQLGMNTLVGGHW

SEQ ID NO: 29928 - protein, 297 aa, unknown
  TnpB Polypeptide
MHLNRAFKDFFENPKNFRFPQFKSKKRSRRSYTTNNQKGTIQIMDHGIKLPKVGVIPAIVHRLPGPEWIIKSATISQKSDGSYYISLLCEKEEEEITPLPVADEKVLGLDYKSDGLYMDSNGRLGDMPKFFRKTQKRLAKRQRKLKNKDVHSKSYQKQLKKIAKLYVHTADQRKDFLHKKSAAITKQYDYVVVEDLNMRSMANKGFGNGKATLDNGYGMFLTMLEYKLHNKGGKLEKVDRWFPSSQLCNCCGFQNPEVKKLNIRTWTCPKCGSIHDRDLNAAVNIKDEGLRILRFAD

SEQ ID NO: 29929 - protein, 411 aa, Trichococcus sp.
VHPHLKKCRLTRDFSHELGGTVFSLALPLANTRSKVYNEAKEVSIMLKAYQFRLCPNREQKIYFANCFGSARFIFNQMLADRKEIYETYKDDKELLKSIKPRTYTSFKEEFPFLKEVDNLALANASKNLNKAYQNFFRDKSVGFPKFKAKHKSKASYTTNNQGGNIRIEDGKIKLPKIGFVKIKQHRDFNGLIKSCTISMNKADNYFISILVEQETPEWLPVEHKIGIDLGLSDFAITTNDAGESVKYANPKCLSRSEKKVKKAQRALSRKQKGSKNREKARIVLAKKHEKIANQRKDFLHKLPNHITDENQVIVIETLRSSNMMKNHKLAKAIGDVSWSEFCRQLTYKAEWKGRTLIKADRFYPSTQLCSVCGHRDGKKAPHIRDWTCPICGANHDRDINASLNLLALAK

SEQ ID NO: 29930 - protein, 463 aa, Methanosarcinales sp.
MVTTTIQKTVKLPVSPEITKRKLGRIEKLSARLTFAVSLYLNIIVENDITTRKEANRYQRVIAEQTGLSSAFVQCARDRALEMYRGYKKLHEKWKKKVKKLEKSLERARASKNKNRVKKLEKKLKRLIDREPSPPSVNKKPPIFFDRRIGEIVFSTCKKFKVWAKISTLRKYETIYIPLITYPYADDHLKWKIKGFRLLYNYRLKRWEVHVTVEREIEVHAKGYAGIDLGMKRLAYIKQVNKEGENRVLSFPKEDHRHFFRRVHELNNRIAKLQRKGKIKALKKLKNKRRNVALDFRRKLAKDVASNISNTVVFIGYPRNIREEHYKGNGNKLSRKRLNRWAFKEFGDILILKLRENENHAIFVGETYSTRTCSICGSRNTVVEDRNFYCKNCGVKFDRDENGATNILLIGMKKTGLDEVMLRAGAVVTRPLSVDDGSEELPEHTTSLQGVSSPVVGEGCSPF

SEQ ID NO: 29931 - protein, 286 aa, Desulfofundulus sp.
MTRVSGIAVKVQSNGWGREPLMVKLPKRLTNAAILQAQLVWHRNQYWLHVTVEKPALLKVQGDVCAAIDPGEVHALSITDGDEALVISGRLLRSLNRLRNKVLRQLQRAISRTSSGSRKRKKLLAKKYRFLNWIERRIEHILHSISAQAVRWCLEKYVKVVYTGNPEGVREKNCGKKHNQRMGQWAFGKLRALLEYKLKRHGIELIPVDERGTSGTCPVCGEYTKQTGRVFRCGNASCGISGIHRDVLGASGILDKAVNGNFTKGRKLPGKVEYLRPQVLAPQKAA

SEQ ID NO: 29932 - protein, 268 aa, unknown
  TnpB Polypeptide
MERELDVVRPEKAEHSKVLGVDCNVDDHSAVTSTGAFVGNADYLNHQRREFEKRRASFQQTGTRSAHLTFQRIGDRFGRWSEDYLHQCSKEIVAEAKRHGCTHIAFEDLEQIRERISDGKKFQQWAFRELQEQTEHKAELAGIVVETVEPSYTSQQCSTCGCTLEENRDGQQFQCLDCSYSVNADYNAVVRSHLTGSKREAFATAKNIARKLAVKLQRGQKSPAGGAFCQYALKSGTMTVNATDVASDAYVSAERESTDKPTASVVGR

SEQ ID NO: 29933 - protein, 359 aa, Bacillus sp.
MSQALTVKVKLIPTKEQISLLEQSSCEYIKVINMLVSEMVEAKKSTKKSTKDIEANIPSAVKNQAIKDAKSLFATKVKKSNYKVIPILKRPVCVWNNQNYSFDSTYISIPFMVNGKATRLKIRALLNDKNNRNLDLLTHKLGTLRITKKSNKWIAQISVALPINEKVGTRILGVDLGLKVPAVAITDDDKVRFFGNGRQNKYRKRKFRSVRKKLGKDKKMNAIRRFDDKEQRWMQEKDHKISREIINFAIANHISVIRLEQLTNIRQTARTSRKNEKNLHTWSFYRLSKFIEYKAILVGIKVEYVNPAYTSQSCPKCAEKNRAQDRKYKCQCGFETHRDIVGAMNIRYATVIDGNSQSA

SEQ ID NO: 29934 - protein, 409 aa, unknown
  TnpB Polypeptide
MKKVNRVEQQIIKRNNPIYKIVDQYCFYSKNVYNQANYIIRQEFINNKNKIGAYDVQKLMQSMDCYKECGSQAAQKTIQLVDKMWKGYFVAIKDWKKNPSKYLGMPKLPKYLPKDGRQVFMLKNRQCSLNDRQFRIAFKPFGGYTVNTHAEGKLMQCRFVPKADYYVMEIVYEIEVPETENIVSERIAAIDLGVDNLMTITTNCDVSPIIINGKPLKSINQYYNKKISEMRSALKLRNDSDWSNEMQRFTTKRNNQVDDYIQKSTKMVVNFCKCNDIDTLVCGYNSGWKQDTNMGKRVNQKFVTIPYLSIVQRLEYKCENEGIKFIKTNESYTSGTSFLDGEDPIEKNYNKDRRIYRGLFQSEKGEYINADVNGSYQIMKKVFPKAFVNGIEGAGSHPVVVNIPLQTVK

SEQ ID NO: 29935 - protein, 689 aa, unknown
  TnpB Polypeptide
MLSELDKYQVIKVPLAKILRDPEKNHPILFSAVKNCHIIVSLAYQLLRLYYLNLFEANKPLPILNQTICEYATSIINSPNKDGCETDLKRDLRDFYHSEYKSTIHYSLNYTGVPVSTILQSLSKEMATMFENNISMHFIKRLRLVIRHKLKTTFPKWDKYQINRGVSKIYDCLFDRDASNLSVELLPIYNFCLHEFIPEQAYTKSLAYDVEAHTHRYLLPTFKLNQYLELNHCKLFQPLPLRKSMVPCHIPLDTYALNYLFDLTKLTTNYNTKNKIANGLVSNPELKYLIWNHLFKLDNKIFKMDMNHKRPKQKPRYKFIYSITTDGVSCSIKFCHREHIDLHNNRFVKKDLRKTPFLTDEAEFIENDEYLLKIGKISKVERGKLLKMSELTPTEKEFYLKKPLVGGDPGLGNLIQLVNKKQHLKYTRQQRYRETHIIQNQKTVHKLRTLKIEVPNHYIEPNNPEPEPVNIQSMERCLNAYNSKTMDYDYFKEFLYLKNQVTAITLTHYLKAVYRKMGLRHYIYTKVSEARLVRNIKATFGSDIVILYGNWSRSTHMKYNAPVPGKGLRDLLAKYFTVIITDEFRSSSICYYSQDQVANRKFERQGAKKKKTKTNKKKIHRCLVCEECCSSKNGGKVPRFMNRDIMGALNILMLGQCDLKNKERPKAYKRAKFGKEETQATSSTLPKVV

SEQ ID NO: 29936 - protein, 416 aa, Bacterium sp.
MLVTQAFRFELDPNRAARVALAKHVGAARFAYNWGLARSLGALEKGERIPSAMELHKEWNRWKRENAPWWVEVSKCAPQEAFRDLEQAFRNWRRKLARKPRFKRKKAPPDNTARFRGSIRVTPRHVQLPRIGKIRVKERTDKLLALLSEGKARILSATVAREADRWYVSLTCEVERPDPLLRHGEPVGVDLGLASFLVLSDGTRVDAPKPLRRALRLLRRRSRQLSRKRKGSRNHAKAVLRLARVHRRVRNIRRDFLHKLTTWLAKTKSVVVVENLSVRRLMGGRLSRSVADAGWGTFQQMLEYKALWYGSQLVVAPLAFPSTRLCSCCGALGPKLGLSERRFRCQACGFEADRDLNAAQNLRAYGLAHLTGSTGSSPGSDACGDPSGGGTALLSRSTSYGSKKQEVASRLWDPAG

SEQ ID NO: 29937 - protein, 399 aa, Lentzea sp.
MMTNVKQVVQVRLLPTPEQASALLATLHTCNAAASWLSGQMRTHRVFRKFDVHKRFYTELREQFGLGAQPAIRVIGKTVDAYTTLRANLTAGNYGPPGSDRRRKVENTPIVFRLHAAQPFDARCLSWQLGDVGREGTVSVWTTAGRLRNVRIVGNPGHLALLRSRTAIGETDLLHRDGVWLLHAVVENPEAAQQDPANGFLGVDLGIVNIATTSDGDRFSGARLNRYCKRQQRIRKRLQAKKTSSARRLLKKRHRKEARFAADVNHRISKTIVAEAERTGRGIAVEELTGIRDRVRLRKPQRATLHSWAFAQLGQFLTYKAQQAGVVLAQVDPAYTSQTCHACGHVDKRNRRSQAVFHCGRCDFVGHADHNAAHNIAARGVVRWGEVMRPDAAPILAAS

SEQ ID NO: 29938 - protein, 371 aa, Gallionellaceae sp.
MALHTKTLRTRVKDKHAKQLSQWAFEVNQVFNAANELTANYAWVPIPGVGYMNCNTSEFDLNKELRGIRAERGLTIGAATVQSVIAQHAKSRRQFKKNKLQWRCSSGSKRALGWIPFKAAGVKLVNGQIRFCGEVFGIWDSYDLSKYELGTGSFSQDARGRWYFNTTVKVETKPGEGLAAVGIDLGLKTVATCSDGEKLDRRRITDEFAERMAKAQRANKTHLIKTIHARIKNSRQDALHKFTTTMAENYGAIFVGDVSSRKLVKTRMAKSVLDTGWGMLKTQLEYKAIARSVVFEVVNERNTTQTCSCCRSISDSSPKGRVGLGIREWTCHECGAVHDRDVNAARNILALGHERLAGGIPYLCAQAAAAG

SEQ ID NO: 29939 - protein, 404 aa, unknown
  TnpB Polypeptide
MKIQASATRAAYQHTRRTGDFGNQVKKAIKGNYMAGLNQRYVGDACGLAAQKRNTPSVIFGGKPAWRDLQKGKISKGEWQQRRNSQLYSRGDKTKRGNPNIRIVGNRILVNDPSERGRWIEGKFWMPDKFEFNPDCYDVRLIYRKGQIEVKISSEFETPQIVTKPVSQGTIGIDCNPDGLAIVETNSQGQLVHHHYEKEQRIRFAKSEKQTYDIRQLAVRVVLFAFLTKKPLVLEELRFRAGKQKNKKFNRMRSNFLHRQMLEAIKSRAVKMGVEVVEVNPAFTSVLGKLKYQDMYSLNVHTAAALVIARRGMGYLESQRFTDKLTGRGGSRVNLEGRSRKHTLRPRAWSWLRDEFLRPKNSWAHSPAIGSCNIAGMHGNPGEIPGGESYPITGRVRHSVSAER

SEQ ID NO: 29940 - protein, 311 aa, Thermoproteus sp.
  misc_feature (92)..(98): Xaa can be any naturally occurring amino acid
MENMGSVRRAVAVEVESPPPELSAVEEAYRRIVEEAAVYVAERGTLEREKYDELYRRFRELYPWLHSQLIQQAMNQGVEAGRSFLQRKKDGXXXXXXXLALSLPGGRREVWIKPHRRLWLYWWKALRGEAELASTLILKRRRGRWYAIFVFDVQPKRKSPAEAVAFDVNENTVAVAKVSLLSTVDAVARWNRRYVDPAIYSIRTDFGRLAKRYEAVRNAKLEELKGKYPFAGRDGEERAQNVADTREFRRFAGRLRERRRKDARVKQVAREVARSPAVIITEDLGKNPQDEMIGVEKKAKKGAKKKWRRGS

SEQ ID NO: 29941 - protein, 522 aa, Bifidobacterium sp.
MKRAYPHTLNAVNDTKRDCLLALFPAFRTALKTVLAHEARHLQQGGTLHRYVQLPDKRRVAGLSARQMKTVGNMVRNALLSWQALLERDVRAVVNGSTLTDWERMVLHRVNTRHAWWANDLCLPWAENGDGELRPCTMRTRGMLLLPVPAYLLKLSRRIVKHAITRTPIPDLSHVRTLVLDAIIAKPERPHTGGSERFGWWIRIATLAKGKPVLIPVDRNEHFEQHYAHAISHGGGLCGVVQLTQHDDGTLSCALVLDQPDAPLRTDGKPLGIDYGMADALMADSDGNLMGHAMLATLKRYDLRLTQLGAWLQRRHIKPSTNREYHRLQHRIRAYVTNEIGRILNRIAARHGDRKVRELIVERLDFRYGGMSPRMNRLVTRIGRAVFKQRLAALTENHGITVHDVPAPYTSQECSGCGYVSRRNRPSRARFTCRFCHKKQHADINAARVIMSRRSWQQPDDTGPASRRNTLRLLDERFRQRWNTPTQGAVMDVTGAPCGIRTATTNEENAGTSSRCHELTHN

SEQ ID NO: 29942 - protein, 361 aa, unknown
  TnpB Polypeptide
MIKAHRKFKTPTMRRSSRIYLTHLNKSKSETLKQFLLKCHDITQYFIDLFWRKDERSATLADLPTIHKGRDKFNTTTRLAQALAKQAKEIIRNRMNNRKPRLRRHTTNLYYHFVTVEKFEGSFDYAVNLIGSGAPKMTIPTKSTKHLNRMLKQGWTLSKTVRFGLDGDRIFIDFILEKPSPPLRKTGKILGMDNNYKNGLVFSDGRMIGKEIYDLIQTFDKRQKNTHEECKCLVDKIINGIDFTGVKMLVIEDLKKVKSGKRGKFPRRLNRRMSHWLYAHIVDRLSQRCEELGIRLVVKDPWKTSQRCSVCGKWDRRNRRGDKFICVHCGHSDQADLNAAKNLEFLGLAGVYGLRYLKSSG

SEQ ID NO: 29943 - protein, 300 aa, Microcystis sp.
TKYPNFKKKHQGGSAEFTKSAFKFKDRQIYLAKCTEPLPIRWSRQIPDGCEPSTVTVRLHPSGRWHISIRFDDPTIKPLPVTDKAIGIDLGISSLVITSDGGKVSNPKHFKKHYQRLRRAAKNLSRKQKGSKNREKARIKVARIHAQITDSRKDHLHKLTTQLVRENQTIVVENLAVKNMVKNPKLSQAISDVSWGEITRQLAYKCRWYGRNYIEIDRWFPSSKRCSNCGYIAEKMPLNVREWDCPSCGTHHDRDINASKNILAAGLAVSVCRATIRPEQSKSVKAGAKNPSGKKQKPKS

SEQ ID NO: 29944 - protein, 347 aa, Microcystis sp.
MEKAYSYRFYPTPEQESLLRRTLGCVRLVYNKALHERTQAWYEKQERVGYTETSSMLTDWKKQEELEFLNEVSCVPLQQGLRHLQTAFTNFFAGRTKYPNFKKKHQGGSAEFTKSAFKFKDRQIYLAKCTEPLPIRWSRQIPESCEPSTVTVRLHPSGRWHISIRFDDLTIKPLSVTDKAIGIDLGISSLVITSDGDKVSNPKHFKKHYRRLRKAQKNLSRKQKGSKNREKARIKVARIHAQITDSRKDHLHKLTTQLVRENQTIVVENLAVKNMVKNPKLSQAISDVSWGEITRQLAYKCRWYGRNYIGIDRWFPSSKRCSNCGHIALENAVKCSRMGLSRLWDAP

SEQ ID NO: 29945 - protein, 351 aa, Nonomuraea sp.
VRAGRKAGYPRFKGRGRFDTVQWPAVKNGATWDSQPHEPVTRVYLLGIGHVRVHRHRRVSGTVKMISVKREGARWFVVLSCDDVPTEPLPATGVVAGIDMGVASLATTSDGVHLDNQRHLAACADRLAAAQRDLARKERGSTRRRKAVARVAALHARVRRQRLDGAHKAALALVRAYDVIAHEDLRIIGMTRSASGTIEHPGRNVAQKAGLNRSILDAGWAVFLTILANKAESAGRELIAVDPRNTSRTCSRCGHCGKDNRLTQAEFQCVACGHGAHADVNAAKNILRAGLALREAAQAAWREAAVFRGAEESWYGSRDWPRGYQSCCPGMPGAAGGTPAAPRATAGSSAP

SEQ ID NO: 29946 - protein, 396 aa, unknown
  TnpB Polypeptide
MLLAHKIELRPTPDQAEYLARACGCRRHCYNPLLAHFSQDGVKWSKSAAYQHYMKTVRPLFPWYSDVSSRVTRNAIEDLDNAFKHFFRRVKNGEKPGYPVFKHKGDGDSFALRESEKFSVDGRTLKIEKLAAPIDMRQKLRFTGPTKQVTISQRAGKFYAAILVDTEDYDPCSPEKDATGMDFGVHALAVLSDGTEYPANQKLKANLERLARKQRRLARKQPGSNRRAKAKLSVAKLHKRVSDQRQAVLHELSDAVTSEYQLVCLEDLNVAGMTKSHNLARAINDAGFGTLRRMIEYKADLRGGQVAVIGRFEPSTRLCSQCGQLHDMPLGKEWMDCDCGNLMTRDHNAAINILNFGLDTLTPDLKRAQETCKTVTDHGTVDDGAKTDKPRLSGFA

SEQ ID NO: 29947 - protein, 469 aa, unknown
  TnpB Polypeptide
MATMANSTVLEVKKKREPFVPPDGWVVQAFQFALDLTDDQRRICARQWGGRRYAYNWTLRTIKTGVDNYNATGVESEPPSFYRLRKQWNAAKDTLCVDSETGEMWWPEVGKEAFADGVRGAVEGYWNWQRSKSGNRKGRKMGFPRFKKKGRDQDRFTITTGVMRLEPDRRHLSISKLGCVRTHENTRKIERLVTSGRARILAVTVRRSGSRAIASLRVIVARPQQPSSGATSVVGVDVGVHTLATVANAEGRVLERVANPTPLANELSALRRLNRQRSRRQKGSRQYRASNEQITRLHRRIRDIRVHHIHNLTTRLAKTHGTIVVEGLDAAGMLCQKGLNGARARRRGLADAALAEPRRQLRYKCSWYGSQLIEADRFFPSSKTCHTCGHVQDIGWARSWTCDECRAIHDRDDNAAINLARWPKCQSDDLGGVAAPVKHGAVHKTGPRPAAGVDMRKSRRTERLAGATP

SEQ ID NO: 29948 - protein, 499 aa, unknown
  TnpB Polypeptide
MSRARKTIRQQLDYRPEIAGWFEETKALFNRVTAFYFEVIDAHPEVLKLDGNGPRDTLERLTHRTKTNPEPAMPLAAVADNLPALMRRTAIQAALGAAHSFHSNLARWHREKEQALGKGKKFRKRPPVAPRRWNASFTLYAGMWKERTANSILLKLWTGTSWCWVKLHVLGREIPEDWEAGSLQVVQHGKHWWLHTFVEKDVSNPGTVKEQVMGTPATQVCSVKLSASEALAVCTIQTREGTALATRFIGGGRRLNGLRKSLLGRVARRRADTGIIALGEADNAHLWAKVRNLDEQVAHRTSRRIVEFARAHGAAIVVFEHLPPHHLKKGTYSQRENEKRASWLCSRIYRYSQYKAWAEGMVTCRVTSRQNSRECANCKSPVARYSEGQAASGYTPGAPLVFCEKCGMRGNADRNASLNIGKRLFARYQKQEKPQTRPLAGRLSKERGVPVSEGAESGGRPRTEPARQGEGDGHGAAQGQRRGVARTGQVFLAEYDPVE

SEQ ID NO: 29949 - protein, 409 aa, Moorea sp.
MRVVERHIVKPSNQYWKEIDELAFKSKNLYNLANYHCRQRFFEAGSSLSLTALYHATKSSDAYRALPTKVSKQIIKRVTSTWRGYFQGYKEWRKYPDKFFAEPKIPKYKDKQKGRNVVIYSHESVYKSALKQGICHLSMSNIQMPTKVQKVVEVRIVPATACYFIEIVYEQPLQQSVNSNYIAGVDLGIDRLVALSTNKPGVRPMLINGKPLKSVNQHYNKLKAKYQSNLTCQRRTSKKIESLTYYRNRFVDNYLHQTSRRIVDYLIEHNIKTLVIGKNDNWKQKVNIGKRNNQQFTQIPHSKLVQQLTYKCQLVGIEVIETEESYTSITSALDLENPCQHETYKGRRVKRGLFKSSSGQVINADVNGSLQIIRKYFPEAFTVEEIVSCAVQPLLVNPVRKTKQQFSTV

SEQ ID NO: 29950 - protein, 397 aa, Nonomuraea sp.
VQLRYSFRLDPTPMQRIALARAFGCARVVFNDALAARRQAHADGLAFISDGDLSKHVITEAKQRPDRVWLGEVSAVVLQQALADACMAYRNFFASLSRKRKGPKIAAPRFRSRRDQRQAIRFTRNARFKVGEKLTLPKIGDIAVRWSRRLPSVPSSVTVIKDAAGRYFASFVVEVNQHPLPQKQTETGIDLGLEHFAVLADGRRIDSPRFLRRAEKKLRKLQKALSRKQKGSSNRAKARIKVARQHVKVADGRREFHHQESTRIVRENQAIFVEDLAVNGLARTRLAKSVHDAGWSAFTAMLEYKAKLYGRTFARIDRFFPSSKLCSVCGTLAEQMPLAVRKWDCSCGAHHDRDVNAAINILAAGRAERRNACGGQVRPSLAVAQADEAGSRGSAAA

SEQ ID NO: 29951 - protein, 480 aa, unknown
  TnpB Polypeptide
MFSVNLYKIKIVKGRNKMSKEIIKTVKQYSFPLSDEETGILERTGKAFRNCRNYFFSRFYGIKSIARLENGRKLRDSLMKENLKNIAGMPARYWKIALVRVLGDLKTLLENVKQKIRKAMYNNQNLSASDRHYMNTVLKKDKDLGEVLNMKKLSEYLYKKFDVNFRRLNSLIRRYYRRYKGKIPYSHKTNFLLLDADMYRYEKGMIAISTIKKGRRIPIKLKDERIFKGNLTLKWDARLIIYGTAKIECREEGNPENVVAIDKGRRKLVTSTSGNSYGTRYSDLTKDLIEKQERKMKERQFYWNLYRNFLKSEKTLKAENVLLNNLGKKKFNKFSERIREKSRSYINHELDLFFETEKPTEIIKEDLTWENLNGKSRGKNFNRIISRWEKGYLNSQIEWKSEQRGIKVTNVNPAYTSQICHICDNFGNRDGETFTCPHCDSKMDADVNAAHNIMKRKEIEGINIYTSASKVKEHYLKLNN

SEQ ID NO: 29952 - protein, 273 aa, Lactobacillus sp.
GKSIIKTAGKRYLKIPKLGYVKTSKTGVLQNTKIKRYTVLLEPTGKYYLSLQAEISEPEKYSLTDKQVGIDVGVADLAILSNGLKYPSFNSSYFEKKAKVWQRKYARRRHLVKLLVLQNKNKRVLCPRSLESFTNWQKAQKSKAKCQAKAANQRRDYLHKLTTHLVKQYDVIAIEDLKTKNLQKNHHLAKSIANASWRMFRQMLEYKCEWYGKKLIAVDPKNTSRICSKYGYNSGAKPLEIREWTCSKCQTKHDRDINVAINILYKGSTKLNG

SEQ ID NO: 29953 - protein, 332 aa, Oceanospirillales sp.
VKWSKKAAHEKYKALRIEFPWYAEVSQRVTRNAVDDLYNAFTHFFRRVKKGEKPGFPKFKKRGLHDSFALREKPKFDVDNRTLRIEKLKTRIKMREALRFTGTLCQVTISKRAGKYFAALLVDTQDYDPKHQAQESVGVDFGIKDLAICSNGQTFAANQKLKHSLKRLARKQRALSRKVKGSKRRAKAKQAVAKLHYRIHNQRLAVLHEVSDYLTAHFKVITIEDLNVRGMTKNHKLARAVNDAGFGMLRQFIECKAELRDSQVVIADRFFPSSKTCSACGYKKDAVVLGVDSWNCPECKAHHDRDLNASVNLDRYGRDTLQLDPNPYTRVA

SEQ ID NO: 29954 - protein, 392 aa, unknown
  TnpB Polypeptide
MLRANKYRISPNEAQKVLLNKHIGASRFIFNLALETKTTAYASSGVNLSCFDLIKQIPDLKKECEWLKEVNSQSLQAPIRNLDNGFTRFFKGQGNFPKYKSKWKGKQSFHIPQNVKVEGGKLVIPKFKKKGIKINLHRPLEDTIKSATISRTPTGKYFVSILCDTGTECLPKTKITKETTVGIDLGIKDFLITSDGEVVDNPKYLRKTESKLKYIQRKYSKYKGKRTKNKLAKLHEKVANQRKDFLHKQSSKLVKENHSMAIEDLNVKGMLKNHCLAKSISDVGWSMFTTMLEYKCEWYGVNLLKIGRFEPSSKTCSNCGTVNKELTLKDREWTCKSCGTLHDRDINAAVNIKNFSLRNHVSGTDTKTRNELSTLVEVLTSEAQPISFALGE

SEQ ID NO: 29955 - protein, 212 aa, Clostridioides sp.
MLLYLKSQVVDIEAFENTNNQIGLDLGIKEFCISSCGEFIENPKYLKKSLNKLAKLQRELSRKTIGSLNRNKARLKVARFQEHIANQRNDFLQKLSTKLIKENDIICIEDLQVKNMIRNRKLSRLISDVSWSEFIRQLEYKANWYGRQIVKVGKFFASSQICNKCGYKNEEVKDLNIREWICPSCNETHDRDINASINILKEGLRLITIQNK

SEQ ID NO: 29956 - protein, 357 aa, Xylanimicrobium sp.
MFLARHIVAHARTRHPFPNLSRVHTIKLDSPVAPIHHRPGSLFPWWVRVSTLHAGKPVWVPLTRNPRLDTWLGQPGAVLAGNVQLHQGTDGQIGVSLVVKAPNVTERDGEHYLGLDWGACVLFATSDGRLYGRRMLTRLRELDAVLTAHTADLNRRHIKWKTDRYYRVLHAKITGYVTNEVGRVLNLIANDTTVTGLVVEKLDFRHGGLSKTMNRIISIAGRATVKKKLDRLTETHGITHTGVQSAYTSQQCSHCHYTHKSNRRTRDRFRCKCCGLSLHADINGARCIQARRSDQEINTSNGAYKSGRDAILRTLTTRHTQTCHRDHTQRTRPLTGRRDGQDQHNPALATTASPKIP

SEQ ID NO: 29957 - protein, 394 aa, Cyanobacteria sp.
MRHVAQVRIYPNSDQQTSLAKAFGCVRWLWNNSLAENNRVYKETGFGLSRTALNSRLPSLKKEYPWLAETYSQVYQASMLNLSRALINFFEGRARFPRFKSKHGKQSLQYPQNVKLGDHSLYFPKIGWVVSKIHRTFEGKLKTVTVSKNKRGHYYASLLFDDGKPEPQISTNGKAVSIDLGVKEFAITSDGSKFPNPKHLPKHEVNLKRKQKNLSRKKKGSNRRQKSRQKLARAHEKVSNARQDFHHKLSRKLVNENQVIIAENLNVKGMLRNHKLARSIADCGWGIFLNFVSYKATEDGKTFLEIDRFFPSSKTCNYCLNVVDSLPLDVRNWTCSSCQTKHDRDINAAINIRDEGLRVLASGTEATASGGNVRPARGRKSSVLANAVEAGSQR

SEQ ID NO: 29958 - protein, 450 aa, Bacteroidetes sp.
MISIAHKIELKPNNKQKTYFRKAFGCARLAYNWGLAEWKRMYEAGEKTHGWEIKKRFNAIKKEQFPFVYEVTKCATQQPFDNLQRAFDNFFRDLKQGKVSYPQFKKKRDNEGSFYLDADNIKLSETNRNSKVLEKITSRENSKCQYIHLPNMKHGGWVKMAEHIRFNYVKINNVCISQSGGKFYASFSLEITEDEYHRTHWPMDSVDASRKVGIDMGVHNAIILSDGIKIDDPKPLKQNLRKQKRLSRQLSKRQHAKTKQERLEGVKKSNNYKKLSRRLGNLDRHIANIRRDFTQKLTTVITTHYAEIAIEDLNVKGMQKNHRLARSVSDVAMGEMRRQIEYKAALNGASVTKADRFYPSSKTCSCCGAIKRDLTLKERTYICPSCGAVIDRDYNASLNLLSLITKKIGMDSPESTPADLMALLSRFTVNGIATSKVETGKQQKSYVLHI

SEQ ID NO: 29959 - protein, 380 aa, Boseongicola sp.
MLKAIKVRLHPTVEQREALAFQFGAVRWAYNFALEWRMKAWEDHGESVTKRMTLDKLVELKSVEATSWLKDADSQALQQSVIHLDDAFGRFFGRRACHPRFKTRHGRQSMSYPQRVKVVDGRALYLPKVGTVRAVLHRAVEGRIKTVTVSRSPTGRHYASILVDDGRDLPEPLKVMDGERVAGIDLGLADVVVESSGRKTPNPRFVKRTAANLRRKQKNLSRKRRGSANRAKARVLVAKAHERTMNARGDFQHKLSRRLVDENQAICVETLGVRNMLGNRSLAAHIQDAAWGGFVRKLEYKCVWSGHRLVKADRWFASSKICSGCGARVRKLPLSVRRWTCAACGDEHDRDVNAAVNLRRHGILALKAEGLSVSACGGLR

SEQ ID NO: 29960 - protein, 434 aa, unknown
  TnpB Polypeptide
MLPKRRSGVDLKTISISNPKSEKKTMWYSYKYRLNPSGSLQKELLHHIDTCRQLYNHVLYLLNESNGIPAQYAVQGRLPDLKKWWNELNDIHSKVLQMVVKRVYDNLSRLKAQKENGRPVGMLNWKRPRDYRSLTYNQSGFKLKNTSGRSVLWLSKIGEIPITLHRDIPEGVNIKQVTVKQEPTGRWYATFVIQVDEGTTEKPDVPKKVVGIDVGVLKYAHDTDGYAIESPDFSKERDRLVRAQRGLSRKEHSSKNWEEQRKVVARRHADLKRKRQDFLHKLSNYYATEYDLVAVEDLDAKGLVELPGNSRNRVEAAWGTFRRMLEYKCEREGTHFVAVNPRGTTKECASCGVKTEKPLWVREHSCPSCGFEADRDANAAWNILSRGLEDVGVVHSEPTLVETALPVDTPVSAKRVIEAGSPIPKERTVQAPTE

SEQ ID NO: 29961 - protein, 391 aa, unknown
  TnpB Polypeptide
MFFEMKLSRTVVCKLKPSAEDFEKLLSTIEAFRDACNYISKVAFERRVFNPVALHHMVYRETRQEFNLPANLAIRARDRVAKAYKQRRDKLLKFTKLSMDLDERLFRLIYKPDGIHASISTVQKRVKPPLDIGDYQRKLLEDARPTHAVLVYRDKQFFLHITVEREIPEPKGSNPIGVDIGMNNLLVASNGFKVKGKSILKKRRRFRELRSSLQSKGTKSAKRRLKRLSKKERRWVNTVLHQVSRKFVSALKEGDVVVMEKLTGIRNRAKHRKSQNGDFHSWSFRKLQSLIEYKALEKGIPVVYVNPRNTSKTCPRCGHIDRANRRTQPLFRCIRCGFQHNADYVASLNLSKLELARLGQAPVNVPNVGMNDDFGIIHYDSPTSPQAYSRG

SEQ ID NO: 29962 - protein, 387 aa, Escherichia sp.
  misc_feature (260)..(291): Xaa can be any naturally occurring amino acid
VKRLQAFKFQLRPGGQQECEMRRFAGACRFVFNRALARQNENHEAGNKYIPYGKMASWLVEWKNATETQWLKDSPSQPLQQSLKDLERAYKNFFRKRAAFPRFKKRGQNDAFRYPQGVKLDQENSRIFLPKLGWMRYRNSRQVTGVVKNVTVSQSCGKWYISIQTESEVSTPVHPSASMIGLDAGVAKLATLSDGTVFGPVNSFQKNQKTLARLQRQLSRKVKFSNNWQKQKRKIQRLHSRIANIRRDYLHKVTTTVSKXXXXXXXXXXXXXXXXXXXXXXXXXXXXXXXXMRRQLEYKQLWSGGQVLAVPPAYTSQRCACCGHTAKENRLSQSQFRCQVCGYTANADVNGARNILAAGHAVLACGEMVQSGRPLKQEPTEMIQATA

SEQ ID NO: 29963 - protein, 627 aa, unknown
  TnpB Polypeptide
MAKTQMLSFPLRLPDCMQAESLRLLDESRLAINVIIEELWASLDEFAGERKGIAWKQVEHYLMTRSGHGSRQERCEMEQAGRILRAQATRKQVFQTILPLLTDELIKPAEGKRKAHKDYRLIKEKVSALRKALDDPDSYMAMTNVIEQACNHFLKNEAWPQTYEDLQPVPVMSVGQLTFAGDDGLEKGQTYRAKIDYVHMCDLVTHEERQRARLYLHLRAPSESGTWTWGQVCGVIELPESVVSRLSQGAMPQAPTLREIRTDDGSRLAVLDLILEVPATYVNELDQECRVLGWDWGVRSLITVSILEKPEGDGQESYRQISRPVFLESGGLDGRQARLRREIDRLKACRERYGKLVKEAVIARVEHKKPLPAHFQKWQDHVDAYEARIEICWKKYEKRNRELAHLASNLLILLALLYDCRLICGENLTTLKTIGCGRGVRGRFRNWRNNSQVRGELWRVLRYKCYLLGIRLRDVEARGTTHTCPRCHQPAKTYLSPDPSHRKKADDWAPWLCCGNPECGWNGARDYAASLNIARLGMAYLVTYHQTKRYHPYRMSESKDSLKPASYTGAGAALLLRPQGITPRPFEGKRVYYAGWSYSIALRTSHPKRVLAILSASRFRKCLLDST

SEQ ID NO: 29964 - protein, 386 aa, unknown
  TnpB Polypeptide
MIIRKGYRFLLKPTAEQAELFCRFAGSSRFVWNKALEYQKNCVENGKGVFSYAEICSGLVKWKEEFHFLKEVHSQPLQQSVKDLSLALKNCLDGSKGFPRFKKKGTTHDSFRFPQGTKLDNKQVYLPKIGWVKFRKSQEIEGTIKNMTVSRSMGKWFVSIQVEMEVQDPVHPSKKEVGIDMGVTRFATLSDGTFVAPINGFGKMKTKLARAQRELSRKQKYSNNWLKQKRKVQLIHSKIAHVRKDFLHKLTSTISKNHAVIVLEDLKVTNMSASAKGTIEDPGKNVKAKSGLNRSILDQGWYEFRRQLGYKQQWRGGQVILVNPSHTSLQCSACQNRTKENRVSQSDFKCVMCHHEEHADMNAAKNILAAGRAVQACGDIIKQVAA

SEQ ID NO: 29965 - protein, 467 aa, Thioalkalivibrio sp.
MSMHGQRFRCYPNRGQEKTLLRWIGCQRFLYNAKVREDRYFRTFARKALSLAGQKPPIDQQYSHFIGSDTEWLREVPSQVLRNGAVRWRQAYGRFFQKRAHRPTMHGKGGEQGVWLTRELFAFEDAGAGGYQLRIGTKKHPVGPLRYVADRPHDRPASIVISINAGQWHVSFATEEDVVYPRPAEIQAELSQWDAGALHAATLGVDRGVVVPAYASNGTVYAFDPVQQRRMARKERQRQRWQRRMARRTQGSSGRHQARTRVARTYTYANNVRKDLAHKASHALVTTPGIRLVAMEDLRVSAMTRRPQAKTDDQGRPAANGARAKAGLNKGILGSVWGRIKTYAQYKAPKHNVLFLLVPPHHSSQECAVCGHIHPDNRPTQSRFVCQRCGQTDHADHNASRVIARRGVSAVLGPCKTHAQPVGAVRPEPPSADGYAGGDHGKSQTGPRPPAHGSSKPETMPTTASAV

SEQ ID NO: 29966 - protein, 444 aa, Okeania sp.
LVAFAGATLRERVVWNDSLACCQEKYESGGKKPTNSQLQKQFITQAKNTEDREWLKEVSNIPLQQSLNDLNQAYQNFFKSTKGQRKGKPVKPPKFKSRKSKQTARFTRGGFKVGQHKVYLAKIGKLKIVWSRELPAPPSSVTIIKDSANRYFLSFVVETCAKILPQIDNSVGIDLGIKTFATFSDGTKVDAPKPLKKRIKKYRKLSKSLSKKTLKSKRYGKARLRVAKFSYGMLRKHAKLKDTRTDFLHKLSTEIIRENQTIVLEDLNVSGMVKNRKLSRAISDLGWRTFRTLLEGKAEKYGRDLRVINRWEPTSQKCSCCGFRGGKLDLQVREWECLNCGAKHDRDKNAAINILVAGGQSETKNGRGGKRKTTAKVAAACVSGALRQQNVNPPRSYGLVGIPAPLGRGGCQVDSNWVWEHSPPNLGAPGVRQKVKKNIVSLIS

SEQ ID NO: 29967 - protein, 394 aa, unknown
  TnpB Polypeptide
MSRYRLAPTAIQEIALRDHCAHARFVWNLAVEQHSWWQPGRKSAPGYLEQCRQLTQARAQYDWLRQGSQMVQQQALRDFAQALVNFFAGTHSRPTWRKAGRDEGFRIVAVKPGHVRRVSRHTGEAWIPKAGWVRFRWSRAVPATAKSYRVTRDRAGRWHIAFAAIPAPISAPGNDETVGVDRGVAVSAALSTGQMLTVPRPGPARQRRLRHLQRKLARASRGSNRRARVKRAIAKLKAREADARKDWAEKTSTDLARRFDLIRVEDLRVVGMTRSARGTIAEPGRRVRAKAGLNRGILASAWGLLVRRLQDKAPSRVEKVNAAFTSQRCSACGHIAAGSRQSQALFRCVACGFACNADVNAARNIAAGHAVTARGGDGIARPVNREPHLLLQSA

SEQ ID NO: 29968 - protein, 231 aa, unknown
  TnpB Polypeptide
VDIGDLRIVPMGNTFIVELTYRVRREEKDLSKSVSLDSSEALFCDLGIDNFATFVSTKPGVRPFLIKGKVLKSLNQNYNKQVAELRSKGHRAHICTKGVKRYWRLHDLLHKASRLVINYCLAYDVGHIVIGVNQEWKQEVNLGKRNNQNFVMLPHRKFVEMIRYKAEDYGIRVTVREESYTSKASALDFDEMPTFDKKESGAKPVFSGRRIKRGLYRSAKGQLINADTNIG

SEQ ID NO: 29969 - protein, 659 aa, Micromonospora sp.
VSGKLRLVEGETARTACARAVLRTGVDEATGEVLSAAVLAQRVGWCADLVAGMAGVLVGEHWNSVDVEVLAGGVDAGGRRLPSRAWMALRRLGWTVAPPPGVRVNDRVVRMAQEQAGRVLRSAAWRAEVTAGILSTWPADPRKRTPAEWDQVRKAIPGGQHLPSNVIKGRTRQVVTFGKVNGRLPVDVFELEGVPRIGRMLLLAACDRQQATIERSDTDPAKALLRLQLPTRPDPQTYRDWTWVACPIRLPSTVPAEAVLHLPTLRLADGTVRADMAYTHVVPKARTTGHSVAVGVDWGLNTLLSAGALRLQADGRITALGAGGQFRAAGVLAKQHRLRRHSERLHAKADQYARLLGGRPDEHLGAKHEVLAGEIRHVSARRQNLNDALAWAAARWAVDQAIATRASVIYLEDLRSMEAKGMGHTLNTRLSQQVRGKISDRMRHLAAEHGIAVVTAPARNTSKHCPQCLTPLQHRKAPDRPTTPGWKWAICPNTGCGWQGDRDHGAWRRIAARGLTHQGKTVIDKTSGAMVIRSVVDELEAAAVVTPSASKTSRWDRSKSGPTRHKPPRSAPRRRRAPSPTRPHSLAGKRPEGHAPTDRLRLPRAAHRHQGVNTISTPTTTGHRPCGAALGAGFHLHAHATPPRWETIPETPSGSGSQS

SEQ ID NO: 29970 - protein, 406 aa, Halorhabdus sp.
MEINRTAVVKLSVPSDRRDDLKRTMNTFRDATQWFADRGWDGDDDGYVITSGNHLQRLVYDDIREDTGLHADLTVAAADHAANVLDGCVEKMKAGERTSKPVFTSNTTVYNTNAITYFDGYCSLAAYGGSRVHAEYIYPDDSIQAEYMESDEWQKQGAKLRYDHQSDTYYLHVSVKKEREDSSGEAENQSTVLGVDRNVDGYLAVTSTGAFIGNADLLNHKRREYERRRARLQQQGTRSAHITIQSIGDTFANWSEDFLHQASKELIKEAVSQNCTTIVFENLENIRDCISNASKFQQWAFNELKRQVEYKAKAEGISVRTVHPAYTSQRCSETGCGFTHEDNRDGDEFACQKCGKELHSDYNAARNIAHKYIQNRRKSGSGGVTYHLALKSGTVNGNGDYSPSTV

SEQ ID NO: 29971 - protein, 450 aa, Halorhabdus sp.
VKRTNTFAVRPLTDDDEQVLRDLLDACAALWNEINYQRLMRYNDEDGFEGEDVWDADTGKLEGKYKGVLGASTAQTVRRANTEAWRGFFENKKAYHDESNTSVTEHPEPPGFRGNEDDGRVLKGVVRKDAYTVEWGDCSRLEMVVGKELRDRHNSPKSRLRLEIVGDPNWPDYEDQGRLELWYDETDSTFRASQPVTVSADTRDTPLADEKAALDIGANNLVACTTTTGEQYLYEGRELFQRFRETTREIARLQSKLKENRYTSKRIRRLYRKRTRRRDHAQEALCRDLLERLYAEGVDTVYVGGLTDVLETHWSVKVNAKTHNFWAFKQFTERLACTAEEYGISVEVRSEAWTSQECPQCGGTDRTTRHQDTLTCPCGFEGHADLTASETFLRRQTEQAVRPMARPVRFEWDDHNWSEPQHSPARESPKEQRTDPSTVHRDGNIASGES

SEQ ID NO: 29972 - protein, 370 aa, unknown
  TnpB Polypeptide
MKRTIAIKLILTQEQSESLLETQNVFADACNKVVPFSVENRCWNRVAMHHLCYYSIRESLPSIGSQMTCNAIKKVCASYKVLKIKRSQDVPIIKFRENGSVHYDKRTYSLSGDILSLFTINGRIKCGFKLGEFQREYLKYSIVKEAELIRKGKRWFFNLVLDLPDKEFKKEGKIFAIDVGENNLATTSNGTIHGGGKLRHERDIFLARRAKLQSNGSKSAKRCLKRISGIERKHVKEINHIVSKKIVEEAANSEARIIVLEDLKNIRKRIKANRRIRSRLHRWAWYELQQFIEYKSRAKGIEVMYINPAFTSQTCSKCGVLGSRHKHLFKCSNCGSYQHSDRNAAINILKLGESVVSSTAPVNVPMVAAL

SEQ ID NO: 29973 - protein, 362 aa, unknown
  TnpB Polypeptide
MRTAYKFRMYPNKQQEATLDLTLETCRHLYNLALADRKTVYEVEGVSRSYEDQAAMLTAERRNGNFSGIYAHCLQDVLRRLDKSFKAFFRRVRAGGNPGYPRFKGRGWYKSFTYPDANTGYKMDGSKLTLSKIGSIRIFKHRDVEGKIKTCTIKKNKVGHWYAILVTEIEDVPEIEPRTAIGIDVGLKNQVTTSTGEALQYPRYYIQAEQKLAVAQRDLSRKKKGSSNRQKAKAKVARLHQKIQNQRDELLHQVSRKLVDSADLIVFENLNISGMLKNHHLAKHIQDHAWGKLIQFTQSKAAKAGKVVELVDARYTSQKCSQCGIMVPKTLADRMHHCPNVRAGDGQGYQRQCQYSHPRTEG

SEQ ID NO: 29974 - protein, 370 aa, unknown
  TnpB Polypeptide
MKINKAFKFRIYPNNTQKQFLAQSFGCARFVYNRFLRQRIDYYAENSKGLTYYDTQTSLTLLKKDSEFEWLKDVNSQSLQVSLQNLDLAYNNFFNKKAKFPNFKKKSNKQSFGVPQNFSIHDNVLDIPKCKGIKIKLHRDIEGTMKSITISKTPSGKYFASVLCELEIPEPIYSGDEIGIDYGVKAFITTSEGEIIESPNYLRKSEKKLNQLSKSFSKKQPNAKNRYKAQKQLARQHEKVSNQRQDFLNKLSKRLVCDNQAIYIESLAIRNMIQNHCLAKSISDSGWNTFVNMLKYKGAWYGCRIIEIDRWFPSSKRCHKCGYINNNLTLKDRSWLCPECNTDHDRDVNASINILTFGRAGIAQTSRSAE

SEQ ID NO: 29975 - protein, 397 aa, Amycolatopsis sp.
LITMSRYRLLPTPVQVAGLLEHARQARFVWNLAVEQHAYRRPGGGAAPGYFEQARQLTEARAEFAWLRAGSVTVQQQALRDFAQAMRNFFAGTTRQPSWRKAGRDEGFRQVAVKPDHVQRLGRKAGRAWVPKVGWVRFRWSRVVPGGVKSYRITRDAAHRWHLAFAAVPDPIPAPGNGAVVGVDRGVVVSAALSTGELLVVPPLTAGERRRLLRLQRKFARCVPGSRRRANVKAAIAKLKARERDRRKDWVEKTSTELARRFDVIRIENLDVTSMTRSARGTRERPGVHVPSKAGLNRGILASGWGLLATRLEHKAAGRVEKTKAAYTSQTCSVCGHRASENRKSQAVFRCVACGHRANADVNAARNIAAGQAVAARGDLGNSRSAKREPHLSTSLA

SEQ ID NO: 29976 - protein, 349 aa, unknown
  TnpB Polypeptide
LRETHGLLAQMTQSAIRRVIANYKAIHTRIANLREESKGKKNGKRRKRRKIPAYYSIKPQYAPDGADLLWNRDYSYSTKTGLFSLPVMDGRIKVKAEWASIPDQYRHGRFGTARLIRKRDKWHLLIPVTIPTPDATEHPKTIVGIDLGIRFLATSYDGERTVFYDGKEVKHRRGKYKELRKQLQHRGTRSARKRLKAIGSRENRWMTDINHQVSKALVNQYGKDTLFTLEDLTGIRNTAETVKVQQRYVQVSWAFSQLRSFIEYKAARNGQATIAVDPAYTSQTCPRCGYVSRKNRNKETHTFRCRNCGYRSNDDRVAAMNLRHKGYDLTVMQCDANTLDVAGVQPTIP

SEQ ID NO: 29977 - protein, 439 aa, unknown
  TnpB Polypeptide
MRRSNQFDVRPRTGRDAEILHRVLDASASLWNEVNYERRQQFFEDESVWNADTGAIEGQYKGILGAATTQQVIRRNSEAWRSFFACLEDPDEDANLPGYWGNEDDGRELRTFIRGDQYTIETSERSRVEIPVGKHLKDEYGLGYRDRLRLEVKGDPHWNGDHGQLIIAYDDVTDAFRAFQPVTVDDSRLDTPLASEEAALDIGANNLIACTTTTGHQSLYDGRELFEEFRETTERIAYYQSKLGDQRRTSNRIDRLYRDRTNRRDHAQDAAVRHLIETLHDEGVETVYVGDLKGVLSTHWSCEVNEKTHSFWAFRCFIERLECVAEEYGIEVEEESEAWTSQECPECGEREETVRHEDTVTCPCGFEGHADLVASRSFLERGSSREVRSMARPVCLKWNKHEWREDHNSPPFTGITANEERTNQSTTNGKVASVDVQTD

SEQ ID NO: 29978 - protein, 453 aa, unknown
  TnpB Polypeptide
MSGDGSHVTVKASIRNYSQVTSDLDEHGRSGSKLWNVACWTARRIWDETGSIPEDDVLKSYLKGSDAYRGLHSQSSQRVLEELAEAFESWYAHRRNGNTQHNPPGYRKHYHNDGTTSHPRSTITWKQRGFKHDAENNRVRLSKGKNHKEDVSDFILCEYEAPPGKTVQNVQTVRAVFVHGRWELHFVCSHELQAESPGEKTAGADLGIVNFAAVSINGEHAHLYPGNAFKEDEYYFAKQIAKCNDSDSRKAIRLQDKRRARRSHYIHAATSHIIERCVEAGVGTLRVGNPKHIREDESGDPRDWGPHGNLDLHAWPFDAVLHQLQYKGAWNGITVDAVDERNTSKTCSCCGEATQSNRVERGLYTCSRCGVVANADVNGAENIRHAPLRADGGTKSEVTQSSLEQFEDLSSAGVVNMSTGWLAQPVVNLFHRGEHGQSSGQGTFTQHVNSHEP

SEQ ID NO: 29979 - protein, 342 aa, Coriobacteriaceae sp.
MSYQRKKSPKGNYCGVVCRLYPNRTQERAFEATFEAVDAAYDELLGWCVGMWSERYGYPKKPFVDKAIAGGKVWKEGPAASLPDDVLGYVEDAVLKALERATRSDPPVPRAEKAQRYNRSYTTKGSGGDLPRRDGRKHLAIPGVGSVKASIPREFAHIYSVTVRRVPDGRYFASVLTWLPTCAAATANTKAVVVASLGTDVLVRLEGGGAEWACPKAWRKNRDRLADADRRLSSQEPGSDAWERERRRRARLHAHVAAIRHDWTHKLTNELTRDYGEIWVPTTNFADLIEGNPRASFLTDAAWGELVRQLRYKCKWRGVALHEVEGKAVRTDGGVELVPEVP

SEQ ID NO: 29980 - protein, 256 aa, unknown
  TnpB Polypeptide
LHGRLKLPKAGWVRIRQHRKIEEGYQLKGATITQEADERYYVALLYSCEEPVNEIRKAESAIGLDFSMKELYVDSNGNRAAYPHFFSKAQKKLAREQRKLSHCEQGSNRYKKQKKKVARIHTHIAHQRKDFLHKESRKIANSYDIVCMEDLNMKEMSQDMCFGKRVHDNGWGMFTDFLAYKMERAGKKLVRIDRWYPSSKTCSCCGNIKEDLQLSDRIYECACGNRMDRDQNAAINICREGIRISGMILDTEKKIS

SEQ ID NO: 29981 - protein, 453 aa, unknown
  TnpB Polypeptide
MKQIISAKLKLITTNEQHRALRETQLAYRDGLNAVSQYAFTHGKTSSVTKLHKGMYAELRMRYHLPSQLACSVERQVAATYKGLWTKLLNNREHLRMKITKKRFKGLDKPPHYSSPTVQYTYERDYTFQCEQQVSLRTLNGRISLPYQGYFKHLLLIQQGASIAQIGDAKLWYDHPKKQFYLLASLEITLPDPTCDDLTETVGVDVGVRYLAVTSTAAGKATFYSGKRVRHKANHYARLRKRLQKKGTRGAKRRMKRIGQRERRLKMQANHQIATQIIQEHSQALIGLEQLTDIRDRTRRRKRKRKKNGKGFERVTPKARKSNRVYSQWSFAELHTLISYKAALSGSFAVKVDADYTSKGCPRCGYTADENRPNKGLLFVCQQCYYTLHADLVGARNVVMRTLVLRQDWSTTGLLSMAPDASDREAKAARLRRYAELRWSPEVRSLRSKTEGD

SEQ ID NO: 29982 - protein, 359 aa, unknown
  TnpB Polypeptide
MLLSRKTQLKLNQSQKLLMAKHAGIARFTYNWGLATWQDLYLSGLKPNKYILKKFFNNHVKPEFTWIKEKGICQKITQYAFDNLGNAFDNFFKGKSQYPQFKKKGRNDSFTVDAGGKAILVGGTRLKLPTIGWVGTYEGLPHTTCQSITISRIANNWFIAFAYEQKHEPTEKQHEIVGVDLGVKELATLSTGVVLQNPKHYKKNLTKLQKLSRKYAKTVKGSANRLKAKLKLARHHAKVSNLRKDTLHKITTYLCKNHAKIVIEDLNVSALVKNEKLAQSISDCGFHEFKRQLEYKCLKFGSELIIADRFFASSKTCSNCGCQKSNLTLSDRIFNCDNCSFSIDRDLNASINLSRLAKA

SEQ ID NO: 29983 - protein, 379 aa, Desulfovibrio sp.
MGMKHRHDMPPFSKFFHLTASVDQDIFLSMDAVKGYVYRLKTNEGQAAVFKRWAGMNRFVWNMALGLQKRARDEEQAPIFYVEMASFLPHWKKDPFPWLAEGVAETYQQTLRDLDAAWKKCVREGAGAPRFKKRGRCRESFRFPQGFVFEGNRVRLPKIGWVGFFKSREMRGEARNITVFERAGKWYMSVCCKAEVPEPVHPSVSVVGLDLGVARFATLSDGSFIRPMNPLRAAEKALARAQRKYARTQKGSHRREKARLRIAKLQASIADARRDFLHKTSTELCKKHAGIILEDLRIRNMSASAKGTIEEPGRNVKAKSGLNKSILDQGWHAFRLMLEYKMRMFGGSVHVVNPAYTSQTCGNCGCVDAESRKSQSQFL

SEQ ID NO: 29984 - protein, 646 aa, Nitriliruptoria sp.
MADTDGDVSVIRLPLDVTGRVLRRRVERLFGDCFRLRRAVQRQARSRVDAYWRDHINRKADPSAARKRYGLTRQALEAAAKAHLDAAPHLAGGCSKALGLHLADSVWTQVERHLFADASGRRHGRPKVGGWWEFARVPGRAKSHTKPRKWETFRLHGSVEAHRDAFQRGDGGFYQPRRMPQPHCAGSWWDYDGPLVVAMTGLGVGELVLPVRLPAAPSNQAHLDHHLGDPNRWHKIDLVRHRDPQQPGGWRYEAHLMVLVAPSVSPSAVRRRQAAPTGRRAGVDVNVSNVTVASHHHGDDLTVDRVAREADQKQAIAKEAKKRRDRQNALDRSRRANNPGQYQLSKAQKREQRRRNNAGLPAKTYTPAGPRQTRTDGKPVQAYRRDQLSRSYRRGRAAVARDAASTSRARRDRARHIAGDLVAAHGPNLVVEDTNLRAWARQWGRSLHAFAPGMLLAALDREARATADHNGVDGGVERASTRTTALSQHCLCGHRATKPLGQRTHHCPTCGLKGDRDAVSATLAAFVTVETGKPQTATLDLQAARAALQHPRTWTDLNRTTRHHKRTKGWQDGLSASTAHPPPHQPDAGRAVGRPPATAGSARQTPAQHPHQPSTSPHRAAGARAGTRTGRSPDDGTNAPPLRDIS

SEQ ID NO: 29985 - protein, 434 aa, Ruminococcus sp.
MCAAAYQLTEYDLHAYFGRGKNSGYEGGIGIDIVQKTATALYSAVKKAIFGKKIRFRKFEETFSFESKKAISGIIYKPETDAIAVCGTVFKLKPVRKNDIWLQKAMRYKVKYCRIIREPFGTHYRFFLQLVMEGVPPQKHAIGAGTMAIDPGISTMTSYNGSKLSFKELAPDVNKYQEKVVMEQNRLSKLTRINNPECYDDRGVHIKGMRIKYSESMKRAKMRLRTAYRKQRVYVEQSNNHLANEWLEASGSVVKIETMNYKGLQKKASKSERQDTKSVITDKAGKKRSVHKFKRRKRFGGSILKHAPSEFLSTIRRKVEAACGIVIDVSALKLKASQYDHASDTYDKMSLSDREKIIDGHMVQRDCYSSFVIFYATNENEPDREGCLNGFEKFLVCQDKLIEEMIHDNFSNQNFGTKLINIKKQQLSEEPAAA

SEQ ID NO: 29986 - protein, 536 aa, unknown
  TnpB Polypeptide
MNEKEYKKSLRQFHKHSDRHILVVETDMSFSDIQKVVALSDKIRKAGNELVGLMRKNYDQLIRTKRYRKVRKLYGATEEKKKRKVLARQLNEMQKQYHVTWDDCRTSMIPIGKKYGIDAIFALTKAEDVWRGIEKCLYANGKTLHFSKYGVLPCIRAKQRNRGIPISVKENQLQFKFGKSTFGIQRKDRFQSDEIHAVLDYLAEPEIIDKKAIQTFVEKAYCINTYRPCYATLVPKLIRGKYRVYLHLTIEGKAKPKYDRFGNPRHKFGKGIIGADIGTQTVAYTSDTEVGLKNLSERGNSIQKSERLERLYYRAMDRSRRATNPQNYNEDGTIKKGRKIWKYSNHYKRLKAKHAELCRINERNRQLAINEDANYLRSLGDVLITEPKNASKLMKRAKETTKNNKGKFNKKKRFGKSIKNRCPGGFQTTIEKKFEVSGGRYIEVASNYRASQYDHTADAYVKKKLSDRMYHLVDGTLVQRDWYSSFLLYCYDDKIEEINKTKCRTEFEKHYKREKALIEWIQANQIKILNSGIKTA

SEQ ID NO: 29987 - protein, 330 aa, unknown
  TnpB Polypeptide
MRNEAYQNGSKIGYSQTSAMLTDLKKHDDFAFLKVVDSIALQQSLRDLDRGFVNFFQKHAKHPRFKSKHNHHQSYRTINQSNNIRIVGKYIKLPKLGYVKVRQSMEVGKINNVTIEHTPTGKYFAVLNIEFEPQPMNNKGGKIGIDVGIKEFYSDSNGNEVPNPKYLEKSMRKLMREQRKLSRKEKGSKNRNKQRVKVALVHEKITNQRNDFLQNESTKLIRENQTICIDDLKVKNMMRNHKLAQHIGSASWSKFFDMLTYKSVWYGNDIVKVPTMYPSSQTCSCCGYKNPLVKNLSVRKWECPECHTRHDRDTNASVNILNKGLQMQSV

SEQ ID NO: 29988 - protein, 455 aa, unknown
  TnpB Polypeptide
MGTRQRFAIPDGWVARGFRFEVEPTSAEQPGRIAQAFGSRRFAYNWALAQVKANLDARTTDPAVPLLAWNFYELRRAWNQAKDAVAPWWAATSKEAYGSGIADLVVALHNWSDSKAGRRAGGRVGFPRFKARHRDHGRVRFTTGAMRLEPDRRHLVLPVIGRLRSKENTRRLQRLAAKDRARVLSMTLSEQGGRLFVAVQAIVCQQPQTPSQPQARCGIDLGVGNEWAVVAHHDDTIERITHPAPWVETHTQRRRVARQRSRRIVGSRGHRQANAKLAALDRRAANLRTQSIHTLTTRLSSRYGTVIIEDLDVAAMGRGMGRRAFRRTVAQAGIGRVRPTLAYKTAWAGGQLAVADRWFASSKIHHGCGGYLADLTLRQRVWVCPCCEQTVDRNANAARNLRDWTGPVAADSDAGCPAGWSCRPGAARGRPRRAGPRSAWRVRGSTRPSSGGGSH

SEQ ID NO: 29989 - protein, 367 aa, unknown
  TnpB Polypeptide
MEKAFKFRLYPNKQQIELINKTFGCVRFVYNYYLAKREEIYKTQGITFNYKDCSADLTKLKQTNTWLKEADKFALQNSLKDLDKAFKNFFEGRANYPKFKSKKCKYQSYRTTFTNNNIEIKGNKIKLPKLGWVKFVKSMEVEGKILNATISRTPTGKYFVSICCRIEKTIEKSKTNKVIGIDLGVKHFLIDSEGNKISNPKYLIKLEKRLIKEQRKLSKKQLGSNNFKKQAKKVAKIHEKIRNQREDFLQKLSSKIINENQVIILEDLKVKNMLRNNKLSKSISDVAWSKFVNMLEYKALWYGRTIVKIDTFFPSSQICNVCGYKNEEVKDLNVREWECPICKTFHDRDVNASKNILKEGKRILGIA

SEQ ID NO: 29990 - protein, 413 aa, Coleofasciculus sp.
MKLTHIYRIKPSTEQVAIMDTRLEMLRRHFNYALGQRYDWLRRTRCQIDRCSLISESIGDIPDKFPGYNFQAGELKATKELFPVYKEIHAEVQQQNLKRLDKAWDRWIKPDKSGKRAGRPRFKKKGQMRSFTFPRINCPKAGVNKIEGGILTLSKIGSMPVVMHRPFPDGFELKTATIVSKPDGWYVAVSLEDNSVPAPKPIDFINSAVGVDLGLNSFLVTSEGESVDVQQHYRKTQRHLARQQKRLAKKAPGSVNAQKQKKKISRIHQRIGRKREIFHYNVAHQLVKKYDLIVAEDLNIKGLARTGLAKSIYDVAWGKFLTIMEAVALRGGVHFVKVSPHNTTVNCSRCGTKVPKTLSVRLHECPKCNLEMDRDENAAINILNIGLTAVGLTVAACGRLSGCTPDDAGIPQE

SEQ ID NO: 29991 - protein, 411 aa, unknown
  TnpB Polypeptide
MIIQQVEKHIIKKSHPYYNMFCEYTHLAKNLYNHANYLVRKEFVENGKWLRYQDLDKLLRADLDYPDYTNMPSAQSAQQTLRLLDTNWKSFFKSIKDWSKNKDKYLGKPKLPKYKPKDGKMVLIVTNQQVKQKDNLLHFLKSFQGFTIKPRCINLSNFEKMNQIRIVPQNQVFCVEIVYSVSITDTLLSDDGHYMSIDLGLDNLATVVTNTGLQPIIVNGKGLKSDNQYYNKKKAYYQKVAKQLNNKRYTNRLYRITQKRNFKIEDSLHKISRFIVDTALSNKVTTIVIGNNKTWKQSSSLGKVTNQAFVSIPHQKLIDKICYKAQACGIQVLLIEESYTSGTSFLDGELPQKEFYNKKRRVHRGLFVSNKGVKINADVNAAFQIMKKVFPNTFVDGIEGVVLHPVRVDIV

SEQ ID NO: 29992 - protein, 306 aa, unknown
  TnpB Polypeptide
LKKSGPTSVVLPDNLPIRYENKCSKISRDRTSISILTLQGRISLNLHFPRYCLKYIEDERWEFKSMELVKHRKKDSFFLHLVISKFISEEETKLQEYVGINRGVKYLAVTSNNQFYNGTRLREIRNKYFRLRRSLQKKGTRSAKRKLKRLSGKEQRFRKDTNHCLSKQIVKNIKANSVIVLEDLTGIRQKAMYPKKSKTSREINSWPYYDLEQKIIYKASEKHIEVAKWNPEFISQRCSACSFIKKDNYRSRQFSCVECQFSINADLNAARNQIHNYFSELPMVQLVFEALRFLDGAPVIIPYVAS

SEQ ID NO: 29993 - protein, 365 aa, Lachnospiraceae sp.
MVKGVKFRAYPNKEQQNLINRTLGCSRMIYNKGLSMRNIAYAAGDKIGYNQTSSMLTELKKQEDYAFLKEVDSIALQQSLRDLDRGFKNFFAKCAAHPRFKSKHDHHQSYRTMNQSNNIRITGRYIKLPKLGYIKIRQSMEIGHINHVTIERTPTGKYFVILNVDFDPELRPNAGGKIGIDVGIKAFYSDSNGNTVSNPKYLEKSARKLIREQRKLSRKQKGSSNRNKQRIQVALVHEKITNQRNDFLQKQSTMLVRENQTICIEDLHIKGMLRNHRLARSLSSVSWASFFSMLEYKASWYGNEIIKVPTMYPSSQTCSCCGYKNPLVKNLTVRRWKCPACHAVHDRDINAGLNIMNKGLQMQSA

SEQ ID NO: 29994 - protein, 416 aa, unknown
  TnpB Polypeptide
MEYSHRYPAYPTQQVAERLEYHIDVHRQAYNYTLYEYENVDGDDIGSAYKHHYRLPGWKDEFPVFSEVNSKALQRTVTRFYQNLDGLSEQKQNSRKVGKLKWKSPREFQSMTYSQSGFELKNTSGRRATLWLSKIGDIPIRYHREIPDKATIKEVVIKKQTTGEWSVSFGLETDDADLPEKPSVDSIDTSDTVGIDLGILNYIHTSDGKTVDWLNLEDEYDRLRREQRKLSRKEKGSNSYEKQRLKVANVTRHIRRKVLDYQHKLTTWLVLEYDAVFVEDLDVKEMLEQSHNARNKQDAAWRQFITLLEYKAELYGTHVVEVEAAGTTKACASCGVETAKPIWVREHSCPSCGFECDRDANAAMNVLQRGFSELGLGWPEDTPVETALPTDTRSVSAKRVIEAGSPTLNEATPVAE

SEQ ID NO: 29995 - protein, 413 aa, unknown
  TnpB Polypeptide
MRELGYTEREIVDAISPTEKAFIKNSAQAVARKACNSYDGYESALNKWHNSTNKSELPKPQPPATDSRGAFPLVMHHGEGYQLTVRDKDDRVGYRISAQPYQEKVRGFLRGAKHDLDRVKHALDSSSDLEVGRAEVVYREGVYYLHVPIRQPITIDAAEDAESVIAIDINERNISTTVLDRESRETLAQLTLDYGQVKHKRQRYYDIKRRCQEHDKHSEVQRIGNHVENFIEWTLHRLSKVIEHYVEWFPNPVVVFESLEGIRNDIEYGSYMNRRLHKMPFHEFERQVTYKTHRHGTPVEHVESEYNSQRCACCGEKGTRRGGRFTCQNDACNLEQDHSDRNASVNAAVRWIAKTETGDDSHSSADNYRPRKTPPQARVRRVGSGRHNTNSGRVDVNRPTSSHEIASQGVLHS

SEQ ID NO: 29996 - protein, 416 aa, unknown
  TnpB Polypeptide
MYLTVKQQIKHLSKENYLSLKELCHTAKNLTNEAIYNVRQYYFTESEFLKYEKNYTLLKNSPNYKTLNSNMAQQILKEVDSSFKSFFGLLKLAKKGKYAFKDCKLPKYLPKDGYTTLVIGFVRLKGNKLIIPFSNSFKKTHKPVEITIPPILLDKKVKEIRIIPKANARFFEIQYTYEAECIQRNLNKNNALAIDLGINNLATCVTSAGKSFIIDGRRLKSINQWFNKENARLQSIKDKQHFGKKTTNRQKAIARDRNNKVNDYMNKAARKVIDYCIKNNIGTLIVGYNETFQRNSHIGKQNNQNFVSIPYGKLREKLECLCELNDIAFVKQEESYTSKASFWDKDTIPVYNSDNPQVYAFSGKRVHRGLYKRADGKVFNADVNGALNILRKSNVVSLDALYSSGEVDTPIRIRIA

SEQ ID NO: 29997 - protein, 266 aa, unknown
  TnpB Polypeptide
LESRELYNAGLQERRDAYRMCGVSVGTSMQQAQLPAIKEVRPEYAALDAQMLQDVLQRLDRAFRAFFRRVKAGQTPGYPRFKSRDRYNSFTFKQTGWNVTAGCLVIRGLGSLKVRWSRPLLGTVKTVTVKRDADAWYVTFSCVVDVADPVAEPALPAIGIDLGLEHFLSTSDGEHVANPRYFRTGEDILARRQQALARKKRGSARRKKAKLPVTKAHRKVRNQRRDFHHKTAQRLVQGHGLIAVEDLHIANMARNPSLAKSISDAG

SEQ ID NO: 29998 - protein, 407 aa, Cyanobacteria sp.
VIKVLKAIKVRLYPTPEQELILAKSFGCARWYWNFALNACIQHYQETGNGLKLAVYKGMLPQLKKEHPWLKENCYSAVLQCVAINLNKAYTNFFAGRAKHPRFKSKLRLQSIQYPQNVTVKGDNLCVPKIGGIKAVFHREIRGTIKTVTISKTPSDKYFASILCEIEGFENCLSGNKTLGIDLGLKDFAIVHDGEEVTKYFNPKYLKRHERNLARKQQKLARKTQGSQTRQKFKKLVAKVHERVSNTRQDFLHKLSRKLVDESQVIVVENLNVKGMVRNRKLSKAISDVGWGMFVNFLTYKLEQKNGKLVEIDRFFPSSQKCSCCSHVVDELPLDIREWDCPSCGTHHDRDSNAALNIRTEGIRIVVMDGGNPVPASGACLRPDNRKVKGQRAMKLEAHTALTSRCG

SEQ ID NO: 29999 - protein, 423 aa, unknown
  TnpB Polypeptide
MTEITLVTSSLLYEDKNEQLYNYFNNITPLFAFLVRRTIHHLNHDLNGEDITKYRTRLKQEYGLTNRFAKAVITTAKNTLKVSTALSDYLHSTYATKIKKVNAKIIKTKAILNNPKTKKNRIKNLKTKLFWLQMKKNKLIQLQNNGPKPMMTFGTKKLLNNNKDLFLKKRDNQIVYIGDKNEHLGNQQFKLFYDKARNKFTYKIRLENKFIQDSKYIYGEFIVKDNIAKKEILKTLKSPKSNPLSFRIIKRNEILHLQIMYRISSESKTRYSNGVIGVDFNKGFITISEINQHGKLLNIDRIDYIHKGKAGVTKNSIHHLVKNLVDIAIKSGKDIVIEDLKSLNKNKKEKTERKHYNRMINTLKFGKFRKFLETRCDKLGVGLSLVKPYNTSKIANNKYCYDMKLNIHSGASYVIARRFYNLD

SEQ ID NO: 30000 - protein, 522 aa, unknown
  TnpB Polypeptide
MKGELNMTRNNETTPTFVVKILLDLKANDYRTVEKSMNVANSIYNDMLSEDKKRINRLRADKTYWNLINDYNNAKEHNKKRSNQKIDLNPINNQLKNIVKSYGLSQTDFEHFLRDRRHNLDFYKILSTPEIQVIAKQAFDTIKNATYFKSKIKNLKFKSKYKDSSFRNKRNDTGLRLIESENNKYAYTLILGNKHEINIKRNAFTTYQQNCMLRAEKIKYVQIQKSKIKGKFCYYLVIYLQGTPPTKHKIGTGVVGCDNGVSTLAYVSDNKVELVDLVPEECLRIEEGINRLNKQISHKLRLLNPQCFNEKNEVIKRQKMTNRSNNLTKLMNRVQKKQRQMRIYRNELQNKVCNELLAQGNVIQLEKMNVKALQKRSKNIRINPKTNRPYSKQRFGKSILKASPSSLVTLLKNKAASRGAKVIEINTKDTKPSQFNHIINKDVKKSLNIRIYDLSDEYPNVQRDLYSAILNKYTIQHTKNDKTTYTIDKIRLTNEFELYYKLMQQEITKIRNENKRLSWYVS

SEQ ID NO: 30001 - protein, 402 aa, Escherichia sp.
VKRLQAFKFQLRPGGQQECEMRRFAGACRFVFNRALARQNENHEAGNKYIPYGKMASWLVEWKNATETQWLKDSPSQPLQQSLKDLERAYKNFFRKRAAFPRFKKRGQNDAFRYPQGVKLDQENSRIFLPTLGWMRYRNSRQVTGVVKNVTVSQSCGKWYISIQTESEVSTPVHPSASMVGLDAGVAKLATLSDGIVFEPVNSFQKNQKKLARLQRQLSRKVKFSNNWQKQKRKIQRLHSCIANIRRDYLHKVTTAVSKNHAMIVIEDLKVSNMSKSAAGTVSQPGRNVRAKSGLNRSILDQGWYEMRRQLAYKQLWRGGQVLAVPPAYTSQRCAYCGHTAKENRLSQSKFRCQVCGYTANADVNGARNILAAGHAVLACGEMVQSGRPLKQEPTEMIQATA

SEQ ID NO: 30002 - protein, 417 aa, unknown
  TnpB Polypeptide
MFTVVNASKLIENSSSRLAFERSDHIAQDNCGRVAHQEMDMIFIAVNFGDFAVAFCGQFSQDVAQEISPLGGECRMPKFRTENDVSREVVDAVACCVKVKIPDTLAHGLNDLLTRCGLAVERMLHHRDSSSSKYYADLVPCVVSKSLIVKYQRNRKCQRVQNLVIPVCGDKGKQIKLVEGGIRVPALFKKDVLPVSWPHPVLGHVRSIELFRRKGEWFGSICYNTGKDPLMDCDGVIGVDRNSVGNIAVLADPQTGAVRKIGICPARTKFVFRRRRKNLQRAGKTRLLKKLHRKQRRRMSYENHRATRAVVDYAATHRRAVVMENLENVRSGDSKIRGYSEKNQWAFAQFGSMLRHKCALRGIPLIEVDPAYTSQRCSRCGSIHRPNGKRYVCLTCGHNDHRDANSGFNIANAVRTS

SEQ ID NO: 30003 - protein, 485 aa, Moorea sp.
MAPSNVSEPQAGIDCSIQLVLPLWENDKPLSQSPSVTVESAAVNNLTTSPGKSRTCTRFFRKRKSSLTLAEDSTTKGKDLEPYWNDLCRDVSSQLLLPVETDLPDSVLNCLNTWQNSTVEKSWFSTNLKAVEDPNSQQIFSESFTSSLAGFTDSENTAKKSKKIRVFLSAEQRRMVRQWFGVSRYVFNKTIKLLQSGEIKANWKAIKTGILNDLPEWCKAVPYQIKSIGIKDACTAVREAKKKYKKTFQINRVRFRSRKNPVQSCYIPKSAVSDQGIYHTKLGKVCFAEPLPASICDCRLVSTNGKIYLSVPHTTAKKETENQGRVVAIDPGVRTFATFFGENSIGKIGTGDFSRIQRLGQHLDNLISKISKAKGRQKRRMKKAARRMVIKIQNLVNELHHKTAKFLTDNFDVILLPTFETSQMSKKASRKIRSKTARNMLTFAHYRFQEFLKHKAIEKNKVVVDVCEAYTSKTVSWTGGAARSY

SEQ ID NO: 30004 - protein, 380 aa, unknown
  TnpB Polypeptide
MAMPKVFRYRLKPTKSQVAILNRQLDLCRWVYNETLALRKNAWENEDRCISYFESKRMLPIWKESKPDLSEVYSQVLQEAVQRVDLAFKAFFRRVKAGEEPGYPRFKGKNWYDSLTYPQSGFTFSDGILHLSKIGDLKVWLHRKVEGTIKRLTIRRSATKKWYVSFLVEDAPKNAVATSEKAVGIDVGISNFAVFSNGIFIENQRYLAACEERLSREQSKKDKLPHRSPERRKAAKKVSHIYEHLGNLRDNFAHQLSHQIVNDYGIICMEDGFSKNLIENKPWMAKSVLDASWNRFRTYLSYKAESAGRLFVLVNPAYTSQMCSGCGTIAPKDLSERIHNCPTCGLVMDRDLNAAKNILRLGLQSLVGIQPRCPRIHSGE

SEQ ID NO: 30005 - protein, 447 aa, unknown
  TnpB Polypeptide
VIVYQAYRFALDPTPRQQGALASHVGGARFAYNWGLGLVQQRLDERAAGQNVEVPWTLPALRREWNRAKAGVAPWWAENSKEAYGSGLDALARGLRNWVDSKQGRRAGAHVGFPRPKRKGRGRQACRFTTGAIRVEPDRHHVTLPRLGRLKTHESTRKLARRLEQGTARILAATISQQGGRWFVSFTCQVQRAEQRPRRPAATVGVDVGVAQLAVLSSGERIANPRPLTAALGRLGRTSRQLARQQGPRATDGTPRRPSAGWRKTQRELARRHARVANLRAEALHQLTTSLAADFGTVVVERLNVAGMVRNNRLARAIADSGMGQVRRLLGYKCPWAGGRLVEAGMFFASSKTCSVCGMVKAKLSLAERTFRCQACGLVLDRDQNAARNLAALVDGIQQIELMVAGSGPETLENACVRDCQPTRHGGRSGNPDPGREAAGSQQPIGV

SEQ ID NO: 30006 - protein, 372 aa, Syntrophomonadaceae sp.
MQVVTLKAKLLSPNKNKREKITRMLETYHQACSWFLTQAEVLNTTSRAKLNRETYRQACELFDLNRGTLQCAMLKALSARRSYLSRKLRGKKASLPKFEKTVPVMVRQDCYSLYQLPSGTWVIKFPVSSGRSQIAVPLATSTYHAKRIRDLVGGSCRQGSMEIWQDKSGEWYVTISLVYETCLNEPGGIIGVDFGIVKLAVLSNNVFFDGRQIRWRKERWADRRRALQQAGRLSRVKKEAGHERRWMRYINHCLSKRIVEIAKAKSAAVALENLLGIRERAKGSKKFNRMMSGWNVRELASFIEYKAALTGVPVIYVDPKETSKTCPKCGNISRYNRKTQGWFKCAGCGYQSDADRVGALNIATRALDALGA

SEQ ID NO: 30007 - protein, 398 aa, Bacillus sp.
LFIIELSEQTFGGGDKMLLNYKFEIYPTEEQQHTLVRWINICRQQYNSAILDKQRYYKQHKKDFTRSELQKQQTIDKKTYYFLKEVPSQPLQEVFARLEKAYKRFFKKEGGYPKIKSFKEYRSITLTQFGMFKYKSKDGSFGTGRRMCSLTKGGKLLISKLGVIDIKWHRKLDGRVKQVVIKHQGNRWFATFCVEKHVNQGSICDANKTIGIDVGIHKFAVLSNGEEIKSPTFLRKEERKLKHAQRKLPKMKKGSKNWYKQVAKVQQIHTKIANQRKDFLHKISFRLTNTYGVICVEDLKIKNMVRNRHLAKSIHDAGWGMFRNFLSYKAEQNGGRLVLVKPHYTSQNCSKCEKTVKKSLSVRTHVCKHCGTILDRDHNAAINIEKAGLVQIAHQPAS

SEQ ID NO: 30008 - protein, 384 aa, unknown
  TnpB Polypeptide
MLRAIKYELNPTNTQKVLIMQTCGCCRKVYNTMLDRKISAYKEDGRTISAIELINQLPQLKSELTYLKDVPSQSLQQAIRNLDTAYANFFRKGGSGFPKFKKKGCKDSFRIPVACVIDYDNWTIKVAKIGTINFFKGHNKKIEGTIKSYTISHTNTDRYFISVLYETMDKPKLNNNKSVGIDVGIKDFATLSDGKVFENQKHLKSNLKKLRVLQRTASRRYQQGKKREEQSNNWNKAVRQVAKLQEKVAFQRYDYLHKVSTWIAENYSTVCVETLNVKGMMKNHHLAQAISDCGWGMFINMLEYKCDNLVKIDKWFASSQTCSECGYVNTATKNLAIREWICPECGTIHNRDLNAAKNIEREGLSLCGLKVSGCTMLAPRTPLL

SEQ ID NO: 30009 - protein, 436 aa, unknown
  TnpB Polypeptide
MIQMIKSIRVQLLPNNKQNTKLFQFAGAARYAYNWALSKQMDNFREGHKIQTDNDLRKEFTILRHSEGNEWLQDVSNNVTKQAIKDLCIAYKNFFRKQKQSGYIKYASKKIAHYNRIGKSLTVYDMNGHPKFRSKKNGDFRFYQDNIKIQFTETHAKLESLAGSRRKNRQRLNWIRLAEKNRIPVRAKYTNPRIAFDGECWWLSVGIQTTRHLKPLRRLSFACKKQRQTRSEGIGIDLGIKDLAVLSDATKVGNINKTRAIKRLKKKRRRLQCQVSRKYQMNKKGDSYCKTSNLIKSEKRLLRINHRLANIRQNHIHQATTAIIKRKPSFVCLEDLNVRGMMKNRYLSEKIQEQNLYEFRRQIEYKARWAKIPVVIADRWYPSSKTCVICGHVKKDLNLSERTYVCPVCGNIIDRDFQAALNLKYYGEAEQMKSAS

SEQ ID NO: 30010 - protein, 403 aa, unknown
  TnpB Polypeptide
MKAFKYRIYPTRRQRDALQFTLDRNRELYNAALEERREAWRMSKISISYNDQSAQLPEIKEIRPEYKEIYSQILQDTLKRVDKAFKAFFRRCKNGETPGFPRFQGYDRYDSFTYPQIEKLKGKPTVSIENGKVVLPKIGHIKVKQHRPLEGKVKTCTIKREGEHWYIIFACEVEAIQKLPHTDLSIGIDMGLKHFMTDSNGDVVDDPRFFRKSHGRLKKKQQRLSKRRNKSSRRKRSAQLVGKAHKKVRNQRKDFHHKEARTLVETFETIVFEDLSMHHMVKRPKVKQDENGKYLPNGAAAKGGLNKSILDAGWGAFIELVKHKAEWAGVTVYEVDPRKTSQICSACGEEGEHKDLSVRTHICVHCGVVLDRDHNAAINILDRGLGRSPRETASPGTFRGAVA

SEQ ID NO: 30011 - protein, 381 aa, Nocardia sp.
VRLRYNYRVYPTPGQRIALARAFGCARVVYNDNLRVREEAHLAGVNLSDAEIQRRVITDAKRTPQRAWLREVSSVALVQASQDARTAYRNWFDSLSGRRRGAKLGKPKFRSRKDHRQAIRLTRNGFSLRGNRRLYVAKVGELKVAWSRELPATPSSVTIIKDSAGRYFGSFVVDVDSAPLPEIASEVGIDLGLKTFAVLSDGKRIDSPRFLRRAERRLKKAQQALSRKQKGSSNRVKARIRVAKAHVKVADARRDWAHKHSTAIIRENQAVYTENLCVRGLARTRLAKSVHDAGWGMFVRMLEEKAARCGRTFAKVNRFFPSSQICSVCGVVDGPKPLSVRHWLCSCGATHDRDLNAARNILAAGRAERVNACGGAVSLSV

SEQ ID NO: 30012 - protein, 372 aa, unknown
  TnpB Polypeptide
MVIIKGYKIRLIPTLEQEILIKKSIGVSRFVYNWCLDKQLNSDKFISDNELRKELTKLKRTDSLHWLNEVGCNVIKQSAKDLCNAYKKFFNKISNKPRFKKKGVHNSFYVNYESMKKTKNGVRCEKIGDIKTSEKLPKLVQDKHYMNPHIVFDGKYYYITFSMEINIKPIENTSKIIGIDLGIKSFAVCSDGTTYKNINKTHTVRKLTKKLRRLQRCISKKYLKNKIGNKFIKTTNIIKLEHKIKLIHRRIKNIRENYIHQITSHLVKTKPSKLVIEDLNIKGMLKNKHLSKAIAEQCFYKFTSVLGYKCDWNNIELIKADRFYPSSKICSCCGSIKKDLKLKDRTYKCGFCGLEMDRDYNASINLANYKLA

SEQ ID NO: 30013 - protein, 417 aa, Helicobacter sp.
MTLTERHIIKPTHPIFKRIKDFCHLSKNLYNYANFILREHYFAGFKLPTAYDLINRFVKESQRDYKALPAQSAQQVLMLLSQNWKSYLKALKAYKLKPSSFLARPKIPKFKPKDGVSIGVLTNQQTSFTKGRMTKIKFPKKANLKRLITKINPQTSRLKQVRLIPKTTCFIVEVVYEQTTHKLPQTHGIGIMGIDLGLNNFVTAIDNQSSPFIIKGGGVKSVNQWFKKSVNQWFNKLKAHYQAKAKTSNKRFWTKRLGKLALWRECKVNDFMHKASAYVVGHCLKKGISTIVIGKNDGWKQELKLGKRTNQNFTNIPYESFIEKLAYKCALVGITLHTTEERFTSKCDHLANEPMQHHEQYLGKRVKRGLFKSSIGKSLNADINGAIGILRKVFPDAVKTLRDSGVVFTPVKISLAF

SEQ ID NO: 30014 - protein, 449 aa, unknown
  TnpB Polypeptide
MKHTLRFRAYLTDDVASEAWRHIDILRQIRNHAVRAYYNADYNDKPSDYDQHKNLKEWTDQWPSFAEPSQHAAQQAISQIHDDIETLQERRDEGYKVGRLRWQGAGQFRSVSYNQSSRFNVDNNTGDDRFVRLRIEKIGWFKIRADRDVPPADGIDEVILKKETTGEWYVSLVTTVDETPEKTPLSEIEPDDCVGVDLGITSYIHTSENLSVDTLDLSEEYDRYAREQRKLDRKERGSSNWENQRRKVAQAKRTIKRKVLDYQHKLTTWLVQEYDVVAVENLDVKPMLETIQNAKNKQDAAWSRFLELLEYKADLHGTHVKKVKPQGTTKECAVCGVETAKPIWVREHSCPACGHTDDRDLNAAKNILNRGLKQLGAGRSESTSPEIEDFWCANESLRDSLTPVQTALPTFTPQRERVDAKRVIEAGSPGVVRKTQSSVMTRDGVSRTT

SEQ ID NO: 30015 - protein, 635 aa, unknown
  TnpB Polypeptide
MRLTNITRYLLPQNKSCPSTKSQDKPCKPGLKKETFSIESLQMEDTSITETKCKKFLKQALGKKRPRESKSVTPECLQPSRKKTCKDKSKNSKKRTHITPCTKTLGADSTGKEKTFSGSWLKSVQGWSQRLWLCTETDYVDMDLSSFNSYANSFKQNCWFTVETKKRIHTSPVNKNCPKTCSPSSTYSWQETMENVLLKTKKEEMEKENMKKKKRVQVKAKAKNQKTIKEPAQRTWKVRLYPNKEQREKLNKMIGTYRYIYNQCVDYYNNGVGEIPTIKELRDKFVCVESMKQYKNQWPECLPWDSRDEACRDFIAALKINWKVYDEKVEKKTFELTGQGLNQTQAKQQAIKIINIFKMRFKSKKRKKIQSFFIRERHWNQKTGGVSWMKEIKTKESFDIRYDTRVLKDGVGKYFILVLKPLEPVKAEERRKIISIDPGERTFLTCYDPEGKIFEFGKNDSDSLIKLGMKADKLQSLHDKKQNNESLRFNSKKRKNLKKKFQKIKYKIQNKVKDCHHKISKYLVQSYDNILLPSFSTSGMIKKEDRRIGSKTVRKLLTWSHYKFHQIIQSKSKRFGAFVIPCEEHYTSKGCGYCGDINNELGESKGFECPKCKFKSDRDINASRNILLKYFIENS

SEQ ID NO: 30016 - protein, 203 aa, Actinosynnema sp.
EPDAFEPVDWIGVDRGIVNHATTCDGVNFSGRRLSRYRRWHARRRRELQAKRTKSAIRRLKRRARREARHARHVNHTIGKEVVAVAQRTGRGIALEELGGIRDRVRLRRDQRATHASWPFHHLGDVLAYKARKAGVPVVTVDAHYTSQTCPRCGHVARTHRPTREQFLCRQCGLAGPADVVAAVNVRNRARRAWVLVNAPAPA

SEQ ID NO: 30017 - protein, 415 aa, Mycobacterium sp.
MVIKRCVKYPLRPSAAQAEVLARQAGAARALWNLIHAHHTFFEASKRWPSWSDSDAAIRQARKDIDWLAILPAQAAQQVLKAYKQAWSNYWNGTHGLPTWKTRRARRAVDVPQARDLNLTRLNGKWATVVIPKVGTVKVRLHRDMPERVTGARVVREATGWMLVVRGENQVVKPRRRRAERGDVGIDRGVTHTLALSDGSFIDQSVTLTVGEKKRLYRLERHAARQRAGKPRGRKASCRLLRTYAQIAALKARQARRRYDFAHQATAALVASGVAALMVEDLRVKNMTRSARGTVEAPGVNVKQKSGLNRAILDQGWTQILTLLTYKADQAGARVIRVRPHGTSQTCHRCGSAAAGQRENQAVFRCADPVCRWTGNADTNAAIVIKQRGQEVALQDVEPNATRQAVKRLNPKTAA

SEQ ID NO: 30018 - protein, 309 aa, unknown
  TnpB Polypeptide
MCYAASKLWNICNYERHHYKELGLEKYPDWYYQKKAHKGNLWYRQLPSQTAQETCKQLDKAWKSFYVLKKTGGIKEPNPPRFKQDNIPVTYMQMGIRHEKGSDQLRLSLPKDLKRYMEETYGIYEKFLYLENKIFKDMDHIKQLRIYPPENEKCDLIVIYEIEEPEHLSQNGHYLSIDLGLHNLMTCYDSGNGRTFILGRKYLSLERYFHKEIARVQSVWYAQQSKKGIKYPKSSKHIQRLYRKKQNAVKDYLHKVTRWIAEYCRKEDIRCVVVGDICNIRNGKDMGIRPTRSFTDCHITGCTSCWNIN

SEQ ID NO: 30019 - protein, 520 aa, Kribbella sp.
VCIRDRIKGLTAGDEVVLRTVGEHLGRLASADLACRVRDGLDHDSDRWADRKRDLTASSSSRWAGSITKATHDQWGLARRAQHAHAQSLTAGVRTIRDRLCLPVGEPGRSGQPGGYRSRQEWHAKSRRLTVLEARLAAVEADRAAGHVSVVRGGKRLLNKRHNLNAAGLTEAQWRHEWEATRWFLSADGESGKRCGNETIRVTLDGEVSLRLPAPLTHLANAPHGRYVLTGRVTFGHRGHEWGDRVEANRAVAYRIHHNPGKDRWYLDASWQRKDTTVILLETLRAGEVIGVDMNADHLAAWRLDTHGNPTGKPRTFAYDLTGTATRRDAQVRHALTRLLHWAKQSGVKAIAVEDLDFTDSKTREQHGRRKRFRQLVSGMPTSRLRTRLLAMTAEAGIAVIAVDPAYTSRWGAQHWQKPTSTPTHKTTRHEAAAIAIGRRALGHQIRRRTTPPRQHQTDAAGHRTLQAGSGTPGREEAGHPGPGPRTRSVPPTRSTYAGNQATQHRSGPPTDQDTVLLSV

SEQ ID NO: 30020 - protein, 415 aa, unknown
  TnpB Polypeptide
MKLTKRFRIKPDERLLEICRIANNLYNQTLYYWQQRRENDGEFLKFYTLRNEMRNVTNLEGTKNYYLMNAHVSEFVIKLAYDAIDSFYKQIADWKKHPERYKAKPEFPHYHKRNGYTEVQLDAHEFKIKDGNIIFNKKKGYGIPIPQWNKWKGCFENTKMVRVLPHQDYMIIEVVYEIEIRQADVNINNVAAIDIGVDNLATLVTSSGCTIFNGKPLKAYNQNFNKKIAKAKSILDRQQPDKRSSNRIRQLYDKRDCFIETYMHCVSRRIVDQLINEHVGLLVVGRNKGWKQESNMGKVGNQRFTQIPFFKLQSQLKYKCEMAGIKYEEQEESYTSKTDALALESIEHHETYMGSRKKRGLFQSSTNKLVNADQNGALNILRKFLGDVAYIEATKNWEIPATPHVVNCFTKKTTE

SEQ ID NO: 30021 - protein, 420 aa, unknown
  TnpB Polypeptide
MWVNQAFRFELSPNAAQRRALAQHIGAARFAYNWGLEMALKAREEGRRLPSAPELHKAWNAWKRENAPWWTEVSKCAPQEAFRDLERALRNWQKRKGRFPRFKRKKLAPDNGARFTGTIKVFSRQVQLPRIGLVKTKERADKLVGLIQAKKARVLSATVSREADRFYVSLTCEVERPDPKPKEARSEEDVAGVDLGLSSFATLSDGTPIDAPKPLAKRLRLLKRRSQQLSRKEKGSNNSKKAALALARLHRKVKNLRRDFLHQLTTWLARTKPVVVVEDLNVKGLSRGPLSRSVADVGWGTFLRTLEYKAKWYGATLIVAPRSFPSSRLCSSCGHLHGKMPLSQRVFRCEACGLEMDRDLNAALNLRAYGLAHLTGPTASSAGSHACGDPSGGGTALLGWPTSHGSAKQEVAHLHRPVEG

SEQ ID NO: 30022 - protein, 489 aa, unknown
  TnpB Polypeptide
VPEAAQGRLRRHGSQGLPQAYPCQVRRQRLGGTGTGYSARPYSPFRASLAYDCGLRDRQGVQRADFARTSQEVSLPIAATVTMDAILFCQHGRKREFGNHQTVHRGAEQDMRRTFEYRLYPTRPQRKRLEAALRSCREVYNWGLADRIDAHAKGEKRNYYKQQFMLKALKQQQPWLKEVYAHLLQDALRRLDSAYKGFFRRVKAGQKPGFPRQRSADRYDSVTFQEAGKGGAILEPDGKRLMLSKIGRVKIRLHRPLEGKLKTCTIKKRADGWYALFSCDLNHVPMPRPQDRVVGLDLGLKSFAVLSTGETIQNPRHLKAAEQDLKRAQRIVSRRKKGSRRRAKSKAILARKHLHLVRVRRDWQRKLACDLTSRFDVIVVEDLNVKGLMQKRSQEGRWKDRALHRSIGDVAWAQFLGVLGHKAEWAGVLVLRVPPQGTTTRCSRCGAMVPKALDERIHRCGCGFVCDRDLNAAFNIEQAGRTALLGRVA

SEQ ID NO: 30023 - protein, 433 aa, unknown
  TnpB Polypeptide
VSKNLRLNDFQPEEEYVYLTYSLKNDKKEESKILLENYRVLLQKALDWLWDRTRIERKEVKKGKRAFTKVKVKLPKKKEVYKTLRDELEKINNLASHYVDKAISDAYSILKGWKRRAEKGQASLRKPRLKKVYVRVKSTLRKVEGESVRITVRPYEYVTFSWSHTWFSRRVEGLELGEPIIKEDKVHLPFRYKLPWFTPLDFLSIDSNLYTLDAYDGDKFVTFSLKELYSLKYGMELKRGRIQSFASKHGKKGKVLMEKYSHRERNRVLDYVHKFVNKLLEMYPVTTFAVEKLNKQEMFEDSDDKLSKRISRTVWRTIHRVLKYKAPLYGSFVKEVSPHLTSKSCPRCGWVSRKVGRTFHCERCGFTLDRQLNASLNIYLKMCGFPHLFFTPTGSRWVGVIPLKGRRGMNGAMPRDSGEAQGLRIEYKFMKIQ

SEQ ID NO: 30024 - protein, 401 aa, Okeania sp.
MVEKAYKFRFYPTQSQENLLRRTLGCVRLIYNKALDARTQTWYEQKQRVSYKQTSAMLTNWKKQEDLDFLTEVSSVPLQQSLRHLQTAFTNFFSGRAKYPNFKKKRNGGSAEFTKSAFKWKDGQIYLAKCAEPLAIRWSRQLPPGCIPSTITVKLDPSGRWSVSLRVNDTRNLSLKPVKKQVGIDLGISSLLTTSDGEKFANPKNHYKLYKKLRLAQKSLSRKTKGSNNYHKARIKVARIHAKIKDSRLDYTHKLTTQLIRENQTIVVEDLAVKNMVKNHKLAKAISDANWGELVRQLEYKADWYGRELIKIDRYFPSSKRCSNCGHIVEKLPLSVREWECPECDSRHDRDINASINILAAGLAVSVCGATVRPEESKSRKAGAKKQKAPNSDVRESRAVS

SEQ ID NO: 30025 - protein, 314 aa, Streptomyces sp.
MPARRSGSPRTPAGKSPWAGRLLLPKIGEVKVRWSRRLPSVPSSVTVIRDAARPVLRLLRDRDRPRRRPGADAGCRWSAVCGDRLGPDPPPSSQLRSSRGTPIAVLSDGTKIDSPRFLRRAEKKLKKAQREWSRKQKGSKNREMARLRVARAHAQVADARREFHHQLSTQLIRESQAVAVEDLAVKALARTRLGKSVHDAGWAQFLAMLEYKAGRYGRVFVKAGRFEPTSQVCSVCGVKDGPKPLHVRSWTCTHCGTVHDRDHNAAKNVKQAAGLAVTACRAQVRPELVPAQREEAGSHGIHTGARAAQRHSTR

SEQ ID NO: 30026 - protein, 438 aa, Streptomyces sp.
VPTTPFVAPGPSGVTVRDRLKHLTAEDGRVLRLVGGHLGSLASWDLKARCGDGPGHSAEAWAARKRRLTPLSSSRWAGAVTKATHDQWALSRRCQATYLHSLEAGIRTIRHRLSLPAGEKGSKGVPGGYRSVREWHAKSRRLAVLEARYAVVVGDWQAGRVRVVRGGKRLANARHHLADAQLAEARWRERWEAERWFLAAEVIGVDTNADHLAAWRLDRHGNPVGSPRRYFYDLTGRADHRDAQVRHALTRLLNWARTYRVQAIAIEDLDFTAEKTREKHGRKKKFRQVISGLPTGRLRARLTSMADATGIAVIAVDPAYTSKWGAQYWQRPTTSTTRKTSRHDAASIAIGRRAQGHPIRRRTAPPPHDRSDRVGHRTVQAGPGILGREGTRPRVPGPRTRCAGPGHGAYAGDQRVQHRSGHAAEPEIWQQDSLPLSL

SEQ ID NO: 30027 - protein, 548 aa, Streptomyces sp.
VQRNTKRQLRVIDASFVALGPSGVAIRDRLKHLTPDDEKVLRLVGEHLGRLASLDLKDRCADGLDHSTDTWAARKQGLTAESSSRWAGSITKATHDQWALSRRCQLAHIQGLEAGVRTLMHRLSLPLGEKGTKKAAGGYRSKSEWFQKTRRLHVLEHRLDAARAEREAGVVHVVRGGRKLLGNRHNLQAAQLTETEWRQRWEAERWFLAADGESGKRFGNETIRVTPDGEVSIKLPAPLAGLANARHGRYVLASRVGFAHRAAEWADRIDANRAVAYRIHLDVVRERWYLTASWQRPVIQTIPLEAARARGMVGVDTNIDHFAAYRLDVHGNPAGDPMRFPYDLTGSADHRDAQIRHAITQVLHWAKRCGVAAIAIEDLDFTAEKTREKHGRRKRFRQLISGIPTAKLKARLISMAAEQGLSIVAVDPAYTTQWGGQHWQKPLATPRRKVTRHDAAGIAIGRRALGHPIRRRTAPPPHHQSDGVGHRTVQAEPGTRGREETRPPVTERAHDARARAGNTGTRETSRTSKTVRDVRSDQAWVQSSLLIT

SEQ ID NO: 30028 - protein, 329 aa, Streptomyces sp.
VTTNHVKRAFKYRFRPTPAQAAELSRTFGCVRKVYNLALAARTEAWARQERVSYNQTSAMLTAWKKTGELAYLNDVSSVPLQQTLRHLQAAFTNFFARRVKYPRFKSRKKSRKSAEYTSSAFRFRDGKLTLAKMSGPLDIVWSRPLPEGAMPSTVTVSQDSAGRWFVSLLCDDPSVRPLPATGQAVGVDVGLDHLLTLSTGEKIANPRHERRDRTRLAKAQRNLARKARGEGANRRKARLKVAKIHARIAVFPSSKLCSHCGTLQEKMPLSVRTWTCDCATTHDRDVNAAKNLLAAGLAVSACGAGVRPQRRTPGGQSATKHEPSRREP

SEQ ID NO: 30029 - protein, 387 aa, unknown
  TnpB Polypeptide
MRLTRTIILPLDAKPKDVLPTIGAFTKAFNLVAQVGWADSDSNGISLHKKTYRRCRAEFGLPSQYACTARVKATEALLSVRDRVRKGKKASCPNSKLCPIRLDARTYTIWFGKRICSIRVLDGRRRFGIRVPKFYEPFVSWKQASADLVVRKDKVFLHLVVTKEAEDPVPAGKTVGMDAGIRRTAVTSNNRFFGGGKLSHVADGYRKRRRELQKKGHSGKRHLNRLGWKENRFVRDVLHVVSKRIVSKLEPGDVLAMEDLTGIRDRAKWGRKSRTMLNSWAFARLQAFCQYKAEAKGCLVARVDPAYTSQRCSKCGHVEKANRRSQGLFECRRCHHSLNADLNGSRNIALRGEMTVAIGNRHGAPSIAPNAPPVRGFEQTQRSLAAG

SEQ ID NO: 30030 - protein, 383 aa, unknown
  TnpB Polypeptide
MRRAYKYRLFTNRNQERELGIMLESHRRLYNACLEQRKVGYETDKQSVKYTEQSAWFKTERTRNLYFARLNFSSAQATMRRLEKAYKNFFRRVKQGSEKPGFPRFKARDRFDSIEFPAYGDGIRLHETKLRVQNVGMIRTRVHRPHEGVVKTATLKLEASKWYVILSCDLGEVSIPPSQNPPVGIDVGLEHFFTTNEGEHIANPRFLKEQLPELRRCQRSVSRQKKGSKKRRKAVAKVSKLHTRVRNVRREYHYQIVNRLIDRYGLFAVERLNIRGMLRNHRLAKAISDVGWYNFRMILAHKAESAGAVVIEVNPAGTSQFCAECGVEVRKELSDRWHSCDCGYSVHRDINAARNILLRALAWTGLAGPNADVSLHVLGSRRL

SEQ ID NO: 30031 - protein, 422 aa, unknown
  TnpB Polypeptide
MKGGDKMKVWKQNLKHLTSKQYQMLKEMCYLSKNVYNQSLYNIRQYYFSEGLYLRYEANYPLMKMSENYKLLGANVAQQTMRFADYSFKSFFGLLKLAKSGKYESWKIKIPHYLPKDSLYKISFSQARIANGKFRVPVSSQLRKQFPEKILIGIPEYIRDKKIHQIHIVPKHNGKFFEVIYMFDDAEPEAVKLDPTKFLGIDLGINNLATCVTNEGESFIIDGRKLKSINQWYNKELARLSSIKDKQKIKGFTNKQYLITRKRNNQVQNYLYCAARKIINYCIQNQIGSIVVGYNDGFQENPNLGKVSNQKFVMIPFGRLKSRLEYFCDQDGIRFIQQEESYTSKASFFDNDEMPKWNPQNPKQGTFSGKRIYRGLYQTSTDYKFNADVNGALNILRKSKLTDLSVLQCRGKAYLPLRIRIS

SEQ ID NO: 30032 - protein, 329 aa, unknown
  TnpB Polypeptide
MQMGIRHEKDSDRLRLSLPKDLKSYMEETYGIHEKFLYLENKIFRDMDHIKQLRIYPPENGTCDLIVIYEIEEQEQLSHNGHYLSVDLGLHNLMTCYDSGNGRTFILGRKYLSLERYFHKEIARVQSIWYAQQSERGIKYPRSSKHIQRLYRKKQNAVKDYLHKVTRWIAEYCRKEDIRCVVVGDIRNIREENDMGHKTNQKFHGLPYNKLYIMLEYKLKLYGIQIDKTGRKLYQPVQPISTRSIKKYAEASNRKKRGIYITNGVRYNADAVGAFNILRKYLSVSGKEKTLSVTGLKKSRNNKSSCIAERQAVLVSWTHPEKRRYPARF

SEQ ID NO: 30033 - protein, 402 aa, unknown
  TnpB Polypeptide
MRLTEQIQVPYSKELSILCHLAKDLYNSANWYVRQDFFQLNNTLSYYDLDFILKHKEAYRKLPSQTSQQILKVVRRNWKSYFKALQEYKKNYKKFKKKPRIPRYKNKNGETIIIFTNQQCKIKDGYLYFPKRINIAPIKIRIKDKLKEVRIIPLGTKYKVEIVYEKEVQNFHLNQNNVLAIDLGLNNLINAVNNIGQEPIIIKGKVLKSINQFYNKQLANYRSIENRKGYFKDTKRIKRLHLKRTNKITTLFHRTSRYIVEYCIQHNIGSIVIGYNKEWKQDINIGKRNNQNFVQIPFSKLLLQIKYKAELVGIHYITDDEAYTSKCSFLDKEKIKKHNIYLGKRIRRGLFRASDGTIINADVNGAYNIMKKAFPNAISVDGIEAFGLMPQIIQHTIVDMII

SEQ ID NO: 30034 - protein, 392 aa, unknown
  TnpB Polypeptide
MIKSIKVRLKPNDKQLTKLFQYAGCARFAYNWAIARERENHKQENKFLSDSELRKEFTQLKKLQEYEWLNEVSNNVTKQAIKDACNTYKRFFKGLCRYPKFKSKKRSTLSFYQDNMKIQFTTTHVKVEKFSMSKKQNKQKLNWIKLCEKGIIPTNCKYTNPRFTYDGLYWYVSVGIEVDDNTIIPSNEGIGIDLGIKNLAVCSDKNTYENINKTQKVKKLEKRKHRLQRSISRRYEKNKKGVSYYKTSNIIKKEKELLKVIKRLTHIRQNYLHQVTSEIVKRKPSFICIEDLNVSGMMKNKHLSKAIQQQGFYEFRRQIEYKSEWNNIPVIIADRFFSSSKLCSCCGNIKKDLKLSDRIYKCECGNVIDRDLNASLNLKRYGENVLKRQSVA

SEQ ID NO: 30035 - protein, 412 aa, unknown
  TnpB Polypeptide
MKQQVKQLTKEDYKNLKLLSHIAKNLANEAIYNVRQYYFQEKEYLNYEKNYVLLKNSINYKTLNSNMSQQILKKVDRSFKSFFGLIKLAKKGKYNFRDIKLPNYLPKDGFSTLIIGDVRIKGNKLTIPYSNAFRKEHKSIEINIPPKLIDKKIKEIRIIPKSKARFFEIQYIYEIEEVQSNLDKKQVLAIDFGINNLATCVTSQGKSFIIDGRKLKSINQWYNKENKRLQRIKDKQGYKAKYTNRQLKNVMKRNNKINDYMNKTARLIISYCLEHNIGNIVCGYNETFQRSSNIGKKNNQSFTHIPFGKLREKIEYLCNLYSITFIKQEESYTSKASFFDKDNIPLYNDDNPKKYVFSGKRVKRGLYKTKDGKLLNADVNGALNILSKSKVVDLTVLYNRGELDTPIRIRVA

SEQ ID NO: 30036 - protein, 370 aa, unknown
  TnpB Polypeptide
MGLKKEFNSIKKEQFPYAYEITKYACQQPFIQLQEAWKKYFTYLKTKKGPKVGRPKFKKKGKSKDSFYIGGDQIIIKNRTVKIPNLGCVRFKEDIRFQGKITSATISRQADNWFISFAIEPLISFIPCKNQAGVGVDVGSKALVTLSNGIQIEAPKPLKKSIRKLKRFSRQLSKKVHARKKGDTTPKSKNYIKQQMKVAKYHAKVANIRKDTLHKVSTFLTDNFQYIAIEDLNIKGMMANGKLARTISDLGLYELRRQLEYKSKLKGNILTFADRWFPSSKTCSCCGNIKSDLTLKDRTYHCNECGLIIDRDLNAAINLERLEQTIKIPQALREFTTVEMTALLTRNGLVSSIVESVNKHQPNLIVSRVG

SEQ ID NO: 30037 - protein, 222 aa, unknown
  TnpB Polypeptide
MPLEVRSENQAPQFDFDCLWKEEDEEEEKEEEKDDEKEDSNHSMAKNQQQQQQRPWIEGILSMDPGVRTFMSGYSPSGLAYEWAKQDVGRIYRLCHAMDRLQSRWSGKEIRHRKRYRLKRAARRIRKKIRNLVDEVHKKQAKWIVEQYHTVLLPVFETSGMVRRIHRRIGSKTARAMLGWAHYRFQQRLIHKTRVSLVQGDSLRRALHLQDVWIPSPEAWLQ

SEQ ID NO: 30038 - protein, 384 aa, unknown
  TnpB Polypeptide
MIKTQKITLRPNRDQIVWFYQQCGYAKFAYNSALSDFRSELSADNFLSMYDLNKRFNQKKKAIDWTKAQDQRAAMYAVHHLGSAIDNWKAKRAKFPKLKKRGCKHSYTTDEQAVHMEGKRIKLPKIGWIKTFEELRFRGKIVSVTISRTAHRWFASVSVEVEAPIHRCPAPSEFVNWFTSQVEVGTPHQIERSIYPTIGIDVGISTLATLDNGTKYENPTPLKRYERKLAREQRKLSRKVFLSKNWCKQKRKVERLHYRIACIRKDAHHQATTDIPKCASKIGIETLQVTNLLKNRKLAKALSDAALGGFLEKLKTKAKTLSIPIVQADRFFASSKNCSTCGQKKDDLTLSDRQYHCNHCDASIDRDVNAAINLKHVAVGYTET

SEQ ID NO: 30039 - protein, 369 aa, unknown
  TnpB Polypeptide
MKTYKYPFYDQSNCIRLGNLLDDMWQVHEYFHKWQRHRYKDGLPYANHAAMCKHLTDLKKTTHPHWKALPSQAIQEELKRIDKAYIRFFKKLGGRPKIKKRHKFKSLTLKQAGWFLNDNCITLNFRKWDAGKWRQEKVAYTFHKHREFEGNIRFITIKRDNCGDYWLYILTDFVETKPLPTTGKSVGADFGMKDAYLTLSTGEKKQHPQPLKRSLNKLRTLNKSLSRKIKGSHGWWRCVRQLARLYRKISNQRKDFQWQLASELCKSFDTIAIETLNLEGMKRLWGRKVSDLAFYQFVEILKYKCQKHGRTFLQVGRWTATTKPCSDCGFHNENLTLSDRQWTCPECGSHHDRDINAAINILRAGIATT

SEQ ID NO: 30040 - protein, 398 aa, unknown
  TnpB Polypeptide
MRPDLIQIMNTRSHRLPDSPARTSALILSYKFRLYPNRTQQTALDDMLRDFCALYNAGLQQRIEAWRRRSISVSYTMQAAELKAIRACHDGLARWSFTAEQQVLRRLNKAFQAFFARIRRGEKPGFPRFRASARYHAAEFRVGDGLTLKKSGRIGVIGVPCEIKVKWHRQLPDTPNSAILTRQNGKWFVILHVEAAAGEQHAGETVGIDAGLTALVALSTGETVARPNWTRQAAKGLRKRQRALARCQRGSKRRSKAQQRLARYNGDIAARRRDMLHRLSADLTARFTGIAVESLAIKGLARGMLAREVHDAAWAQLITMLDYKAARAGGTLIRIDPRGTSQTCPDCGAVAAKALSERMHHCDCGCILDRDVAAARIIHDRAFRHGTCLRTPSQPVAA

SEQ ID NO: 30041 - protein, 423 aa, Cyanobacteria sp.
MQLVERHIIKSTHPLFAEIDSFSFKSKNLYKAASYILRQNYFYGWGYLNYNAIQKLMQATPQYQALPAKVSQQILMVLDKNWQSFWAAITEYLQQPKKFLGKPKLPKYKDKQKGRNLLFYTVQAISKVQLRRGIISLSMTNIRVKTQVQPAAIRQVSIVPKCDCYIIEVVYEQQKSTAPSIQGDGIAAVDLGVNNLATLTSNQLGFVPLLINGRPLKSMNYFYNKHRSRIQSKLRGNCSTSSRIKSLTRKRNQKVDNYLHHASKLVVETLVAHRIGRLVIGLNPLWKQAVALGKVNNQHFVSIPHKRFVHLLAYKCQLAGISVLPIEESYTSVASFIDGDAIPTIGMEQDAPIFSGKRIYRGLYRSNSGVTLNADVNASLNILVKAFPDAKWIGDKSCVVQPRRISPLKVRMKEQAAMLAEAL

SEQ ID NO: 30042 - protein, 445 aa, unknown
  TnpB Polypeptide
MVEANRTLILPLELPSSDEDKCFHQTIEKYQYCRDRASGHCWQSPTQPDDIVTSKRAVEDALYHDLREETNGLHANLVQKAIKDVTSAMDSVKKAWQRGERISKPTWDTTESWVMTYDTRAGTFSKHDATFATTGSTVTLEYHTPANLDETPYNEYVLSSAWELTTSKLAYRHGQYWLHLGIKRDASDQHWTAQANTEVSNAPTEDTSRVLGVDLNVKRWTAVTSAGGFHGNADYLNHRRTQYEELRGELQQTGTRSAYLRLHERSGTESAWFDEYAHAVSNSIVEDALDTCSTHIAFEELDGIRERMSNLPKYQQWMFGRVQDYVEYKAAEHGISVVYVSPRNTSKQCSHTECQTVSSSNRREKRFECESCGRSWNADYNAARNIGLNYMFDSVLPASQTCSSGKATSQLALMSGVLSVTERDVNHVSKDWMSTDKPTALAVGS

SEQ ID NO: 30043 - protein, 266 aa, Streptomyces sp.
MAEPLAIVWSRPLPEGARPSTVTVSQDSAGRWFVSLLCEDPVVRPLAALDTAIGVDVGLDHLLTLSTGEKIANPRHERRDRYRLAKAQRSLARKAGGDGANRVKARRKVARIHARIADRRRDVLHKLTTRLVRENQVVVIEDLAVRNMVKNRALARAISDAAWSEFRRMLEYKAQWYGREVIAVDRWFPSSKLCSDCGTLAESMPLHVRTWTCAGCGTAHDRDVNAAKNLLAAGLAVSVCGAGVRPQRRTPGGRSAMKQKPLQRKP

SEQ ID NO: 30044 - protein, 412 aa, Streptomyces sp.
MFAFVQLRYNYRVYPDAPQRRALAQAFGCVRVVWNDCLRDRQEAHAAGRPYVTSAELSRRRITQAKRTTERAWLAEVSAVALQQSLRDLDTAYRNFFDSLKGRRKGRKVAPPRCKSKKDTRQSIRLTAGAFSLQDNGTVYVAKVGAIKVTWSRPLPAAPTSVTVTKDCAGRYFMSFVVNTEPHILPELETEVGIDLGLTTFAVLSDGTRIHSPKFLRRAEKKLKRLQKDLSRKARGSKNRVKARVRVARQHARVADRRRDWHHRASTQIIRDNQAVYVEDLAVSGLARTRLAKSVHDAGWSAFVHMLEYKAARHGRHFGKIGRFVPTSQICSVCGVKDGPKPLHVRQWTCTGCGTVHDRDDNASKNTLATGRADRLNASQSAGKTRTKVPAQRVEAGSHPDGHPTVAGTPGL

SEQ ID NO: 30045 - protein, 238 aa, Streptomyces sp.
MKISAMRLRYNYRVYSRLRITQAKRTAERAWLADVSAVVLQQSLRDLDTAYNNFFNSLTGKRQGRKVGPPRYKSKKDTRQSIRLNTNAFAVLSDGSKIHSPRFLRRAEKKLKRLQRALSRKAKGSKNRAKGRIKVARQHARVANRRRDWHHKASTQIIRDNQAVYVEDLAVSGLGRTRLAKSVHDAGRSAFVGMLEYKAVKHGRTFAKVDRAFPSSQICSVCGFRDGPKRDESPGTVR

SEQ ID NO: 30046 - protein, 990 aa, Streptomyces sp.
MAAPFVAPGPAGVSIRTSLKGLTGQDEKVLRLVGDVLGSLASRDLKARCAAGPAHDSDHWARRKRALTGQCSSRWAGSITKATHDQWALARRGQLAHIQCLEAGVRTIAQRLALPVGAKGARGLPGGYRSRREWFAKSRRLRLLQERLERERADREAGRARVVRGGGKLLRNRHNLQAARLSEAQWRARWEAERWFLAADGESGKRYGNETIRVGPGGEVNIKLPAPLAGLANAPHGRYVLACRVGFRHRGEQWADRIAANRAVAYRIHYGIDRGRWYLTASWQVPPLWTVPLEAVRSSGLIGVDTNADHLAAWRLDAHGNPVGEPRRFDYDLTGSAPHRDAQVRHALTRLLHWAQRHGAAIAIEDLDFAAEKTREKHRHRKRFRQLISGMPTAKLRARLLSMAAELGIPVVAVDPAYTSRWGAQHWQKPLTSDNRKTTRHHAAAVAIGRRALGHTIRRRTPPPPQHRSDAVGHRSVQAASGVPGREGTRPAFPDHGHDPSAPDAERKRATREPTTVRGTRLSTSPGTRTHSRSVTRNGRRAGTSSKTIGDSRCPEELAETARAPSAAARARRRPTARAKCPRWLTANWVSQPSGVRRSSGTAIASALQTSTGQSQAQSQASGLGPYRQTVSAGREVADAGGVEAEDGAADPVLQRLGPLRRDGGRAAQDARDGARGGAVGVGVQAAAHGQGDRGGEVARAVEEPGGEHGGVRHGVDPGQAARLAFQLVQRGLPGHARVVQARGAADRTGQAAARRDAVEGGLDRRTRAVRRERGGDQRGRPHRPVHPVAGVRQHGVAAGHGGGAGRIAGVDPAVDVGADQGADPLLIGVVDGRGERGPHPRRQIAVRGPLGGERLEVRQPQQPHLAHLLGGEAEAVGLQEVQAEDGVVDVVVPRAAVDPAAYALLPFGAQLELHRVGRRLQGGQVVGEGEGVGAAQIAVDAVAGPDVAALDGLAEHVPGDAAEPAAEDLVRGPGRAFAAAVAHVSGVPG

SEQ ID NO: 30047 - protein, 568 aa, Streptomyces sp.
VGVLRELSAPFIVPGPSGVAIRTRLKGLTVGEAEVLRLVGAHLGALASRDLKRRCAEGLEHSADTWAERRRAVTGESSSRWAGSITKATHDQWALSRRAQFAHIQNLEAGVRTITHRLSLPVGAKGIKRRPGGYRTRQEWFAKSRRLHLLEERLVAERADREAGRVRVVRGGKRLAHTRHRLAQAQLTEAEWRQRWEAGRWFLQADGESGKRLGNETIRVTPDGEVSIKLPVPLAHLANARHGRYVLTGTVGFRYRGQEWADRVSVNRAVAYLIHLDVARHRWYVTASWTIPPVKTVPLAQARAAGLIGVNTNADHLAAWRLDEYGNPVGDPRRFSYDLNGPATYRDAQVRHALVRLLHWTKGHGLSIAIEDLDFQTEKTREKHGRRMRFRKLISGMPTSKLRARLVSMAAELGIIIVAVDPAYTSRWGAQHWQKPLASKNRKTTRHHAAAVAIGRRALGYPIRRRTRATDGTAPHDPMGSPLLERSRELGEDRAGHRTVQAASGTPGREETRPRVPGPRTRSVGTGGGAKAGDQRGHLPAVAGGAHNRSGHPAEHGFWHQGSSPLSL

SEQ ID NO: 30048 - protein, 366 aa, Streptomyces sp.
VGRVIRAYKFLMRPTVGQTIALGEMLRDHCGLYNGALQELREAFRHSSKTSVKYGQQSRQLKEIRAFDPERHGRWSFSSQQATLRRLDKAFSAFFRRIKSGETPGYPRFRGVNWFDTVDFPKDGDGCRWGSTPHDPVTRVRFQGVGHVKVNQHRPVVGRVKTVSVKREGRKWFVVLTAEQEQPEPLPKTGSVVGIDMGIANFLADSNGNFVPNPRHGRKAAARLEAAQRSLARFPRVRRDKRTKNHQRAMEKVATLHGEVRRQRLDHAHKTALDLVRQHDFIAHEDLKIRNMVRAVEPKPDPETPGSFLPNGAASPPRRTGPHRTSSTALAAATRRTPTRWALSTFYGPGWSVATPTRHSEKPPHL

SEQ ID NO: 30049 - protein, 394 aa, Streptomyces sp.
VKRAFKYRFYPTDAQAAELSRTFGCVRKVYNMALAARTEAWARQERVNYNTTSAMLTAWKKTGELAYLNEVSSVPLQQALRHLQVAFTNFFAKRARYPHFKSRKKSRKSAEYTTSAFRYRDGKLTLAKMSESLDIVWSRPLPEGAKPSTVTVSQDAAGRWSVSLLCEDPAVKPLPAHEQAVGIDVGLDHLLTLSTGEKAANPRHERRDRGRLARAQRKLSRKAKGGGANRARARRKVARIHARITDRRRDHLHKLTTRLVRENQTLVIEDLTVRNMVKNRKLARAISDAAWSEFRSMLEYKAAWYGREVLAVDRWFPSSRLCSNCGTLAKAMPLSVRSWTCGGCGAVHDRDVNAAKNLLAAGLAVSVCGAGVRPQRRTPGGQSATKQKASQREP

SEQ ID NO: 30050 - protein, 526 aa, Streptomyces sp.
VAVRARLRVSETDAAVLAEVGLFLGALAAGDLAVRSQQGLEHGSQTWAVRKRELTEVSSARWAGSITKATHDQWALARRGQSAEMAWLRQQIASVQARLARRLGAKADKREGVPRGYGSRLEWHAKSRRLHALRARLTGAEADWAAGRVRVVRGGKKLTRVRHHLDQAGLSERAWRERWRAARMFLAADGESGKRLGNETIRVTAAGQLSVKLPATLVRLANAPHGRYVLDATVAFHHRGEEWRDRITANRAVAYRIHHDVARGRWYVTASWKRAPAPVLPLEAALAQGVVAVDMNDDHLAAWRLDIHGNPVGEPHRFFYDLAGSAQHRDAQIRHALTRVLHHTRATGARAIAIEDLDFTDGRCREKYGRNKRFRRLISRFPTAKLKARLVAMAAEQDIAIVAVDPAYTSRWGAQHWQQPLTTSNRKVSRHDAASIAIGRRALGHPIRRRTTPPHDDQRDRRGHRTAQARPETRRREEPRPRLPGPRTRSVPPGSGANAGDQRAQHRSEHAAEHGFWHQDSLPLSL

SEQ ID NO: 30051 - protein, 693 aa, Streptomyces sp.
VWRRAKDAPVSVIRLPLVVGDVEVRRRVERLFSGMWHVKRALQRDARDVVDAYWAGEVRRERDVKAWRAELGLSRSGLERRAYRHLERSRWLSDHVSKALVMHQADEVWAGVARHLHPDTSRRRAGRPRTGTWWEYTRIPGRARSHTTDRKWETFRLHGTLAEHLEAFRHPALPPSVTTPAQAAELPPGMRVLAQPRRMPTPARPTAGVPTGTTDTHRRPHAHAATWFDHTGPLTVVFAGGPTGGGNIVLPVRLPQGAGRWPYLHHYLDDPDRWHKIDLVRRRCPAAPGGWVYEAHLMVLAPGYASPATRTRRRQAAALQRVGGVDGNVSNLAIVSLPAKLDPDDGAVRSDRITLTRQEQHALTAERTKARRRQRALDRSRRASNPRQYQHSWRQKARDERQNAAGLSPKAVTVPTGPRRTTTAGKPRQAYRRDTLSTAYRDLRARHSAAATSAAEASRQRAKKIAAAVVAVHGPNLTVEDCDIRTWFRLWGRVCSATTPGRLIAALAAECTATGGRLLRASTFTTALSQHCLCGRRTPKSLRQRTHHCAPAGGGCGLKGDRDLVSAALAAFTTLTDPDDPTTAHLDHTRARTAQILFAQGLQEALTESTAPKSAPSGRTRAAAEPPGTPFPGNERPLLGETPDPAPWQPRMRPDPPPSGPRPTPERHDRTPAAPVHTYGISLSHTPRSPQRS

SEQ ID NO: 30052 - protein, 399 aa, Mycobacterium sp.
MGRGGLMRRAYVFRLRPTARQHVALAACVESHRELYNAALQERRDAWSHSTTRIYYGGQSAQLTEIRSVRPDQAVWSFSSQQATLRRLTKAFDGFFRRVKRGDTPGYPRFKGKARFDSVEWPKDGDGARWLPDHNRVYLQGIGQVKATVHRPVQGRVKTIQIKRQGRRWMLVLSCDDVPTSPLPATGRQAGVDVGVVTYATCSDGTEVANPRWARQEAARLEAAQQRLQRAQRGSNNRIARRETVAARHRKIANRRKDFHHKQARGLVAAYDLLVVEDLTIANMVRRAKPKPDPQRSGQFLPNGARAKSGLNRSISDAGWGQFVSILRAKAEDAGRTWIEVNPRHTSDGCECCGHAAPENRVSQGEFVCQRCAHTAPADQHAARNILRAGLALHAATAA

SEQ ID NO: 30053 - protein, 380 aa, unknown
  TnpB Polypeptide
MRRAFKYRLYPNANQGRELQIMLETHRRLYNAALEQRNFAWSQRRVSVGYQDQSAELPDLRATDEWFKKTNHSSCQATLRRLDKAFQQFFERVKRGEKPGHPRFKGRDQFDSIEFPAYGDGIKLIDAKLRVQHVGTIKVKLHRAVEGKIKTVTLKREADRWYVVFSCEVEPVKTTASALPETGIDVGLESFLTDSNGVHEPNPRYLKAELPALRVAQRTVSRKKKSGKAVRVVRKIHARVRNQRREHHYQVADKLVHRFGFIGAERLTVKNMVKNRSLARAISDAGWSQFLSILKHKASKAGASVVEVDPRGTSQECSGCGKDVPKPLKERWHACPHCGLSIHRDHNAALNILARARLARTEPVESNVVNGSRPPRSRRL

SEQ ID NO: 30054 - protein, 380 aa, unknown
  TnpB Polypeptide
MNRSNLFSLAPTREQHHILEELAANCAKLWNEINYLHCQQYENYLRLDWNLQAYKKYAPLVGSATAQQIVRKNNEAWRSFLKLRRMEKNGELPSTVRRVKPPGYWKRDGRYMLRILFRCDSYQIREDRVDLPRHLSIPFKGKPKWTGKQGRLEVAWDTLSKKWRVFQAMNVKPIITPLGSKTCYIDLGVRNLATVWLPEWRQPVAYQSGRLLADWWYWTNRIARHQQRLAAVNGSKKSKQLARLYRTRRNRFRHAVATFARQLVKDLYARGMSSIVIGELTGIRNGNSHSRQGNAMVHNYWSHKYVADRLRWTAEEYGMKVRTVSEAYTSQTCPRCGSRHSERILRGFQCLDCGLEAHRDAVGVLNMAARCGEHAVRPMV

SEQ ID NO: 30055 - protein, 444 aa, unknown
  TnpB Polypeptide
VKINTSYKVKIYGHRKVFKTTVEMYRQAVDFLIGVCLNEWDDIAEIESLMQRKTFVEKLVHKTKGRPFVKYDFDSPFYKFPNYLRRAAIAEAIGDVSSYKSNYANWTVEKNGNPPSEPKAGYTCPCLYKDDCFIRIDNYTAKIKVFVRNTWDWVTLRLKKSDVDYILHHCAMRKALSPTLRRRGKEWFLDFSFQEKVDLSDTEALERRIVAVDLGVNTPATISVMRADGTILDRKFCKLSKEQDSLLHALNRIKKAQQNRCLSTPRLWARVKGINKNISVKTAQYIVDTAVLYDADVIVFEHLNVRGKKKGSKKQRLHHWRSQEVQRIVTDKAHRLGIRISRINPYGTSRYAYDGSGQVLRGKNANLSTYELCKFKSGKTYNCDLSASYNIGARYFIREILKSLSAKARLQVEAKVPALCKRSTCTLADLINLYAAVVGVPSTC

SEQ ID NO: 30056 - protein, 414 aa, Cyanobacteria sp.
MRTAYQYRLRPTKQQASEIDRWLSMLAAQYNYLLADRLSWWEQNRSPVNACPLICHLPERRDNPDFYSQKRTLPQLKKTHPWYGEIYSQVLQDVVKRVKITFDRFLKGDSSGKRSGKPRFKARNRYRTFTYPQMKEGCLQGNFINLPMFGKVKVVWHRPIPEGFKIKTASVTKKADGYYLTLSLEDKTVPEIKPDFDPNKITGIDVGLKEFLTTSEGETVAIPQHYRKSQKRLRVIQKRISRRKKGSNGRLKAIKQLGKQHKKVADKRKDFHFKIANYLLLKYDVVAHEELNVKGLARTRLAKSVLDVGWSSFLSILANKAENAGLLVVPVSAHNTGLRPASLTQDCSNCGEKVSKKLHQRWHSCSCGCELDRDHNAAINIKNRAAGQTVLKAKSLLSNSRIVLEAYTVLEESV

SEQ ID NO: 30057 - protein, 382 aa, Spirochaetales sp.
MKNLTIRIYPNQEQEKLLWRHIGACRFIWNWGLETQINEYDETQHRIGATKMCKKLTNLKKQEDFQWLNDISITSLQQTIRELDRAFNDWFLVKDKGKPKFKKKKYGRQSYPVESRKFYFIDDTVQIAKLGKVKFRSSYEFPQGNRAYRFRNVRIRWENKKWLLSLCVDDDLCDNQAKIKPLNNYNMGIDLGVKILCSVAVGDKHIEVPNINKSKRVKNLESKLRHLHRNQTRKYRTNGNFDKTKNIIKIEDEIRKVYFRLRKIRKNYTHQTTTYLVNLYPQRIVMEDLNVIGLIKNRHLSKHIQNQYFYEFRRQMEYKCADRGIEFILADRFYPSSKTCSCCGAIKTNLKLSDRTYVCSECGLVIDRDYNAAINLMNYSKD

SEQ ID NO: 30058 - protein, 236 aa, Clostridioides sp.
VEKAYKFRMYPNKKQQELINKTFGCCRFVYNKYLAKRIEVYKNDKETFTYKQCSSDLTNLKKELKWLKEPDKFSLQNALKDLDNSYKKFFKKKAGFPKFKSKKINRFSYKTNFTNGNIMYCGQHIKLPKLGMVKIRDKQVPKGRILNATISKEPSGRYYVSLCCTDVDIEAFENTNNQIGLDLGIKEFCISSCGEFIENPKYLKKSLNKLAKLQRDINASINILKEGLRLTTIQNK

SEQ ID NO: 30059 - protein, 386 aa, unknown
  TnpB Polypeptide
MQRTVTCTLRISPDDVSKVSRTQAAFNAACDSAATVAFQERIFNSVRLHHRVYYELRATFGLLAQFAVRAIAVVADAYKLDRKTQRHFRPDAAIVYDERLYRLEPKDGFQRVSLSTLDGRIICDLAIGGHQRGLLGQAEKIGQADVFRDGKGRWRIAFSLTLPDPTPPLSPTDVLGVDLGIVHLAATSDGEVFSGAALNGTRARRRRQRRRLQQKGTQSAKRVLRHLAGRERRMQADINHTITKRIVQTAAATQRAVTLEDLNGITRRLLGTVSRSQRQRLGGWAFHQFGTFLGYKAQAAGVPVVFVDPAYTSQTCPVCGHVARGNRPSQAKFLCISCGFAGHADHVAALNLAARGRVVVNLPDVGVSCALSHGATHKPAALAVGR

SEQ ID NO: 30060 - protein, 411 aa, unknown
  TnpB Polypeptide
MTAKIKRTFKYRIYPNREQKSILETWLDICRVLYNDCLTERRDAWDISQKYISYYDQCNQLREIKTFDNEIKEVHSQVIQNVLKRIDKSFKNFFRRVKRREKAGYPRYKGKDRYDSFTYPQSGFKLEDKKLILSKIGSVNIKKHRDIPEDAKIKTCTIERELDRWYACFTVEIEIEEPNYEAITNPIGIDLGISHLITLSNGDMEDNPRYLVRSEGKLKRRQKKLSKSKKQSNNRTKRRFEVVKTHRTVRDQRTDLLHKISRSLVNTYDLIVFEDLKIRNMLKNHHLAKSISDVSWSQLTNFVSYKAEEAGKRVEFVNPRNTSLECSNCGKIVKKPLSQRTHKCPFCGLVMDRDKNAAINILNRGLRKSKGFSICQKSSIFEQLKNVGQELSEFKPEDFSKRRMIQEAPML

SEQ ID NO: 30061 - protein, 384 aa, unknown
  TnpB Polypeptide
MEKCLYDNGKTTHFSKYGELPCIRAKQINRGIPMFVEDGKLRFKLRKMQFGIQVNDRFQSDEVNAVLSYLENPDKMDADAVNTLIEEACCIDTYRPCYATLVPRLIRGKYRVYLHLTIEGKAKSKYDRFGNPRHKYGKGMIGADIGTQTVAYTSDTEVGLKNLSERGNSIQTSERKERLYYRAMDRSRRATNPQNYNPDGTIKKGKKTWKYSDRYKKLKAKHTELCRINAVNRQLAINEDANYLRSLGDTFVTEPKNASKLMKRAKKTTVNSKGKFNKKKRFGKSIKNRCPSGFQTTIEKKFKVTGGAYIEVPNNYRASQYDHTQMTTLRKKLSDRLYRLRDGTLVQRDWYSSFLLYCYDYRTQDIDKDKCITDFGRCYDKEKA

SEQ ID NO: 30062 - protein, 408 aa, unknown
  TnpB Polypeptide
MEINLTSKLRIVFQSEDDRKSAFDTLIAYRDACNYVSQYVFNHDFVLKQSELQTALYHELRNRFGLKSQMTQSVFKTVIARYKAVQTQLRKQRVWDGYKKDNHGKDVPNYINKDLTFLWKPISFKRPQLDLVRNRDYSFKDDLLSMNTINGRIRVKVYGLSENPYFDGLWKLGTGQIVRSGKYWFFHVAASKVVSEFELSQLKHVVGIDRGLRQILTSYDEKGQTRFINGNFIAKKRNHYARLRARLQAKGTKSAKRRLRSLSGRESRWMSDVNHQLSKTLVETYGKQTLFVLEDLTGVIFNTVRSRRKEHRYAHHSWSFYDLEQKLRYKAHLNESEVVLVDAHYTSQRCPKCGTIDKSSRDKGTHEYTCSNCGYSSNDDRIGAMNIYELGKWYVSGVEKPSFIISNE

SEQ ID NO: 30063 - protein, 395 aa, unknown
  TnpB Polypeptide
MEQGQGRGGAVVGGVLQRGLQLGLRRPGPSAHGLLPFALCRPHGQAGRLSNVQEEKLAPKLQGHDRRLRHKRQAPRTPAPHRGAQDQRADREAGAKALGRHRPHPFRHRLRRAGRWYISFCCEVEREQAVPANPGEVVGVDLGVRSLAVLSNGEVVANPRHLSSYARRIARLQRQCSRRKGPGKGRPPSKRWFRATRSLAKVHAKVARLRSDGLHKLTTRLAVTYGTVVVEDLAVKAMTARPKPNPDAAGGHGRNGARPKAGLNRALLDVAPGELRRRLDYKCRWYGSKLVVAGRRYPSSKICSACRTVKAKLPLSERTFVCEHCGLVIDRDLNAALNLASLAEATGTASGAGTNRDTPVNAQGEERFMDLSKCSSLNCEDGSDPHGPGKTATAS

SEQ ID NO: 30064 - protein, 394 aa, Pseudanabaena sp.
MKARYSYRFYPTDQQRQSLAQLFGCVRVVWNDALAICKQSEALPGYNQLSAMLTQAKKTEAREWLGSVSSVPLQQALRQLDVAYKNFFNSRNGKRKGKKMGSPTFKKKSNQQSATFASTAFKVFDGIVYLAKIGGLKPIWSRELPAAPSSVTAIKDAANRYFLSFVVEVEPVQVDAENQSIGIDLGIKTFAVMSDGSKVESPSYSKQDRKIRKLQKQLARQQKGSNRRRKTRLQIAKLHNQIADTRKDFLHKLSTKIVSENQAIVLEDLNVSGMVKNRKLARSISLQGWREFRMLCEAKSEKFGREFHVINRWEPTSQVCSDCGFKWGKLDLKIRTVQCLNCNAEHDRDENAAKNINQVGTGHCHDSKRMQRQSKTTSVASVSEASRITAPLGR

SEQ ID NO: 30065 - protein, 441 aa, unknown
  TnpB Polypeptide
MQIVSSYGVEIKKKNIPLRATLDIFRKAVSYLIPVYAETWEELSEIRNPQKRFNEAEHLVHETKKNHARFLFDRHFPKMPSYLRRAAIQHALGAVSSYQSRLSLWEKGELRGKPKLVCENHAMPVFYRDVMYREAEPGEDTAYLKLFDGREWKWFQVKLLHTDMEYLRKKWSGKEASAPTLERKHHKYFLRFSYTEEVTLSKTAVKEQVICSVDLGINTDAVCSIMRADGTILGRKFINFSSDKDHLYHVLGRIRRFQREHSSRQVQSRWDYAKRLNMELSRKIAAEITKYAAEYQAGVIVFEYLEMQGKISGKKKQKLHLWRKRDIQKLCEHQAHRNGIRVSMVSARNTSRLACDGSGAVVRNQENHSLCTFRTGKQYNCDLSASYNIGARYFIRELLKPLPETERSSLEAKVPAVKRRTSCVYADLRKLYVEVNNLKAA

SEQ ID NO: 30066 - protein, 491 aa, Arthrobacter sp.
MHPEDRRTGGADFGTSPLDTMIRSYKFRLYPTSKQEDLLRAMLDDHRLLYNAALQERREAWKRARTGISFATQSSQLKDVRADESDYARWSYDGLAWTLRRLEAAFQAFFRRVRAGAGKPGYPRFKGVGHFDTVIHRNGNGAKWGTIPHSVVTKVYIMGIGHIKVRQHRPVTGRVKTVAIKREGRARWFVVLAAEQELPSPLPKTGTMIGIDLATGSNGLAYTSLGERIDNPAYGKASRSRLADARRALARCQRGSKRRNKARDRVTNVHRKVRNQRQDYLHKAAKRLVSRYDVIVAEKLNTAGLVRRPAPRPDGTGGYKPNGGSAKTGLNQSILDAGWGHFLDVIRAKAESAGREFIQVDPTYTSQTCSACGYRDATNRSGKMFVCLSCWHRDDADINAAINILRAGLALRDATQAVVTRSRITAKSQREGLAVRPHEARPLQADRPLFLSTEQPYLLARREPRPHPVYEYPAHSDRPHPVLLFIEIHAI

SEQ ID NO: 30067 - protein, 282 aa, unknown
  TnpB Polypeptide
MSVQRATQLKKEKKWLKEPDKSSLQNALKNLDTAYKNFFNRQKAGFPKFKSKKNRYKSYKTNMTNNNIGFLGNKIKLPKIGKIKIRDKYCQIEGRILSATVSQTPSGKYYVALCCTDVPQPEFIRTNKYVGLDLGIKDFIITSDAVKYSNLKYLQKSLTRLAKFQRELSRKTKGSSNWEKARVKVAKLHDRIANQRHNLLHQVSCQLIRNYDVICLEDLQVENMMKNHKLARNIADVSWSEFMRQLTYKAKWFGKIIVKIDKFYPSSQLCHVCGYKNTEVKT

SEQ ID NO: 30068 - protein, 401 aa, unknown
  TnpB Polypeptide
MQLVEQHVIRKGDSRYEAIDQAAFASKNLYNAANYEIRQAFIKEGVYLNYHEMHRRMKSHDAYKALPAKVSQQVLRTLDKNWQSFFKAIAQWREHPEKFSGRPSLPRYKDKQKGRNLLVYTIQALSKPALRQGCIQPSGLPIRIKTAHQNVDQVRIIPRHGFYVVEVVSSREPVQADVNPTLYAGIDIGVDNLATLTSNKKGFVPHIVNGRPVKSINQFYNKRKAELDEKLMKMDARRRCSHRLERLATTRTRRINHYLHTASRRMVNLLVEEGIGTLVIGKNPNWKQEVNMGKRNNQQFVAIPHARFIQMLAYKGELVGIGVIITEESYTSKCSFLDHEPIGKHETYAGQRLKRGLFRAADGRLLNADVNGSANIIRKVAPNAFADGVEGVVVRPVRLRA

SEQ ID NO: 30069 - protein, 372 aa, Bacillus sp.
MILARKVRIRPNKEQEHQLWKSVGTARWAYNWTLGKQEENHKHGGKFLSDGILRKELTVLKQTEEYAWLYEVSNNITKQAIKDACEAYKRFFKGLADKPRFKSRRKSKPSFYNDNVKLKVRNNEVLIEKVGWIITSESLPVDVKYTNPRIHFDGKYWYLSVGVENECPKIELTDVSLGIDVGVKELAVCSDGEKKKNINKTQTVKKVEKRLRRLQRQVSRKYEMNKEGNRFIKTGNIIKVEKKIQHLHRRLTNIRTNYLHQVTKDIVKTKPYRIVMETLNIKGMMKNKHLSKAIAKQCLYELKRQIQYKSEKYGIEFIKADKWYPSSKMCSSCGSIKKDLKLSDRIYKCACSHVMDRDLNAAINLSRYELVN

SEQ ID NO: 30070 - protein, 372 aa, Alkaliphilus sp.
MELTITAKIRIYPSDNQIIVLKDTMHKIIKALNCTSGYIYSNNCLVQREIHDNLYYHLRSSFGLKSQMSASVIRASIAKYKSAKTNGHDFNLINFKQLEYDLVSNRDYSLNKDKFSINSLQGRLHIPYETKGMQKYFDGTYKFGTAKLVNKYGKYFLHIPVTKEYEECKLDDINQVVGVDLGINFLATVYDSSNQTIFFNGKKIKFKRAKNKSLRKELQKRQTPSARKRLKAIGQRENRWMNDVNHSVTKALIDKYGKNTLFVLEDLTGIRNATKKVRVNNRYVSVSWAFYQFRVILEYKAKMNGCRVIVVDPRYTSQTCPKCGHIAKANRNKKKHTFCCKNCTYTSNDDRIGAMNLWRKGIEYISKETIEI

SEQ ID NO: 30071 - protein, 390 aa, Haloprofundus sp.
MHREVTTTVRIKLHSLTQRKVQLVEREYSAFQDAVHGDTNANLYSATKQQAGNVRSNKNPREDTEQPVVLRNDCITIEHDEDTVISSWWFKLPVYNPEKERGDSIWVPVYVPEKDIHLLNSKQIRDSQLVHQDGEWYVHLVCKRSVAVADEYDDVLAVDMGAKWIAVSIFLSDRNTQFHGAEVRRVREHYKQLRKSIGKAKVRQGAQVIERIGDKESRTVEHELHQVVNELVSRARERNAVIVFGDMTGLRFDNDKGRYVNDKTHKMPFAKTANILTYKAHLDERECIPVKEYDTSVTCWRCGSQNTNREVQGRLECDDCGLEDNADKNGASNIAKRAVGKNIQSPLSTVGAVVAQPKTQVVLTGTNGEMEPANSPEDVKLTLREGSSRL

SEQ ID NO: 30072 - protein, 407 aa, Haloprofundus sp.
MEVVRNIQVKLDVPEDAHSVLDETFEQFRHAAQHVADHGWDDNPYEITDTKNTLHKETYSDVRSKLSLQSSLVQSARNLAATALGNCKDRIIEDGEKASKPEFKGSVVVYNGRTITYNDDHVSLATTDKRVTGGYVTPVNEEGTPFEDYWTDEWDKREATLHKRDGTYYLHVAVKKNVEPSCDEESENGVVLGVDLNVDGYIAVTSTGAFFGNADYLNHRRKEYERRRGSLQQTGTRSAHLTIKSIGNRFARWSTDYLHRMSKAIVQEAVENNCTAISFENLKHIRKRISNASKFQQWAFRELQRHVEYKAEEHGIDVDDVNPAYTSQRCSHSECGFTHENNRDGDEFECLKCGKQLHSDYNAARNIGWRLVQHWLKSGAERATSQLALKSGTVNANGRFRPTELLG

SEQ ID NO: 30073 - protein, 470 aa, Haloprofundus sp.
LSSSIRFEIAFTPSSNERSERVSRGGAETGCDYPRSIADRCLNLKSITDTSPVMEVRRTAPVKIVVPDGRRSDLHETARQFLYCANRASEYCWDDTSYKNCVTSNTKARSALYYELHEETDLVANLVQKAIRRAVQATKGCVEHWKNGRRVSQPEFTSWSIVYDKRSATFYQNKVSLSTVNGRVECDFELPAESPTPYEQYVLSEKFEFRTSTLQYDAVDDEFYFHISTRRYDRDGEDDSEVLADTEHQTVLGIDLGVNSLAVASTGRFWQGNDYDHWCREFEKRRAKMQQRGTQAAHNALLRLGKREEGWRKQYIHTIANEIVKEAVETGCTQIVFENLDGIRERLRFAKWHHLWAFRRIVEYVEYKAAQQSVAVERVKPNFTSQRCSRTDCGFTHEGNRHGEHFECLKCGYKVNADYNAAKNIGMRYVQKRQHRLHSLPMSESVDASVNMRINGGLMNGDGYQPLAET

SEQ ID NO: 30074 - protein, 538 aa, Micromonospora sp.
VADLRDIARPFVADPASGVCIRDRLKGLTPEDDKILRLVGEHLGSLASRDLAQRCRDGLEHSTDTWARRKRELTAVSSSRWAGSITKATHDQWGLSRRAQWAHVESLRAGIRMLRHRLSLPIDEKGSQGKPGGYRSEREWFHKSRRLAHLERDHDRVLAERDAGQVCVVRGGQKLLKTRHNLAAANLTEDQWRERWEAQRWFLRADGESGKRYGNETIRVTPEGKVSIKLPAPLTHLANAKHGRYALAARVGFPHRGAQWRDRIEGNRAVAYRIHLDVTRSRWYLDASWQRKDLPIVPLETLRSGEIIGVDMNADHLAAWRLDIHGNPIGQPRTFEYQLRGTADRRDAQIRHAITQLLHWAKDTGGRAIAIEDLDFTDSKTREKHGRKRRFRQLINGMPTGKLRARLLAMTAEADISIIAVDPAYTSLWGAEYWQKALTTNKRATTRHQAASVAIARRALGHRIRRRTTPPRQHQSDAGGHRTAQARPGGRGREGTRPPQTGPQTRSVPPTVGVNAGDQPIQDRSGWVQCQFDLHGHI

SEQ ID NO: 30075 - protein, 328 aa, Holophagaceae sp.
MKRTGSFKLLATPQQAESFSVLATLFAEACEAMIPFVQEHRCWNRVALHHLVYYPMRERFPTLGSQMVCQAIHRVADAYKTLRANKGIPKDQPVPALHFSPTSVNFDHRTYSIKGKAFSLFTPAGRATVGIACGALQKELLVTGKLRHDRDRYLAKRRRLQSNGSRASKRKLKAVSGREQRHVRHVNHEVSKTIVAQALQAGASTLRMEDLTHIRDHVKAGRRVRTRLHRWAFRQLQDFVQYKAEAAGLKVEFVEPAYTSQTCNACGGLGTRVKHRFTCTCGNLAHSDVNASRNIARFAGLSSSARGVVNRPEFAHRARPGAVESSFL

SEQ ID NO: 30076 - protein, 175 aa, unknown
  TnpB Polypeptide
VYHRITKQYERQLARAQRRLAKCEKGSSNRKKAKLAVAKIHAKIADVRSDFSHKLTTKLVRENDLIAIENLQVKNMIKNHKLAKAISDVAWGELVRQFEYKGKAYGREIVQIDKFFPSSKRCSECGYISKSMPLNIRKWVCPECKTEHDRDINAAKNILKAGLAILVGCDQVRQP

SEQ ID NO: 30077 - protein, 121 aa, Chitinibacter sp.
VIETYTYYKAYSSSKAVFKIPAPTTSQECAKCGHTHPDNRKTQALFVCGNCGNTDNADHNASLVIKKRAINLILDTGTVLSGDGVLRTQSDSGRGGNRKTGRAKSSTSSAQRSVKKEKLAA

SEQ ID NO: 30078 - protein, 412 aa, unknown
  TnpB Polypeptide
MQRLQAFKYELRPDGQQERQMRRFAGSCRFVFNKALVLQKQRYEQGEKKLGYAGLCKLLTEWRGSPATAWLADAPVHPLQQTLKDLERAYQNFFAKRAALPRFKKKGQRDSFRYPDAKQIKLDQASSRIFLPKLGWLRYRNSREALGAVKNITVSQSCGKWFVSIQTEREVQQPVPQSSSAVGIDMGVARFATFSDGSFLAPLASFKKHEIRLRRHQRAMSRKTKFSNNWKKAKAKVQRIHTRIANCRRDYLHQATTTISQNHAMVCIEDLQVRNMSKSAKGNHEKAGKNVKAKSGLNKAILDQGWFEFRRQLEYKLAWTGGMLIAVAPHNTSRTCPCCGHVSKDNRKTQAQFQCVQCGHEQNADAVGAINVLERGHRLLACGEDVSHARPARAKRAAFVKQEPAEVSQAQA

SEQ ID NO: 30079 - protein, 400 aa, Hydrogenophaga sp.
MLIAHRIALDPNNVQATYFARAAGTARFAYNWALAEWQRQYEAWKHDSILPKPSQMALRRHLNSIKAEQFPWMLEVTKNAPQMAIIQLGAAFKNFFAGRAKFPKFRKKGLHDRFSLSNDQFDIDGSRIRIPHLGWVRMRETLRFTGKIMSATVSRVADRWFVSITVDTPDDSRVPEAKNQGAVGVDLGVSALATLSTGEIITGPKAHQALLCRLRRLSRGLSRKVKGSANRKKAKARLSRLHARIGNVRKDGLHQLTTDLTRRFHTIGIEDLNVRGMVKNRRLSRAVSDMGFFEFRRQLEYKAAQRGGVIVLAERWYPSSKTCSDCGHKLETLPLALREWACPACGADHDRDVNAAINLRNLAVSSTVSACGEVGSGLGRKLKTKPASVKQESSSKATYG

SEQ ID NO: 30080 - protein, 404 aa, Actinomadura sp.
VYEHDLSCTWTYNQLVRLRYNFRIYPTVGQQQSLARAFGCARVVFNDALRARKEAHAAGQPYLSDGELSKVVITQAKKTVERAWLGEVSSVVLQQALADLNTAYRNFFASLSGERKGRAVAAPRYRSRKDRRQAIRFTRNARFTITAGGKLRLPKVGDVRVRWSRELPSQPSSVTVLKDAAERYFASFVVETADEPLPETASEVGIDLGLTHFAVTSAGRKIANPRFLRRAERRLRKAQQALSRKQKGSKNRKKAVVKVARLHTRVRDSRRKHHHKLSTQLIRDNQAVYLEDLCVYGLARTRLAKSVHDASWSQFAAMLEYKAERHGRTLVKVDRWFPSSKLCGACGRVAESMPLHVREWACSCGAVHDRDVNAAINILAAGRAERLNACGESIRPPAQGGGAR

SEQ ID NO: 30081 - protein, 342 aa, Methanobrevibacter sp.
VRKVILTYKIKHNRDFSDELVKAKLVAQIALESPKWLSSKDVKHIGLKSAISCQILNKYHKRNRNVKKIRSVKLTLPSQSCKKLENEIYVPCLKLRIEFSKGVEKINQIEIGDKYAYISCTVKESPKFEIKTHIGVDCNAVGNLCTIAVKETGKVYKLGKRAIHVRKKYKAMRRHLQKKGKYKKVKNIGNKEQRICLDINHKISRKIVDLAVANKSVIRFENLKGIRKSKKKSRSLRGTLNSWSFYQLQKFVEYKAQQAGAEVIYIDPYMTSKCCSKCGHIGDRNKKNFKCLNCGHFEHADVNAAFNIALPSEALVQLSVDRDAGNGHLACPNGATPDKVAG

SEQ ID NO: 30082 - protein, 329 aa, Bacillus sp.
  misc_feature (274)..(307): Xaa can be any naturally occurring amino acid
MEVNQMIINKAYKFRIYPNQAQAILINKTIGCSRFVFNYFLSLWDHAYKETGKGLTYDTCSAKLPAMKKELVWLKEVDSIAIQSSVRNLADAYTRFKSKKNNVQSYTTKQTNENIAVVGNKIKLPKLGLVRFAKSREVEGRIVNATVRRNPSGRYFVLLLVETEVQELPKTHSYIGIDVGLKDFAILSDGTHYENPKFFRSLEDTLAKAQRVLSRRMKGSSRWNKQRVKVARIHEYISNARKDYLDKISTEIIKNHDVIGIEDLQVSNMLKNYXXXXXXXXXXXXXXXXXXXXXXXXXXXXXXXXXXRKHLLPANYVLVVDIKIKTLKI

SEQ ID NO: 30083 - protein, 312 aa, Bacillus sp.
MKKELVWLKEVDSIAIQSSVRNLADAYTRFFKKQNSAPRFKSKKNNVQSYTTKQTNENIAVVGNKIKLPKLGFVRFAKSREIEGRIVNATVRRNPSGRYFVSLLVETEVQELPKTNSYIGMDVGLKDFAILSDGTTYKNPKFFRSLEEKLAKAQRVLSRRSKGSSRWNKQRVKVARIHEYMTNARKDYLDKISTEIIKSHDVIGIEDLQVSNMLKNYKLAKAISEVSWSQFRSMLEYKAKWYGKQVIVVSKTFASSQLCSCCGYQNKDVKNLNLREWDCPSCRTNHDRDINASINLKNEAIRLLTARTAGLA

SEQ ID NO: 30084 - protein, 453 aa, Bacillus sp.
  misc_feature (55)..(228): Xaa can be any naturally occurring amino acid
MYFYHFSQEDSFLKEREVSRWEMNCSTYIKCYFTIHQMYVRYIIVIYRNGGESNXXXXXXXXXXXXXXXXXXXXXXXXXXXXXXXXXXXXXXXXXXXXXXXXXXXXXXXXXXXXXXXXXXXXXXXXXXXXXXXXXXXXXXXXXXXXXXXXXXXXXXXXXXXXXXXXXXXXXXXXXXXXXXXXXXXXXXXXXXXXXXXXXXXXXXXXXXXXXXXXXXXXXXXXXXXXXXNATVRRNPSGRYFVSLLVETEVQELPKTHSYIGIDVGLKDFAILSDGTHYENPKFFRLLEDKLAKAQRVLSRRMKGSFRWNKQRVKVARIHEYISNTRKDYLDKISTEIIKNHDVIGIEDLQVSNMLKNHKLAKAISEVSWSQFRSMLEYKAKWYGKQVIVVSKTFASSQLCSCCGYQNKDVKNLNLREWDCPSCRTHHDRDINASINLKNEAIRLLTARTAGLA

SEQ ID NO: 30085 - protein, 346 aa, Caldivirga sp.
VGAGADFSQDAGGGVYEVKYRNRRTNVVRLLPNGAQERRLRKLADAAAKLWNELNYERRQQFFRGEKVDFKGTWSKYYGKYKNVLGVNAQAVMQKSNEAWNAFLHLLRLRREGKLPPHMRRVSPPGYWKDEVTKQRRLILLVRQDRYVVDERRHVLILKDFKMAIRFTGGLRWFGRQGRLEIHYDETRNAWYASIPVEVGVEEARTGRKSKHIVRGERKSIQVESPKGSKVASIDLGINNLASVVVSDGTWLLYKGVRAKEDYFYLQRLISRIQSLRGTLKDRLLADAIDELNREVRRLHGKLRRLLHLYRNFASHLLRTLHELGVSTIYLGYHSTLPRKGATSSP

SEQ ID NO: 30086 - protein, 355 aa, Shigella sp.
  misc_feature (301)..(335): Xaa can be any naturally occurring amino acid
VKRLQAFKFQLRPGGQQEREMRRFAGACRFVFNRALALQNENHEAGNKYIPYGKMASWLVEWKNATETQWLKDSPSQPLQQSLKDLERAYKNFFQKRAAFPRFKKRGQNAAFRYPQDVKLDQENSRIFLPKLGWMRYRNSRQVTGVVKNVTVSQSCGTWYISIQTESEVSTPVHPSASMIGLDAGVAKLATLSDGTVFEPVNSFQKNQKTLARLQRQLSRKVKFSNNWQKQKRKIQRLHSCIANIRRDYLHKVTTTVSKNHAMIVIEDLKVSNMSKSAAGTVSQPGRNVRAKSGLNRSILXXXXXXXXXXXXXXXXXXXXXXXXXXXXXXXXXXXHKPALRVLWSYSERKPPVTK

SEQ ID NO: 30087 - protein, 405 aa, Saccharopolyspora sp.
VARTLVKRAYKYRFYPTEQQAAELSRTFGCVRKVYNLALDTRTRAWFTEQRRVNYAETSAMLSAWKRTDELSYLGAVSSVPLQQCLRHLQSAFTAFFGKRAKYPRFKSRKQSRASAEYTRSGFRWRDGQLWLAKLTEPLAIVWSRPLPDGAEPSTVTVSRDAAGRWFVAILVETQTEHHPRADSVVGVDAGITCLLTLSTGEKVINPRHERRERKRLARAQRNLTRKEKGSANREKARRKVARVHARIADRRRDHLHKVTTRLVHENQVVVIEDLNVRGMVTNGKLARAISDAAWSEFRSMLEYKTAWYGRELVVIDRWFPSSKTCSECGKVAESLPLHVREWTCRGCDVGHDRDINAAKNILAAGLAVSACGAGVRSQREPSRTRQPAAKQELSDVRPMEIPRT

SEQ ID NO: 30088 - protein, 238 aa, Exiguobacterium sp.
  misc_feature (190)..(215): Xaa can be any naturally occurring amino acid
MLRTKVRDSVRFSLPLRGYRMRRTHHDLLEGGGTDMLKGYTYRLHPTPAQADFLVRMIGCARFIYNKLLEDRIAIREEAKAGSGTRRKPATPASYKPLFPFLAEADSLALANAKLNLDTAFAKFFAGTGGFPVFKSKRRSRASYTTNNQHGTIRIEAGKVRLPKVGFVRFTQHRPFEGIIKSATVSMTRXXXXXXXXXXXXXXXXXXXXXXXXXXTHPEVRSEGQEGAARFVTLEDRE

SEQ ID NO: 30089 - protein, 440 aa, unknown
  TnpB Polypeptide
MEVSNVQSVTSARFVTPPLTRRKRELLNDLLDQFAASANFCIQKCLEHNLTSRASLHRVAYGEWKSRFDLATHWFHSAGQVATQTLRSWRKLCRQGQADPNKPPVYEARTMRLELWGDRNQTGVCRFQGDAIQIRIRKGEHLWLPLIVTEHHKLRYLSDWCEGKAKVGEITISAFRDRANVWVPFKREVEPKLINGVCGIDINERSVDLTILKPSEQPKHISLDVSKLPAIRHSSQLKRKSIQRKLDVPPQRPVQKRRLQMKYRRRECNRTSQILHVVSKQIAEIAERERVAVAFEGIKEIRKSMRSKRRSKNGQALRKDMRRRLNQWPFRKLQFYAEYKVARQGLPTVEVSNYHKSKDCPVCGHYNRPNGHAYRCQACGFEASRHLVASWNIAKDGARHVPADCWQMQRAADELVAQAKLPAEPEKLPQISVIQNDAEI

SEQ ID NO: 30090 - protein, 429 aa, unknown
  TnpB Polypeptide
MILSYSEKFQGENLEKKIFYEICSIAKCIYNSSLYNQRQYYRESEGKYLEKTLLYQKIRDEVSRLYKKLNSWVSQRIIFQVDLDYQNFFKAFKVKKEYQIVRPPKYKKKGKGLVPVVFAGPALKQEEKTLRLSLSKYLRNKFGSKFLTIEIPSFLEEKEISEVTIIPIGYSQFEIKYTYEVEEKKSEGKEVLALDLGLNNIAAGVTTKGEAFLFSGKWLKSQNRFYNKKAAEFQSQIDTEKNPLKKMKLIFHKKMLTKKRNRKVKDEIHKISFNLIKFCTENDIGKIVIGHNKEWKNEINIGKRNNQNFVQIPHSKLITYITYKAKLQGIAVEEIEESYTSKTDSLALESIQKQEKYLGKRIKRGLFKSSIGKSINADINAAINILRKCIGDSLSNLEEIISRGCVFHPWKFEMKRSIHSHLKPTSLPL

SEQ ID NO: 30091 - protein, 409 aa, unknown
  TnpB Polypeptide
MSKAAETKAYMIKTYKFRIYPSKKQEMKMKEHLKIEKDLWNELLDANKKKYETEKRFLTRNEMHKIVRDKGLYSQTAQALSQRLETALFRMIKMKKQGKKCGFPRFKSIDRMKSLYYPQFGFRLDKKLSVTPFGEISIKQHREIKGKIKTLTLKRESSGKWFAVLCVVQERQESKEFKKQRSEARNQNHENQVGIDLGLIRFATLSNGEIIENPKYYKKYEERLAFLQRKLSKKKKGSKNREKAKHRLAVLHEKIANARLDFLHKISNKLVNSYSFIALEKLNSKEMSKRIKGKLHLGKHIIDAGWNKFTNMLCYKAEEAGCKVVFIEAKNTSQECSNCHRIVEKQLSDRIHHCPFCGLHIDRDVNAALNILIRATQGHCGSNACGDQASTLSQDRASMVKEAGTICSV

SEQ ID NO: 30092 - protein, 431 aa, unknown
  TnpB Polypeptide
VSEVVRTVVVKSTPLSRKLFRVFVELEGMYRNMVEQLVLYAVRNGVTSFTKLKALKYKEMRSLYPQLPSHYVHTVCQDVSTRVKSFLKRRRRGLAKKDYPEVRRVSIWLDDHLWRMRSLTSIEIATHRDWVAIELEPHKRYWEYVNSGWRLAPGVRVRLDKRNRRLIIYLVFKRSSEAYKPRGFISVDVNENHAAVLVDGKVYLFETGFRDIVLGYYYRRRRVQEKYDKLYGVNCRVKRRILRRLKERRKKSDLRWKLANIVARAARERQYAIVLEELGEEPANEMINHVRDDQLRHRIYQASFKGVQKTVEEKAREYGVPVVYVDPRNTSRTCPVHSAEITYSNGSRVGRCSKGGELWHRDVVACYNLLLRVRLGDGSSAPSLGGFNLDGSPVPLGSTATHDPILITHEVWARWKSLDVMNKHELKRINI

SEQ ID NO: 30093 - protein, 400 aa, unknown
  TnpB Polypeptide
MIKTIKVQLLPNNKQNSLLFQSAGTARWAYNWALGKQIEHFENTGKLTKISDSTLRKELTQLKRTEDFKWLYNYSNNITKQAVKDLCGAIDKFHFESKKNGYQYRESAIKSGRKLTFRDFKFFPRFKSKHKSEPAFYHDTEKIKFTKTHVQLEKLGKIKLAENERIPINVKYSNPRITFDGLNWFLSVGIEQVESVSNQYSEPIGIDLGIKATAIISDNREFKNINKTKRVKKATKRLKRLQRRASKQYLKLKKGQEKSKNLIKLETRIRKTHKRLKDIRTNYTHQITAALVKTKPKFIVIEDLNVSGMLKNRHLSKAIQQQNFYEFRRQLTYKAQFNNIELIIAPRFFPSSKTCSHCGHVHKQLNLSDRVFKCPACSFEINRDLQAAQNLLAYGLSVVA

SEQ ID NO: 30094 - protein, 374 aa, unknown
  TnpB Polypeptide
MNKAIKYRVYPSDEQAVMFAKTFGCCRKVWNLMLADKIACYEETKSFGKQTPAMYKKDYPFLKEVDSLALANVQLNLQSAIKNCFDRSRKKQNGFPKFKSAKHSRKSYTTNNQKGTVAIIDDKYIKLPKIGKVKAVIHRQPEADWVIKSATVSQESDGAFYISVLFEFEKNIVQVAKSDNVIGLDYKSDGLYMDSNGNIGSNHRYYRESHEKLAKEQRRLSRKTGSKKNQPKSNNYLKQLKKVNKIHRHITNQRIDNLHKLSTEIANQVDAVCVESLDMKAMSNKGFGNGKATLDNGYGIFLNMLEYKLYDRGKYFIKVDKWYPSSQICSCCGSQKKITLADRIYKCSCGLEIDRDYNSAINIKNEGLRLLKAA

SEQ ID NO: 30095 - protein, 338 aa, Bacterium sp.
MKVLRTYKLKITSDHPKFSQYAESYKEAANWLSYVVFKRKKKKINTPSQLSKEFYGTVREKFNLPSQLTCSLFRHVVGTYRSMKSNKNRSLATYNKASLPLCWKRDFNIRKKGMSIWGELVSYKSQSLPEGKWSDSKLKFSKGQWWLCLTIEIDQVEPKVEGGIIGVDRGQKNILVAIDPKSNKTLYIKGGELNHKRLCIRQTRAKVASVGTRSAHRLLKRLSGREKAVTQNILHIASKQLVSFASLNDARAITLEKLTGFKQKFSKENKKQHHKQRARNNRWPYFMLEFFVTYKANFVRITVDNVPAKNTSRGCKFTDNADRVGAKNVALRSLLQRC

SEQ ID NO: 30096 - protein, 383 aa, unknown
  TnpB Polypeptide
LLKHNEHYRSLVQCGQCVLRAVDASFKSFFALIRLKKDGKDLGKVKLPGYLEKDNLYPVIFQSQMFRIIDSKIRLSMTRYFKERNHIGKKFLWFDLPKHIDPNSVKEIKIVPHYKGLYFTIHITYKKEVTDTDVDKNNILGIDLGVNNFAACIDNLGSAFLLDGKYIKSINQGYNKIVARLKSILDKSKGCPKYSKRLYRITTKRNNRIEEVMRQYVSFIVKYCLERKIGTVVIGDLRHAQNSCNMGKKSNQSFVQIPYGKFTSKLKSKCELFGIDVDIASEQYTSKCSALDSEPLKKQESYCGKRISRGLFKTKLGYLVNADINGAANIVRKFLTKSKQNLETFSFQRLFRGLVNRPVRIRYHQIVGGTNFSPSLGACLQGS

SEQ ID NO: 30097 - protein, 491 aa, unknown
  TnpB Polypeptide
VCPGVAIHRKPGAETPSFRPRMACAQAVSIASVSTASVSTASVSITSSSTPRRYLVTNTRWACRVDMTDRPRRIFASGSQRGDIAVSQASAIPEHMSRYRVCPTAAQEALLLGQCAHARYVWNLGLEQRLMWRRWQGPTPGYTAQAAQLTEARAAEPWLAAGSQMVQQQALRDLDQAWRNFFGGTHHKPTWRKAGVHEGFTIVGAQARRVEQVSRRWSKVLVPKVGWVRFRRSRAIPESRSYRITRDRAGRWHIAVAAIPAPIPAPGTGQVVGVDRGVAVAVALSTGETSGPARPGPKQAERLVRLQRRLARAQRGSNRRARTRAAIARLRARDADRRTDWIEQTSTDLAVRFKVIRVEDLNVRGMTRSARGTLEAPGRNVRAKAGLNRAILAQGWGRLVTRLEQKAPGRVEKVSAAYTSQRCSVCGMVDPSSRQSQARFGCTSCGYTGNADVNAARNIAAGHAVTARGDRGSPARSVKREPQHARPPQVA

SEQ ID NO: 30098 - protein, 381 aa, unknown
  TnpB Polypeptide
VQVLESVSQPFISDERSSSAMETFRQMLNECVRLGLAENKSSFMSLRYACYPKLKDFKIAAAFKNNAISRASGILSSYRKLVKKGRRVRKPYCWKPILTTSYQFKKTTNSIILPSKLEIPLNGYVLKKIKGKRIHSITVSERGVSICFSKEVQPIECNEIFGIDTNLENITLAGNGFTRRFDMTEIGVAKQRYREAKSHFNRNDHRVLSQISEKYGKLQADKSQSEIHKTTARIVKLAKKSKAGIAIEDLKGIRKLYRKGNGQGGNFRARLNSWAFGEFQRQIEYKAKREGLTVVKVAARNSSAKCMACGNKLFPEEYRKLRCSKCGLIIDRDENAAINVRTRGLAKLFAMRFSPIGLPSEAMNGNLTTRVILLANGSQSV

SEQ ID NO: 30099 - protein, 163 aa, Caloramator sp.
VLKLKYLKEQRKLSKKQLGSSNFKKQAKKVAKIHEKIRNQREDFLQKLSSKIINENQVIILEDLKVKNMLRNNKLSKSISDVAWSKFANMLEYKALWYGRTIVKIDMFYPSSQICNICGYKNEEVKDLNIREWECPICRTVHDRDVNAIKNILKEGKRILGIA

SEQ ID NO: 30100 - protein, 367 aa, unknown
  TnpB Polypeptide
VEKSYKYRIYPNKKQKEIIAKTFGCCRFVYNTYLAKRIKLYEETKKSFSYIQCSNDMTNLKSELEWLKEVDSTALQSALRDLDSAYQKFFKEHSGYPKFKSKKIHRYSYKSKCSNGNIQYCGKHIKLPKLGMVRTKNKLIPQGRILNATVSQEPSGEYFVSLCCTDVDIKPLEKTGISVGIDLGIKEFCITSDGEMVDNPKYLKKSLNKLVKLQRELSRKSKGGSNRNKARVKVARLQEHIANQRKDFLQKLSTEIIKNNDVICLENLNVANMIKNHELARSIADVSWSEFVRQLEYKANWYDKKIIKVDRFFASSQTCNICGYVNKETKNLGVREWGCPCCHTHHDRDINAAINILNEGLRLLEVA

SEQ ID NO: 30101 - protein, 398 aa, Kribbella sp.
MSRFRLYPTPEQETALLLQCGHARYVWNLALEQWSMWTRDKRPAPRYVEQARQLTEARAGFDWLRAGSQTVQQQALRDFDQAVSNFYAGTHRRPTWRKARLHEGFRIVGGQASRILRLNRKWAVVNVPKVGWVRFRVSRAVPDAKSYRITRERTGRWHIAFAAIPPPVPAPGSGEIVGVDRGVTTSAALSTGELLSCPGFSDGELKRLKHLQRRLVRCQRGSNRRQRVRAAIAGLHARARDRRKDWVEKTSTDLARRFDIIRIEDLRVAQMTRRPNPKPDPGRPGAYMPNKRCAKAGLNRGIRASAWGLLVERLEHKALDRVERVNPAYTSQTCSTCGHCAPANRKNQAVFRCVACGHQADADVNAAVNIAAGRAVSARRETPVQVSQKREPQLATSA

SEQ ID NO: 30102 - protein, 302 aa, Enterococcus sp.
MKAYRFRIYPTEEQRVFLIKTFGCVRFTYNTLLKSGSNMQERLSPAKLKKDFPFLKEVDSLALANAQRHLDRAFKNYYQGRASYPKLKSKRSRWQSYTTNNQQHTVYIQDGMLKVPKLKSLIPLELHREIKGNIKTATISAEDSKEFYVSLLCEEDIPIIKKTNKTIKIHFSRERLIEPEMCLEHYYLDILKTEEIIRKAEKRLGVRKHAALKQHKKLSQAQNYQKQKQRVNRLYVHRQNQKNALFDKLSIHLVREYDRIYIQNLPSQEESEKIFYSTDWQRFLTKLSYKAEWYGKEIILDE

SEQ ID NO: 30103 - protein, 320 aa, unknown
  TnpB Polypeptide
MLLSKETTIHFNDKEANIISHMCYAAYKLWNVCNYERKNYKDLIQKGELKEYPDWYYQKSAHKDDIWFKSLPSQTAQEVCKLLDKGWKSFYKLLKTKGIENPQPPKFKHELIPITYMQNGIQKQENGSIRLSISKQLKEHMSQSYGIKEDYIFIHNQFMNNFENIKQIKIYPLKNGTSRIIVIYEIEDTNMLLDNFHYLSIDLGLHNLFTCYDSLNGNSFIVGRKYLSICRKYDKAISRVQSEWYSIQNVMNQNKEKPVNPFYPKSSKHIKKLYEKKQNCINDYLHKITKSIVDYCVANNIHTVVIGDIKGIRKNANLAV

SEQ ID NO: 30104 - protein, 390 aa, unknown
  TnpB Polypeptide
MTVAYQYKLMPTKTQERLLWRFLEIACRLYNDALKERKEAWETERRTVTYYDQALKLKDLRATDKELALLNFSTCQHVLRRLDKAFKRFFGGLKKGEKVGYPRFKKPHRFRTLEFTYGHGTKIKPDERGRLRLYVQNVGLIKVIWHRPLPEGAIIKQVWVTLKADGWYATFALEVPDKAVKKPLPQTGKAVAIDVGLENLLALSDGTLIDNPKWFKVTEEKIALKQRILSKKVKGSKRWRRMCRQIAKLHLKVARQRRDFYFKLAGWLVREFDLIAVEDLNIKGLAQGICSKGVHDASWGIFLNQILPYKAWSAGKAVVKVSPNGTSQYCAMCGAYVPKDLSERQHICPCCGFVTHRDINSAILILKLGLEQARRDADFTPASCLQEAVG

SEQ ID NO: 30105 - protein, 370 aa, unknown
  TnpB Polypeptide
MMKTIQTVVEELPEQRAIFDENLLLMADAQNFVVSSCYDHEETNTFRMHHFNYPILRERFGLPSQLAVVANKYACSSVKGAIRRKAPRPNFSGRAVHYDSRSSTIDLVKKSASLLTKEGRLKVKLNVPLYFQKFSDWKVKESNLVKCRDNKLRLMIMIEKPAIKSNGSGKVIGVDRGITNLIATSDGWLYEGRDVFSVKKRYVGLRARLQAKGTRSAKRHLSKMRGREKRFMADVNHCISRTLIDSAGLNGALILENLKGIRTARHRHQQNWLFSNWAFYQLETFLKYKGEERGVAVEFVPARNTSKACSACGSIKKGQRQGSVFRCKTCNVVLHADLNAAKNILHKYQSSRAAVNQPIALQADGASHRL

SEQ ID NO: 30106 - protein, 402 aa, Escherichia sp.
VKRLQAFKFQLRPGGQQECEMRRFAGACRFVFNRALARQNENHEAGNKYIPYGKMASWLVEWKNATETQWLKDSPSQPLQQSLKDLERAYKNFFRKRAAFPRFKKRGQNDAFRYPQGVKLDQENSRIFLPKLGWMRYRNSRQVTGVVKNVTVSQSCGKWYISIQTESEVSTPVHPSASMIGLDAGVAKLATLSDGTVFGPVNSFQKNQKTLARLQRQLSRKVKFSNNWQKQKRKIQRLHSRIANIRRDYLHKVTTTVSKNHAMIVIEDLKVSNMSKSAAGTVSQPGRNVRAKSGLNRSILDQGWYEMRRQLEYKQLWSGGQVLAVPPAYTSQRCACCGHTAKENRLSQSQFRCQVCGYTANADVNSARNILAAGHAVLACGEMVQSGRSLKQEPTEMIQATA

SEQ ID NO: 30107 - protein, 443 aa, unknown
  TnpB Polypeptide
MDIYTTYPVRISRYHKVFQDTVSWYRNAVDFFIRVILSEEDLFLLKNQTERVNAVERLTVTSAKRPEVKYNFGKDFYKFPAYYRRAAIAEALGCVSSYLSRVKNWEVEDTGTRGKKPSLPKAGFTSPALYRKNCYIRETDYTASIKVWVNNTWDWVTVDFRKSDADYILKHCRGRKECVPVLRKRGKKWYLDFSFEEKTKLHDIPVEDQLVLAVDLGINNACTCSVLAADGTVAGRGFLSLPAENDCLEKATGRIHKAQRNGAKRMPRLWARAKGISDAIAVKTAAYIVDMAVRYSVDTVVFEHLNTSGKKKGSKKQRLHFWKAQYVQKMVTDKAHRLGIRISRICAWGTSRLAFDGSGRILRGKESTKTAGNYSLCEFQTGKVYHCDLNASYNIGARYFIREILKPLPATVKQDIGAKVPRCLKRSTCTLSDLISLAAVLAA

SEQ ID NO: 30108 - protein, 502 aa, unknown
  TnpB Polypeptide
MHTVQLLLRPTAYECSELDRRFHAISHIHNVCVSHADKLLVRLEHDNEYQAWRKEYLSIPKESKGAPAKHRKKLSSLMADRRKELGLSKTGFESRLKVCGKRYSRLLSSQQVQAEADRVWASVEKYLFGNGKKVHFKKHMDFQTIGGKSNRNGAKFDRDTMTVSWNGLEMKCYLPKKESSREYILESMEHKISYCVVKRLMFSSGWRYYLELVLDGPAPGERRKSGDKVMGIDPGVSTIAGVSDKGCILTELAPDADIYEKGIRKLQDSMDRSRRHSNPQNYDPNGTVKKGRKTWKYSKNYLRMRKQLKNLYRKKSAYILTIHRELCNRLIRDSGHFLVERMQYKALQKKAKKTEREEKVSEVKAKNGTIRQVHKYKKKKRFGHSINRRAPAAFLRELERKAVSAGGTYVEVDTQSFKASQYDHFTDTCKKTTLKERKKEIGGRMVQRDLYSAFLIKNAAPDLKHPDREKCIYEFERFADMQDALLHKMREEGISYKQCFGF

SEQ ID NO: 30109 - protein, 209 aa, Anaerolineae sp.
MQSVYGDAQLFERNGDGYVRLPLRIDNDAPPVCDGDPTFSGVDLGLVRWATVSTPVPVECFAGTAVRHRREHVSDLRRRNQKHKRLDRVKAMGGQEWPWTRDINHQMSRPIGDLAAMYERPVMVFETLDGIRSRVGGSRRFNRMMSWWAFRQWIDFVTYKAARAGIPVVFVDPRGMSKACSGCRHSSRSNRPDQSHFRCVRCGYQLMPI

SEQ ID NO: 30110 - protein, 437 aa, Richelia sp.
LLTNYVYKLKPNTTQSTKMNHWVDMLRSHYNWCLNDRLTQYAQQFIMGEYCDIRTKAEACPLTCFVSKNGATGEPWKASNLDKKGNPVNPRRNAGMIQDAALPDLKKARPWFAGIDSTALQQNIKRLDTAYKNFFDGRGFPKFKNRSNFTSFTVTMGIKVQKNKIYLPKLGWMKFYNSRPIPIGFTIKAATIRKRQDGWYISLRIEDKTIPDYVAKPLIEVKSVIGCDLGLTKLVHLSDNHQIDNPRFATNKKTKRALKIRQRRVSRKVKGSANRKKAATNVGRIHQKIVDKRQAYQWKVANIIVSRNVDAIAIENLNVSGMMRRCKVKVDSSTGRFLSNGQSRKKALNRSIADASWSDLTLKIEYLAAKQGKVVVKVNPKHSSQECRKCGHVDKSNRDGEKFICVKCGHIEHADIGAAKTIRDRALNMVRGDGSET

SEQ ID NO: 30111 - protein, 407 aa, unknown
  TnpB Polypeptide
LSTVKKTKKAKKEKDPNEQHRAIKYRLEPTPKQKEFFEKTFGCCRFIYNCLLADKIAYYQENGKMLNNTPAQYKIKFPFLCEVDSLALTNSQLDLQIAFANFFNNHSFGFPHFKSKKHSRKSYTTNLVNGNIQLYNDGIKLPKIGKVKGIIHRQPDQDWQLKSVTISFETDCNYYVSLLFEYIKKVDDILLTEEATEENTIGFDYKSSGLYMDSNGKSCDMPKYYKQSEKHLAELQRKLKNKLLNSKNYIKHQNKIRKLHKHIANQRKDFLHKESFEIANRWNNVCIESLHMRAMSNKGFGNGKSTLDNGFGMFVNFLEYKLFIRGKELVKVDKYYASSQLCNHCGYKNPLLKDLRIRSWTCPVCGFYHDRDINAAINILQEGLHILSKRRKEKLKAKEEAKQLNKK

SEQ ID NO: 30112 - protein, 403 aa, Symploca sp.
VKRQAVKVRLYPTDQQKQILAQHFGCARWWWNHGLNQCIETYKATGKGLSQSALNSMLPALKKEPELEWLGECYSQVLQSVSLNLSRAYQNFFAGRAKYPKFKSYRHRQSIQYPQKVKQVNDCLKFPGKVGVVKAKIHRPLDGKIKTVTVSKCPSGKYYASVLMEYDGDNPTPNTDGKVVGIDLGIKDFAITYDGDKTSKYVNPKYLYKYQKRLAVKQRIAARKQKGSNRKNKANKIVARVYERVSNVRQDYLHKLSRKIVDNNQVVVVENLNVKGMVRNHKLAASISDASWGTFVNFLSYKLEKEGKVLIEIDRWFPSSKLCSNCHYQIGDLPLEVRVWTCPSCGTHHDRDGNAAQNIRAEGMRMLSSSGTGEANASGEDVRPTRGRKSKMRQSFVKLEAPT

SEQ ID NO: 30113 - protein, 305 aa, Scytonema sp.
VLKAVKVRLYPTTEQEIFLAKSFGCARWYWNYALNACIQHYEETGKSLKLSVYKAYLPKLKLENPWLKEDCYSAVLQCVAINLNKAYSNFFEGRAKFPRFKSKHHKQSIQYPQNVKVVGDCLDVPKIGTVKAVFHRPIEGKVKTCTIVKTPTDKYFASILLEFDGETGQVSGDKTLGIDLGLKDFAIVHDGEQVTKYSNPKHLKRHEKNLARKQKKLARKVKGSNSRNKYRKLVAKVHERVSNSRQDFLHKLSRKLVDESQIIVVENLHVKGMVRNRKLSKSISDVGWGMFINFLDYKLKWKEGQ

SEQ ID NO: 30114 - protein, 415 aa, Scytonema sp.
VLTLTYEYKAKPTKEQIKLIEHILDVCRKVWNFALRERKDWLNSRKCPVNACSITSEYIIPADAPYPNYNTQAKALTQAKKQYPELKTVNAQVLQQVLRKLETAFIDMKRKGMGFPRFKNRYRMRSYVYPQLGEGQILRGNQIKLPQIGWMEYVKSRDIPDGFTVKQVRVVRKASGYFLMFTLECNVNVPDTFPAGYAVGLDLGLDKFAATSDGTLVERPRFLTQLHGKLKLLQRRLKNKKKGSSNRHKLNRKIARLHQRISDTRKDWHFKLAHKLCDDTGMIFVEDIDFRVWAKGMFCKHTLDAGFGQFVSILQWVCWKRGVYFAKVDKDYTSQVCPQCDTHTGKKELKDRVHSCPECGYMTHRDVAAAQVIRNRGINALGRSVVENACGDGLTGTGDSLVKSQRSKKKGGEAR

SEQ ID NO: 30115 - protein, 382 aa, unknown
  TnpB Polypeptide
MMRTASIWLELSAAQAEALAALRTAYADACNRLVPVVREHRLWNRVGLHQRSYTMLREATPLGSQMCCNAIFSVCKAYKAQKELGRIRKDAPIPEIRFDRASVHFDKRTYSLKGETVSLYTLDGRITVPMRLGEHQRRILGSGQPKEAELVLRKGQWFFNLVVETDDAQPVASGPVMGVDAGENNLAAHSLGRVFGGERLRDKRDRYLALRRRLQSNGSQSAKQKLRQVSGKEMRRVKHINHETSKAIVQAAIDAGIAKITMEDLTHIRERIKAGKRMRGRLHRWAWRQLQTFVEYKAKAAGIAVEYANPAYTSQTCSCCGELGKRSKHRFECPHCGLRAHSDLNASRNLARIGSGAPLSRAVVNTPDVGSVDMGNHVCASQ

SEQ ID NO: 30116 - protein, 243 aa, unknown
  TnpB Polypeptide
VKFAKSRELNGRILNATIRKNPSGKFFVSILCEEEVPELPETSLEIGIDLGITDFAILSNGQKIDNNRFTSKMEKTLKREQRKLSRRALNAKKAGKELFEAKNYQKQKQKVARLHEKVINQRTDFLNKLSTEIVKNHDSICIEDLNTKGMLRNHKLAKSISDVSWFSFVSKLQYKAEWYGREIIKVDKWFPSSQLCSKCGHKDGKKSLEIREWTCPVCHAHHDRDINASKNILAEGLQIQVIV

SEQ ID NO: 30117 - protein, 426 aa, unknown
  TnpB Polypeptide
MEKYIACVNSLVALHLSGVSIQKFSSKDVDAELPAAVKNQAIRDAKSVLQRYAKKQRKVERKRAWFAEQGKTPKRPIRDAKVPILRRPVLFVNNQNFKIDLDAKTVSVPLFRNGETAPRKTTRNSVQKEIHVATVTPRQREILTRTPHLSTLRIVRRRNTLLAQVGYTVEEPETASLDDLLVDPKTVVMGVDLGIKCPAVSYSTNGTVRFFGNGRENRYKRRKFYARRKKLQKAKKLRAIKHISDKEARFMKERDHQVSRAIVNEAIRQGAKVIALEDLDGIREGCTKSTPTRKSRKNVDKPKVDSVVESVGEPVQLALFSESETMTKKERRKKRKLSKKQVAARRKNNRSLNSWSFYRLAKFIEYKAALAGILLVYVDPYKTSQLCPHCGKEHKAKDRRYECECGFHAHRDLVGAINIAKNALKR

SEQ ID NO: 30118 - protein, 383 aa, unknown
  TnpB Polypeptide
MGKQFKFRIYPSKEQEARIQKNFGCARFVYNYFLGKRIEAYKSGQKMMSLNECARNLTLLKKQEGYEWLAEADDNSLRYALRDLEFAYKSFFRSVNHAGFPKFKGKRETRRSYRSKNNIARQSIAVYDNEIKLPKLGLVTCKVSRQIDGRILFATISQVPSGKYFVSVCCTEFEPVPLIKTEAEAGIHMGIKTLVSLSDGRRFKNVRAFEKSRAKIGRLQRRLSRKSKDSKNHEKARLKLARAYEKVTNQRNDFLHKLTSQLVNEYDLICVREEPFSERAKNTHYSKYAADAGFGTFVRQLEYKCNWYGKDLIKISNWHPSVQLCSYCGHKNLALKLRNSSAKWTCPNCGEQHNRAVNAAVNILNEAKRVRRDKPEVKPDESA

SEQ ID NO: 30119 - protein, 436 aa, unknown
  TnpB Polypeptide
MIQMIRSIRVQLLPNNKQKTKLFQFAGAARYAYNWALDKQMDSFREENKIQTDGELRKAFTILRHSEGNEWLQGISNNVTKQAIKDLCIAYKNFFRKQKQPGYIKYSSKKIAHYNRIGKSLTVYDMNGHPKFRSKKNGDFRFYQDNVKIQFTGTHVKLESLAGSRRKTRQRLNWIRLAERNRIPVRGKYTNPRIAFDGERWWLSVGIQTSRKLKPLRGLSFVCKKRRYARSEGIGIDLGIKDLAVLSDATKVRNINKTRAIRRLKKKRRRLQRQVSRKYQMNKKGERYCKTSNLIKSEKRLLRINHRLANIRQDHVHQATSAIIKRKPSFVCLEDLNVRGMMKNRYLSEKIQEQNLYEFRRQIEYKAHWSKIPVVIADRWYPSSKTCVICGHVKKELNLSERMYVCPVCGNIIDRDFQAALNLKRYGESERMESAS

SEQ ID NO: 30120 - protein, 380 aa, unknown
  TnpB Polypeptide
VQEAVLREHCAHARFVWNLAVEQQSWYGTAGRKTAPGWVAQARQLTEARAEHEWLAAGSQMVQQQALRDFGQAMANFFAGTHRKPGWRKAGRDEGFRIVAMKPGHVRRLNRHTAQVWVPKAGWVRFRWSRPVPEGVKSYRVNRDPAGRWHVAFAAVPEPVPGPGTGEVVGIDRGVAVTLALSDGRMYQAPAPRPVVRLQRKLCRARRGSNRRTRVRARLARVQASNADARKDWAEKASTHIARRYDLIRIEDLKIGNMTRSARGTTDAPGRNVAAKAGLNRSVLQQGWGLFARRLDDKAPGRVEKINPAYTSQRCSACGHVDRDSRKSQADFLCTACGYVCNADVNAARNIAAGHAVTARGGLALAGPVNREPQHALLAS

SEQ ID NO: 30121 - protein, 406 aa, Mariprofundus sp.
MQILKAYKFRLEPTESQRQSFAEFAGCRRFLWNKMLSINLQRLTDKQPIMRYNESAWWLTLWKKSDEFGFLAQVQSQVLQQCLKDLDRAFSDGFDRKQPLKRMPRFKKKGSNDSFRFPQSVRVEGNRVFLPKIGLVRFRQSRPIEGLIRSATVSRRGKHWFVSILTAREIAEPIHQSSMVTGIDRGVVNLATLSDGSVFEGSKPLKRLAKKLAREQRKLARKTKFSNNWKKQRERITRLHIKIADARNDAIHKATTIISKNHAVIVLEDLRTKNMTASAKGSIDEPCTNVRQKAGLNRSILDMGWFEFYRQLEYKQRWRGGQVILINPRNTSRKCSACGFTDKVNRQTQAQFSCMACGHTENADVNAAKNILAAGYAVQACEGIGGYAPNEAGTRGAAMRPLPLAA

SEQ ID NO: 30122 - protein, 425 aa, Beggiatoa sp.
MKKALKTKIRGLNKSQFKRLRKLTAHAKNLYNQTLWTLRQAYEATGKYFSYPQMDKAMKQVHNLEGEINYKLLKAKVSQQILRRLDKNFKSFFVATQDFKKNPSKYKGQPKPPRFKKSQYDNLIYDFQAFQIDFDKVVLDATKGNELKIPLPKQLIGKNIKQVEIIPKPHSFQAVFVYEENQATYQQAVPNDQVMSIDLGLNNLATCVTNGVIKPFIIDGRRIKSVNAYYNKRKAKIQSELEKYRGKKWSNRLQNLTDWRNARINDCLHKATAHVVKICLVNNISKVVVGDVTKSLDHINLGKKTNQNFVNLSLGQFVDKLRYKLGLHSIKLTVANESYTSKASFVDGDKMPKKYVKEAKPTYSGKRIKRGLYQSQDGTLVNADANGAYNILRKSDSKFSFGKLVEKVGDYVKDWLHPTQRVFIK

SEQ ID NO: 30123 - protein, 437 aa, unknown
  TnpB Polypeptide
MLLAYKYRIYPTKTDKILLAKHFGCCRFLYNYFLSYRKNEYEKGNKVSYLMTQKELTKMKTQDQYSWLNEVSSQSLQMAIQQLDDAYKKFFRKEGGYPKYKSKHSSTQSCSFPQNVRLKKNRVYLPKFVKNGIKINIHRELPENAIIKQATITKKNNKYYIAISFDDNIPTPKPVVAQSSIGLDVGINSLIATSKDVKIENPRYTAKYARMLKLASRHLSRKQHSRKKGDTTPKSKRYLRQQAKVAKIHEKIANSRSDYIHKITNEITNQYDVICIEDLNVKGMIKNHKLSKHIADVAWGELRRQLKYKSERKGKFLITVDRWLPSSQICSSCLSLTGKKPLSVRKFICPICGTMHDRDINAAKIIEYFGLLIFFTLGHVHNLSAGTVDYTRGEPSGGDSFSILIEKLSSYGSMKREALTSISESGSPKEAITSSAS

SEQ ID NO: 30124 - protein, 423 aa, unknown
  TnpB Polypeptide
MLLAYKYRIYPTEADKILLAKHFGCCRFLYNHFLAYRKGEYEQGNKVSYYITQKELTKMKAKEEYSWLNEVSSQSLQMAIQQLDDAYKKFFRQQGEYPNYKSKHNSTQSCSFPQNIKLEGNRVFLPKFMKNGIRVNLHRELPESATIKQATITKKNDKYYISISFDDNLPIPKPIIAQSSIGLDMGINSLIATSKDVKIDNPRYTKKYARALKLASRHLSRKQHSRKKGDTTPKSKRYLKQQAKVAKIHEKIANSRSDYIHKITNEITNRYDVICIEDLNVKGMIKNHKLSKHIADVAWGELRRQLEYKSERKGKILIKVDRWLPSSQTCSSCLSPTGKKPLNVRKFTCPICGTTHDRDNNAAKIIEYFGLLIFFSLGYKHNLSAGTVDYTRGEPSVGDGDSISIVAPSSHGSVKREALTSLK

SEQ ID NO: 30125 - protein, 374 aa, unknown
  TnpB Polypeptide
MAEKAYKFRLYPNKQQEELIRKTCGCARFVYNVTLAVRQAAYKAGAPLSGNDCVKMLPGLKVQYPWLKEVDSTALQSSVRNMDRAYQNFFASKGGSRKGRAIGFPKFKAKHHCRDGFTCKVGFAVQDGAVKLPKLGWIRAKTSTAVKGRIINATVSITRSGKFFVSICCTDADIPQLPTTGAAVGLDVGIKDLVITSDGVKYPNHKYLAKNEKKLAKLQRRLSRKPKGSRNREKARLKVARLHEKISNQRNDYLHKLTTQLIRDYDIICVESLNVQGMMRNHSLAKAIADASWGEFCRQLQYKAAWQHKQIVEIGTFFPSSQLCSCCGYKNPGVKDLSVREWTCPVCGAHHDRDGNASTNILAEGLRLLSTAVA

SEQ ID NO: 30126 - protein, 565 aa, unknown
  TnpB Polypeptide
VEAEVNISRSHRIRLFPTKEQERFLQDCAFVARTAWNFGLSFLIESNRRVIADWNALSDAERLARDPALKPKKESKRKKKKTEVSDDKKKKQSKPKVEWASYTDDDRLKRAPTGWDSAPASAAWTQVKKTSASGQLRGAVIANAVPAMVGFNAFIDLNKAWNKYFKECGSKPCSRRKDDKNCWCKDFPAWMGCGHPRFKNRSSGKSFLLPGSDKSGCNAIFGVDGKHFVFTGNKYHQRITMAEELRFQGRVASARVFEDNRHWYASIQVMDITVPDPAAHAGPSVGVDLGVASTATLSTGEKIDNLHAARKNEPRIAKLNQAISLKSIWLPCPACAGEPDKKKECKRCSGAGQVQDRRAVTCEVCKGTGKDLEDESKRCRRCRGCGRQKSQRMIDLEAKITKLQQHAANQRNDHMHKATTRIVQTYSFIGLEDINFNEMKTQNAEKMTGEGKRKRGFQRSLTDACPGEFRRQLEYKAPAYGGRSVRIDKWSASSKICSACGERVDDLPMSVRTWTCPVCGVSHDRDINAAVNILRKALDEAKTTGEQSAVVKKPRCAKKELHDAR

SEQ ID NO: 30127 - protein, 369 aa, unknown
  TnpB Polypeptide
MKIIRSTKCSLKFASSSKKKQLSIVLAEYSKVVNLFINHFWNNPDDANKSQLLKPIVDLPKDSWLSARLRKVAAREAIDMVSAAKERWKDKAVIPVHKGNRICGSANIADLIPSKNAHEFDAWLHLASIGDKVILDLPVRYHKHFNKYNIVGKRLNSYLITKNYVQFSFEITTAEKRTGTNAIGIDTGINALASTSTGKQYGLDIKQCIERVKRCKHGSNGQMQARRALRQRIDETVKEIFIKENPDLIVVEQLKNMGHKSKAKRLLAKNIRRSIGIWNWKYWLKRLQEHTELNRVSFRSVSPYYTSQTCPKCGHVDRMNRNGEMFLCLKCGHTDNADNNAGVNILFRYIMGQYGVHYKQDNLVRLGYA

SEQ ID NO: 30128 - protein, 418 aa, Streptomyces sp.
MQLRYSFRLYPNGPQRFALARAFGCARVVYNDALRARETARAGGEAFPKTGDLSKLLITEAKKTEERAWLGEVSAVVLQQSLRDLDTAYKNFFDGLKGKRPLMGAPRFKSRKDNRQTVRFTANARWKITTGGDLALPKIGDVRVKWSRALPSVPSTVTVVKDAGGRYFASFVVETDIEELPETGAVVGIDLGLSHFVILSDGTKIEAPRFLRRAEKKLKKAQQNLGRKAKGGNNRTKARIKVARAHGRVADARREFLPQALNCVRAGETPIQLSTKIIRENQAVAVEDLTVKGLARTRLATSVHDAGWSQFVAFLEYKAVRYGRGFHRIGRFEPTSQVCSTCGVKDGPKPLNVREWTCGACGAVLDRDINAAVNVAKAAGLAVSACGAQVRRAFVPAQRGEAGTHRDGQPTVVGIPAL

SEQ ID NO: 30129 - protein, 472 aa, Streptomyces sp.
VKATRIAYSKDLNTGKYAQLEEQARRLGAVRSLVWRLYGSISGLPWSDRQIRDVWIADGTAQTFGVLANAWKETVRDAVADITANREAAKRKVKKAIFRHIADEAERKHLVTLLKRDQWVADSYLSRQMRRHWKRGRNRTHNQIVVRSDQYKTFTLADSGNVWLAVPGLERRQLVRIPLNTTVSPTGTLRLILRNRRAEVHYQIDAKGTKSSGRPCGDRETGIDKGYSEVLTDSDGKRYGTQLGDLLTSESDHRRTKNARRAKLCAVAERAERRGDHAKARRIRDHNLGTLKRDRRSTAWRCRVRDITYRSVHAVVDKAGVIVAEDLTKTFSSRKKLGKNTHRRLAAWTKGVTAEALQTVSDRRGSAVRLVNAAYTSQAVPFTDILAVRKGDRLHCTECGAVWQADHAAAINILYRASDSDITLHTPHTRVKQILRERADRQRSRLPDQDSSTRPLCRCGERTIQPMLNSEQ

SEQ ID NO: 30130 - protein, 655 aa, Streptomyces sp.
VQLAEGETSRTACARTLIRGGVDEKWGEVLTRAVVVERIGWCADLVAGMAASLLGEHWNTRDVDVLAAGVDVGGRKLPSNAWMALRRLGWTVAPKGGIKVNDRIVRMAQEQVGRTLRSAKWRADVTAAVLATWPTDPAKRTAGEWDQVRAAVAGGEHLPSSVFKGRTRQIATFTRNHGRLPADVFEAEGVPRVARMLLLAACDGQQATIERTKAEPKKALLRLQLPTRPDPRSYADWTWVSCPIPLPPTVPANAVLHLPTVRIEGGKVRADLAYTHPVPKAQRTGHMVALGVDWGLNTLLSAGAARLHQDGRITVLGCGAQFRAAGVLAKQHRLRRQSELLQAKVDHLALLLTGHDDEQLAAKYHILVDEIRYVSKRRSNLNDALAWSAARWAVDQASAAGATVIYLEDLRSMEAKGMGRTHNTRMSQTVRGQITERMRHLAAEVGIAVVAVPPRNTSKHCPRCLTPLRHRKAPDRPTESGWKWAICPHRECGWQGDRDQGAWRRIAARGLTHQTTTTASRAGGAMVIRSVVDNLETKAVITTAPDESRKDRSKTGPTRPHTSRPAPRRRRAPSPIAPSGSAGKRPEGHAPTDRTRLPRAAHRHQGMHTISNTTTSRHGPRGAALGAGFHLPAHATPPRWFEPNPDLRSDSGSLS

SEQ ID NO: 30131 - protein, 401 aa, Streptomyces sp.
VRRAYKFVLRPTVRQEAALRVMLRDHCMLYNAALQERRDAYRHASRTTVRYGEQSAQLKEIRGFDPDQARWSFSSQQATLRRLNMAFAAFFRRVKDGQTPGYPRFKGRGHFDTVEFPKDGDGCRWDSTPHHRQTRVRLQGVGHIRVHQHRAVRGRVKTISVKREGRRWYVILACDEVPAETLPATGSIVGIDMGTTHFFTDSDGVHVANPRFVESMAEELAAAQRHLATFPKRTRCRTKKHCAAARKVAKIHAKIRRQRVDHHHKTALALVREHDVIGHEKLNTAGMTKTPAPRPDPGQPGAYLPNGAGAKAGLNRSILDVGWGLFLGILAQKAESAARRVIPVNARNTSRTCPECGHVARENRVTQAKFECVKCGLVANADHVGALNVLNRAGLVLCAAA

SEQ ID NO: 30132 - protein, 310 aa, Streptomyces sp.
MLRDHCSPGYPRFRGVNWFDTVDFPKDGDGCRWDSTPYDPVTRVRLQGVGHVRVHQHRPVKGRVKTVSVKREGKHWYVILACDEVPAEPLPATGAACGIDMGVAHFLTTSEGEHIANPRHGKLGADALAEAQRALKEFPRRKRENRTARHRRAVEKVAKLHRKVRRQRTDHAHKTALTVVRTYDVIAHERLSIANMVRAPKPKPDPDQAGAFLPNGAAAKAGLNKSIHDAGWGVFLGILAHKAESANRKLIPVDPRNTSRTCPACRDVSGENRTTQEKFEYTQCGHSANADQVGALNVAIRAGLVLPDVA

SEQ ID NO: 30133 - protein, 210 aa, Streptomyces sp.
VKRAFKYRFYPTDEQAAELSRTFGCVRKVYNLALAARTEAWARQERVNYNETSAMLTEWKKTEGLAYLSKVSSVPLQQCLRHLQTAFTNFFAKRAKYPRFKSKKKSRKSAEYTTSGFRFRDGRLTLAKMAEPLDIVWSRPLPEGAKPSTVTVSQDAAGRWYVSLLCEDPAVKALPATDKAVGVDVGLDHLLTLSTGEKIANPRPHRGPPP

SEQ ID NO: 30134 - protein, 421 aa, Streptomyces sp.
LVKRQFGHRARLALSPAEVLKADAQAHAARTMWNLLHAWWQMMPKDKRTLANADAAIRQARKDLEFLALLPAQAAQAVLKTYVQAWRNCWDGRADAPNYKGRFRSVMSVDIPQGRDLNIKRVHRRWGMVNLPRIGRVKFRWTKDLPVGKRAGTENRITGARLVKDALGWHIAFRVMTQEARPEAHQGPEVGIDVGVSVPLALSDGGSFEHGAWLTEKEQAKLLHLEQRAAQRKQRRKPGERTSRRLRRTYDQIARLRAKAKRRAADWQHQTTTTIARAYGTVVVEALTITNMVKSARGTAEEPGKNVAQKAGLNRSIAAEAWGRTVTMLAYKTARHGGTLVKVPAPGTSRRCSACGCTTPASRESQTVFVCKNPDCGWSGNADHNAARNILHLYRIGLVAIPAAGRAVVRRARCVKPATAR

SEQ ID NO: 30135 - protein, 316 aa, unknown
  TnpB Polypeptide
MPKKDDLPYMMGLKLRLYPNWKQEKILWKNLNASRFIYNQLLANSWTDSRIIKNKLDKRYPIPEAYWRYDKNGKVIKKSQKRPTGLARITAQRYPWIGDDDLDSDMFTNTEVNYKAAWNMFRKVHTAGKPKFKRKNRPVQSYSTSNHYSSATVKKHGGALSLYNGSIKFLDHNHIQLPKLGPIKVKLHRSLPTNRLVRIATVTIKHYATGQRTVSLLLKSDEPFHQALPNTNQAVGIDLNTENFLTTSDQKQVANPHYYRALNIVPSKSTWQNTNGFFLAGQGVPKKSIVLCGQARITSRRSWSLPKSINGFVIGA

SEQ ID NO: 30136 - protein, 243 aa, unknown
  TnpB Polypeptide
MCETRIGTVTLTKDPADHFFLSMQLASDKPFVKESKTNHGHIGIDLNTDNFLTDSEGNTVPNPRYYRTIKGKLAKEQRILSRRQRRAKKEHRSLRDSKNYQKQRLLVAKLHAKVMNQRHNFLQQISTALIKNHDLVVAEELRSKNMLKNHALAMSIADVGWRSFLNMLAYKADLYGRQFITVSPKNTTQTCHDCGFVMGSGGTKKLTLADRKWTCPQCHTHHIRDHNAALNILEKGFQKQQKS

SEQ ID NO: 30137 - protein, 317 aa, Turicimonas sp.
LKDLEKGYKNFFAKRTKFPRFKKKFQRDSFRFSQGFKIDEDKQRIYLPKIGTVGYRKSRSIIGKPKNITVSREGLKWFVSIQTEFEIEPKRMINSEIGIDMGVKKFVTFSNGTFVEPVNSLRNCLKQLAKLQKKLSRQQKGSSNSKKTKTKIAKLHKRIADIRRDFLHKITTTIAKNHGIVFMEDLKVSNMSASASGIVEQPGKKVRQKSGLNRSILDQGWFSFKTMLAYKLEERGGLLVLVPPKNTSRTCPNCGYISAKNRQTQAHFECVKCGYKENADIVGAINVLRAGHARLACEMNGAVRLLSAGTQRDFLQQ

SEQ ID NO: 30138 - protein, 383 aa, unknown
  TnpB Polypeptide
MQIQLMKQFCGCARYVYNRTLSLERSLYKKDNKHSFKYAEAANRLPEWKKKNPFLKECHSQVLQQSLKDLDQAYTNFFRKRANFPKYKEKFRNDSIRFPQGVELDEAKQQIRLPKIGWVGYRKSRDIMGAIKNVTVSRRGEKWDVSIQTEYEVSSPASNPSEIGIDMGVKRFVTLSNGDFVEPLNPFKQEREKLAKLQRKLARQKKGSRNSRKTKRKIARLHRYIADSRRDFLHKTSTKIAKNHSIVYVEDLKVSNMSASAGGTKESPGKNVRQKSGLNRSILDQGWYSFFRMLSYKLERGGGKLIKVDPRNTSRTCPRCGFVSAENRKSQATFACIGCGYRSNADEVGAINILRAGQGRLACAMSGAVRPLSAGTRRDLLQH

SEQ ID NO: 30139 - protein, 346 aa, unknown
  TnpB Polypeptide
MKLRKTYSARISGNANKVNYIESVMSQLTLMSQFVFDKGKPFWYDSKTMYRECRSEFPDLNSKIVQRFLQKYRPIKDKPDPKKPIRPSICFDYQNFNFRKTDNSLSTHWLRFNRKNFPVFGKYLADKVDPETVKFVEIVRRKNRLYANLTTVVEIDDPCDTTNPVGLDINAKRVVLSNRKFYHLRRLAHRKRELHRNKLKLQNYTKDICHKLTTQIVNDLRSVGSKVLVLEDLTGLRNSASKKKRTSKGRHCNHVINGLPYAMIRNFLEFKCLEHGITVQTVNPAYTSKQCNRCKSKDSQRPTQPRFICNDCGLQIDADLNGSRNILERYTRLECVSSESHASTDL

SEQ ID NO: 30140 - protein, 394 aa, unknown
  TnpB Polypeptide
VKIRYQFRCYPTEAQKKTLSQTFGCSRYVYNWGLNLRANAFKEGQKINFGKSSAALTQLKKTPEAGWLKDVSCVPLQQALRHLDAAYINFFKKRASFPSFKKKHGKQSAEFTKSGFKFNREAGKRSLQLSKIGKLNIKWSRGFKSDPTTVTITKRQNGQYFVSLCLDESRKQMLKTSQSVGVDLGITHLATLSNGEQIENPKYIAAQKKRLERAQRILSRRVKGSGRRNRQRLRVAKIQQKTADSRKDFLNKLTTNLVRRFDIICIEDLNVRGMVKNRKLSKSISDASFGVFRIMLESKAKMYGREIRVVDRFFPSSKTCSNCGHIVESLPLQIRQWECPACGQSHDRDINAANNILAAGRVVTAQGGNRRQVKASALKCSSRRSVNAQIVKCA

SEQ ID NO: 30141 - protein, 308 aa, unknown
  TnpB Polypeptide
LGSLFTALRVEVDLLSGCRPVKPREYLYLRLNRHTLRVLSGHNVHSVTLTSESLCISYSKETVEIRPQGYIGVDPNLDNVTVASTDHTVRAFDLSKVTNIKSTYRLVKSHFKRNDTRMARQVFAKYRQRHQNRVQPLFHIVTKRIVDEAKTRRYGIVLERLTGIRRLYRKGNSQSRNYRARMNSWSYGELQRQIEYKARWEGLKVIYVPAWNTSKQCSICGYKTLESTQRKLWCPKCGTILDRDENAARNIAAGGLRFSPNGPPGEAMVEEREPENATPIPKVDGGKSSRQTQDKTDKDLTEPEPLIK

SEQ ID NO: 30142 - protein, 405 aa, unknown
  TnpB Polypeptide
MKATRVEKHQINKTNSLWKIVDNLCWKSKNVYNCANYIIRQEFINNGRWIRYNELDKLMQQQECYYELGSQCSQQALKILDKNWKSFFVSIKDWNKNPAKYLGKPKLPKYKNVNNGRFILTLSNIQFRIEEECLFFSWKPLKPLNNIFKTRVHSKLLQVRFIPNGNIYVLEIVYEVDIPDVNIESERIVGIDIGIDNFATISNNIGVKPIIINGKGIKSINQYYNKKKAELQTDLKVRHGKDWSNRLQILTNKRNNKIDYFLHNASKSIIGWCVYYKIDTIVVGKNDNWKQESKMSKKVNQSFIQIPHALFIEKLTYKADNQGIKVICIEESYTSGTSFLDNELPIKENYNKGRRIKRGLFKSNTGELINADLNGSYQIMKKVFPNAFDNGIEGAGSHPIRLNVI

SEQ ID NO: 30143 - protein, 427 aa, Lactobacillus sp.
MSGKETRSFKDVMNCHFLALFVGNTLGILYNANIRLQKTKLKDVTVMTLKAIKTRIYPTTEQQEKIIANFGYCRFVWNQLLDMQKQRYADGGSYVNEFGMNYLIKCLKQEYPFLKAAESTSLLHVSRDLHHAYQKMFKEHSGFPRFKSRKFPKQSYQCNAVNQNIQVIDQHHLKLPKLGRLRFKAGRQPIGKIKNVTIRRSAAGKFYAIVLIDTNVEVLPKTSKVVGIDMGVSDLMITSDGIKYPTIRFDKRLSKKKHYWEKRLARRRQQAQAAIAWDHHNKVIEPRELTDFKNYQKAKRMVAKYNEKIANQRDNYLHNATKKLVEQFDVIKIEDLKAKNLLKNHKLSRAIANQSWRKLRVMLEYKCVWYGKQLVTVNPRKTSQICSNCGYDDGKHTLDIRQWTCPTCGINHDRDINAATNILQATE

SEQ ID NO: 30144 - protein, 340 aa, Bacillus sp.
MKLNYRFEIYPTIEQQHTLERWISIYRQQYNSALLDKQRYYKQNKKDLTRYELQNQQKLDKKIYHFLKEVPSQPFQEVFARLEKAYKKFFKKDAGYPKMKSFKGYRSITLTQFGMFKYKKKDGSLGTSRRMCSLTKGGKLLISKLGVIDIKWHRKLDGRVKQVVIKHQGNRWFATFCVEKHVNQDSICDANKTTGIDVGIKKFAVLSNGEEVQNPTFLRKEERKLKRAQRKHSKMKKGSKNWCKQVDKLQQIHTKIANQRKDFLHKLSFRLTNSYGVICIEDLKIKNMVRNRHLAKSIHDAGWRDVPYIPLLQGKTKWWMFGNGKTALHVTEMFELRGNS

SEQ ID NO: 30145 - protein, 364 aa, Gammaproteobacteria sp.
MKTTIKTLRVRVKDKHAKLLRKMAFEVNQVWNAVNAFTDENCYVPIPPVGWVRVPYSAFDLAKTFKTIRTERGLNLIGSATVQEITESHAKARKQFKKDKLKWRCSGGARRSLGWVPFKSRQLIWRNSQAVLFNHHFGVFDSYGLGQFEFRSGSFSEDSRGRWYLNVCVKIEIQPCSGTGQVGIDLGLKTTATCSDGNTLERGEWYRSAEKKLAIAQRAKNKKRVRAIHAKVKNCRADANHKFSRKIVNENALIVIGNVSASGLAKTNMAKSVLDAGWFQLKTMLDYKSIRMQVEFLEVNEKNTTQTCSSCGTLPNSRPKGIAGLGIREWTCSECGAEHDRDINAAKNILALGHERLAVGIPCL

SEQ ID NO: 30146 - protein, 266 aa, Halococcus sp.
MKNRSGRLPRWQSTVRYDKTTDEFYAHITTRRYDNADERGSTDTEHRSVLGIDLGVNSLAVASTGTFWQGDDYDHWVREFEKRRTKMQQQATQAGHHVMKRLGRRERAWRKQYLHTLANEIVTEAVENDCAAIVFENLDGIRERLPQADWHHIWAFRRLYEYVAYKAPERGIAVETVEPNHTSQRCSRCGFTHENNRDGGSFACLSCGYELHADYNAAKNIGLRYARQEYHRLRSSQMSSDGDAPVDVRLNRGTMTDDGPRPVAGD

SEQ ID NO: 30147 - protein, 391 aa, unknown
  TnpB Polypeptide
MIRTYKCRVGLSKSGHKRLTQIFSMSAELYNAGLESRIDCYRKTGESRSLYDQYKELPEVRAELPEFEAVSSIVLRGVLSRLDKAYKRFFKYGGFPRWKSGRRWRTIEINDKCWSMLKRQGDKTVLKIKGLPRIEVKPSRELPPNNLLKAIRITKKALRTEVALSYDLPTPEAKPVTNPVGIDMGISKRMTMSDGETVEKRELDRKKLIRLQRSVSRKVRGSNNRRKTVSLLAKEWQRLTDKERDYLHRLTSEIVKMYDFIAVEKLKTKNMLRNRNLAKSIAEQAWGKTLTLLNEKAESAGVKLVEIDPKGTSQECSSCGATVQKNLSVRTHKCSCGTVMDRDLNAAINILHRGLTIAGGNITRMVGRMKEKLEIAPARPRTVNEVANFAL

SEQ ID NO: 30148 - protein, 373 aa, unknown
  TnpB Polypeptide
LKVRSESYSWLNAAAIEVNQVWNWANEVSAKAARPFSGKSKWLNGFDLCSLSAGATEFMDRIGADTIQRVCTEYASKRKAAKRAQLRWRVSRDPRRSLGWVPFKAASLKRKGRSLRFCGKAFRIFDREYLADHRFRDGCFAQDALGDWWLCIPVRIRVEPSVAPRESVGIDLGLKSIATTSDGERLEAGRWTQGYAQKLARAQRRGHKRQAKRIHRKAARRRSDALHKFSRSIVERYQTIVVGDVSSLQLARTRMAKSVLDAGWGMLKMQLQYKGQQAGRCVQIVSERYSTRVCGNCGALTGPKGIGQLVVRQWVCAACGDTHDRDVNAARNILAGSRCGPPSAGMSHRSHPIAPSSASRARKARTDRVRAAA

SEQ ID NO: 30149 - protein, 523 aa, Bacillus sp.
MKITRICLLEVNKNEEIDHLNDLMRTWCSAIRYSFNRLVEGEKSGDVIKIVQQKFGLNKRYSEDAVLHAQAVILSQIELLPTRIEGVQGKIQKTIQKIEDYQTGKKWPKKVPVEICLAGLKARLDKLLEKESVLLTHREQGTIPTVIFGGKKNFYDRLDNKISLKEWKELRANTLYSRGDKSKKGNLNTRMVLDETENQFYIEVANPLLKNEGKKNSPRLRFRVHIPDKYFVEIINIVMPNVVGKTPTGKPMEEYQVYSIEIKRRGKKYYVHMTYDLETFGSELKWSEKITSDIVAGIDVNIDKITVTILTKQGCFLESRTFYCHEMEYVKSNRRTNVAGETAKEIIDYLLQWNVGAFVLEDLKFKQDHDTVKRFNRLVHSFAKNKLQNALISKGTKFGFKIKKVNPAYTSVIGRFKYTKMYGLSVHEAASFVIGRRGLDFEEKIPKELINHLRSLVKPMLIHILGSMEESREKSINGKQRRKFIAMMLKNIDDFKENHSWKLWNVIHKTLLIKNQVLQLKEV

SEQ ID NO: 30150 - protein, 478 aa, unknown
  TnpB Polypeptide
MTRHTTFCFTLKPTPSQAEALARHVGAARFAFNQCLAFVRDALASKSDEGPSPFVPWSGFDLINAFNRWKTTAAAGADESGAPGLPWRTQVCQQVFEEAAVDLGSALAAFSAGRKGERKGKRARFPRFKKKTRDRPSFRLRNKGHGAKSAIRLGVGDDPRMLRLPKLGDLAVRECTRRLRRMLAKGRAKILFATVALRSSGRWMVSMNVAAQELHSALRHASPLDSPVVGIDRGLTTFAVLAEASGREVERIDAPKPLRNSLPALRKASQSLSRKKGDSRNRARARAALAKMHARIGAIRRDFVHRESTRLAKTHGRLVLEDLCTKGLMKTTLARSLADSAWAMFASVLAYKMKWRGAELMVADRFFPSTRRCNTCGHVGEKLALSERTFRCGRCGHEADRDTNAAANLASYGATASVAAPGCRSHVAAKHAETRNACGEGSADGRLLVIRETSLVEAGRAYARHPRRVVVAGTVNTL

SEQ ID NO: 30151 - protein, 446 aa, unknown
  TnpB Polypeptide
MHLTHKIALRPTPEQADYFNCACGTARRVWNWALAEWKKQYVAGQKPNAMALKKQFNAIKYSDPQWLDENGQPWIKTIHRDAHAQPFAHLAKAWNRFFAEIKAGKPAHEPQFKKKGHCRDSFYVANDKFSLSGKTIRLPKIGDVVLTEALRFEGKILGATVSRTANRWFVAIQVEVPNTQFYRQRTAHGISGIDLGLKAAATLSSGESIQAPKPLKAALRRLKIRGRRLSRKHEAAKITAGFAPNANLPKGARLPVSNNRKKSSVTLAKLHARIANIRADFTHKLTTRLCRENQAVVIEDLHVKGMLANDKLARAISDVGFGMFRLQIEYKARRYGTQLIIADRWYPSSRLCSICGWKNEALTLKDREWVCPQCGTHHDRDLNAALNLKRLATATALPVASSPSNGDATTGMVPVAVGKVTPVRYECGQQDMSGQEKNRAHFSAPS

SEQ ID NO: 30152 - protein, 306 aa, unknown
  TnpB Polypeptide
MKDRQTRRLVAESIYVRNDGYKQREEELVLSKSLRVRFKAGELWVGKQGRLELHYDRLRGKWYGHIPVKVNWPRKGKPHQSTLKRASIDLGICNLATCIVEGGDKAYVYSGRAVLSDWRYWTKRIASYESTLKKTNQRDSSKHLSRLYRTRRRRLNHAVKAMLRDLYDRLEAHGVTDLIVGDLKHIRDNANHGKVGNQKPHNFWPFMQIRQRIRELGEEYDIRVRFKSERGTSKHCSLCGEKHKNGRKHRGLYHCKTRNILMNADVNGAYNILYRCRKVAAGSGSRPMAWPMLLKWNSQEWDVSAA

SEQ ID NO: 30153 - protein, 375 aa, unknown
  TnpB Polypeptide
MRKTYKYRLYPTTKQKKALQGSLDACRWVYNKTLETRKKAWEERNESISRYDTSKLLTEWKRGNPFLENAYSQCLQNVTLRVDLAFRHFFRRVKAGETPGYPRFRGFDRYDSFTFPQSGFSLGGDRLKLSKAGSIRIKKHRDIEGTTKTLTIRRTNGKWYACFSCEVDPAPLPASDKVVGIDVGLHSFAVLSTGEKVDNPRFLKSDAKRLARAQRRLSKADRNTPDRKKQRKKLSRLHERIANRRTDFAHKLSRTIVNTYQVIALEKLNIKGMMSNHTKVFGHKLNRSIGDAAWNQFMQFTAYKAEYAGRQVVFVNPNGTSKRCSRCGQIVEKTLADRVHSCSCGLVLDRDENAAINILSLGLQGLGLAPGSSRL

SEQ ID NO: 30154 - protein, 404 aa, Crenobacter sp.
MQRLQAYKYELMPTGEQQRDMRRFAGSCRFVFNKALALQQVNHEAGGKFIGYVEMAKQLTAWRNSAEMAWLKTAPIHPLQHALKDLEKAYKNFFEKRANFPRFKRKGQSDSFRYPDPKQIKLDQANSRIFLPKLGWLRYRNSREALGELRNVTVSQSCGKWFVSIQTRREIDIPVPRGGMVGIDLGIARFATLSDGSFVAPLHSFRRHEKALLKAQRSLSRKTKFSSNWKKARIRVQKIHSRIGNARRDFLHKTTTTISQNHAMVCIEDLQVRNMSRSAAGSTETPGRNVRAKSGLNKSILDQGWFEFRRQLDYKLAWNGGHFIAVPPRNTSRTCPCCGHVSADNRRTQARFECVECGYENNADVVGAINVLRAGHARLACADTSPEVGASGQEPTEATIQFSV

SEQ ID NO: 30155 - protein, 411 aa, Crenobacter sp.
MQRLQAYKYELMPNGEQQRNMRRFAGACRFVFNQGLALQQQNHEVGGKFIGYNAMTKRLTEWRNSPETPWLSKTPSQALQQSLKDLERAYKNFFAKRADFPRFKKKGHGDSFRYPQGCKLDQMNDRIFLPKLGWLRYRNSREVVGTVKNVTVSRHAGKWFVSIQTEREVAQPVPQGGIVGIDLGIARFATLSDGRFIAPVNSRFKQHEATLRKAQQALSRKTKYSNNWKKAKARVQKIQARIANVRKDFLHKASTAISQNHAIVCIEDLQVQNMSKSAAGTAEAPGRNVSAKKGLNKAILDQGWYEFRRQLDYKLAWRGGHLIAVPPHHTSQTCPNPACGHVSKLNRQTQAAFRCVACGFEAYADLVGAINVLRRGEAVLKQGQDIARLACEVSGAVIPPAAGTHRGELAA

SEQ ID NO: 30156 - protein, 371 aa, Bacillus sp.
MLLNQKYEIFPNEEQKEMLDRWLQYCRQTYNSALLDKQRKYRESKESYHRKDMQTQLKMDKKKYPFLKEVPSQPLQEVFLRLEKAFDGFFRKDKNYPKQKKYKDYTSMTFPQFGFNAKGNRMAMSFSDNGKLYNTKLGEIDLLLHRPLEGTIKQLVIKRQGKRWYAIFCVERQELPSDIDTNNAIGIDVGLHKYAVLSDEREFENPTFLRKKEKQLKMAQRKLSKMKRGSSNYRKQVMRIRQLHEKVGNQRHDFLHKLSYNLSRTYSVVCVENLNIRKMVRNRKLSKFISDAGWGMFRQMLSYKCEKNGGLLVKVEPHYTSQDCSSCGERVKKSLSIRTHICTKCGVVLDRDYNASLNILQKGLEQLLVTN

SEQ ID NO: 30157 - protein, 196 aa, Archaeon sp.
MAYHIHKKYKSIRVYLQKNGKYRKVKQIRNREQRIVSDMNHKISRKIVDMARENKSGLKMEDLKSIRNAKPTKSFRYSLNSWSLYQLRQMIEYKAKLLGVPIVYVNPQYTSQECSGCGLIGSRNSKVFKCLHCDHADHADVNAAFNIALRQGRGQSVADIDVTEGNTDILKEANLWMMETLEPHELYRGSMSVNKA

SEQ ID NO: 30158 - protein, 439 aa, Blautia sp.
  misc_feature (201)..(235): Xaa can be any naturally occurring amino acid
  misc_feature (436)..(436): Xaa can be any naturally occurring amino acid
MLLSKKTSIKVSREYANLIGHMCYAASKLWNVCNYERQHYKETGMAQYPDWYYQKKAHKKDLWYKQLPSQTAQEVCKLLDKAWKSFYALKRSGGIEAPRPPRFKQESIPITYMQMGIVHERDTDRVRLSLPKTLKKYMEETYQIHENFLYLENKIFRGMDQIKQLRIYPPEKGNCKIIVVYEVPDQEELPQNGHELSIDLXXXXXXXXXXXXXXXXXXXXXXXXXXXXXXXXXXXPDQEELPQNGHELSIDLGLHNLMTCYDSENGKTFILGRKYLELERYFHKEIARVQAQWYGQQSGKGVKHPVTSKHIRKLYKRKQDSVTDYLHKITRYLAEYCREQGITCVVTGDIRNIRREKDLGHRTNQKLHSLPYNRIYIMLEYKLKRYGIRFVKQEESYTSQCSPLSPEVGKRYAEPSNRKERGSYRDGNRVYNADAXSDP

SEQ ID NO: 30159 - protein, 374 aa, unknown
  TnpB Polypeptide
VETYTLGYKFRIYPNKTQARLINRTLGCVRFVFNHFLAVRRDEWKANHHSLTYVKTCQLLTNLKKREDTSWLSEADSMVLQESLRNLDRAYENFFQKRAAYPRFKSKHSRSQSYRTRNQGNGIRIEGTRIKLPKVGLVKIKQSRAFEGRILNATVSRAASGTYFVSFCVKTDKMALLHPNGGRQIGIDIGLKAFYSDSDGNTVASPRPLKSLQRQLRREQRRLSRKMPQSRNREKARICVARLHERIANIRKDFLHKLSTRLARENQTVAVEHLNIKGMLRNHRLAKSISDVSWSEFFRQLAYKTELHGGELLKVDTFYPSSQTCSLCGYQNPLTKDLSVREWDCPACGTHHDRDVNVAKNILRKAVEDKSTAA

SEQ ID NO: 30160 - protein, 424 aa, unknown
  TnpB Polypeptide
VQKSLTSTLVFQLDIQEGSRQLLDTGQLEARRVVNEIFRLDKEGHDWKTIEDTVVERSSHVQNTTQRLFNKATDALERYYDEDDYGHPRQNHEESFPLRMNHGEGYQLSVDEESESISFRVTALKRTFVRGTLQSSHHHIETLKTALTDDDWRVGTAEVVRNRDRHELHVNVTHETAEVADKQNAETVIGVDVNEDCVGLSAVTESGVEDSVVIEYPEIKKKRHEYFTIRKRMQSVGQTTLEHEVRDEEQRFVHDQLHQVSRDIVEWVQQFENPVIVFEDLKDIRDDIDYGTRMNRRLHSLPFAQLQKFVSYKAGWEGIPSDKIDPEYTSQECVNCGHTTRSNRQGKRFQCVQCGFQDHADRKAALLISARGLEALNRNVPALNSPPIVRVRLHGNGLSEPADHDPVSTVRGHQTDGETGSVSS

SEQ ID NO: 30161 - protein, 335 aa, Dictyobacter sp.
MAENLRFHGKIMGARMSKTADWWFISITVEIPQEPSFKRAAAVGIDVGLNRLVTLSTAEGYENQAFLKASLHKLRQANKRLHRRVQGSKNREKARRQVARLHYRITCLRQDLLHKVSTHLATCYGIIGIEDLNLKGMLKNRCLARSLSDAALGTLLSLLTSKVEQRSGQVVKVGRFFPSSKTCHGCGWRWEDMDLSDRLFVCQNADCAYHHVPQDRDHNASLNILDEALRLIGLMDQAVGGTGSDEDAKLAVDWMEDQKSFGFEAIEDEAATTRGVGLCLHTFYYINWSRFAFYLCHSITKRTPTLSVHWRYSLCDSTSTYLLVVLLHATNIGFV

SEQ ID NO: 30162 - protein, 260 aa, Dictyobacter sp.
VVYTKAEEQKQVSPSLVAAVDIGVNNLVALTSNKTGFVPRLVNGRPIKSVNQRYNKQAAKLRKKMSHNHHTSRTLERVSAKRTRRIEHYMHTVSRRLIDVLVTEQIATLVIGNNPGWKQESSMSKKQNQHFVQLPHARFIDMLTYKATLVGISVIVQEESYTSKASFLDLDPIPVYGKTGEKQPVFSGRRIARGLYKAKSGRVFNADVNGSYNILRKALPDAFSNGIKDVNKTLVALPASLVVHPVRIVIPSKSNMSRIR

SEQ ID NO: 30163 - protein, 372 aa, Bacillus sp.
MTKQNKAFKFRLYPNKEQEELLAKTFGCVRFVYNKMLAERKEIYEKFKDDKEKLKEQKFPTPAKYKDEFPFLKEVDSLALANAQIHLQNAYKNFFEGRAGFPKFKSKKHKQSYTTNMVNGNIKIEDGHIKLPKFKKPMKMKQHREIPVVHKIKSCTISKTKTGKYYISILTEYEKDIRPVKIQKVVGLDFAMDGLYVDSEQGEKANYPRYYRQALDKLAKAQRILSRRKKGSTSWEKQRLKVAKLYEKTANQRRNFLHHKSKELAANYDAVIIEDLDMKGMSQALNFGKSVHDNGWGMFTTFLEYKLKEQGKQLVKIDKWFPSTKKCSRCGNEKEMPLSERVYKCTCGIVLDRDHNSAINIKNEGLRLLELA

SEQ ID NO: 30164 - protein, 523 aa, unknown
  TnpB Polypeptide
MARTSTPTFIVELPLRVPRAADREMLVRLDLARQLYNACLGDALRRLDLLQESVAWAQACAFPKTVGKKLNPKRRDAFTAVRAAHGFTQDALSAFGTACKNAAEWNAGRARSDPRLGAHETQRIAERAFAAVNRYAYGTQGRPRFKGKRRPLHSLEGKSQESGITWNAGTGCLEWGALCLRTKLPPDGKDPWLAQALQARTKYARIVWRVIKGTRRWFIQLAQEGQTPLKYQPGPKRRVGLDVGPSTIAVYGKDHAALVPLAPEVLQPWREIRRLHRAMDRSRRATNPECFNADGTFKKGTTIHVRSVGYHRLRHVIAETERILAERRERSHGNLANRILGLGTLIQSETLSYIAFQKCFGRSTKVRGVGDLMSRIRRKAARAGGALRDLKTQRLKLSQYDHLTNTYTKLPLRERWHVLGDGSGVVQRDLYSAFLASVTETDVLHPSRARRAWPAAQSLLGRAGWRRTQPVSVASVLVTAPGLPTPERVARHRALAREDASDGVGARREPKRPAGSGPRTPRR

SEQ ID NO: 30165 - protein, 523 aa, unknown; identical to SEQ ID NO: 30164
  TnpB Polypeptide

SEQ ID NO: 30166 - protein, 257 aa, unknown
  TnpB Polypeptide
MNIRKHREPMGEVKTCSLLVKNQKYYAVFSCKAETQPKIEVSSISPQRQIGIDVGIGKDNFFALSNGEKQTNPQFYRTAEKELGELQRKASSKEKRNNRRKKAKLELSKKHEKVSNQRKDFVFKAVKKLRDNYDLLAVERLRTRKIMERSQEKNPWYSAKSLHDASLSFFLLALSHRVEETGGRLVKVNPAYTSQRCSNCQQLASRKLELSDRVFVCAWCQHQEDRDINAAKNILYQAQITELGTNFDSQVKSDNSF

SEQ ID NO: 30167 - protein, 405 aa, unknown
  TnpB Polypeptide
MRGEEPVVNEALKTRALPEGSYDKLLEFLKLYRDAVQLVVDKIWGIDEKLSWKKLHRLFYSDLMRLGFRAHHAKEIYVYANSLVDSAKNNGGRKPVLRKLSARIDKYDYKLDLDNMVLTLKLHNGYEARLRLVAPRERVEKFRGWSNYELVVKYEDGEFWVSIYFKRAVKPLEPRMVMTIDLNFGNVTLAIYTLDGRRVRLKKLNTPHKKILTHKIWIEKIQKRYPKSWRFIKSVRKAIERHGKRIKNISWDYAHKLGDLVAELAFKHNSVIILEDLEKLKENNKKDKEFNKRLGLWFYRRIQFCVEYEAMERNLRVAKIDPRGTSSKCPRCGGKLVEVGYRVLRCMKCGFVGDRDVTATINIYKKYISKHSRCGVSGVAPNAPKPDENPSGMQGNKNEAMTTES

SEQ ID NO: 30168 - protein, 167 aa, unknown
  TnpB Polypeptide
MSPEEVRSKLVEINKEQYEIYPYVIKYNKLEAMRVDLQNSCPHKNAFLHSSFTDSYEQRTYGTIICLESLDVQGMMKNHKLAKSIADASWSSFINMLNYKAIWYGREISVVDRYFASSKLCNVCGWKYQDLDLSVREWRCLECGSYHNRDINAAINIRNQGLKLIEN

SEQ ID NO: 30169 - protein, 542 aa, Nostoc sp.
MQVRWNYKLQPNKGQDAFMSEWLVTLRKHRNYCLAERRRGFESNNQHSDQSVMYSYGAFCDIETQVEYGSFCPLTCPVVKHGVMSADTLTKQDGKWLSVSGVQSVRTTELRNENPFYSRIYSGVLQGNLAKLDAAYLGFFTHKRGFPAFRKASNFNSFQYKPGAAKLTVNRTSKKKRCYSHVYLPGLGDMRYLDSRTIPENADIRTVTVMKEADGWYMSVLLNLAESLPEVTPIETVTSAVGIDMGINKLIALSDGSFIENPKFATNQKTRRQLRIRQRRVNRKVKGSKNRRKAGIEVAKLHKKIADKRNNYQWKAAKKIVNTADAIIREDLNIAAMKLRCKPRRIKGRFMRNAPPGSIPVDTFAQSSPRGCSPVADFAPNGQSAKRGLNRSISDASWGNSFSKIDWLAAKSGKPVMTINPRHTSQECSACGHISKLNRDGEKFVCEACGHIDHADTQASRTILRKANLIFVSNRHKKPTHQSLVPTPGLGESNALLCNDVATCGKRHQAGNRISKACTEPSRSVISENRILFEQLCLKLFD

SEQ ID NO: 30170 - protein, 379 aa, unknown
  TnpB Polypeptide
MSTYTYTFRLLANADQASRLSKHFGVCRYVYKHFLARRHQLYRDNQEGSTYYKDCATLTILKQELDWIGDANSQSLQQELKNLDTAYTRFFKKQARCPKFHCKYKDKQSFRVPQHTTVVGDLIKFPKFRDGIKFKQHRPMDGEIRYVTVSQNRAGQHYICICVERVITKLEPRENTVGIDLGLKNLATCSNGKVFKNIRSYGTLQKRLRRLQQSVSRRVKGSHNYIRVKNLVAKCHQKIADIRSNHLHQVSHDIISKNQVIMLEDLNVKGMMANRRLAKSVADVSLYELVRQIEYKAGWYGREVVKIDRWYPSSKTCHVCGHIHEGLTLSDREWTCPVCKTKHDRDHNASMNILIEGTRQRNKTLGTRGLACGEGVRLR

SEQ ID NO: 30171 - protein, 369 aa, unknown
  TnpB Polypeptide
VKLSMANKAYKFRIYPNAEQQIMFAKTFGCVRFIYNRMLADKIKYYEETKQKLNNTPAQYKKEFEWLKEVDSLALANAQINLQTAYGNFFRSPKIGFPKFKSKKSNQKSYTTNCVNGNITVENYYIKLPKIGLVKLKQHRMIPSGYKLKSVTVSQTSSGKYYASVLFEYENQVQEIEPKTFLGLDFSMHELYRDSNGDEPCYPRYYRQAEKRLKREQRKLSLMQKGSKNRDKQRIRVAKHHEKVANQRKDFLHKQSKQITNAYDCVCVEDLNMKAMSQALQFGKSISDNGWGMFVTFLKYKLEEQGKKLVKVDKFFASSQICSCCGYKNTETKNLSIRAWDCPKCGTHHDRDINAAINIRNEGMRIAFA

SEQ ID NO: 30172 - protein, 427 aa, unknown
  TnpB Polypeptide
MRLTERHLIKPNHKLYKELDELTFKSKNLYNHGLYLYRQSYFEYKKDPEKQILSWRDIDRNLRQQCHEDIQALPSKVANAVLKNLGESISSYWTLVKLKREGNLNQKPRLPYYLHKTRGRYPLSFNYQTFGKVRGSNKELILCPKGLCLRVPTKVDNPKQVRIVPHYRNFIIEVIYEVNEPNLNTTSQYAGIDLGVDNFATVTFSTGDKPLLIKGLELKSINQGYNRLVAKAQSLLPETQQTSKSIHRLWSRRSWILHTKIHQITAFLTSLFDEMRIETVFIGKNKNWKHELPFSNVVKQRFAYIPYETFIKQLSYKCQLRGISVITQEESYTSKASFLDNDDIPVYGEVENPRFSGRRIKRGMYRSGDGRLINADVNGSYNILRKGMLKQYKVLRIDNPIIQPVVVREIGKRPNQNLINLYVTPNI

SEQ ID NO: 30173 - protein, 391 aa, unknown
  TnpB Polypeptide
VSKQKRAYKYRFYPTDEQRVILAQTFGCCRFVYNWGLHTRSFAYKEQGQKLNYNALAAMLPDLKREYPWLCEVSSVPLQQSLRHLDTAFKNFFEGRAKYPTFKKKQNAQSATYASNAFKWENGQLTLAKMNEPLAITFHRDLPKGCKPSSVTISKDCANRYFVSMLIEDKIEPLPVVNKMVGLDLGIKSMVALSTGESIDNPKFYAKDEKCLAKAQRRHARKKKGSKNRAKARLKVARVHARINDQRRDYQHKLSTRIIRENQVICIESLAVKNMVKNHKLAKAISDVGWGEFVRQLEYKSKWYGRTLVKIDRWYPSSKTCHACKHVGDSLPLDIREWVCPECGVVHDRDTNAALNILAEGLSAFACGGSVRPVRTRVRQATPVEAGNSRS

SEQ ID NO: 30174 - protein, 330 aa, unknown
  TnpB Polypeptide
MLIEQAFQAYFALLKKKAKGEYEPNVNRPHYMKKKSGRQVTHYERGAISFKDEGYIILSGTSLRIPTVHGKEDIEFARIVPRGTHYVVEIGYKVPLPEISTSERVLAIDMGVNNLAACTTTEGEKFIVSGRPLKSLNQMWNKQTAEHRSRLEKNHGRKSSKLLRNRARKRNARVKDYIHKATKAIVRHAIFVGIGTIVLGYNAGWKQGTSLGKKNNQNFVQIPFDLFRKTLAYKCALVGIRFVTTKESYTSKNSFVDGEYPRKREKYAGRRVKRGLFKTKEGLKINADINASFNIMRKFMEKEGTWNSCLQENLVEACSAPCVLRLAFSV

SEQ ID NO: 30175 - protein, 307 aa, unknown
  TnpB Polypeptide
MKDHSSVKNFEPTSIDYDTRIFAFREKDEEISVTLLRSRQRIKLVLGDYQRTRLKDSKPTSATLCKKGSEYYINIQAKSEAPEQIHVDTVLGVDLGITDIAVTSEGQKFGGKTIKLIKNHYASMRAVLQQKAVKGTRSSRRRCRELQQRLSGKEARYQRQINHEISKAIVTRAQEIPAKIALEDLTGIREGVNQKAGKNHRRKVSGWAFYQLKEFLSYKALAAGVPLVLVDPAYSSQTCHHCGEHGIRNGKSFKCPVCGWSGDADFNGAKNIAFLGRYVDRPGGSEGLPSIKAVLSGLLKAPVFRPE

SEQ ID NO: 30176 - protein, 463 aa, unknown
  TnpB Polypeptide
MTQNNNIIIRIPTGVKLTGIELTEEFLQYKQKVDLLQRKFAALFNDWIEDGLILSIDNKYIKFTGEIWDGDYAGKQQDKDVASLRHVKALPEVKEIIESVLSDGELENMQKSSMDDIIWHVVERYKSYKNRNKKFPKNGIQIKSNKAMNFKDGKLKVNADEKTITIKTLEKGEEISLTFEESYYDNLDLVDNTWRGGNIVFNSLEACADNELVLMVEDEKEFYMPEQVVGMDVNQKEENWLTFSEVMENGGVTLAKPMAVSEIEKIRDALNAKLRPKKKDEVSHKLNSEQRRKMYRRLKKKMVNRYTAIEESLSPVLESFNKKYEGKLAFAIDGVATGRTKNSFGQEDVRDIIVRWCLKNEVPFVIVPPQYTSQRCPECGEFHKQNRKTTNTYVCPSCGYFNENCDLVGALNIKAHGEFLLEKFKFSAPTLSVKREKTPLVIEFSSALREFFNFPQAKSKTSN

SEQ ID NO: 30177 - protein, 373 aa, Synechococcales sp.
MSQSLYVKCKLIVPAESHQDIDDTLQGFADACNQILEVAKRDNCWNTVKLHHKVYKPVRKTTGLKANHVCQAIRRVIGNAKAVKQIHKFRPTSISLDIRTFKYFEDTQMVGITLKSGRKNFSLSIGGYQIALLKGQNPTSATLKKSRQGTYYINIGVDIPTQPTGKTPKVLGVDLGRRAIASTSTGRDWDGSQLQAVRAKYASVRGLVQSKRTRSSRRLLRRLSGREARFQNWINHNISKSLVAEAKQLNATIAFEDLTGIRQRAKVRKPQRREHHSWAFYQLRMFTHYKAAIAGIPVVLVNPAYTSKTCHQCLHIGHRDGKVFSCGNCGWHGDADYNGAVNVSLLGGLVNDPEIPKLSCSLVVGNWDKAVAL

SEQ ID NO: 30178 - protein, 390 aa, unknown
  TnpB Polypeptide
VPQLKSSVSTLKHRERVKVNTVYRFRIYPNKSQRELFAKTFGCVRFVYNRMLAEKKAYYEKTGKNLSVTPARYKSEFPWLKEVDSLALCNAQLHLQTAYKNFFRDDSAGFPKFKSKKKPVRSYTTNCVNENIVLQNGKLKLPKAGWVRIRQHRKIEEGYQLKSATISQEADERYYVALLYSCEEAVYEIKKAKSAIGLDFSMKELYVDSNGNHMAYPHFFQKAQQKLAKAQRKLSHCEQRSNRYKKQKKKVARIHTHIAHQRKDFLHKESRKIANSYDVVCIEDLNMKEMSQDMRFGKSVHDNGWGMFTDFLAYKMERAGKKLVRIDRWYPSSKTCSCCGNIKEDLQLSDRIYECACGNRMDRDQNAAINICREGIRISGMILDTEKKIS

SEQ ID NO: 30179 - protein, 398 aa, Kribbella sp.
MSRFRMYPTPQQEAALLEHCGHARYVWNLALEQWSMWTRDKGPTPRYLEQARQLTEARAVFSWLRAGSQTVQQQALRDFDQATRNFYAGTHRRPTWRRAGQHEGFRIVGGQATRVVKLNRKWAAACVPKIGWVRFRQSRAVPDAKSYRITCDRVGRWHIAFASIPPLVPAPATGEVVGVDRGVAVSAALSTGELLLCPRPRTTEQRRLKQLQRRMARCHRGSNRRRRVKAAIAKLYARARDRRRDWVEKVSTDLARRFDIIRVEDLRVAQMTKRPKPKPDPGRPSRYLPNGRRAKTGLHRSILINAWGALVRRLAEKAPGRVEKVHAAYTSLTCSSCGHCAPENRESQAVFRCVACGYQANADVNAAVNIAAGRAVSARRETSPWVSLKREPQLPTSA

SEQ ID NO: 30180 - protein, 234 aa, unknown
  TnpB Polypeptide
LGSPPRYNLHTFILAWETGIANLSTTRGRMKIPFNVPRYAQYAIGCPTSTADLIFRKNKFYLHVVVVLPDVEFVANGKAIGVDLGVTRPAVSSDNRFHGSRHMKEVVKRIFRLRRDLQANGSKSAKRHLRCLAGREQRFRRDCDHVISSSIVKDIDVGTNIVLENLTNIRNLVKGYNGEASRRLHSWSFLQLRSFLEYKPEARGCQVVIIAPRKTSQQCSRCGFTYRGNLRSQS

SEQ ID NO: 30181 - protein, 234 aa, unknown; identical to SEQ ID NO: 30180
  TnpB Polypeptide

SEQ ID NO: 30182 - protein, 371 aa, Solobacterium sp.
MLQTVTAKIQIIVNPSEQQIVFETMKTFANACNYVSSYIFKTHCLNREKIQENVYQQLREVYKLRSQMAISCIRAVVAKYKTILENQEEWIQPKFKKPQLDLVWNRDYSLNKELFSVNTLNGRIKVKYFSKGMEKYFNNNCKFGTAKLVFKHDKFFLHIPVTYEIEEISKNEISNVVGVDRGIRFIVTAYDSKGKTTFYDGKFIKKKRAHYKNLRRELQKVGTPSSRRRLKAIGNRENRWMQDVNHCISKALVTNNPEKTLFVIEDLSGIRAVTERVKTKDRYVSVSWPYYDLEQKLIYKALKNKQLVEKVNPAYTSQCCPKCGHTEKANRNKYKHIFCCKNCGYKSNDDRIGAMNLQRMGINLLMPTTME

SEQ ID NO: 30183 - protein, 378 aa, Solobacterium sp.
MEIIKALKMRIYPDDSQKMKIDKTIGSCRFIYNHMLDRNIKAYNRRKEHLSYNNMQNLLPIMKDYLPWLKGADSQVLKYACRQVDVAYKNFFAKRTGFPKFKSKKKSKASYTTTNKKCIDYLPTEQMVKLPFLDWMKCSDKRVLKDYDFKYATISKVNDKYYVSITYSIEKDVKSIAINENQVVGLDYKSDGLYVDHNGFTVNMPHYFRQAQAKLKSEQRKLRLKQGFKKGQKQSNRFKKQLLKVAKLQKHIANQRRDFLHKLSTELSKDYDAICIEDLNIRSLSNKGFGNGKATLDNAWGMFTVMLDYKLQEQGKQLIKVDKFYPSSQTCSICGCINKEIKDLSIRKWECLNCGTVHDRDINAAVNIRNEGLRLLGL

SEQ ID NO: 30184 - protein, 412 aa, unknown
  TnpB Polypeptide
MLKFYKDGITKDTLKVYRNLKLGKYKKSISDNKMLISYKTEINPTYSQINKINKTLGVCRFLYNAYISENIKAYKDNKSFITGYDFAKYVNSTLTSNHLWIKDAYAKARKKAIMNAETAFKNFFKGKSKFPKFKKKNKCHNSFYFVKNNKTDCIVQRHRIKIPSLGFVRLKEKGYIPVDKVIKSGYITKQANRYFVSVIIDIDTSKPRSVYSNGIGIDLGLKEFAVLSTGKTYKNINKSKTVRNIEKRLKREQKRLSKKYENKKKGVATLDKNIRKKISKIQKIYYKLSCIRTDYINKIVDEVVKTKPRFITIENLNITCMMKNRHLSKAISNQRFYEFRTKLVNKAKRLHIEIRLADTFYPSSKLCSCCNSIKHDLKLKDRIYKCDYCGLKIDRDYNASLNLMKCQNYKLA

SEQ ID NO: 30185 - protein, 418 aa, unknown
  TnpB Polypeptide
MNLRKAGDTMPNLTKTIKLRLNVTEEQVMLFRQMTERYRQGCNFVSQYIFAHAFPLAFTKLSKTLYPILRKVFALKSQLAQSVVKTTIARYKTVKEQLYRHPFQYKDRDGTWKRITKTLDWLWNPIQFRRPQADLVRNRDYSFVEDGSILSINTLGKRTKCTFQGKPFAKYLDGTWKLGTAKLVALKGLWYLHISVSKETEPFQKENVQHVVGIDRGLRFLMVSYDEKGNTDFVSGKKIAAKRHKFQEIRKELQAKGTKAAKRRLKALSGRENRWMSDVNHRMSKTLVEKYGKDTLFVLEDLTGVSFEASNLSRGAKQNYDLRSWSFYQLEQFLSYKAQENRSKVLKVSARYTSQRCPKCGTIRREHRCHHKHLYTCSCGYQSNDDRIGAMNIQQLGTRWLSGDESPHYTRIARTTLE

SEQ ID NO: 30186 - protein, 292 aa, unknown
  TnpB Polypeptide
MEQTITLKIKLYEPTRAKQEIYQEMADRTTEFANSYLGLDKKDRPKTSREAKEYSKPLPSAILAQAIRDIRSKPKAKRFKRLWPCFNNQNFCVEKKASRDGGAVWKASFPTLEKRVGVPVVVTPYQEKYLNLLLAGKAKQGTARLVRCGKDWYIHLSLTVAVEQGQKPEKIMGIDLGLIDLLVASAGGQTLFFSGAELAYIRRHYADLRHKLQKAGAYRALKELGDKEHRWVTDVNHKISRAVIEFALLHGVTKIRLEDLTGVRWTDRQSKKQCRDHGRSLHCWPFYQCSSS

SEQ ID NO: 30187 - protein, 408 aa, unknown
  TnpB Polypeptide
VFDITKTIKLRIHVSPEQEILFRQMTEQYRQACNFVSQYIFDNQFNLAYQRLNKELYSDLRGRFGLKSQLAQSSIKTTMARYKTVKQQLFQKPQKYKDEDGSWKYIPKTLEWLWKPIFFKRPQADLVRNRDYSFVDNGQSLSINTLGKRTKCTFERKPFSKYLDGSWIFGTAKLVELKGRWYLHIPVTKAVEGFQKENVRHVVGIDRGLRFLTVSYDEQGNTEFVSGRKIAAKRHKFLKVRQQLQSKGTKSAKRRLKAISGRENRWMSDVNHQISKTLVEKYGKDTLFVLEDLTGVSFEETNLSKTAKPNYDLRSWPFYQLEQFLTYKAHENRSEVLKVSAKYTSQRCPKCETIHRENRDHRKHLYRCQCGYQSNDDRIGAMNIQLLGSMWISGDSNPRYESKTTASE

SEQ ID NO: 30188 - protein, 434 aa, unknown
  TnpB Polypeptide
VENTTEKEALKIERKIKTLNNLIMLRAIKIRLYPNKTQTMQINKLLGCYRFVYNQCLNKKIQSYNNDKTNETLTTLGHFIHHELLKDDNLIWLKEQNTKVLKQALKDMLSAYKNFFEQHKGFPKFKTKHDNKQSCRFELGAISKRNVYTDYKLSLANIKNVKFKCNDKYAQYLQKNKNCIKQATLKRLPCGEYYLSILVDGDLMKNVKQTDNCIGIDLGIKDFVITSDGEVFDNCHFKKLQNNKIKRLQKQLSRKQKGSNNRNKARIRLAKLYKKIRDKKEYYLHYISNSIINENQVICMEDLNVKGMSKNHKLAESILEMNFSEFRRMLEYKAKWYNRRIVFVNRYYPSSKKCHNCGYINKVLALNDREWLCPQCGELISRDYNAALNILDEGMRIIGSSTAEYTLVDYPTAERRTTHNMCGAMDDRGLPPKK

SEQ ID NO: 30189 - protein, 486 aa, Geminocystis sp.
MIVTHKYKLKPSESQEKIMLNWISMLRSNYNYCLRHRIEAYEEVKVLRLGEYCDLKSRASCTPLTCSVFKNSNLGEPFKNNGKKRNAYEQQSSELPSLKKSHPWYKTIHSTVLQQNLRRLDKAFQNFFDGGKGYPKFKKRHQFKSFSYPPNQVKVEGDKIYLPSIGWMRMHLSRPLKEGFEMRSVTIRQKADGFYVAIQLEDKTIPQTQPIELTQVKAVVGVDCGARPHKLLALSNGENIPNPEFEKRLAKRKTLRQRRASRKRRGSNNQRQAFRSLARLDQKIVNQREDYQWKVAHKLNCIADVIVMEDLNIQGMIRKCKPKQDENGHFLKNGQSAKKALNRLIRDCSWGELKNKIRQVAEKFGRIFLEVNPQYSSQTCSHCGFKDKKNRHKESFLCLNCGTLADADTNASITLAKRGIEKLGISLNALLGVTQEVTGTSESTDARNRDISGALVSEPTNPLQLSLFEWMCGPSNWLLESPSFTK

SEQ ID NO: 30190 - protein, 457 aa, Geminocystis sp.
MILNYQYRCYPEVPQKSQLNNWLRVSQYWYNWQLGDRFRWWQENRSNYVIPSGDCCYISCSLPPLELKEKPSFYSQKKLLPEKKKDLIIVKHSGELLDLSTVPSQTLQDVSKRVDQTFERYIKGDCNGKRSGKPRFKSRYRTLKVEAQAIQIKRVEKDWLYLSCSKLNGWLKIRLHRGLPQGFSLKNILISKKADGWYCTLCLDAPTVPIFTPDKIVPTWDNSMGIDAVLSGDDYLATSEGQKLPSLKSFRKHQKELAKISRLKNHQKKGSKGRKKLALKEGKKHQQIARARKDHGYKTAHNLIRTDKKVFFVENLNLKGLSKRNKVKKDIEGKYLPNGQSAKSGLNKSWLDAAFGNFYEILSYIAEKAGAVVIKVNPAYTSQVLSYRDEIVFTDCSIREYYDLIEDIRVDRDINSSINIKRVGLDLFLTINRRSGKITKSKTGSTTKQVLAVLKRY

SEQ ID NO: 30191 - protein, 266 aa, Geminocystis sp.
MGMINHQEIKGSSSYKIDTIKKLFTNYTKKQPEYAWCNNLSSRVYQNAFRDLKTAYSRYFQGLGEQPVFKRKKDKQSFRVESSNGKVLLEAGKIIKIPTLGTFRLKEAIPFSCVSQTFTISKSADKWFVSFSIDGDRLPPRIHPVIEPVGIDLGCKTFATLSDGNVADLGMYEFKRQLTYKALWYANRVDIIDQWYPSSKKCSNCEQKKETLSLSDRLYTCDECGFECDRDLNASINLEKAPEEVIIEKIGWVTAELTSVDSIKPT

SEQ ID NO: 30192 - protein, 347 aa, Geminocystis sp.
MINLNYEYRIYPEPSPEETLLRWLFACRQVYNYCLAERKDWIKSRKSPIDQCSLVNEYIIPAQTKYPDYYYQKRQLTEAKKTNPELKEVPSQVLQEVVGKVDKAFRSFHNRGYGFPRFRKRIRSMVFPQFKTNPIVGNQIKLPKIGDIEINLHRPIPEGFVVKQVQVVNKASGWYVICTIQSEGNIPDPIPDLSYSSLGIDLGFSSLIATSRNEIIDRPKFLIALQSKLTSLQRELKDKVKGSNNWKKACKKIVQLHEYIHRVRKDYHFKLAHYLCDQAKMIFIEAIDFKSWGRGMLRKHSLDFAFGAFVDILTLVAKKRDVYLLKVDKDYTSQTCPNCNTLTGKKS

SEQ ID NO: 30193 - protein, 519 aa, Geminocystis sp.
LSKITYQTLISQEVAEFCDLIGGFFGKIERDLCKDLEKGKKLNDLKKSYQIKYGINARQFNSIHIILKGKIASRKECYKSQIKQTELKIKGLQKIIDSEKKKLAKLPLSCGRNQKSIRSKLRFTIHQKQRKLAILKDRLVTLKKKKPSMIFGGKKLWYAQFNLKENGYSSHQEWLKDWQKCRSSQFTLVGSKDEKNGNQNCQLLANGTLKIRVPSCYESIFGKYYLIENVKFSYGQSDVNYALNNQQALTFRFVKKDEKWYVFCSFDLPETPTISCNKNGMLGIDLNPNIIGWSYVDHDGNLKAKGQIKINVRDKNTNQTKAIIGDAVKKLVKLAYQYECPISVENLDFERKKATMKEEGVKYSRMLSNFAYSCFLDMLNSCAFKHGIEVIKVNPAFSSLMGLTKFMRLYGLSSDTAAGLVLARRALRKKEGIPTSYARLVQVDSSRHVWSFWNALSKKLKGVKRHSFFNSVSNREVEVKLLDELHSDRFNGKSQDTFITRRDSLSRVVNNSVRLTQKW

SEQ ID NO: 30194 - protein, 371 aa, Geminocystis sp.
MIFGGKKLWYAQFNLKENGYSSHQEWLKDWQKCRSSQFTLVGSKDEKNGNQNCQLLANGTLKIRVPSCYESIFGKYYLIENVKFSYGQSDVEYALNNAQALTFRFVKKDEKWYIFCSFDLPETPTISDNKNGMLGIDLNPNIIGWSYVDHDGNLKAKGQIKINVRDKNTNQTKAIIGDAVKKLVKLAYQYECPISVENLDFERKKATMKEEGVKYSRMLSNFAYSCFLDMLNSCAFKHGIEVIKVNPAFSSLIGLTKFMRLYGLSSDTAAGLVLARRALRKKEGIPTSYARLVQVDSSRHVWSFWNALSKKLKSVKRHSFFNSVSNREVEVKLLDELHSDRFNGKSQDTFITRRDSLSRVVNNSVRLTQKW

SEQ ID NO: 30195 - protein, 237 aa, Geminocystis sp.
  misc_feature (196)..(229): Xaa can be any naturally occurring amino acid
MHKAIKVRLYPTNEQAQKLSQVMGCARWWYNYALNLCNETYKATGKGLTQIALNKHLPKLKKEEDTLWLKDCYSQVLQSATLNLTKAFRNFFEGRAKYPKFKSFHGKQSCQYPQSVSIIDNCLKIPQLGLVKASIHRIFEGEIKTVTVSKTSTGKYFASILFETEQDFPEVTITGKVCGIDLGIKDFAIVNDGEKXXXXXXXXXXXXXXXXXXXXXXXXXXXXXXXXXXKDCQWQIR

SEQ ID NO: 30196 - protein, 393 aa, Geminocystis sp.
MLKVVKVRIYPDTSQKVLLASAFGSCRWVWNHFLNLINETYKATGKGLSSYDVKKLLPQLKKQEDTAWLSETYSQCLQQVCLNLGVAFNNFFEKRAKYPNFKCKHGKQSLQYPANVKIENDCLNVPKIGLIYTKFHRIIEGTIKTVTITKNCCNQYYASILVDDGKDKPEQSFLGKAIGIDLGLTHFAITSDGSKFNNPKILKKHEVNLKRKQQQLSRKQKGSNNRNKSRLKVARVHKKITNCREDFLHKLSRRVVNENQVIAVENLNVKGMMQNHCLAKAIQQVGWGQFCTMLKYKAEQEGKVYIEVNRFFPSSKTCHVCLNKIGSLPLDVRYWTCLKCGTKHDRDINAAINIRDEAMRIIQTSGTGDKAYRQTVSRSNRGRKKSTTVLVSG

SEQ ID NO: 30197 - protein, 416 aa, Geminocystis sp.
MQLVERHIITKTHSFWSSLDQVCFASKNLYNKANYNIRQSLIFCGEFSSYNLLDKVLKSTPEYRALPAKVAQQTLRNLEQNWSSFFAGIKEYKSHPEKFLGKPKLPKYKDKNGRHLVIYTAQAVSKKSLKQGSIKLSGLDFSFPSKIRGEKLHQVRVVPKNNYYIIEVIYEKEEVKPKDKTEKIAAIDLGINNLIALTSNQQGFTPILINGRILKSINQFYNLKKAKLQKQLPLGQYWSNRLSLLTRKREEKINDYFHKVSSYLVNLLLESEIDTLVIGKNKNWKQKVELGKRNNQNFTSIPHNKLIEKIKYKCQLVGITVIEREESYTSVASFLDLDEMPTYGVVREEEKVKFSGRRIKRGLYRSGSGKLINADVNASYNILRKAFPKAFVEGIERCVVHPRLVTSTKQKMKVST

SEQ ID NO: 30198 - protein, 382 aa, unknown
  TnpB Polypeptide
MITYKYKLYTSKRTKHLDAMLREAGWVWNHALALQKRYYKMYGGYIDEGRMKAKWVRWYGKSSRLHSQTVQEILERLDESYQRFFHHIQIRPPKFKKADDFKSFVFKHGGYTLNGNVLTINKINKRYKFSLSRPYEGVGKIKNVAVKRTPVGEYFMYLFIEAKAETIGKTHNGASVGIDFGLKTYMTLSTGEPIQSPLYLKQALGAKRTADRRLSKKQKGSNHRRAARRAKNRVEELITNRRDNWQWKQAHDLCRRFDVICIEDLNLTGMTSLWGRKMADLAHGKFVRKLEYLAGKYGVTVQKIDRWFPSSKLCDCGHVYKELTLRDREWTCPVCGLHHDRDLHAANNILRQGVASLGSPGKTREPGKVTVRGRKHPRISRL

SEQ ID NO: 30199 - protein, 405 aa, unknown
  TnpB Polypeptide
MLVRSLVFRLKDPLPNDAKFLMEDFRLAVNNAIRFGVHSNVTSRFALTKLSYKGFRKEHPGMYVQHLVSAFEVAGSALKNHRRRLRKGLPAQVPFIRRLFMKAENQAYRLDRKDGIIDLPIRAGLHVRLELIVSDYHRRYLDDESLSLGSLTLFPDKVIVTFRKHPPELYAYESIVSLDTNERSLDGVLANEDKIAAIVRAEFPDVSVIQSAHHDRRRKLQKKKSHDRRTARKLCAREGKREHHRIDHRMHEVANAVLSFAEEKKSMIVIEDLTGIRPCKNKKLNRRISIWPRRKLHRIIEYKAAWRGIPVVKVDPRYSSRKCPVCGRIQGSRKGAEFVCGCGWHMDRHINASINLLQTAASEKAAGGLRFDPGAFQHDVVMVLCGPNKAVRPEPNGTSGMRAIA

SEQ ID NO: 30200 - protein, 366 aa, unknown
  TnpB Polypeptide
MRLVSTIKLKVNGNKNLFDMSSTFLKAVQYTIDKGFKAKVSNRFKLHHLVYKDLRQWLPADFACEAIAKASLNLKSVKLKKKPVMKSCPISFNRNLFTFSFDKIRIATFTKGKRQDIPIYVPEYYWKYLDWRYQTLEIIKDRKGRLFFHITFSGEVRRHSCGQNKHLGVDLGVNNLAVTSDGKVFTGHKTKIMQYQFLRKKLQRKGTKSARRKLKAISGRQKRYMRGVNHKISKEIVASADTIVLENLKGIRDRNKYMGKRLNRWLYSWSFYQLQQFISYKAMREGKYVVFVDPYMTSQICSNCGEIGSRYFDCFYCSHCGFSSQSDFNASCNLRRHTVTMPHNSMDEGKSQLTTAPDIRVKSPCL

SEQ ID NO: 30201 - protein, 381 aa, unknown
  TnpB Polypeptide
MSTQTYVFKLYNSKRNKSLHQTIDLAGCIWNHLISLHRRYYRLYNKPLNIYRLQKHITKLKKIKRFEKWNLLNSQSIQDITERIDRAYKLFYQNRKRGVKTSPPKFKLITKYRSFTLKQSGWKFSSSNRIMIQGKEYKYFKSRKTEGQIKTVTIKRDNLGDLWICFVVKKENQIIQAKSGKIVGLDFGLNCFLTLSNGQKINNPLFLKQKIRLLKRLHKQLNQKNPGSNQYRKNILSLARMHRKIDNQRKNFHFHVANALAKQYNIIVVEDLNLRVMQKYWGRKVSDLGYAQFLKILEWVCLKHGSRMIKIDRYYPSSRICSNCGYKREKLELFERNWVCSSCNYNHDRDINAAINIKRVGASTLNIEDVKPASTGCFHRC

SEQ ID NO: 30202 - protein, 534 aa, unknown
  TnpB Polypeptide
MGKDYTNKYISTVKHETLTNQGKIDSLDPLWSHYQNLLGQFMYDMNFHLVRGQEVLKYTKAKPYQGDMTVLFERATKAYHKAVENGSELAPLEDVLNEIQMNAVQTPLSARYVQCCYSQAYEAYSSWTALLAEQVKTYLGFSSVDDVLIDGQPFLTTCYRINKDRRWYQKPILAWTLDTDGNLVVPTKENEAVIELEVPAVIMKFMRRLVKQARKAISLPDLSNVRTLKLDEKVAKLEVSTNAHHVDFWLKLSTLDKGKPVYIPLKNNPYYMKLLKTGERVPFVQVCLKDGKLTVSPILAHEKAPLRTDGSEIGLDFGMVTMFTTSTGERHGITSFNKLKIWDEILLKRTKELQAQGKAFKSDPTYNTLQSKIRSFIKNEIGRILNKLANKGYVVFMVEKLDFRGVGLSRRMNRLLARTYRKVIKAKLARLEEKFGITTVEVNAAYTSQECSKCGFVSKGNRKSQSAFHCACCGHKINADVNAARNIIKRRSFDVELRTYAREHNVRINRCLILERLLHKHDRLCRNNLASCHL

SEQ ID NO: 30203 - protein, 466 aa, unknown
  TnpB Polypeptide
METVTGYVTGINGNLANVSFNGSVHKNEVGYILVDGKRLKGEVIRINNGVASMQIYEMSNGIKVGDPVEFTGELMSVELGPGLLTQVFDGLQNPLPDLAEQCGFFLERGVYLDPIPDREWEFTPSVKVGDAVEAGDSIGSVPEGLFKHEIMVPFTLKGSDWTVKSIKEKGSYNVRLSLPKKLKEYMAHTYDIRAAYLYLKNPVFSNMDIIKQIKIYPPANDGTSRILVIYEVEDVLPEEDNGHYLSIDLGLHNLMTCYDNVGKTFIIGREYLSLSYFYNKEIARVQSQWGRIQAAREMEDLKTSKHLQKLYRKKNDCIKDYIHKMTRYITNYCVKNDIHTVVIGDIKGIRKERNLGRKTNQKLHSLPYARIYMQLEYKLKMKGICLIRQEESYSSQCPPQSEEVSHIYAEKRNRKKRGIYIVDTVIYNADAVGAYNILRKYHAVSGKEIDMPVTGLSSTKTIKVAV

SEQ ID NO: 30204 - protein, 382 aa, unknown
  TnpB Polypeptide
MGYYETPSYFDYKLVNVKTTLSARALSSMTSQALGLVSASVTKHRRRLYILSELKKDTVKNAKGIERLENIILKKLPQKPVTDTTGSAVFKAELSSKCAKLIPFKDGGEFDFFLKLSALGPSFGTILVPIKQHRHSKQLNQKGKLMTSFLVGNKSVDLRWEMKVQPQKKSGKILGGDSGLKTVLTFSDGQSTDSVKDIHGHTLNSILQTMARSKKGSKAFRRHEKHRTNFINWSIKQLNFKGVKQLNQEKVVNIFYKNKTSRFLSHWTNSEIEKALASICELNGVRLVYQNSTYRSQRCSGCGLVRKANRVGKLYKCKSCGLKIDADLNGAKNHALTLPSVPVALRRLKLNRKGFFWSPKGLFNVDGSELRVPNTSKETELA

SEQ ID NO: 30205 - protein, 397 aa, unknown
  TnpB Polypeptide
MIAVEKGSKVRLYPNKKQMEYFEHCFEVKRQGFNYLLQMKKNDYYKLRANQGVRYCNYQTRSNLGREYTKWKIEKHGYVSDSRIKNYIVQDIENAYTKVFQEGAGWPKFKSYHKAKPSYTTGQNVKIEDGKLIIPKCKPLKFRGRIIDGDIKRVTISRKNERYYASILFVNVRVTPKPKTRRLLAIDWGEETFITTNYGIKTNPPLYKKYHKKVARLLHKLSKKKLYSKNWYKLKEKIDRLKEKINNKTTDWYHKHTYQIARDFDEIAVENLKYKRLHQQGPKRSVSKIKKVQWTFGKWKIFLKYKLHWYKNEKIKKVNPQYTTKRCSNCQTINKKVLIKKNNTWLFKLWDRSIRIWKCPDCKTIHDRDINAAKNIYNLAFCTVGATGIQACDTTTH

SEQ ID NO: 30206 - protein, 415 aa, Spirochaetales sp.
MKLTKETKIKLNEKESNILGHLCYAAYKHWNNLNYERLNYQELLFEKMPDWYEQKKAHKDDFFARLLPSQTAQEVAKQLDKAWKSYFVLKKTGGIENPQPPRFKKDKMAVVFIDNSIKKIRDNKIRLSLPIKLKEHMKSKYGIDDDYLVLSNVVFENISSIKQIKLYPPEKEEARCIIVYEIEDKEKKEDNGKYLSIDMGINNLLTCYNNTNGEVFIIGRKYFSIERKYLKAIKDVQSRWYKVQSDMGVERPKSSKHIARLYKKMNNSLNDYIHKITRSITKYCRESGINTVIVGDIKNIREEFNKGRLLNQKMHSLPFNKVIKKLEYKLAIEGISLIMQKESYSSQCSPLSEKVSKQYAEKNKRVKRGLFVDGKMEWNADSVGAYNILRLYRDRTEKIIHMEAIKPPYVMKVAV

SEQ ID NO: 30207 - protein, 480 aa, Dielma sp.
MKVFSLSNRFYYREFPDLKNTVLHDLDVYNRVLHKAYKCLYDRAYKGASFKDSELHQLLKKQFHLNDYIPLSAVHEAKALLKANAALNKKLIRKTDKRMNRIRMKIREKETELEKVICEKEKMIRKTKLHGTTEKDYLYEATVIDPKIKNLKNQIKLLKYRLTGEKQKKERFMEKPKSVCFGGRKNLKHDMDTYRYNRRKRMLICGRRQGKYGNNLFKYHIDEGILVYRGIRQEIRMPVVFHQHREHIERAVRMKHNTPGKAIAYELYDHGEYFIIKAIAEYPGEPVLPSGRGSIGMDINRDHIALAETDRKGNLVKAWRIPLKERGTRNQREYERYVAVKRIVEECAGKKKNLIMEDLEFERKKEESLYRDRNYNRMLGTFAYKRLEEKIERKCMEKGVYLRKVDPRHTTQIGKLKYAKRLGLSIHHSAAYVIARRGEGYRERIPNEYHEYREWKEVIRDLGKATLEECQRTPYLCLFR

SEQ ID NO: 30208 - protein, 378 aa, unknown
  TnpB Polypeptide
MIKTFKYRLYPTKKQVQKLNWTLDKCRVLYNSCLLDKKNRYEQTGKGLSRIDQQVILKNDKDRFDFLNDIHSQVLQDVLFRVDKAFQSFFRRVKAKKRAGYPRFKSEGRYDSITYPQKPAFQIAEQGLKLSKIGSIKIKLHRSIVGKPKTCVIKKQNGKWYACFSVEYINQPLPHSDKVVGIDVGLENFAILSNQEKIKNPRFFKIDQNALAKAQRKLSKQTKSSPKRKKAKKVVIRIHERIVNRRHNFIHQEARKIVNNFGVICIEKLNVKDMMSNQIKVFGHKLNRSIADAAWSQFAQQLFFKAEDAGRKIIAINPKGTSQRCSQCGTIVKKDLSVRWHDCPVCNVHLHRDLNASYNILRLGTQSLGFSIEAPSYL

SEQ ID NO: 30209 - protein, 327 aa, Lachnospiraceae sp.
MKRLPYRYQDENGSWQTIQKTLDWLQKPVHFSRPQADFVRGRDYSFVTDKKTGQQLLSVNTLQGRVLAAYDVPECFADYFTDSAWSFGTAKLVSLNGEWYFHIPMSKAAGAEFNSTAPSHVVGIDRGLRFLAVTYDENGRTFFFDGKAIMEKRAAFQHVRDELQAKGTKSAKRALKRISGRENRWMSDVNHQLSKTLVDRYGANTLFVIEDLAGVGFSGETLSSRNSRQRKDLRSWTFYQLEQYLTYKAHAAGSDVLKVDAHYTSQRCPKCGRILKENRHHDTHEYVCDCCGYRSNDDRIGAMNIQMLGTMYVSGDMHPRFGVRKEK

SEQ ID NO: 30210 - protein, 237 aa, unknown
  TnpB Polypeptide
MLEIVYNKKEKDLMPDNGNYLGIDLGLNNLASCVSNTGSCFIINGKPLKSINQYYNKRLAYLKSKLKGNKQVSRQIRSLTNKRNNKIKDYLHKASRVLINHVVSNGINTIVIGHNRCWKSEINIGKRNNQNFVSIPFNMFISMISYKATLDGINVKIVEESYTSKCSFLDNEKICKHKEYTGRRIKRGSFKTSSGSIINADINGAFNIIRKSAKEAFDVSILPEGRGFWWNPVRISV

SEQ ID NO: 30211 - protein, 255 aa, unknown
  TnpB Polypeptide
VSWRYKELTSQLVGWKKDDSSPWLSESPAETLQQALKDLDRELVRFKTRGDGNSFRLPQLLEGDFDEANARIRIPKIGFVRYRKSRDIQGKVKNLTISIEAGRWYASVCTEIERFQPQATGNGEICIDLDIVRTVRLSDGTVYRLDATEIKKLEDRIAVYQKQLEGNKSSKQKLAKLGKAADFDKKVPSRKRRRLKERIVHLHRHIRNIRKNFMFKTARAIAQKYGQVAIEDLQVRHMTKSAWERLKSRVVSDRL

SEQ ID NO: 30212 - protein, 293 aa, Actinomadura sp.
MIAVSGTDAPFRIVGERGRHWDVRRLSRKTGEVRIPKVGWVRFRWSRPVPSGVKSFRVTRDRAGRWHVAFAHIPAPIPAPGNGQAVGVDRGVTVSAALSTGKLLHGPSLTAWEAGRLRRLQRKLARAKRGSNRRAHIRALIARIRAREADRRRDWVEKTTTRLAIGFDLIAVEDLNVRGMTRSAKGTIDAPGTGVRAKAGLNRAILAAGWGRLVQRLEHKAPGRLIKVDPRHTSQTCHACGHRAPENRESQAVFRCVACGHRANADINAARNIQDNIYHQACRPVFVSAAAPR

SEQ ID NO: 30213 - protein, 407 aa, Caldicellulosiruptor sp.
MNKTYILPIPGEYQDLAKELSKQSGKIYSKAVSFLKKMNKKGLRIKQKTFYKYMEWWIHQKDFILHSQSKQAAYQQAWVNYTATLRKIKKTRKKNKNTSKIRLPYRNKKYNKVCFKESAIKLEGNSLIFSNMKGAEKIVIDDVKLGIKPKYAELLYHADKGKYYVHVVVEIAKEQEEKKKGGKTIAIDLGVIHPMVCFDGENVLLYNGGVLNSILRYRNKKLSELQSKISGCQKGSKRWKKLQRAKIKLLRRLRNQVRDVLGKYTSHLIGYCVENGITTIVMGDVKGIRHSKKKSNKVASQKVNQWLFRKISKMIEQKAEFAGIKVVYVKENMTSQTCPVCGSKNKPQDRNYECKSCGFKYHRDGVGAINIYGKYTGESLVVGRLACPVGVRYKAHLRCPAVWNTHP

SEQ ID NO: 30214 - protein, 308 aa, Caldicellulosiruptor sp.
MNKTYILPIPCEYQDLARELSIQSGKIYSKAVSFLVKMNKKGRRIRRKTFDTYMEWWIHQKGFILHSQSKQAAYQQAWVNYTATLRKIKKTRKKNKNTSKIRLPYRNKKYNKVCFKKSAIKLEENSLIFSNMKGAEKIVIDGVRLGVKPKYAELIYHTDTGKYYVHVVVKITKKQKEKKKGGKTIATDLGVIHPMVCFDGQRVLLYNGGVLNSILRYRNKKLAELSSKLSRCKKGSKRWKKLQRAKIKLLMKLRNQIRDVLGKYTSHLIGYCVKNNIRTIVLGDVKGIRSSKRHGKVTNQEVHQWLFR

SEQ ID NO: 30215 - protein, 458 aa, Caldicellulosiruptor sp.
MNGCLFLLLNHLENTGYNRNSKKFFGSRRVEKMTKAEKIRQTLLQTRERRKNQIPVVYQLKINLNSAEKETKDKLFKLFLEAKWLYNYIVADIENRLNEDADKLKEVEIKVGESFEKREITNLTLQMKQALVERIKQNLYDLHRQKQKGYKTGKLQFKHHVNSIPLKQFGNTFKFINQQKTRVKIQGIKKPLRVLGGHQILEGVEIAKAELIKKPSGIHLFVTCYIDRDKYTKIWEHRKNRKGVVKPRVWQTFDSVAGVDFKPIGLMLSSGLKFEWLIKETERLKTLQKELARQQKGSKRWYKTKEKIAREYERITNIKYDIINKVCSFLYRYRTVCFQEDHIKCWKEGYFSKSVHYSAVGIIKRRLSDSLRVPAVAIKSNIPTTKTCSRCGSRQEISLSDRIFKCSVCGLEIDRDLNSAINMLKSVGLDRSELTPVEWETSARIFGNNPYILVSHTT

SEQ ID NO: 30216 - protein, 405 aa, Caldicellulosiruptor sp.
MYKTQKNHLRCNKQTYKLLRILCHTSKNLYNYALYHVRQHFFKTQKHLKYESVYHIVKENDNYKLLPSQVAQQTLISVDETFKSFLSLLKAKKEGKIDKKVSIPKYLPKDGMFQIVFSKDQFKIEGEKVRLSLGRGFAKEFGEKFMYFDMPKNIIGKKIKEVRIIPRYHGRWFEVEYVYGEEERFCSLDKSRYLSIDLGLDNFAAAVDTIGTAFLIEGRFIKSVNRWYNKERARLQSIYSKQGIKSGKKLAKISFKRQYIIDNFLNQAINTIVKHCLKNQIGNVVIGKMEGIKQEINLGRVNNQNFVAIPYEKFKRKLKLKCKEYGIEYIEVDESYTSKKCSRCGIVDKSNRKHRGLYVCRRCGKVVNADINGAINILAKVAGESAAWQITSSGCVNHPVRIRVA

SEQ ID NO: 30217 - protein, 433 aa, Sutterellaceae sp.
  misc_feature (69)..(82): Xaa can be any naturally occurring amino acid
MDRAVSAAQAGSGARAAAQRSGVAPGTQPDQGHAVPLDVRGHQVRGSECNPQSRNSLQEFLFQSQALQXXXXXXXXXXXXXXPWMYEVTKCAVQNAIRNLGTAFKNFFSNPKHFKYPKFKKKFVDDSFTISNDQFKLDEELSRIHIPRLGWVRMCERLRFKGARLLSATISRRADDWYVSISCEIKDLSHLSPAKNHGRVGVDLGISKLATLSDGHVFEAPKPLKSKLGKLRKLQKRLSRASKGSQNRLKLRLRIARLHRSIADIRADALHKLTHFLSANYSTVVIEDLNVKGMMSNRHLSRAIADIGFHEFRRQLAYKMALRGGELIVADRFFPSSRLCRHCEKRNADLELSDRQWQCPHCGCRIEDRDLNAALNLYHYPEMKWDRPRTPVQGRSSESTADQAPPAVADHNGERAGRPHGRREFAVCGRGTR

SEQ ID NO: 30218 - protein, 441 aa, Streptomyces sp.
VVVVVLRRLGRHPQRGRDGEVHRHAMGAARVEEAGWRQLVIRAYKFLLRPTVRQRQALGEMLRDHCSLYNAALQERRDAYRHSSKTSVKYGEQSAQLKEIRAFDPEQQGRWSFSSQQATLRRLNKAFQAFFRRVKAGEKPGYPRFRGVSWFDTVEFPKDGDGCRWNSIPLDSVTRVRLQGVGHVRVHQHRAVKGRIKTVSVKREGRQWYVILVCDQVPTEPLPTAGTVTGIDMGITHFLTTSEGVHVENPRHGKRGNQALANAQRALKAFPRCKREHRTANHRRAVEKAAKLHRKIRRQRTDHAHKAALALVHAYDQIAHERLNIANMVRVPKPKPDPETAGSFLPNGATSKAELNRSIHDAGWGVFLGILAQKAESAARVLIPVDPRNTSRTCPQCGHVDRENRDGEKFQCTACDHRDHADRVGAWNVKLRAGLVLPDVI

SEQ ID NO: 30219 - protein, 285 aa, unknown
  TnpB Polypeptide
  misc_feature (35)..(68): Xaa can be any naturally occurring amino acid
  misc_feature (240)..(273): Xaa can be any naturally occurring amino acid
LKETANTGYSLARPYRAISYHYVSFMPGRSFSPKXXXXXXXXXXXXXXXXXXXXXXXXXXXXXXXXXXAILSDGTVYSNPKFFRRLEEKLAKTQRILSRRTKGGSNWNKQRIKVARIHEKIVNARKDYLHKLSTYIVKNHDIIGMEDLSVSNMLKNNNLAKAISEVSWSQFKTMIEYKAKWYGKQVVTVAKNFPSSQLCSCCGYKNKDVKNLGLREWECPNCHTHHDRDLNASINLRNEXXXXXXXXXXXXXXXXXXXXXXXXXXXXXXXXXXIFHPSFSKSSIL

SEQ ID NO: 30220 - protein, 321 aa, unknown
  TnpB Polypeptide
MFINLKQNEEYIWLKEISAHTISNICLDLDVAYQRFFKKVSGKPKFKKKYKCKNSFPVRQDSFYLNNNCAIIEKIGKVKYQTNYEFPQGRNVVKFSNPRIKYENNKWILSFGIECNKQTQILTNKSMGIDLGIKDLAIVSCGSEFKVFKNINKTKRVKKINKQLKHAKRIVSKKYYTNKSWIKSNNIIKAEKRVKQLHNKLSNIRKNYIHQTTRELVNKLPKRITMEDLNVSGMMKNRHLSKAIQEQCFYEFKRQVKYKCEEYGIEFIQANRFYPSSKTCACCGFIKKDLKLKDRVFICPDCGFEIDRDKNASLNLMNYKG

SEQ ID NO: 30221 - protein, 390 aa, unknown
  TnpB Polypeptide
MMQRAYKYRFMPTPEQAHNLACTFGCCRVVYNWALKRRAVAWFEHGQRVTYNDLSHALTELKKQEGTRWLAEVSSVPLQQSLRHVEKALVNFFEKTAKYPKYKKKQKKQSATYVNTAFVWNGSTLTLAKQKEPLAIVWSRPLPENVKPSSVTITKDKAGRYFISILVEEEIAPLPPIDKTIGIDLGLKSFLITSDGETIDNPKYYARYEKKPAKLERKKAKKKKGSKNCDKARKKVARLHAKIADTRRDFQHQLSTRLVHENQVICVETLAVKNMLKNHCLAKAISDVGWSEFVRQLEYKAAWYGRTVVRIDRFSPSSKTCHCCGWVKEDLTSEDRVFVCQDCGNVTDRDYNAACSILAVGLTASVCGGHVRRGKRKLGHAVSNEAESPS

SEQ ID NO: 30222 - protein, 377 aa, Proteobacteria sp.
MLQTMKYRLKPTKAQAQLLHSQLEECRCLYNHFLAERREAWDARQESWTYHKQALTLPGLKASCVDLSLVHSQVLQNVAVRIDLAFKAFFRRCKAGEDAPGYPRFRGYGRYDSMTFPQYGNGCQLVAGVLKLSKVGAVRVVQHRPVEGTPKTCTIRRASTGKWYVTMVCAVEAHPLPATGEAVGIDVGLRSFATLSTGESMPCPQFLRADEKDLKRTQRQLSAATQGTPERRKRRKVVARVHERISHRRTNFAHQASRRLVNRCDLMAVEDLSVNRMVQNHCLAKSIQDAAWSQCATFLSYKAAWASRQFVAVNPAYTSQDCSGCGHRQKKTLERSHVCACCGLTLDRDHNAALNILRLGLQSLGLVPRSSAVYGGE

SEQ ID NO: 30223 - protein, 387 aa, Okeania sp.
LTALQATVKRVDLAYNAFLKGIRKRPKFKSIGNYSGWTYPDGRQGFKVQIECSQKYAVNCGWVTLNDLGMRLRMRGRFKYWGKPTTCTIVYRPHKDEWYASFSIKTSEPEPLFGSKSPLDYESMVAFDLGCETALTCYDGYGFNSISNPRFDREFAPKIKQASRQLKRKQRPIKGKQKASSRWKKAKRKISKLKAKQSAVRQDWQHKVTTEIASCYDIVVTEKLNVRGMTRKAKKGKRKKQKAGLNRALLDVGFGALNQMALYKILAKGGLHITIDTKKVKPSQRCPSCGTVHREWAQLSNRYHVCDDCGFEIPRDQGSVMVMWQTAADKQPGLGTNLVSRRCSSSTDSTRKHTGSMKQLGQMKRSKSQNVDVSGAVSQTPHVYTAG

SEQ ID NO: 30224 - protein, 377 aa, Oscillospiraceae sp.
MERLQAYKFQLRPKVGQESLMRRFAGCCRFVWNKALVLEKQTYEADGKRLCYYALAGKLKDWKKEEETAFLSEAPSQILQQVLKDLDRAYKNFFAFRAGFPRFKKKGVHNAFRYPQGFKLDEGNSRIFFPKIGWVRYRNSRRVKGTPKQVTVSLSAGKWYISVQTEREEPNPVHPSQSRVGIDMGVARFATFSDGNHVKSPHSFRKYEKKLAVLQRKLSKRTKFSSNWQKLRERIQRLHRKIAAVRNDFLHKTTTTVCKNHAVVVIEDLKVRNMSRSASGTMDAPGRNVRAKAGLNKSILDQGWFEFRRQLAYKLTWLGGTLFVVPPQHTSQTCSHCGCVDRQNRPMQAKFKCVACGFELNADHNAAVNILRQGMPY

SEQ ID NO: 30225 - protein, 181 aa, Competibacteraceae sp.
VKGSNNRRKSAVRLAKLHARIANVRQDWTHQTTTALTERFALFGVENLNVRGMMANDKLARSIADIGFFEFRRQLEYKAALSGGAVVVVDRWFPSSKTCNECGCYRASLPLSIREWVCAECGAVLDRDVNAAKNLQRTALASGSCPDSQACGETGSGRSRKTPVKPASMKQEINHVSIGYG

SEQ ID NO: 30226 - protein, 404 aa, Scytonema sp.
MLLGFKTELKLNNQQRTELLKHCGVARHAWNWGLGLTKQILDHNKANPNEKIKFPTAIDLHKWLVALVKPECPWYYECSKSTPQESLRALCLAWKDCFEKKKGVPQFKKKGRHDSFTLEGTVKTLGSRSIQVPKIGVLKTYECLPTHCPRKKKKSPHKVPPNSFQPKSVTISREADKWFISFRFEASKPDLKLEDTWFFSEHSVVGVDLGVSNLATLSTGEIVEGAKSYKRFKDKLARLQWLNRQKVIGSANWKKAQLQIARLHRKIANIRKDTLHKLTILLAKNHSVIVIEDLNVKGMMANHKLAASIQDMGFFEFRRQLTYKCDLFGSKLVIVDRWFPSSKTCSNCGTVKKELSLKERTFNCECGLSINRDLNAAINLSHCVAGVPPVEARGVKNYSSITVS

SEQ ID NO: 30227 - protein, 479 aa, Moorea sp.
MSKKGNKKTEEIFTQVIPVVACSDLTQVKKIMALCGTPRAITYNQLGSLSGWGADWRSTDKIIRKILLPTDIGLPSKLWEWSVNDTMKAILAQQEAAKTFLIKEIYRKTKNPEERQRLIHLLKNNPTGDNWLHRKFRKQYIKGRTYVRNQIVYQNAGYSCKRINRSSVQLEIAGLVKGKRIKLKLRSRHLIKGQIRVIFKDNEQLFLHCTRKKTIVLPSEKPSKKIGIDKGYTEGFYTSSAIKIAEGLGKLITEKTERIAQTNRNRYRLRNYAQNHQKLAKSKTILKNNLGYQVKSKKLKREKATIKNFIRADLRRTITTPVKLFCEDLTQPIQGKLQAKRINRKLNQWMKGELQASMEKISLETGSNLSVVNPAYTSQVDSLTGTLLGHRQGDRFIRYTGDYIQADLNAAINICIRGQDNKITRWLKASEVETELIARTVRYLVELGVSVTLAVQRGWLLPKFKAKALKQETKYHRQG

SEQ ID NO: 30228 - protein, 377 aa, Erysipelotrichaceae sp.
MNKAIRYRIYPTNEQCIMFAKTFGCCRKVYNLMLADKIASYKETKSFGRQTPAMYKKDYPFLKEVDSLALANAQLNLQRAMKNRFDKKRKSRCGFPKFKSAKHSRKSYTTNNQNGTVAIIDGRYIKLPKIGMVKAVIHRAPDTDWNIKSATVSQDCDGRYYVSVLFEFEKVIEKVEISDRALGLDYASDGLYVDSNGRRGSNHKYYRESHKKLAREQRRLSRKKGSKKGEAKSSNYMKQLRKVNRIYKHIANQRLDNLHKISTEIANQYDVVCVESLNMRAMSNRGFGNGKATLDNGYGMFLNMLEYKLADRGKYFVKVDKWFPSSQICSKCGRIHHEMKNLANRVMKCECGFVMDRDCNAAVNIKEEGLRMLKSAR

SEQ ID NO: 30229 - protein, 361 aa, Methylococcaceae sp.
MKTFKYRIYPTKIQIARIDSTLFYCRFLYNSMLNHRITCYKAGKTVSKFDQLNEFSKIKKEFPEYKNIHSQVMQDVGVRLDKAYQNFFRRVKQGGEPGFPRFRGRNRYNSFCYPQSGFAIKNSKLQLSKIGALRIKLHRPLEGITKTCSITRKNGKYYACFSCEVEQKKLPATDKSIGIDVGITDFAITSDGKFFPKMNQYRKAEKHLKYLQRQVSRRTKGSSRRKKAVKLLSVAHEHVANQRKDIAHKVSRKLVDNYDLIAHEDLRVTSMVKNHHLAKSISDAGWSMLFQFLHYKAENAGRTVIAVPPAFTSQICSGCGALVPKKLSQRWHDCPHCGLSIQRDVNAAINILAIVTKKQAG

SEQ ID NO: 30230 - protein, 404 aa, Streptomyces sp.
VIRAYKFLMRPTMGQRATLTAMLRDHCSLYNGALQERRDAYRHVSKTSVTYGQQSVQLKEIRAFDPERQGCWSFSSQQATLRRLDKAFAAFFRRVKAGETPGYPRFRGVNWFDTVDFPKDGDGCRWDSTPHDPVTRVRFQGVGHVKVNQHRPVVGKVKTVSVKHEGKHWYVVLTAEQAQPEPLPLSGSVVGIDLGIANFLTTSHGRFVPNPRHGRKAVAKLETAQQALARFPRVRRDKRTGKHRRAVECVAGLHRKAHRQRLDHAHKTAHDLVREHDFIAYEDLKIRNMSKAPKPEPDPGTPGSFLPNGATAKAGLNRSINDAGWGVFLTILRAKAESAGREVIAVDPRNTSRTCPECGHVAKENRPTQEKFHCQSCGHRAHADTVGALNVLRAGLVRRDARKG

SEQ ID NO: 30231 - protein, 211 aa, unknown
  TnpB Polypeptide
VSVQVEEDHQEPVQATGEAIGIDVGIKTLATLSDGRTFDNPKALRSRLKALKRASRQHGKKQKGSNNRRRAQRKLAKLHMRIANIRKDTLHKVTSQIVAKTKSPEERPSIIVLEDLNVKGMLKNKKLSRAISDVGLGEFKRQLCYKSAQAGIEVKQVSRWFPSSKTCSSCGNVKEELALTQRVYICVECGYRADRDYNAAKVLAATAEMNT

SEQ ID NO: 30232 - protein, 199 aa, Tolypothrix sp.
LKGKDWQYELLEDAIRTANFVRNKALRYWMDNRGASKNDLQKLCVTLAKEYDWAGKLNFQARQSSADRAGNGVSRFYQNCRENKPGKKGYPKFKKRGCSVEYKQTGWKLAENRKRITFTDGFKVGTFKLLGTPDLNFYQPEEIKRVRVVKRADGFSCQFLIDVERSEPQSPTGKAVGIDLGLEFFYTDSEGNQIENPRF

SEQ ID NO: 30233 - protein, 358 aa, unknown
  TnpB Polypeptide
MLLSIKTKLKLSKAQEIILCKHAGIARFTYNWGLATWNNFYKDGLKPNKYILKKFFNNHVKPEFTWIKETGICQKITQYAFDNLGDAFSRFLSGKGGYPNFKKKGHHDSFTIDASGKPISVGGKSVKLPTIGWVRTYEGLPHTTCTKITISRTADSWFIAFAYDQEHEPTVKQHDVVGVDLGVKELATLSTGVVFPNPKHYKNHLEKLIRLSRKFTRKNKGSNNRHKAKIQLAKHHARVANLRKDTLHQITTFLCKNHAKIVVEDLNTSGMLSNHKLAQVIADCGFHELTRQLEYKAKKFGCQIIIADRWFPSSKTCSKCGHIQDMPLKERIYNCGSCGHSIDRDLNAAINLSRLAKA

SEQ ID NO: 30234 - protein, 514 aa, unknown
  TnpB Polypeptide
MRAQTPSYVVSIKLHLPEQIENHLEKSFHISNSVYNEGISLGLKRFEAMKRNPYYQELLEARRLAKAGIDKLKKVKKKTKGLAQQVKLYDKALFELRKAYGLTEFALGVYLCQQRRKDGSPYQQLSASEIQIIAGQVYKTLEKVLFYQIKPHKVKFRSKYDLQVSYRNRTNKEATRLVSSDKKDIAYRLYIHKKSTFVDIPVKAFNTYQQMSLLRCEKIKYVQIIRKTIRGKKVYYLQIVCQGFSLSKVTKGCGVIGIDPGISTVAFASQKEVVLVDLIPMDITKKEKLLKQIDRAIERSRRVNNPECYNENGTIKKGARFKRPSNRQLRLRNRRRKVYRSLSEERTKLQGQLVNRLVSQASIIKIEELNVKSLQKRSRDIRINPKTNQPFSKKRYGKAIFRAAPGAFRVALETRASQLGVDFEIISPKNVKPSQYNHITQTFEKKSLSTRIYDLSDEYKDVQRDLYSAFLIGYIENGRYQQKQLERDFPAFYDQMKDFLQQTPKTKRLSWYLN

SEQ ID NO: 30235 - protein, 497 aa, Xylanibacterium sp.
VSVPAGSVLVVARHTTFQLVADPTAKQARALARHEGAARFAFNQGLRLHLNARQASKNATEVLTGDDPDAVLVPWTGFDLINAFNAWKKTEDAGRRFVVAADGTADLEVTGLAWRSEVSAQVFEEAVVDLGKALGAWTSSRRGKRAGRPVGHPRFKKKNYERGSFRLRNKTSKTRTGQRTTIRLGEAGPRSVTLPGIGAIKVHDDTRRLRRMLAKGRARIVFATVSRRGGRWRISLNVEAADLHPAAQHPARDDADHAGWAGVDRGLHAPVVAATRDGSEVLRVATAPKALLTAQPVTRRLQKSVSRKVKGSASRRAAVRRLARHHERVRARRHHFLHQVSNSLVQTHDRLVIEDLNITGMLANHRLAAAISDAAWGELARQLRYKMAWRGGQVVTADRWFPSSKTCSACGDVKTTLTLGDRVFTCENEDCGLTIDRDRNAAINLATWGEQHHTTQVLDPEARGQVTNAHRPDGSGPRTRADETSRDDVGTLTATAA

SEQ ID NO: 30236 - protein, 399 aa, unknown
  TnpB Polypeptide
MERRKVTYKLYPTPTQGARLLDLLRSHKDLWNAALEERIDAYRKAGKSISYAQQCASLTQIRGELPEDWATMNCSSQQITLRRLDKAFTAFFRRVKAGQSPGFPRFKSIDRMPGFGYKSHGDGWRFTPGANWKHGTLRLQGIGHIKARGQARTGGTIKSCELLQRDGVWHASLTIECAPQRTGGTAAAAADWGVEKLLSLVKSDGSVETIDNPRWFKAAQERQIALDQGVSRKKRGSKAWRRAKRTSARFKAQAARRRLDHHHQLSARIASEIAVFATEELHVQNMTASAAGTIEAPGKMVAQKSGLNREILDTAPSLLMQLIAYKVQETGGRFMQAPTRQLKPSQRCPACWSLRKKTLSERWHACACGHEEDRDMASARVVLRWAMGDIPGQELPQAA

SEQ ID NO: 30237 - protein, 402 aa, Escherichia sp.
VKRLQAFKFQLRPGDQQECEMRRFAGACRFVFNRALALQNENHEAGNKYIPYGKMASWLVEWKNATETQWLKDSPSQPLQQSLKDLERAYKNFFRKRAAFPRFKKRGQNDAFRYPQGVKLDQENSRIFLPKLGWMRYRNSRQVTGVVKNVTVSQSCGKWYISIQTESEVSTPAHPSASMVGLDAGVAKLATLSDGTVFEPVNSFQKNQKTLARLQRQLSRKVKFSNNWQKQKRKIQRLHSCIANIRRDYLHKVTTTVSKNHAMIVIEDLKVSNMSKSAAGTVSQPGRNVRAKSGLNRSILDQGWYEMRRQLEYKQLWRGGQVLAVPPAYTSQRCACCGHTAKENRLSQSQFRCQVCGYTANADVNGARNILAAGHAVLACGEMVQSGRPLKQEPTEMIQATA

SEQ ID NO: 30238 - protein, 241 aa, Paenibacillus sp.
LKGRRIELSKIGDVQIKLHRQPQGTIKTCTIAAKNGRYYACLSYEGEAQPLEQTHRHVGVDLGVKHLAVTSDGQFFAAPKYLRQSEAKLKKQQHAVSRKQRGSNRRRKAVKLLARQHERVANKRKDYAHKVSRTLVNRYDTIVFEDLNIQAMGKNHALAKSIADSGWNGLVHYVTYKAESAGRRIIQVDPYLTSQICSGCSEIVKKPLAVRIHWCPHCGTTLDRDVNAARNILARARLQVS

SEQ ID NO: 30239 - protein, 379 aa, Salegentibacter sp.
MKQIKTYHFKLNPTKAQEQTFAQWLGSCRYVYNLCLDYKKQLYTSHRTSINKNDIQKELSAIAKEIAWIGCVHSQTLQEVTDRLFKTYEGFFKQGKGFPKFAKRNQYRSFTFKQGIKIHQGINSIQLPKIGKVNYRKSQPVEGIIKTASIIKEAVGWYIAICCEAAIIPLSSVENTLGLDVGIKSFLVTSDGVVVDNPKHLYHRQYRLRKAQRAVSRKKKGSNNRKKAVQKLARAHQKVKNARKDFHHKLSTQLIRENQTIITENLQIKNMVKNHKLAKSIADAGWYQFIQMLEYKSKWYGRELIKVAANHTSQDCSVCGWRNKELQLKDRSWTCINGHTLKRDLNAAINIRNKGVGHTPSAWEIYSDSGRVAQESHLL

SEQ ID NO: 30240 - protein, 429 aa, unknown
  TnpB Polypeptide
MKLTYQFRIKEDSKIIEFMKISKELYNMALYEIRQSFIKEHKYLNYYDIEKLMKTKPNLDNKILYKLLPAQTSQQILKVLDRNWKSYFALSKKYKENVYHNQKPNIPSYIRKNENILIFTNQNLTLKNNRLKNKKFNINIKIPQKDIISNFQQFRIVKKNNILFGEIVYEKKININPNTDKNKVMAIDLGLNNIAALTDNIGNSPILINGKGLKSYNQLYNKKRSKLKTIVTNGKNVKNVNDKKYFKSTKRMIKLDNNRFFYFKNFLHHVSKNIINICLYRKIGTICVGESKGIKTSSRLGKHNNQHFVQCPIQQLKEMIKYKAEMEGINVICTEESYTSKCDSLSSEPLKNNKTFIGKRIFRGLFASPKGLINADVNGSINIHRKVFGDNFGIQSLVNSRILFNPIKIRNPQDSNSFKQFLLKGINKC

SEQ ID NO: 30241 - protein, 644 aa, unknown
  TnpB Polypeptide
MESKAKKITFPSMKQVKLLDCQFKQFVSLGIKSKLSALKHLPGTGDLINKTWKNFAILTLLMRKIPRIQKLTISILGSLPKSNWMTFLDKLNTSSNENQNMLHIQLFQILLQELISNEKDYKPFWTPAYKELSEKLLLPIEIDYPVLDSTSLKSSSKKQAVRLPFLTMKKIKVQNKNLQKTYYQLSTFTAASKWEKEAIKSSNLKALKIKMKPSNQQRKIIDEWIDTSRYVYNKTIHLINKGHPVNHFQLRDKLVTEDTKKNNKEYKDFIVELQELTDKKKLLNKELLQNKKDIAKQQELIKQIEMQEKLIIDKKKSRNEIIKTLATEKNTGIKEWEFNTPKAVRDGAVNDVCKAYKTGFTNLKLGNIKFFKMHYKKKTNPDKCVCIPKSLVKNKNGIIHFSSHFFKENCKFKMGKKTLKKYKDLKIDNDTRIVKQKDTYYLIVPIPVEEIPKKPLVNYCGIDPGIRTFMASFGNNECIEYHHNEEAIKSLNTKIMILKELRCLKFRKRILKAKLNRIETRKSNLINELHWKVITDLLNRNDVIFYGDIKSHDIVKNKHNRTLNRNMNELKFYKFKDRLLFKATEKNKRIVLVNEAYTSQTCSFCGSMYKPGCSKVYDCKNCNRKVDRDINASKNILMKGILSI

SEQ ID NO: 30242 - protein, 443 aa, Varibaculum sp.
VARRESAPKNLSEKARLAKNKRIKATVNATRARRAKMECRTRKIKIDRSHLNNKQKEAIARLFLECKWLTNSCIANERFDRSYIKELNGKVQVKTPIGMEEREFLVLGGQLAQSVVDGLRANLKALSKLKSNGRKVGGLRYRRQVTMVNFPQYGNSHKINREKNRVKLANIPGWMRVRGLDQLPENAEFANCKLLDRPDGLFIVITCYTNKEPEDFAPGTSIGVDMGVKTHLTFSDGTKITALVEESERARGLRRKISRQKPGSNNRAKTLARLEKVLAKDANKREDIANKIVHELLKNETVYYQDEPLNKWFEKQGRVKAGRRLQGSILGRVKAKLEQSSRAVMLDKYLATTATCICGHKTKHEPDKRIFVCKSCGYSDDRDIHAAKNMVRLGQSQKAPATEHSRTLADKHLRPVAPMDYAFIGKTGGVWLKQEAPTSSVLG

SEQ ID NO: 30243 - protein, 451 aa, unknown
  TnpB Polypeptide
MKKTEGLYMQKRKFTIVTQLHENNNTNLIEYVDKTRVLYAKAMRETFHVLKRVDNFNKSSYNTYLQNKYDITQRTANSILSDAQGRLNALTELKTYEKSQLIRKINHLENTVIPKLVTKRNNNNVRLRQKLSVSLMRHRNLRRKIVAKKSKLNRLKQKLENLNHQLETGLLKLCFGTKHLLKRDYEKFINQRDSQMSFVGAKAQKASNQMLQLTYNSKNNQFEIKLRKDFGFKTAKGDDRYEYGKVYFRHHKNHIISILRQGNSPLSYKIIKKNNRFYLYCTFEIQVGDEDFITHSSYGTIGLDFNKGFITLSETNQYGHLVQTQFLPYRFKAGHKTKTDLQCIANHVVTLARSTGKDICIEDLNFKNKKAKTESKSGKKYNDMLHSLAYQQFMTTVESCAYRNHVIVNKVNPAWTSWLAKKLYCPTMKLNSHVGASYVIARRGQGYKDSV

SEQ ID NO: 30244 - protein, 443 aa, unknown
  TnpB Polypeptide
MQKRKFTVITQLHENNNTDLIEYFDKTRSLYAKAMRETFHVLKRVDNLNKSSYNTYLQHKYDITSRTANSILSDAQGRLNALTELKKYEKSQLIRKINHLENTVIPKLVAKRNDNNRKLRHKLPISLMQHRNLKHKIVAKKSKLNRLKQKLENLNHQLETGLLKLCFGTKHLLQRDYEKFINQRDSQMSFIGSKGQKARNTNLQLTYNTTNNQFEIKLRKDFGFKTAKGDDRYVHGKVYFRHHKDKIISILRHGNSPLSYKIIKKNNRFYLYCTFEIQVCDEDFVTYSSHGTIGLDFNKGFITLSETNQYGHLVQTQFLPYRFKAGNKTKTDLQVIANHVMILARSTGKDVCIEDLNFKNKKAKTESKSGKKYNDMLHSLAYSQFMTTIESCAYRNQVIVNKVNPAWTSWLAKERYCPTMKLNSHVGASYVIARRGQGYNDSV

SEQ ID NO: 30245 - protein, 208 aa, unknown
  TnpB Polypeptide
MRVNISNNVTKQAIKDACTAYKNFFRGLQKFLGFKSKKRSMPKFYQDNVKIRFSNTHVKFEGFSSSRKANKQKMNWVRLAEHGRIPTNAKYMNPRISFDGLNWWISVCVEFPDCRETLNDDGVGIDLGIKDLAVCSDGTKYKNINKSQKVKKLEKQKRRLQRSISRSYEKNKKGESYCKTNNVIKKEKLLLKRNHRLTNIRKNYLKKE

SEQ ID NO: 30246 - protein, 945 aa, unknown
  TnpB Polypeptide
MLLSDFPDPFSLYFVPRERLSAFQKNRQASAMRTVCFKVDEATLSEEDRLKLDALHNAYGAQVDRFLRLLGMCDYRRYAIGDRYRDLRDQIVADQGQAIEAALKTHAYSKRSKKVRARMTELAGNAEVLPATIAPKIDPILTGGLQARHWKLGLQQASGTVFRWWRLLQSEALAAIRRKKSYAGYTMEECRYIVGLLSDATDRFFDMMDGRVPLPVKLDDVDKIRNARGLCIQMVRAVHDAMGHMPRRGENRSVWFDESCYTSTYIEAEDRTLIELMSPVPGKHISLKINGRVPIRDFCLRRGRKERVRCSRSAKPTIQTVRTEVGLEIHVTIPLKSKEVKLDQSLRSLASFEAVRASGRLSNTLMSNWFESDRYESTYDMAANETTVRFFENPKHKGLSLTFAGELPFRDRKITKKGRLQVLKSKHKPLVRLNRSAGRTTLDVLGNPVAPAWVQPPSESTFVRLHRCPVKTMTGTCGSEAGRMPSRWIGAGACTVTYDEAKDETIVAVNRPREGMAFTVTLAGHAPLREMVRPRTGKTYALARPKKPSFHVVFPSKNTVALELILNVETKPVAEEEDFEKLARAGVESYEGVYPEKVQTSIWYMPQHYCATHDVVRGMTEIRITPPDGGRAFAIDIAGHDHLAQYRRLEDGTVEEKACRCKPAIQLAFVGRDPETGVRLLEVRMQGRIRPKDVADGDASLSDPDLVRAMAFDLGYTEVAYDALGNRFGEKLGGILSRFADFLLKADRARNRFRAMTMPPRAQPDKPAPAFDKAKARRIRRCNLGEATYNRRLHAFREEFKKEVNRALNEMFDLHAGAVFIIEAFGLVFRYAGISKYWRRRLSSWIRGLLAERLEFKAAERRVRLIYVPAAYSSQSCPVCGYTDRKNRKGNVFRCRKCGTEAHADAKAAQVLLLRVHDKRFHRYSTMSDIKQHHREDHQAYLARQ

SEQ ID NO: 30247 - protein, 407 aa, Cupriavidus sp.
MGLMHRLQAFKYALMPTGEQQRNMRRFAGSCRFLFNKALALQKERYEQGEMKLGYAGLCKLLTAWRNGTEMPWLKDAPTHPLQQALKDLDRAYANFFAKRADFPRFEKKGQQDSFRYPDPKQIKLDQDNSRIFLPKLGWLRYRNSREVLGTLRNVAISQSCGKWSVSIQTEREVEQPLPNGGAIGIDMGVARFATLSDGTFYAPLNSFKLHETALRKAHQAMSHKFKFSNNWKKAKARIQRIHSRIGNARRDYLHKCSTTISQNNAMVCIEDLQVRNMSKSAKRSAEQPEKQVRAKSGLNKSILDQGWFEFRRQLDYKLAWSGGWLIAVPPQNTSRTCPNCGHVSKYNRQMQARFECVGCGFEENTAVVGAINVLRAGHARFACEVSGAGMPPAAGTRRSDSIRLDA

SEQ ID NO: 30248 - protein, 375 aa, Alkalihalobacillus sp.
VVEITATLTAKIQIYVSDNQTESLKITTNAYRKACNWLSKHIFETKNLNQVKLNDLYYKPLRNLFDLKSQMAQSVMKTVIARYKSAKSNGHEWSLIECKRPEYNLVWNRDYSLTQNQFSVNTLDGRLKLNYERKAMKKYFNGTWKFGTAKLVNKHKKWFLHIPMTKEYQKIVFENVSTIVGVDVGINFLATTYDSQGKTTFYNGNVVKHKRGACKATRKQLQMRQTPSARKKLKQIGSRENRYVTDVNHQMTKALVDQYPRGTMFVLEDLTGVRSATEKVRVKNRYVSVSWAFYQFRQMLEYKAELNGQKVIVVDPKYTSQTCPKCGHIEKANRNKKLHIFKCKNCQYQSNDDRIGAMNLHRKGIEHIGVGTIGV

SEQ ID NO: 30249 - protein, 492 aa, unknown
  TnpB Polypeptide
MINKIYNEQTLTQDTKLINFYIRINFELENRLKPLIYNYYSFESILVNIISRNHNLFKEDMDVNDYQLLTSPRLIINTLYYYNYQYSEQQEYLKNKYKNNPLWKELKEVAKKLNPYNLTYIIERVRTVFDTYFTSLELYEQNPNLFQEKPKPPITRKLSELTEYSIELDKYGSLSFVRLEKENLIGINLSDQMVYIPVSNDQVKKLTEMDRLYSVKVVYDDEDLYLQIGYLKESNETENKQTKQEIENYKIKHTTKNEQAKYAGIDIGKRNLMAVFVDDETTPSLLVDGRPFKRFKDKEKFESLTTLLHNMTRLTIEYLYLYGVTDLFVAKNLLEEQSSNTTLFEELIKYIEQESEKYGLQIHYIDESFTSQVSCISGDINSIQAYSKQFPEERGIFDYLFALKRITNPNYTDDYSGKRINRDLFLDTVINERFNADLNAAVNHIKVGTDKSFDWLKDKLFKLKEPIIIKSEEEFEKLLESLRNNKSSKSAN

SEQ ID NO: 30250 - protein, 383 aa, unknown
  TnpB Polypeptide
LQKGGEDMIRSYKIRLLPNQEQEQLLWKHINTSRFVWNFGLSHQEELYKNNQKHLSGYDLRKVLTNLKQQDGYMWLKEVSAYTISDVCLDLDNAYKRFFNKQNHKPKFKKKNKCKNSFPIRSDRFYFNNNCANIEKIGKIKYQTNYNLHQGRNMCKFTNPRIKYKNNKWILSFGMECDSQTQIFTDNSMGIDLGIKELAIVSCGDKFKVFKNINKTKIVKKLNKQLKHAQRKVSRKYYTNKSWNKSNNIIKAEKRVKQLYNKLSNIRNNYIHQITRELINMLPYRIVMEDLNVKGMMKNKHLSKAIQEQCFYEFKRQMQYKCEEYGIKFVLADRFYPSSKLCSDCGFKKNNLKLSNRIYKCDNCGLIIDRDKNASINLMNYKG

SEQ ID NO: 30251 - protein, 470 aa, Mycobacterium sp.
  misc_feature (375)..(460): Xaa can be any naturally occurring amino acid
MARLKVPEGWCVQAFRFTLNPTQTQAASLARHFGARRKAFNWTVTALKADIKAWRADGTESAKPSLRVLRKRWNTVKDQVCVNAQTGQVWWPECSKEAYADGIAGAVDAYWNWQSCRAGKRAGKTVGVPRFKKKGRDADRVCFTTGAMRVEPDRRHLTLPVIGTIRTYENTRRVERLIAKGRARVLAITVRRNGTRLDASVRVLVQRPQQRRVALPDSRVGVDVGVRRLATVADAEGTVLEQVPNPRPLDAALRGLRRVSRARSRCTKGSRRYCERTTELSRLHRRVNDVRTHHLHVLTTRLAKTHGRIVVEGLDAAGMLRQKGLPGARARRRALSDAALATPRRHLSYKTGWYGSSLVVADRWFPSSKTCHACXXXXXXXXXXXXXXXXXXXXXXXXXXXXXXXXXXXXXXXXXXXXXXXXXXXXXXXXXXXXXXXXXXXXXXXXXXXXXXXXXXXXXXTTKDHSLATV

SEQ ID NO: 30252 - protein, 472 aa, Lactobacillus sp.
MSKERPTMSELPYHFGIKMRCYPSTKQMQMIQKGIDASRFTYNEMVARNQDAYDCVRLSEASLDLWFFFRTKERFWEFWRHRGQLNDINHRGKWEDMPLYATTLTRLVKVPLMKTYYKNCVKTQRVIKESYDWLQNKMIHSSTLSMAMKSYSAAWNLWRKANKGKIGTPRFKRKDWFGAGTMQLSNSYASNQPIDMYSGYVKVLDNKHVQLPKLGRIRVSHLVHFMNSHNGNVIRIGTVTVSKDNLGQHWVSFQLGSKVPFVKSFKKTNSQLGIDLNTDNFLTDSNGNIIKNPRFYRTAEKHLKNAKRKLSRRYLRAKKEKRSLRNSKNYLKQRLLVAKKMKRISDRRNSFLDNLSLALIKNHDLVVAENLQSKNMLKNHALAKSIADVGWRTFIQKLTYKSELYGKTFLAIDPKNTTQTCNDCGYVMGSDDKSERLSLRNREWTCPNCGEFHIRDHNAAKNILQKGQLALA

SEQ ID NO: 30253 - protein, 464 aa, Methanosarcina sp.
MLLTYKIKHNRSFTEELQKARKVAEFCIKHQTQNRGLNSPPIQKPIFSLRSSPSSSFSTFSEFSSDFPIISSAPPSLDSLSSTYSLQVSEALSPGDIKHIGLKSIISCQILKKYSRNQNFRSAKNVKLIIPSRAVRVDRKERTITIPCLKLLLNYQFSSNFTKISQIEIDNIYAYVAVVFPDDEPKNSEHYIGVDRNTKGHIAVVADPESGKIWKLGKMRYHTHKKYENIKKRLYNMGKSKELKAVKIREKNIVKDLNHKISRKIVDIALYNECGIKLENLKGNRKLNSKIGDIGKGENNKSKKRKWDKNRDKNRRKEINKYSIKSKNTTGKQSWSCEYSLNSWPFQQLQQFIEYKARLLGVEVVYVDPHATSKKCSRCGHKGDRHSKQFKCPYCGHVDHADVNAAFNIALTPKGSGQFPVERDAGKGSTDTPQRVLGRTIFSKRTARKETSPQFAWEVCQFLN

SEQ ID NO: 30254 - protein, 357 aa, Deinococcus sp.
MPRPRRLEPERHTIQIDRTAYPALYDLIRQRLLLRIDRLPQGQDPLTGVRSCTSYRLSAPDAFQLLDDTTARIGPVEITAAFSHLPSPAYQALTQAADAFRQYVGLPELLAAARTPDRTPAQVQRLIEAAVQQGRQPGQPGLYVPSQQFQSEWLADEILMHQTETEFFLSLSFRTRFQRLSRARVTTRVGLDLGLDPRSVAAHEDGSIYTFRPTALAIPAPHGLTPEARQLLNQLLYASGRQDAERILAYLTHRAHHVYAERLTHRAMSRRFVYRARDRAINDFHFSWLSQFLNVASLPFTRVDPAGTSTTCPQPDCRHRHADNRRGRAFLCRACGYQGDADAVGARNVLTRGIGRP

SEQ ID NO: 30255 - protein, 368 aa, unknown
  TnpB Polypeptide
MDAIVVSYMAAACWVSKQVFASKELNSNRLHRAFYATVREKFGLPSQLTCSLFRQVTASYKTLKALGKWDLCIYKRPTMPLTYGRDILRNRKGVTILGKPVILKHPRIPESGWKDSKVKRVGEVWYLCLAHEIEIAEPKTEGCVVGVDMGIKRMIVATNSANHKTFFFHGGVLNHRRSCIRRTRAAVQSVGTRSARRLLRRMSGNEAAVTVNLLHVASKQLVSYAVEVGARRVVVEDLSNVRDASLKKGKDLRSKVHRWPYAQALFFLNYKAAAVGISVEKVNPCNTSRGCNACGHVSASNRKGLRFCCQKCGHKDDADRQASKNIRLRSVLALQVSAKTGSLKAPQSSEPSEITAGSFVSHGDLAVV

SEQ ID NO: 30256 - protein, 368 aa, unknown; identical to SEQ ID NO: 30255
  TnpB Polypeptide

SEQ ID NO: 30257 - protein, 496 aa, Shewanella sp.
MAIRGFSINISDKTSSRQATCFAQWIGASNVMRNQKRSEYVGLLAESKGDQINQAYSHIRTNKELPFLKAIPVQIMRNAASLVFADVEASRKGLRKFPKQKGRGKKRSALITKELFMLEPLGESKTLLTIFDNATKKRQKLFSIQLDYVPDQLYKQFRISRLGNKFTFSGSYNDGVDSPTNEELLNGFVEYNDDDLLAQITGIDRGVVLPACTSEGARYAYNPAQVAKLKAIAKKKAHYQRLLASKKRLNKNKNKHRCESKSQQNLATKISKLDSKTANVRENFCHTISKEIVIQAKPIISLEDLKLTNMTRKAKPKRDSTGRKFIKNNGRAKSGLNRSLLNVSLGRLGMFITYKANDYGKAVVAINPAYTSRTCHICKKKHTVRPNQATLVCLNGCGTFNADENAAIVIAQRAVPYIKESKFADKAKTRKNTAIRKKKAVSPPLVSELSSVKKSGKLEAVSSEMSPCLLTQTSRRKTTIRRHAVYQAFLQQGTLT

SEQ ID NO: 30258 - protein, 408 aa, Shewanella sp.
MKKTLRYNFRIKPTPEQEAKFIEFGSYARSVWNLLLSENMLRYQYDKTFVFYHEMAGLIKDLKKFEEFSWLKAFDSAAAQQVARDLEAGLKNSFTKGRTQQFPTFKVSFKQKKLHNDSFRCVNNSNCIRIENGAVSIPKIGKVPIVLHRKLVSEIKTVTVQLSHGKWEVSLTQEVECKTAKRVLHSIVGYDINSQHTVVGSNGWYVKNPKAFKRSSTKLKQIQVQLSRRKKGSNRWHKTKSRLNTLHGKISRQRLAFAHEVSCSIAKTSDIIVFEDLNVKGIQQFNGHMVNDNVMGMITSLTKYKVELNSGIYHEIGRYVKSSGICYECKHTHKFGLNVREFACENCDLVQCRDLAAAKSIESTGENDLIAAGIVARVTPKSQKKSSTKTKVFESSKFGVGTEKKEAA

SEQ ID NO: 30259 - protein, 401 aa, unknown
  TnpB Polypeptide
MHICIHMMISYKYPIFPNKITQWKLAENLDACRWLYNRLLKDLNDAKEKGIKLKTYDTQNVIPSLKLENPKLNLVYSKVLQMVNYTLWSNFKGLAASKKDGRKIGHVRFKGYGWYNTLNYNQSGFKIDRDHNILHLSKIGEMQIKIYRKIEGCIKAVIIKREGERWFAIVQADQEPQPLPETGEAVGIDVGLTSIVVDSEGNEIENPRYAEQSEDKLARLQRRLSRAVKGSNNYGAIKDKIAKLHKRINCQRDDFLHKLSRMYVNNFDIICVEDLDVKGLKEKGHNNGMHRSIHDASWSKFIFMLSYKAQSAGRKLIKIDPRNTTQRCSACGSIVKKELCDRVHECPYCGFSCNRDYNASRNILFAGMEQPVAPIELKPLHHISVMQVLATKWEAAPFKTR

SEQ ID NO: 30260 - protein, 381 aa, unknown
  TnpB Polypeptide
MLGAYRYRFYPTPDQALNLHRTFGCVRYAYNRALRYRQDAWYERHETISYPQSSALLTGWKKEPEHAWLNDVSSVPLQQSLRHLQTAYRSFFQGRAKYPTFKKKDGYQSAEYTASAFRWDGASLKLAKQAEPLDIRWSRRFAGTPTTATVSRDPAGRYFVSMLVEETMAPLPVANAVIGVDVGLKDVVVTSEGVASGNPRHTAKHAARLEKYQRRLARKQQGSSNRRKAKLKIARVHAKIADCRKDFTHKLTTALIRENQVICVENLAVKNLVKNPALAKSINDANWGEFVRQLEYKAGWRGRTVVAIDRWFPSGKRCSRCGYTLDKLDLATRRWTCPECNTTHDRDVNAARNIKAAGLAVLACGETVIPVSAKVGIGRAR

SEQ ID NO: 30261 - protein, 401 aa, Nocardia sp.
MSACAEHAGFLPVAVVTVRACNCGTTSASTRHPVNRSCWRGRSGARGWCTTTTCGPANKRTRPGVKLSDTDIQRRVVTDAKRIPQRAWLCEVSSVVLVQACRDARTAYRNWFDSLAGKRRGAKVGKPRFRSRKDHRQAIRLTRNGFTLRGNGKLYVAKIGELKVAWSRELPAVPSSVTVVKDAAGRYFASFVVEADTAPLPEVSCEVGIDLGLATFAVLSNGTRIASPRFLRRVERKLRKAQQELSRKDKGSRNRVKARLRVARAHARVADARRDWAHKQSTVITRENQAVFVEDLCVTGLARTRLAKSVHDAGWGLFIRMLEEKAARYGRYFAKVDRFFPSSRLCSVCGVIDGPKPLSVRSWTCACGVVHDRDLNAAKNILVAGRAERVNACGGAVSLSA

SEQ ID NO: 30262 - protein, 190 aa, Halobacteriales sp.
MDRGPPEPPENPEKCVGIDVGILTYAHDTDGTAVRSLDLSDERERLEREQRKLSRKQHGSSNYETQRRRVAECHADLRRKRRDFLDKLSNYYAREYDLVAVEDLNVKGMIESPSNSRNTASAAWRMFLSLLEYKCEREGTHFVAVNREGRAKSARSAASRRTSRCGSANTPVLPAGLRRTGTRTRSSDAV

SEQ ID NO: 30263 - protein, 355 aa, unknown
  TnpB Polypeptide
MIRNEWFRANRYVYNKCIEYLKKGNANDWVYIKANMKTLFVWYDWLNDVPYQIKGQAVKDACKAVETEECKAAQTGEPFNMKFRARKHPKQSCFIPKTAVKERGVYVRILQGPLLRREELPGDLLDCRLVLDNGRYFLVCPYKERHHVADTQGRVVALDPGIRSFLTFYSETSCGWLGRGDFGQIQRLCSHLDDVMSDLEKATGKRRQRLRKAAARLRVKIQNLVDELHHKAARYLVDNFDIILLPTFETKDMVKRGTRKIRKKTARMMMTFAHYRFKQFLKHKAHETGKLVIDVNEAYTSKTCSWTGEVKNNLGGAKVMVGRDGQRMDRDINGARGIFLRALGDTPALQACVVE

SEQ ID NO: 30264 - protein, 201 aa, Bacillus sp.
MRYGKEIKDREIQNVVGLDFAMEGLFVDSEGKKANYPRFYRQMLDRLAKGQRKLSRKKKGSSNWHKQRIRVANIHEKVVNQRKNFLHHQSKELAANYDAVVIEDLDMKGMSQALKFGKSVADNGWGMFTSFLQYKLNEQGKRLIEIDKWFPSTKTCSQCGSIQEMALSARTYQCVCGRSLDRDYNSAINIKKEGIRLIATA

SEQ ID NO: 30265 - protein, 429 aa, unknown
  TnpB Polypeptide
MTAKAEEVKLEETEESTTVIQTRVYELHPNKVMRQALDEACDYRRYCFNQGLALWNEMYEARRIAKATKQKALLKAYPSPTERKVRDELVANKADWQYQYSAHLLQLAITDLANAWSNFFNKAQPDWGKPKFKSKKAPRQGFKSDQSKIKDGILYLERARESTIPKDQWRGFKLNEDPLSEEFGVVSYFKEKGRYYAAIPYKIKAKNIKTPDKTGKATAVDVNVGHFDYTDGRIVVLPKRLNRVYKRIKHYQRQLTKKRVENGQAAYNSKNYLKTKAKLQACYRKAGNIQNDLMQKFTTELVKGYDKIVIENLSVKGMLMSHVASKGVHRSMFGKFKQILTYKCNWYDKELILANKLYPSTQRCAVCGNVKNGDDKITLYGNKKHGTKHNEFVCYNKKCPNYNKVVDRDKNAMLNLLVLAEHPELNHAL

SEQ ID NO: 30266 - protein, 387 aa, unknown
  TnpB Polypeptide
LQAVKSVRQNYRPTEEILSLLEDFRCMVNDCVRIGLRENVTSMKSLCMKAYHQLSAHDVPTCYRLTAISRAAGILRNHRRVMKKNRSARVPYVTGLSLTDCYGFRVIHRLVRVTVKKGEYVFIVLNDHTLRSIGGHTPRSLTLTADGLSICLSKEVAEIEPVGAIGIDRNLDNVTIADSDGGTLRYDLAGATEVKARCRETKRHFRRNDARIRRVVYGKYGRIQRNRVGSILHNVSASIVRRAKEKRLGIVMENIRGIRRLYRKGNGQGTNYRARLNSWSFHELQRQIEYKARWEGIPVAYVAARGTSVNCSICGSRTYPNERRTLHCSRCDISIDRDVNAARNILAKGGGVRFTLDGPPEVPKEAMKGNGTTTPILGADGGKVTQG

SEQ ID NO: 30267 - protein, 475 aa, Acidimicrobiaceae sp.
MSHARPKLEAVASRPTTPTFSHTGQVLSRAVTFQFALDPNVEQRILFAKCAGARRFTVNHHLARVKSNLNARFAEREAHYEDGALFESSTSSLSWAAFSFINEFNAWKNGETEDSPVSEDGSRGLTWRHELPNDVFECASVDAARALENFSASRRGERGGAPVGFPRFQAKGNVTPSFRLRNRATPGRAPSSQPIRFTDPSHLRLSKIGPVKVFGPTRKVRRMIDAGRFHIYSATLTQRAGRWTVSLTGVAAELHQAQRSRTNRHAVPVGVDRGIISLCVAADANGVPFGSFEGVTTLKQALYKLKAANQALVRTTPGSKGRQRARARLAKTHRKVANTRRHLVHQASNALVDRCQVLVIEDLNLAGMVRNRHLARSISDAAMGELSRQILYKARWHGVEVRVADRFFPSSKTCSGCDEIKSALDLSTRSYLCDACGLVIDRDLNAAVNLARWQPKEISAEILLAPARVPLLSTA

SEQ ID NO: 30268 - protein, 390 aa, Pseudomonas sp.
MLRRQAYKFRIEPTGEQQRKLRQFAGACRFVFNKALAVQQVNREEGGKYIGYVAMAKYLTAWRNGDETPWLKDAPVHPLQHALKDLDRAYQNFFAQRADFPRFKKRGQRDSFRYPDPKQIKLDQGNSRINLPKLGWLRYRNSRQVLGTLKNVTVSLSAGHWYVSIQTEREVAVPLHAAPLAVGIDLGVVRFATLWDGERETVLEPLNTFARHQHRLAKAQRQMARKTKFSSNWKKAKARVQRIQRQIANARADYLHKATTAISKSHALVIVEDLQVASMTRSASGTAEQPGSRVRQKAGLNRSILDQGWGEFRRQLDYKLAWRGGWLVAVPPQNTSRTCPCCGHVSADNRQTQARFECVGCGYENNADVVGAINILRAGHARLAESANAE

SEQ ID NO: 30269 - protein, 426 aa, unknown
  TnpB Polypeptide
MLRTRGYKYELRVNNKERKLLGKCASISRFTWNWGIANRKQRYRTQTGEARYTDAMKQHKELNHLKLTEFPWMYEVSKCVPQEALRDLDRSYQNFFTNHQQIKRKQTTRYIGLPIFKKKGKCKDSFRLTGAIHLFPKVKQVQLPRLSKLRLKERPNLPVSARILSATVSRTADRWYVALTVKEEQPDCNPNDGPMIALDKGLSVFAALSSGISIARPKFLLQQARKQGRLSKAHSRKQKGSNNKRKSTLRLARFYRRIANQRHNFLHQTSTYLAKNHSVIVTEDLYVKGLMQNKKLSKYWADLSHGMFQRFLAYKAPLYGSTVIEIDRWFPSSKLCSKCLYYHRHLTLADRAFHCPLCGLVLDRDQNAAFNVANYYTIYQFLLFPVAESSAETLNACGEAVRPASEQARIDESGRTAPRTVCNNCS

SEQ ID NO: 30270 - protein, 298 aa, unknown
  TnpB Polypeptide
MSRLTFKYRLHPNRQQREKLQTTLDVCRELYNAALQERRDAWAAHRKGIGFVAQANQLVSIKEIRPDVAAVHSQVLQDALRRIDKTFQSFFLRVKRGQVPGFPRFRSKNRYDSFTYPQAGFSLNGRLSLSKIGNIKIKLHRPIKGEIKTLTIKRENGQWYACFSVVVEPQPLPPNNKVTGIDVGLSSFAVLSDGSEVENPRLLKKQQKRLRRAQRRVARRKRFSKRWTKAVRIVAKIHRKVFNQRNDFQHKLSREIVNNYGLIAVEDLNVKGLSRGILAKAVHDAGWAAFFSEAVVQS

SEQ ID NO: 30271 - protein, 403 aa, unknown
  TnpB Polypeptide
VVTCGIHHISWQPYQKIQKNKLENIFKIRKESEVKSVEKAYKYRIYPNKKQKEIIAKTFGCCRFIYNKYLAKRIEMYEQNKETFSYVQCANDMKKLKSELEWLKEVDSTALQSSLKDLDSAYQKFFKEHTGYPKFKSKKTHRFSYKSKCVNGNIQYCDKYIKLPKLGMVKTKNKLVPKGMILNATVSQEPSGKYYVSICCTDIDIQPLNKTGNNIGIDLGIKEFCITSDGELIPNPHYLKKSLDKLAKLQRELSRKSKGSSNRNKARIKVARLQEHIANQRKDFLHKLSTETIRSNDIVCIEDLQVKNMIKNHKLAQSIADVSWSEFVRQLEYKANWYGKQVVKVDKFYASSQTCNVCGYINKDTKNLSVREWECPCCHTHHDRDMNAAINILNEGLRILEVA

SEQ ID NO: 30272 - protein, 419 aa, unknown
  TnpB Polypeptide
MMDKKNLKKTYKYRLYPTKRQQEILEKQLFLCRWLYNHFLDERRTLYQKKKIKVSCYDQIKKILELKKEKPELTKVYSQALQDVVRRLDRAFQNFFRRVGKNKNGRRQKVGYPRFKGYWRYDSFVYPQSGFELKEKEGKLNHSSDSEGSRRDLSLRLSKIGSIKLKLHRPIEGSIKTLTIRRTRTNKWYACFSVEIKKELPKKKVIQEAIGIDVGLDSFLTTSQGEKIDNPRYLTKSEEKLAKIQRWHSRKKLKSSNRKKSRLKVARLYEKITDQRLDFLHKLSSGLAKSFQLIAFEKLNIKGMVRNKYLAKSISDASWNRFLQQLRYKAAEAGIWAVEINAKNTSQICSGCGSNVPKTLAVKKHKCPQCGLIIDRDINAAKNILQLALNTVGTTGINACGVGRILPTMKQEATYFNSW

SEQ ID NO: 30273 - protein, 463 aa, Bacillus sp.
MKESKTYRKQLRLYRETKLKVERTTHKEKSRLLKKEVDFYTKILNDIRQSYGLTEYGLHAFIKKYQQNVKKHIDSNTSQKIASTVWKAMKMVLFQGKKAHFKKYGSLTSLEGKTNKSGIRFKNNEIHWNGLVLPVLIRKKDLFVEESLACHKIKYCRLVKKGIRGKDTYYVQLVMDGIPPVKRINSTGGFRHKETPPNRVGIDIGTSTVAVSSETEVWIQPLAPKIPQLDKEKRRLLRKLDRSRRSNNPNNFHPDGIVKRGIQLTWTRSNHYLKTLYQVKELYRKRSVYVKEQHSQLANRILSCGDEVYVETMNFKALAKRTKETKKNQKGKFQRKMRFGKSIGSYAPARLVDIIHQKLTYTHNQIHKVNTRTFKASQYNHVTDSYQKKKLHQRWTWIGKHLVQRDLYSAFLLMNSEMNVQQTNRELCFQTFQRFVALHNQEMERLKQNKEKLPSSIGIKKSR

SEQ ID NO: 30274 - protein, 281 aa, unknown
  TnpB Polypeptide
VIVLEFKAKGKRHQYSAIDEAIRTVKFIRNSCLRYWMDNKGANKFDLNKYSAVLAKNFPFANELNSTARQSSAERAWSSIVRFFDNCKKKVPGKKGFPKFKKNCRSVEYKQSGWQLSPDKKSITFSDKKEIGKLKLKGTWELWGFDKKQIKRVRIVRRADGYYVQFCVSAEIKEELDPTGTAIGLDVGLKDFYTDSTGKTEPNPRFYRTVEKRLKFHQRRVSRKKKGSANRKKAINRLGRTHLKISRQREEHAKRLARCVIRSNDLVAYVRAACRKARLES

SEQ ID NO: 30275 - protein, 446 aa, unknown
  TnpB Polypeptide
MAAAGGCRARGGRVAGERPLGPRVRGYATAAERHAKTIRLKALTARLSRVQRQAGRGAVSVVRGGKALLRQRNNLREAGLSEDQWRRAWESSRLFLTADGEADKPWGNETIRWNPDEGWLEIKLPAPLSHLANQPHGRYRLSCPAGFCYRGDEVAAQAASGAVRYDISFDPVRDRWYLAASWTTAPAPAAALDTLRRHPVVAIDVNHGHLAVAALAPDGKILGVAATVRLDLAGLATATRDGHLRAVISNLIATARQHDARAIVIEDLDFAAARAEGRERAGGRPARGRRGRNFRRAVCGLPTGKFRDRLVQMAANAGLPVIVVDPAYTSRWAAEHWLAPLRAHHPKTTGHHAAALVIGRRGLGHRARRRVTGNQPAPAEAARPAQTRPRTKPATKPAPRKPADPPGPRQPPGTKTGRPHRTTAGNQAAQDRPGPPTEQYSLPLSD

SEQ ID NO: 30276 - protein, 446 aa, unknown; identical to SEQ ID NO: 30275
  TnpB Polypeptide

SEQ ID NO: 30277 - protein, 378 aa, Geobacter sp.
LRTFAFKAYASKRNRKLHRQIDVAASIWNHCIALHKRYFRLFGRHLNQFQLMKHVTKLKRIPRYSFWSEIGSQSIQDVVQRIEKGYQLFFQNIKKKSGRKVQPPSFCKRDKYRSFTLKQAGYTLSGNRLRVGKQQYRFFKSREIEGKIKTLTVKRDALGDIVFIFVTDAEHQTFHAATTEIAGVDFGLKSFLAISDGRKESAPQPLKQAIKQLAKTSRALSRKQRGSNSRRKARKNLARLHRTIANRRKDFHFKLARKLVNRYNAIAIEDLNLSGMKVLWGRKVSDLGFASFVSILKHQATKTGCTIVKIDRWFPSSKLCGSCGTINEALSLRDRNWTCDCGAVHDRDVNAALNIQRAGASALGLGDVRPGSNPAIAV

SEQ ID NO: 30278 - protein, 518 aa, unknown
  TnpB Polypeptide
MSGMMLVRWNYKLLPNRQQDTLMDEWLVTLRKHRNYSLRERELGWNTNNRDGNDPIAYAYGAYCDIEPRIEVGVYCPLTCPILKHGVLADVPLTKTIKEKVDKKTGEIKPSLLEWDSASGIQSKRTTQLRQENAYYARIDSGVLQRNLAKLDAAYSGFWQHKRGFPAYRTLANFNSFEYKPGRVIFKSAPAQDKYSHAYLSGIGWMRYFDSRSFPENASPRTVTIKKEADGWYMSVLLNLPEQLVETTPIEDIKSINGLDVGINKLIASSDGSFVENTKFATSKRVQRRLRIRQRRISRKQKGSKNRADAGKRVAKLHKQIADQRESYQWQAANREVKKADAVAHEDLNIAGMKKRCKPKKVKGRFMPNGQSAKRGLNRAISDASWDQLFQMIAWVAAKAGKPVIKYNPKHTSQECSKCRHVSPENRDGEKFVCENCGHIDHADTQAARTGLQRVGLRFVSTRHKNLPVGCGEVMPVRHGAASNGKRQQARNPKSKAMPETGIIEQLSIFDLIPLETG

SEQ ID NO: 30279 - protein, 289 aa, Ignisphaera sp.
MPRAKTPRLWLTHGYSYRVRDGYVEILGGFRLRIIGWDMRYDAYPNGDAILLFKDGKFILGISKRVLKPAKYIPRGILAVDINERQIVIGNGKIEYRFETAVRRALHYKQLAEGLQKKYSSPKYSAWLRRRGIRDRIRYFHKKARNIVEDWAKKTSHKIASLAKQHLYAVAREDLTNLVESLRKLPKEHRVSLLILSYRRLEQWIDWQCEKNGVPLIVVEPRGTSTTCPMCSSKLIENGYRRLRCSRCGFEADRDTVAVLNIEKRALAQMWGSLTPLNAPQMTDVSPNR

SEQ ID NO: 30280 - protein, 407 aa, Ignisphaera sp.
MRGGEPVVIEALRVRALPEGGYDHLLEFLKLYRDAVQMIVDRIWSLNERLSKRKLHRLFYNNLVSMGFRAHHAKEIYIYAKSLVESARSNGGRKPILRKLSARIDRYDYRLDLDNMTLTLKLHSGYEARLKLVSSSERVGKFRGWRNYEVVVKCDGSGFWVSIYFKRVAKAVKPRTVMSIDLNFDNVTLAVLTLDGGLLKLKRFRTPHRKVLTHRIWVERVQKRYPRSWRFIKGVKKAIDRHGERIRNITWDYAHRVGDMVAKIAIRYRSAIILEDLEKLRENNKKSREFNKRLGLWIYRRIQFCVEYEARERGIEVAKVNPRGTSSKCPRCGKKLAEYRHRVLRCRKCGFVGDRDVIATINLYKKYMSKHSICGVSGVALNAPKPDENPSGVQGNRDEAMKTHELI

SEQ ID NO: 30281 - protein, 282 aa, Okeania sp.
LSLRVNDPRNLKLKPVTKQIGIDLGITSLVTTSDGEKFANPKNLKKLHKKLRLAQKSLSRKTKGSNNYQKARLKVARIHAQIKDSRIDYTHKLTTQLIRENQTVVVEDLAVKNMVKNHKLAKAISDANWGELVRQLEYKAEWYGRQLIKIDRYFPSSKRCSNCGHVVEKLPLNIREWDCPECGTHHDRDINASINILRMGTRVGVRRKGTPTKKAAGLAVSVCGATVRPSGSKSQKAGAMLAQLLRRRKQKAPNSDVKESRAVTQVQRREDVNLYRTPNRIF

SEQ ID NO: 30282 - protein, 411 aa, unknown
  TnpB Polypeptide
MIVQLVEKHIIKKNHSYYDMFCEFTHQSKNLYNHANYLVRKEFVETGKWLRYQQLDKLLRQDFDYPDYTNMPSAQSAQQTLGLLDKNWRSFFKSIKDWSKNKDKYSGKPKLPKYKPKDGQMVLIVTNQQVKQKGNQLKFPKSFDGFTVTLRCVTLPNFEKLNQVRIVPYNQMFCVEIVYSIFVDDTVLQDNGRIMSIDLGLDNLATVVTNTGLQPILVNGKGLKSVNQYYNKRKAYYQRIAKQMNGKPYTNRLYQLTRKRNFKIDDALHKVSRFIVNIALENDITTIVIGNNKNWKQSISLGKQTNQSFVTIPHQKLIDQIVYKAQLQGIRVICIEESYTSGTSFLDGESPVKEFYDKKRRVHRGVFRSNQGVFINADVNAGYQIMKKVFPNAFADGIEGVVLHPVRVTIR

SEQ ID NO: 30283 - protein, 371 aa, Clostridium sp.
MILGNKVRLFPTKEQEQKLWKSVGTARFIYNWTLARQEENYKNGGKFISDNDLRKEITVLKQDKLNWLSGVSNNVAKQAVKDACNAYKKFFKVESDKPRFKSRKKAKPSFYNDTSKLKVKDNAVLIEKIGWITVKKNSIPMNCKYTNPRISFDGKYWFVAVGIEKEQPKLELTNESIGIDVGIKDLAICSNGMTFKNINKTKKVKKLKKILKRKQRQCSRKYEKNRNGKEYVKTENIAKLEKQVKLLHRRLANIRTNHLHQATNEIVKTKPSRVVMETLNIKGMIKNKYLSKEITEQCLYEFKRQIQYKCEFNGIEFVEADKWYPSSKTCSECGHVKTKLSLSERTYICEECGFAIDRDYNASINLSRYSA

SEQ ID NO: 30284 - protein, 384 aa, unknown
  TnpB Polypeptide
MKLIRTVKIKLNMLASEALPTIQAYTKAFNFVCQEGFTKKDKNGVSLHKKTYKVVREYLPSQLAISSRMKATEALISVLTKTKHKKYGSCPVSKSCSVRYDKNSYSLFLNKKEVSLLTVSGRKRFALAIPEYYKEKFATWKHCYADLIIRNNKVYLHIVFEKEVTDVTSTGKLIGIDRGINNLAVISNNKFFGGGIIKKQVRKYQRLRSSLQSKGTASAKRHLKRLSYKERRFRADINHQISKQIINSLNTGDTIVIEELTGIRNKRLRKKQRTLLNNWSYFQLEQFITYKAMTKGIDVKHIDARYTSQRCSKCGFTCRSNRKSQSDFCCKQCGFRLNADLNASRNICNKHLDSYKLSDRADVNRPIVGAMKLSTSHQPRAGGN

SEQ ID NO: 30285 - protein, 375 aa, unknown
  TnpB Polypeptide
MQCNKYSAIIWNNCVKADQESRKEHNKSLTRSELQFMMKKTVPHILANSINIVIFKYITARDTMFRSIKINHENSNKVKLPYKEKEFYNTIWNYQNIRIYKDKGYLTLAKPLLSNNHKQKPMKLHMKFIPDNIVEIELVYRNGLKLLIKTKQENDNVLIQSNNEASIDLGEIHSITSIDNNENAIIITGRKLREIKQLRNKHMGKLKSRRSKCIKGSRQYKKYSRAIKKLVYKTKNKILNLTHKITKLYLDYCIKNNIRKVYYGDLDSCTKNTKKEKRGGKKVHQKLNEWNYGQLTQELINKLSRYGIELVKVKEYYTSKKCPICGTHNKPKGRNYTCDCGYIMHRDVNGAINILNDNSQFNINRYKQLKYLQIT

SEQ ID NO: 30286 - protein, 357 aa, Hydrogenibacillus sp.
LQTVTLRLHLHRPTQAKIRRYRELVERTTAFANNLVAAGRPKGLTSRTARAYLAGDLPSAVINQALRDVAAHRDVKTFRVLWPSFNNQNLRLKKVGDFWTASFPMQTGRVRVPLAVTPKQAALLERLGRDVRQGAAKLYEKRGRWYLALSVTLPAEEKAVEPARDKHDKIAGIDMGLRYLAVVNAGGETLFFPGDQAAYVRRRYHALRRRMGKVKALKAIRKMKDKEARWMKDQDHKISRAIVDWCLARGVSIIRMEKLEGIRRRKTRKRDFGRSLHSWSFYRLQQFIAYKARLAGIRVEWVNPKDTSRTCPRCRHCAKENRNGIRFRCRKCGYEAHADAVGAWNVSFAISGLAEAA

SEQ ID NO: 30287 - protein, 381 aa, Clostridium sp.
MILAKKVRIIPNIEQEQKLWQSVGTARYIYNWTLARQEENHKNGGKFIKDGDLRKDLTILKKSELNWLNEVSNNVAKQAVKDGCNAYKNFFKGLADKPRFKSRRKSKPSFYNDTDKLKVKENLVLIEKVGWIKTVEQIPTDIKYINPRISFDGKFWYISIGIEKEETISENTDISIGVDLGLKDLAIVSNIDKPFKNINKAKEVKRLKKKLKRKQKQVSRKYEDGKIRIGKEGENRYKFTKTNNIKKLERELKLIQRRLSNIRLNHIHQTTTAIVKTKPSRIVVEDLNVKGMLKNKHLSKAIQEQCFHKFISILEYKSKFNGIEFVKADRFYPSSKTCSCCGAIKKDLKLKDRVFVCPSCNAQMDRDKNASINLSRYKKSA

SEQ ID NO: 30288 - protein, 284 aa, Clostridium sp.
MILAKKVRIIPNIEQEQKLWQSVGTARYIYNWTLARQEENHKNGGKFIKDGDLRKELTILKKSELNWLNEVSNNVAKQAVKDGCNAYKNFFKGLADKPRFKSRRKSKPSFYNDTDKLKVKENLVLIEKVGWIKTVEQIPTDIKYINPRISFDGKFWYISIGIEKEETISENTDISIGVDLGLKDLAIVSNIDKPFKNINKAKEVKRLKKKLKRKQKQVSRKYEDGKIRIGKEGENRYKFTKTNNIKKNRKRIKTYSKKAFKYTFKSYSSNNNCNSENQAKQNSC

SEQ ID NO: 30289 - protein, 383 aa, unknown
  TnpB Polypeptide
MEDFRLAANNAIRAGLQSRVTSRNALTRLVYHDFRKEHPNMYAQHLLSAFEVAASILKNHRRKFRNQLSDKIPYVRRLFMKAENQAYKLDRENGIIDLPIRAGLHIQLGLIVSDYHRRYLDDKSLSLGSLTLLPDRVVVAIRKRPPKAYAPESIVSLDTNERSLDGVLVNEDRIEAVVRAEFPDVSVIQSVHHDRRMKLQKKKSHDRRTAKRLCAREGMREHHRIDYRMHEVANAVLSFAEEKKSMIVLENLTGIKPRMGKCMNRRISAWPRRKLHQIIEYKAAWRGIPVVKVDPRYSSRKCPVCGRIQDSRKGTEFVCGCGWHVDRHINASINLLQTAASKKAAGGLRFDPGAFQHDVVTILCGRNAVRSEPNGTSRIKAMT

SEQ ID NO: 30290 - protein, 421 aa, Mitsuokella sp.
MYFLVGFMGYVSTRSRLKEMRNLLKAFKTELRLTERQKDKVRRSLGICRFLANQYIARNIWLYRLYQRGVLDEKQRRFVTANDFDKYVNHVLKKKFPWIDQCGSKARKKILVNAEQAFRRFFKGQAHFPRFKRKNQQNVKLYFPKNNKGDWTIWRHKIQIPTIGKARLKEFGYLPQGVTIKNGHVSYKAGRYYVSVTAEIEEMSRYNNDLEASYHPRSDGIGVDLGVKSLAIVSDGRIFENINRTSRARRLERRLRREQRRLSRKYEMRKKKGGSTATASANIEKKKLSVQRLHQRLANLRRNHENQVIHALVEQKPRFITVEDLNVTGMIKNRHLSKAVSDQRFYSFREKLRRKAEIIGIEVRIADRFYPSSKTCHACGHVHSGLKLKDRVYVCPACGFTEDRDLNAALNLRDTKNYRIA

SEQ ID NO: 30291 - protein, 403 aa, Brevibacillus sp.
LKGGEEMYHYRTINVPVRCSSHDLKYLYGLNKKSAYVWNLCLELATKYSEENDGKWISRNDLQKATKKCIDLHAKGIHYVAHKYLFARDGALQSKKKGILNVKYPWKKKKYFNTGWDSQSIKVDYAKGKIYLSKPDYIDTHDNLRRSKPVVCLSKSLPQNIVQVELKYDKRLYLSIKYKEKASYIQVKSKNTAAIDLGEIHSITSIDNSGNAIIITGRKMRSIKQHRNKQQAKIYKRMSKCKKGSSQRRKYIRAMSKLKVRYENKVNDCVHKISKLYLDYCLENQISTVYYGDLDGVTRSTRKNDKGNTFVRQKLSQWNYGELMNQLKNKLTRYGIKLVKVKEYYTSSKCPACKNINKPIKRNYDCTCGYKQHRDIVGAINILNDNHSTNLTHYTSKKYLQIA

SEQ ID NO: 30292 - protein, 276 aa, Clostridioides sp.
AGFPKFKSKKINRFSYKTNFTNGNIMYCGQHIKLPKLGMVKIRDKQVPQGRILNATISKEPSGRYYVSLCCTDVDIEVFENTNNQIGLDLGIKEFCISSCGEFIENPKYLKKSLNKLAKLQRELSRKTIGSLNRNKARLKVARLQEHIANQRNDFLQKLSTKLIKENDIICIEDLQVKNMIRNRKLSRLISDVSWSEFIRQLEYKANWYGRQIVKVGKFFASSQICNKCGYKNEEVKDLNIREWICPSCNETHDRDINASINILKEGLRLITIQNK

SEQ ID NO: 30293 - protein, 476 aa, unknown
  TnpB Polypeptide
VTGGSSSRWAGAITRTSEDAWQLADRNLRAERATLRCRIKTIEGRLAVPAGTGRNRRRGYATQAERFEKQRRVQALRARLAGVEARIDAGRVSVCRGGTRLAKARHSLPAAGRTMEQWRQEWDAERWFLTADGEAGKLLGNETLRWNPDEGWLEVRLPGPLAHLANRPHGRYRLSCRIEFPYRGDEVATQAATGAVRYDISYDPGRGRWYLDASWRAPARPAPAPGELRAQPVLAVDLNHGHLAAWSVTSDGNPAGPPVTVPLALAGLPASQRDGRIRAAITALITLAREHGCQAIAIENLDFADAREQGRERAGRRPSRGVRARRFRAVVVGLPTARFRDRLIQMTANAGLHVIAVDPAYTSQWGGEHWLAPLRERDKATTGHHAAAVVIGRRAHGHRARRREGVTDGDQRIAARRAAPRAPQATAANRNGGIRNAPRQPPRRRKTVTADRDHPPDQAAHDRSGPPAEPVLTIAQ

SEQ ID NO: 30294 - protein, 324 aa, Cyanobacterium sp.
MLQGVKSRLYPNTEQKKLLEQSFGNYCWLWNSCLNLMNETYKNTGKGLSGYEAKKLIPGLKKEHEWLKLTYSQCLQQVYLNLGVAFNNLFEKGAKDPRFKLKYNKQSIQYTQNITIIEQGLKLPKIGEFKAIIYRPIKGKIKTVTISKNFYNQYFASVLFEDGQEKLESSTDSQAIGIDVGLTHFAITSNSSKYDNPKFLNPYKQNLKRKQKQLSRKQKGSNNHNKARKKVAMIHRKITNCREDFLHKLSRRIVDENQVIVTENLNIEGMIQNHCLAEVTGQVGWGIFTTMLKYKAENEGKVYQEVDRFFPSSNICHVCLTSSL

SEQ ID NO: 30295 - protein, 441 aa, unknown
  TnpB Polypeptide
MTKSEKPKRVRKDRSNILTLSERHVISEDHPFFEECAYLCHLSKNLYNATLYTQRQWFFAGSFKSYPIVNKLFTLENQPDYRALPAKVAQKTQMLVQQNFSSFFALLKKAKKGEYDKPVRLPRYLDKDGYQVIVYEKGALSFKEAGFIKLSQTSIKIKTSIPHEQITNVRIVPKGNHFIIEVLYDVEKPIVDENDFSRVAFIDPGVNNLMTVTSNVFSPILYNGRSAKAINQLYNKDRAKIQSRLPFRKAAVDAPSYRQVNAALKPYQTKTSKLLQGITKNRNYRIHDLFHKITTHLANHLVENDVKVLIFGHNIGQKQDINLGSKTNQNFVFLPFTKLISMLQYKCERLGIRFIVTEESHTSKCSFLDLEFIEHHDDYVGQRVKRGLFKSANGICINADVNGSLNIGRKYLTSVNQYSDQLHSELVAHMSNPRRLNIVLN

SEQ ID NO: 30296 - protein, 356 aa, unknown
  TnpB Polypeptide
MILSKKIMLLPTPEQVILLKKSAGTARWSYNYMLSRNNESDRFINEKTIRKEITLLKKTDEYSWLKEVSANIPKQACKDCQNAYNKMFKGQAGKPNFKKKSFKDSFYVNYESFHKTQNGCHIEKIGSVKTVEQIPILDKYLKPRVVFDNKYWYITFSYEVEDCKEDFSKNRPLGIDLGIKTFVTTSDNQFFDNINKTRYCRLLYKRLKKLNRKLSRCKKGSNNRRKVITQIQITHRKLTNIRRNYIYQITAYLVKTKPSKIVVEYLKVSNMLKNRKLSREISQCGFYEFRRVLEYKCKFYGIGFQLANQFFPSSKICSVCGNKKSDLRLNDRIYECDCCGIKINRDFNAAVNLSRL

SEQ ID NO: 30297 - protein, 345 aa, Haloarcula sp.
MVNSKALQRTVTRFYQNLDGLSEQKQNGNKVGKLKWKSPREFQSMTYSQSGFELKNTSGRHAILWLSKIGDIKIRYHRKIPDEADIKEVTVKKETTGDWFVSFGLETDDAALPEKPALDELDSSNSVGIDLGIFNYVHTSDGKTVDWLDLEDEYERLRREQRKLSRKQKGSNNYEKQRREVAKVKRHIRQKVLDYQHKITTWLVREYDAVFVEDLDVKGMLEQSHNARNKQDAAWRQFITLLDYKADLYGCHVVQVEARGTTKECASCGVETAKSIWVREHSCPSCGFETDRDANAAMNVLQRGFSELGLGWPEETPVETALPTDTPDFQRVSAKRVVETGSLGA

SEQ ID NO: 30298 - protein, 145 aa, Salmonella sp.
VKNLIRNPSLSKATADAGWGELVRQLRYKGEWAGRSVVAIDQFFPSSKRCSCCGFTIKKMPLDVRKWQCPECGADHDRDINAARNIKAAGLAVLACGEPVNPESLNATQVRLRETRILALQGGVRQSEPPHSLTEPPDKNRFRIV

SEQ ID NO: 30299 - protein, 347 aa, unknown
  TnpB Polypeptide
MFTLLKNDNDYKALPTRVSRNVLRTLDGNWRGFFNAIKDWKSNPGKYLGKPNLPKYLPKNGKFNAIFIDTGILKPKNGMFGLSGLKGRFKSKVEFNNIKEVNVKPLPSGKYKLNIIYKYEEKRKLENNGKYCSIDLGLNNLMTLTSNKTSPVLVNGRPLKSINQFYNKMLAKMKSELPKGIYTSKKIKKLTEKRNNKINDWIHKSTIFLVDYCLDNELNTIVLGYNEGWKSGIEMGKRNNQNFVGIPFETIKWYISYKSYMCGLNLITQEESYTSKCSSIDLEPIKRHDEYVGLRVRRGLFRTGVGKLINSDVNGSLNILRKAVPNVEFTNGIEAVAVQPKTIKCFK

SEQ ID NO: 30300 - protein, 361 aa, Escherichia sp.
MQTKTLSVRVKDKHAALLRQMAYEVNQVFNLANEITSKAYSNAGEFGAQVPKWLTAYDVQKQTAGLRKEKGYLIDSASIQEVIAVHSKARKQFKRSKLRWRISSGSKRSLGWIPFKVGFAKWQNGQVKFAGKLFKVWDSYGLSAYKFRAGSFSEDSRGRWYFNVAVDYTAQPTEGVSAVGIDLGLKDYATPSHGEKLVAGKFYRNMQSALGKAQRAHKKARVRAIHAKIKNRRKDALHKFSTALVNSNAAIFVGDVSASKLAKTKMAKSVLDAGWSMLKTQLEYKAIARSVVFQVVNEAYSTQVCSCCGCLPASSPKGRADLEIREWVCCECGTTHDRDVNAAKNILAAGHRRLAVGIPVL

SEQ ID NO: 30301 - protein, 661 aa, unknown
  TnpB Polypeptide
MEYIHHYTFTTGHMRKSYSNEIEKEIRIRVRELIKFERGISCNYTVPFMDGTKLHIVADGSFYSATVMIEAKGEDIVLLTTVGCKDETGLSFAMRAINDAQKDLTGKELVGCHPKLPFIMDILTPFCFVIADWSGDFCRTLAWSIFDDSLFFLFFYIISDNLQKESEILYVENFSHKISHIYHIETKRKFINTMFSRHQKGYNHMAFTVTQRVISSEDTIYSYCDNLCRKAKLLYNAALFRVRNVFTGYEKEHRTENEIGVFEEIAMLQKAYPMIHVRKVISYYHLEKLMRVTDNPDFFAGLPKQTAQQMTKQAVTDFKNWLASLREYKKHPEKYLGKPRMPHYKKQDLATVIITNQDAVLYPEQNGVSLKLPITKERLYFSNISEDAFLKDVKIKPYHGRFLLCLTFEAPEPVIKTSMPNTCAIDFGTDNFAAIVCDDGSSAIYKGGAVLSDTQWFHKQKAKYVSILTRGHKNRYIPSKRLSDLSYRHANFVKDQCHKISRSIIDFCVEHQAGTLILGVNPLWKQNSRIGRVNNQKFVSMPIAFLRTMITYKALNAGIKIVEQEESYTSKADITAKDYIPTYGVDDENAKFSGVRIKRGLYRCADGTILNADCHAAANIMRKTVPDIWDKTTDFSFLANPKVYGFHELNPKSIPVKGIAA

SEQ ID NO: 30302 - protein, 522 aa, unknown
  TnpB Polypeptide
LAKNQTYRAFAVRPSHVLDLSGELLDGASVLASLASEVRDISGYATYVVRNDGTLGDELAYVTATAPAEAGRQAGVTMPDFLSSGRTGRSRKEKLVQYNAVTSYRSYQERVNAANGESSKYVSQGWKRTVDASAPSYGEDYVNLGAVDRAYARIENDPFADGEIVMRMVIQGAWYRLVFEFDNTRFTEGKVALPVIKVENGQPVFIFTVVTDNPVVQFSGDYTIGVDVGINNYATVAVREVETGRIVHETTLSQRVHSLWNSVRASEQQVRDLRKKAATLLHDRQARMSALDEAQLHREAASRKKRELAILAAQEIAYLSHLWGNAVVAVEDLGWIVNTMQNGRWNRGAFVQWLTHYVSQNGGWVVAVNPANTSQQCHTCGSKVTHPTHKDSVCPKHGVMDRDVNAATNIAARAVPRVAKARVTRAKNRKLGPQVPLRTPVARNSLKYPGRDRTKSASTPKRKSCHRTVREVILPISPARAQAPCLAARVLADQGACGVLGTSWAAIEYGNVTYECRLCTLI

SEQ ID NO: 30303 - protein, 437 aa, unknown
  TnpB Polypeptide
MVAGSGRSRKEKLLQYNVVTAYRSYQGRVKVANGQSSKYVSQGWKRTVDASPPSYGEDYVNLGAVDRAYAVIENSPFADGKIIMRMVIQGAWYRLIFDFDNKRFTEGKVTLPIIKVQDGAPVFIFTVVTDNPVVQFSSDYTIGVDVGINSYATVVVRDTKTGRVAHETTLSQRVHSLWNSVRASEQQVRHLWKKAATLLHDRQARMSALDEAKLHREAASRKKRELAILAAQEIAYLSHVWGNAVVAVEDLSWVVNTMRRGRWNRGALVQWLTHYVSQNGGWVVAVDPSNTSQQCYKCGSKVTHPTHEVSVCAEHGAMDRDVNAAANIAARAVPRVAKARVTRAKNRKLRQQAPLKTPVARSSLKYPGRDRTKNGPTPKRKNLCRASREVILPSSPARAQASRLEARVLADRGARGALGTSKAAIEQCCMTCKCMLL

SEQ ID NO: 30304 - protein, 418 aa, unknown
  TnpB Polypeptide
MCSYEAVKVRLDPTPRQERLMASHAGAARFAYNAGLAHVKESLENGEPADWSHYSLLRWWNANKDELAVNSTTGVVWWSQNSKEAYNMALHGLARGLSSWSKSRKGQRKGKRVGFPKFKSKNATMRFAYSTNFTAPTESDPYGLKLPRIGRVHCMENVYKRVDGARLIRITVSRRAGHWYASLTVEREPTVTTVPKGGAVGVDLGVKSLATLSDGTVVPNPRALGTRLKALGKAQQALSRKVKGSARREKAKERVAKLHARVADVRADAINKVTTMIASNYSVVCIEDLNVAGMMKNRHLARSVGDAALGEFRRQLEYKTARNGGVLRVVDRWFPSSKTCSNCGTVKAKLSLSERTFNCDDCGASMGRDLNAAINIEVAGSAPETLNAHGGTVRRGSLSGHVALVPVKCEPSGRRKAP

SEQ ID NO: 30305 - protein, 409 aa, unknown
  TnpB Polypeptide
MKRTNLFNLAPTRKQHRILQGLAVNCAKLWNEVNYLHRQQYSDYLKLDWNPQVYKKYVPQVGSATAQQIVRKNNEAWRAFLALKRMEKNGKLPFTIRPVMPPGYRKRDGRYVLRILFRCDSYHMRNGCVDLPRRLSIPFKGKLKWAGKQGRLEVAWDTLSEKWRVFQSVHVKPIITPLGSKTCYIDMGVRNLATIWLPEWRQPVAYQSGRLLADWWYWTKRIAQHQQRLATVNERRKSKQLSKLYRTRRKRFRHAVAAFARQFIKDIYSQGASTVVIGELTGIRNNSNHGRQGNAMVHNYWSHKYVADRLKWTAEEYGMKIRTVSEAYTSQTCPRCGSRHSLHVLRRFHCLDCGLEAHRDAVGVLNIAARCGEYAVRPMAWPMLLRWDGCGWNRNNGMPTQAKRIRVEA

SEQ ID NO: 30306 - protein, 198 aa, Burkholderia sp.
MAGMILVYRYRVKSLNGLLNKQSRAVNYVWKLPNDRFGRRAAEKLAKAQRARKHKRHIAKLHAKVANARADFQHKLALDLVRRFDYIAVGNVSAAKLAKTRMAKSVYDASWSSFRDKLRYKAIAHGVTFEEVDESGSTQSCSACGSKDSTTRPKGIAGLRMREWACSGCSVVHDRDTNAALNILRCGRASPVVGIARL

SEQ ID NO: 30307 - protein, 301 aa, unknown
  TnpB Polypeptide
LREVDKCALQNSLRHLDRAYQNFFHSVNCGAHVGFPRFKSKRNRHQSYQTNSNIKVFDDCVQLPKLGKVKCRISKEVKGRILSATVSRNPSGKYFVALCCTDVKIDALPSIGAAVGLDMGIKSFAVTSDGMEYPNHKHLAKSEKKLAKLQRQLSRKTKGSNRWEKNRFQVARLHERIANQRQDMLHKLSTDLVHQYGVICIEDLAPKNMVKNHKLAKAIFDASWGEFRRQLIYKANWYGKQVVTIGRFYPSSQLCSVCGAQWLGTKDLAVREWTCPVCGAIHDRDINAAKNILNGGLLLID

SEQ ID NO: 30308 - protein, 456 aa, unknown
  TnpB Polypeptide
MPKLTRAITHIKLAAANDAKVGALDALATQYRTLCQQYVIAFCTDQAPDKFAAPRLPSGLSARWQRVAIQQAAGIAASWRSNRARAYAAYQEAVAEYASHPAEQLPLLPPGCTSRVRCSAGETDVTYPDGSTATYRTPLQWREPHVPELQQPVIQANTNVAKLEPSTDTSFDYWLRVSTLERGRPVWLPVKLAAYHRAALAGQAPNTSTTLTRQPDGWWLTLTIDEEVAPTAGAAAPVVGVDVGIVSFLTTSTGQQYGTFHGQLAARHKRDRARRRRKAKLRACLRKKGVTKLPSPQNKRLARHVRQSINRAVNAFYADHPGCQVAYEQLAVATMRFKARAMNAYLYAANLGHIPDQLEWGARKRGVRATGVKSAYSSQECSRCHYTERANRPTQQTFCCGVCGLELNADANAARNIAARLSDKELAGCGDRAAIKTLLLARHQAYLTGVSTPGCP

SEQ ID NO: 30309 - protein, 275 aa, unknown
  TnpB Polypeptide
VIPDDPEETPIGETYLLNEDYEFRMSTLQYDRSTESFYLHAKMRRTERDEKEQSTTTFDDAKHRTVLGVDLNVDGSLAVTSTGVFIGNADEMNHRRREFEKTRGSMHQTGTRSAHLSIQSMNDREHRWMQDELHRASNRILEEAHEHDCTHIAFENLTDIRKRMAGAKRFHAWAFRRLYQYVEYKAEMIGIEVEQVSPAYTSQRCSSCGFTHETNRQSKHQFVCQKCEYELNADYNASKNIGHKLLQTPPLGAEVFERRRTLSVCAEVRDIEPEW

SEQ ID NO: 30310 - protein, 353 aa, unknown
  TnpB Polypeptide
MIQAQLKLRLNNIQEARLVGWLWNLTSVWNWAIRKIELDAKDKIYYTPKDLQNLLANHGEKLKIPSHTLQGILLQAHTAWVRCFKKIAKEPRFKGVRNKLNSIPFPDPIKLPKGNHIGIPGLGKVRFHKQELPEGKIKCGRIVRRASGWYLCLFIAADRKPIERKDSGKIGIDPGFRHLLTIAALDGQWKKVEHPRELEATESRLAQAQRGQNKALTARLHERRTNQVKDRNHKLSLRLVQENVVIRFSNDNHKGIARKFGKSVSSSSHYQLRQMLVYKSRSGGTQYDEPDSKFSTKTCSDCGSPSGPTGWSGLAVRQWRCSDCGSLHDRDVNAARNTLFAGVGTTHEEACHV

SEQ ID NO: 30311 - protein, 382 aa, unknown
  TnpB Polypeptide
MLKAYKYRIYPNQKQKELLSRIFGQVRFVYNLGLETKITAYTGNKQHLSCFDLNKQITELKKECKWLKESPSQALQSSIRNLDVAYTNFFRGAGFPKFKNKYRKQSFQLPQGVFLSENKKQVFIPKLKLVDIDLHREFKGDIKTVTVSKSVTNKYYINILVETYIPKPEKKPIKLETTVGIDLGIKDFAITSDGKKFKNHDFFKSSMKKLRIQHRSLSRKQKGSNHYLEQKMKLSLHHEHIKNQRQDYLHKISKYLVDNYDTICIENLGVSNMVKNHNLARAISDMGWGEFRSMLEYKCEWYGKNLSIIGRFDPSSKTCSSCGSINKELTLKDRNWKCNSCRTEHDRDINAAINIRNFGLRNQPSVTQSGWLHRACDVEITL

SEQ ID NO: 30312 - protein, 417 aa, unknown
  TnpB Polypeptide
MYYTYRYRLKPTDAHRQQLDYWRDTCRQLYNHALKEFSEIPNSEGTLNQRVRQVRDQLTDLKDWWDDLNDLYSTVAQAAVMRIEDSVNALSELKKNGYKVGSLNWKAPQEFRSFAYVQSGFEFNSKDGQTVLSLSKLADIPVVQHQEVPDDESIKEVTLKKEPTGEWFACVTVDDKETPEKSDNPERCVGIDVGILKYAHDSDGRAVGSLDLSQERDRLHREQRKLSRKQHGSANWEQQRQKVAECHQRIKRKRRDFLHKLSNYYATEYDLVAVEDLDIKSMLESSGNSRNTASAAWDTFTTLLEYKCDLEGTHFVEVDPAGTTKECASCGVATDKPLWVREHSCPACGFEMDRDANAALNILSRGLDEVGVGYSEGTPVETALPMFRSSESSDVVDVKRVVETGSPTLKKAAVAAE

SEQ ID NO: 30313 - protein, 395 aa, unknown
  TnpB Polypeptide
  misc_feature (276)..(282): Xaa can be any naturally occurring amino acid
MLEVHRTHRAKIRNHSQVAESLDRHGWSASKLWNVANYHSRQVWEETGEIPDHEELKDELKTHSKYKGLHSQSSQRVLEELAEAFNSWYSSDDERDNPPGYRKRNYYDNKDRRVHEEPPRSTVTWKQNGICHDIKNNRVRLSKGANHKEHPKAWEYILVEYETRPGVEVENLQQVRAVYDSANERWELHLVCKDEIETPTAPGNETAGIDLGVSNFAAVAYSTEDADLYPGNRLKQDGYYFPKEIAKCDDSGGDRATRLHKKWSERRTHFFHSLGXXXXXXXRQPRSRKHRRPSIGRPTSAKRLLSSGDTTPHSRRGQCRSSKRYCTAPCWISCCSAGGSTLTDSTVSLESTTLGITHRVRLMTWMTPRPAPIPSTDGNHNGHAPFTVPCQYDRR

SEQ ID NO: 30314 - protein, 252 aa, unknown
  TnpB Polypeptide
  misc_feature (19)..(87): Xaa can be any naturally occurring amino acid
LISSRHNIPAPSCSSITNXXXXXXXXXXXXXXXXXXXXXXXXXXXXXXXXXXXXXXXXXXXXXXXXXXXXXXXXXXXXXXXXXXXXXLTIQSIGDIFANWSEDFLHHVSKELVKEAVSQDCTTIVFEDLETIRDRISSASKFQQWAFNGLKRQVTYKANAEGITIETVRPGYTSQRCSETNCGFTHDDNRDGDVFVCQKCGKESHSDYNAARNIAHKYIQNRRKSGSGGATYHLALKSGTVNGNGDYSPSTV

SEQ ID NO: 30315 - protein, 282 aa, unknown
  TnpB Polypeptide
MKSSRYAADYILCEYTLHTADRTLEDVESVQTVRAVWTSDEWELHFVCKLRVETPDAPGEKTAGVDLGIANTAAVSVGDATLLYPGNALKEDAHYFRQREYDTEGENGPSQKAQWARQKKARRQQHFLHAVSRDIVEQCATRDVGTIAVGHPKHIREDENWGRHGNKRLHDWAFTTLIDYIEYKAEERGIGVERVAEGKLKTSKTCCACDVEADAHRVERGLYVCDECELVANADCNAAENMRATVTPSPSQDRSNGCLAQPSVRLFDTSTGRVGPQEQVAP

SEQ ID NO: 30316 - protein, 320 aa, unknown
  TnpB Polypeptide
MLYVHCKMDVEFDTSAQEQVSTESGTVLKIDLGVNNLAVVSTGTVWTGNEFDRWRQEYENRRGDLQQCGTWWAHENAQSVGHKQESRYKITLYPISNELVAEAREYGYSLIAFEDLTDIRERTGVSWGDKWAFNRLYQYVEYKAEGYGLTIEQVAPANTSRRCSECGFTYPANRESELFECLKCSYENHADYNASKNIGLRYLRRNQTRGDEGAPAVVQLNSGMVTVNGEYEPPVEVSVGAEVHAESPPVQKWVSLPGWHNTECTHDCNYVGGKTGPAQIRTAVTATRRPKDTKLPHRPVFRQRIVACLTVLFADLVGTV

SEQ ID NO: 30317 - protein, 440 aa, unknown
  TnpB Polypeptide
  misc_feature (354)..(392): Xaa can be any naturally occurring amino acid
  misc_feature (427)..(431): Xaa can be any naturally occurring amino acid
MLRAYRFRSYPDRSQTETLNHHLWLSKELWNRMLDYSKSKYKRDGKFASKKELREMVKHQGLYSQVAQELVDRLVDATWRFVRMKKACEECGFPRFKSFGRMKSLCYPQMGFRLMGNCLKVTLFGEVKLKLHRPIKGKIKTLVLKRESSGKWFAIFTAEEAEQIHQINHGAKVGIDFGLSKLAVVSDGSVIANPRHIKKHEEKIAVLGRQLSKKKKGSHNRVKAKVKLARAYEKLANSRLDFLHKTSSSLVRKYSMISLENLNIKGMTQEKFGKQINDAGRGMLASMLCYKTESAGCRIVFVNPEGTTQQCSRCGIVVPKTLADRVHNCPGCGLVLDRDLNAAHNILKRSTVGXXXXXXXXXXXXXXXXXXXXXXXXXXXXXXXXXXXXXXXKTKLSIASIKTGIPNAASRKALCLAAAKAMTSTNXXXXXKDVPSKAIS

SEQ ID NO: 30318 - protein, 353 aa, unknown
  TnpB Polypeptide
MLRAYRFRSYPDRSQTETLNHHLWLSKELWNRMLDYSKSKYKRDGKFASKKELREMVKHQGLYSQVAQELVDRLVDATWRFVRMKKACEECGFPRFKSFGRMKSLCYPQMGFRLMGNCLKVTLFGEVKLKLHRPIKGKIKTLVLKRESSGKWFAIFTAEEAEQIHQINHGAKVGIDFGLSKLAVVSDGSVIANPRHIKKHEEKIAVLGRQLSKKKKGSHNRVKAKVKLARAYEKLANSRLDFLHKTSSSLVRKYSMISLENLNIKGMTQEKFGKQINDAGRGMLASMLCYKTESAGCRIVFVNPEGTTQQCSRCGIVVPKTLADRVHNCPGCGLVLDRDLNAAHNILKRSTVG

SEQ ID NO: 30319 - protein, 404 aa, unknown
  TnpB Polypeptide
MYLTARAKIPQYSELKEAGNLCTKIWNKANYYCREQWKNTGKIPSYYELQRMFKDDFWCRKVHSHTAQAVLHKVSEAYGSWFTLRKTDVTANPPMFRKKNGISTITFTKFAVKVENDRIRLTLRKGAYLWITYQLQPKVEITQENIVRIEVTKGFANIVYKVDEPPLKKEGCVMAIDLGIINAAATVKENGEAKIYTGKGLLSTQRYFNKEVARVQSVVMKQSKGKKKWSRKLSELARKKRRQIKHALHAQTKAIVEDCVKSSVSVVVVGDLKNIRKQRSDTKNPKKLAGARSLGRKTNQKFHAWSFKQFTDTLQYKLRLKGIQLVSVNEKSTSKTCSKCGNMRKRNRKTRGSYVCNKCGYKINADVNAAINILKKYLQPLGRSSANVGLAKVIRWDGNILFEP

SEQ ID NO: 30320 - protein, 519 aa, Phormidium sp.
MPRQNRTKTPSFILEIPLTVSDKDAGVLSSRFEASRQVYNACLGEAMRRQKLVKQSKKCQEARSLKKGKARTAAFREANLAYGYSEYDLHSYCTTIRNSWIGEHIDSNTAQKLATRAFNTSAKVAFGQAKKVRFKGKNQLDSLEGKTNKTGIRWVNETLVWGNLQLKPYLTTYDPVITHGLKSRVKYVRLVRRRINSKTLYYAQLICEGKPFQKPKNQIGQGIVGLDIGPSTIAIVGDDSARLTLFASELKFVEKKIRQLQRKMERARRANNPNNYNPDFVNKKGKKKKGTVKKGCKQWNNSKTYLQTRTSKANLERELAAHRKSLHGKLVNEILSLGDTVKLEKLSYKSFQKLFGKSVGKRAPGEFVSHLKRKAESAGATVIEFSTQTTKLSQTCHQCGIAKKKNLSDRIHQCDCGIYCQRDLYSAFLAKFVDENELLQANQARDAWLGSEPILYAAWRQATQTNLRLEGRVPSSFGKFPESEPVAAKVQNVDAKDLDVVPNWESQVEASSHFEPPCL

SEQ ID NO: 30321 - protein, 487 aa, Streptomyces sp.
VVQAFRFALDPNAGQEQALRSHCGAARAAYNWAVAWVTASWRQRGAEKTYGIPEGELTPWRPWSLPSLRKAFNEAKKTDPRFADWWEENSKEAYGTGLSNAAAAFDNYTGSKNGKRRGRRMGAPRFKAKRKARPACRFTTGTIRVEDGRHVTLPRLGTIRTHEPTVNLLARVRTGTARVLSATVRHERGRWFVSFQAEVKRELVRVTRPEAAVGVDLGVRFLAVLADSAGEIRTVPNPRHYDQALKLLRRASPAVSRRRGPDRRTGRKASRRWERADAARNKVHHRVANLRADALHKLTSALAAEYGTIVIEDLNVAGMLRNRRLARRIADAGFGEIRRQLTYKTRRRHGTRLIMADRWYPSSKTCSGCGAVKAKLPLHIRTYECDLCGLVIDRDDNAGLNLVALAATGTNGTGVAGDRDTPAVSKPRGADQKTRITRPVARRRRGGQAARSLPRAGRKRETVPEPKPSRSGDETDLPGSDARNAET

SEQ ID NO: 30322 - protein, 501 aa, unknown
  TnpB Polypeptide
VPYAAFDKNGGPLNLSEVLDGIRQDAELVAHYALQEMTEQNLALVTYFDGIKPADAGRQMRLFLPAEVKKRFKSGASRLEKMFQEQVVTNLRSWVTRVEVMAQTYPGYVSEGWKRTASKSKPASLKPRLALSATDKGYHKNFSVTPERISLDMVVQGKWVTLHFPTPPQLLEVGCEPGAPDIWVDKNDRVVFGFHGKTDPGRPEFSERYVIGVDVGVKNPAAYVVWDTEKKEIVERSLLGQRARSLNNKIKRTQTQVTSLQKKNRSEESVSHREHLSNRRLELSILIAQELADVSWRYGNAIVSFEDLSHIKNTMKHGRWFRGEVHRRTRDMVEADGGRVMKVSAAYTSQRCHVCGENLNMSDYSQPRCDTCGINHHRDLNAAANIAQRANVKKACETRKKHATKTKRVRRSKCHSKPLKHPGTKNRPTPKAPQNRPKTKTHTLTYPPLSKKEVSKRMCPAESRVSAVDHRGDSGFQTISGTTVPKENQFTSTVDRVYPKE

SEQ ID NO: 30323 - protein, 385 aa, unknown
  TnpB Polypeptide
MRAYKTEINPTTEQKRIIHQTLGVCRFIYNFYLGHNKEVYEKEKRFVSGMDFSKWLNNEFIPNNQDYKWIKEVSTKAVKQAIMNGEKAFKRFFKGESKFPKFKKKKRNNIKAYFPKNNTTDWSINRHRLKIPTLGFVQLKEKGYIPTNSEVTSGTVSYEAGRYYVSVLIKEEVKQNNLPYSESIGIDLGIKEFAVISNDIQYKNINKTKKAKKLEKKLKREQRRLSKKYENKKKKGGNATTSAKNINKQILIVQKLHQNLKNIRQNFVNQIVSELVKIKPKSITIEDLNIKGMMKNKHLSKAIAQQNFYYFRTKLENKCKQNGIELRVVSKWYPSSKTCACCGNIKKDLQLSERIYICEECGYEKDRDLNAAINLKNAKEYTIAC

SEQ ID NO: 30324 - protein, 471 aa, unknown
  TnpB Polypeptide
MSTLTKTIKQYSFPFEKTKDFNFESLEKLGYEFRDTKNFFYSRFSGISYINKLKDKYTIRDGIIKENLKNISKIPARYWKICLSHVLGNIKTLLENIKKLIKKATYNNSNLSDKDRHYIYTVLKSSEYLENVLRRKKLSDYLYDKFKINHKKLNNLIRRYFRRYKNKIPYSKKNNFLILDSGLYQYKDGFLKISTLNKSKRIKFKMKDERVFKGNIIIKWNSCLTVFGTKKFESKTIFETENSIAIDKGYKKLIATDKNTFYGTEYSSLNKMLIDKQVEKLKNRNRLFQIAQRHKEKGNSKKAKNIFKNNLGRIKQNRFSKKIRKRSENYINKEVNNFFEKEKPTEIIKEDLTWETYKNKKKKGFINQMERWEKGILDRSIEWNALQKNIKITDINPAYTSQICHICNNFGTRNGENFTCQCCQNKMDADVNAAHNIRKRKDIKEIDLYTNTKKVKQYYENLKKGEAAFNI

SEQ ID NO: 30325 - protein, 378 aa, unknown
  TnpB Polypeptide
MSLGCEGLLTLTIKMRVSPEPSPHQKLMNLMRRYMEGLNHAIRIIVENKALSLGKAHKLLYGVLKERYGLPSKIAIDCYREAIAIAKSWLSNPNRGRVPRTKTLRIWLTNRCSYRVRDGCVEVLGGYKLRIIGWDRRYDNYLSGDATLLFKDGKFILEISKRVPKPVKYVARGVLAVDVNEKHIVVGNSKTEHRFKTAIRRALHYKQLAENLQKRYSSARYSAWVRRRGVRERIRYFHRKARNITEDWAKKVSHKIAFLAKQHQYTVAREDLTNLVNSLRKLPKEHRVSLLILSYRRLEQWIDWQCEKNGVPIIVVEPRGTSSTCPICGSKLVEKGYRRLRCPRCGFKADRDTVAVMNIERIAISKMGDLWPPRLPRK

SEQ ID NO: 30326 - protein, 419 aa, Okeania sp.
MAVLEYICSQANKLTNCGIYYCRQMVFKAGSFLTRATLDKELKSNIHFKAMGSACAQQTLHSVIESFDSYKNLWKLYKEEKLHFRPKPPSYRKKGGMAVVSYPARWVKLVDESLKFPLGNQVKAWFGINHFILPMPSNLDFNSIKEYRIVPRNGCFYIEFVYKQQEIESVKVNNNVLGIDPGVNNWITGVSNTGKSFIIDGKKVKSQNHWYNKQVAKIKTRKPQDYWNEELAELTEKRNRQMRDNINKAARFIINWCLVNDISNIVFGWNKFNKDGINIGKKNNQEFVQIPTARLKERISQLCEQYGINFIETEESYTSQASFLDDDFLPKYGEKPERWKASGKRVRRGLYRSCDGSLINADAHGAANIIRKVKTQLNLDLTKVIRAVLTLPKRYFLDSLSRQYRKRCEGGLNPLTIFA

SEQ ID NO: 30327 - protein, 287 aa, Moorea sp.
VKLFNDPPGFIYPNLDYTQAWSFDYGETNWLTGVSTRGKSLIIDGRKLKAMNQGYCRLVAKCKQGKSQFYWDSNLDQLQSKHNNQIRDAVNKAARFIVNQCLNDRVGNLVIGWNEGQKNGSLLGKRNHQNFFVIATGRLIQRLKELCPQYGITITITEEAYTSQASFLDGDSLPKQGEKPEGWKASGKRVKRGLYRSRNGQIINADCNGAANIARKVATQLKLNLAEVGRASLTVPQRIDLFSRLNKSYRKRCYGSRRTHSKNSLESPVFPTRGDVNSSNAFEQTLY

SEQ ID NO: 30328 - protein, 240 aa, Moorea sp.
PNLDYTQAWSFDYGETNWLTGVSTRGKSLIIDGRKLKAMNQGYCRLVAKCKQGKSQFYWDSNLDQLQSKHNNQIRDAVNKAARFIVNQCLNDRVGNLVIGWNEGQKNGSLLGKRNHQNFFVIATGRLIQRLKELCPQYGITITITEEAYTSQASFLDGDSLPKQGEKPEGWKASGKRVKRGLYRSRNGQIINADCNGAANIARKVATQLKLNLAEVGRASLTVPQRIDLFSRLNKSYRKR

SEQ ID NO: 30329 - protein, 198 aa, unknown
  TnpB Polypeptide
MLLFSLSYFYNKEIARVQSQWDRIQAVRKMEYLKTSKHLQKLYRKKNDCIKDYIHKMTRYITNYYVKNDIHTVVIGDIKGIRKERNLGRKTNQKLHSLPYARIYMQLEYKLKMKGICLIRQEESYSSQCSPQSEEVSRIYAEKRNRKKRGIYIVDTVIYNADAVGAYNILRKYHAVSGKEIDMPVTGLSSTKTIKVAV

SEQ ID NO: 30330 - protein, 154 aa, unknown
  TnpB Polypeptide
IVAVAVQRRQVIVLESIQGIRALYRKGNGQARKYRGRMNGWSFSEAKRQLEYKARWVGLPVIRLSRREPRGSSVTCPRCGKRLLWDKRLERKLWCAKCRIVMDRARRGRVRFARSWSPIVREAQGRTVGAVKGNPTPTVIPGVDAPKLAHQTKS

SEQ ID NO: 30331 - protein, 483 aa, Peptostreptococcaceae sp.
MLVGLLLEVGMAIVYRTAQISIKKGHKLYGYFDDLLIKSKNLFNTSNYYIRQLLTYFDKCLPSSNEKEALNYINGNIDALNAQRLKKYLKKVENGSTKGKFKTFAPVSKEQPLTYELLDGVFKVSKHPDYYGLPAQLNQGVMKLVFRNWKSFWKSISDYHKHPHKYNARPKIPGYSKNPNKSMLILTNQICKLKGKYLRFPKTNLTLNVGKYYSDIGTLKEVRVVPKKDILILEVVYAVEIDVVPLNPNNIASIDIGVNNLVTMINNVGGRPIIVKGSIVKSINQYYNKTKAQYTSTLRSGKNHKQGTFQTKRLSKLDRARHLKIKDYFHKTSYQIVWECKKHNIGTLIIGKNDQFKKNVNLQKKDKQNFIHIPFVMLINMIRYKAEASGIQVIVHEESYTSKASFLDNDPIPTYGDAFEGRFSGKRIKRGMYKTKEGHLINADVNAAYNIMRKVVPNALSEIRDRGVGLRAIMSTPLVLEIA

SEQ ID NO: 30332 - protein, 315 aa, unknown
  TnpB Polypeptide
MAEMKKTEAYAFLREVDSVALQQSLRHLDTAFQNFFKQPKTGFPKFKSKKQNKKSYSTICINGNIAILNGYLKLPKAGQVRLKQHRAVPKEYKLKSVTVSQTPGGKYYASILFEYENQVQEKEMRRFLGLDFSMHELYRDSNGNEPAYPKYYRNAEEKLAREQRRLSKMQKGSNNRSRQRIKVAKLHEKVSSQRKDFLHKLSRQTADAYDCVCIESLDMKAMSQMLNFGKSVSDNGWGMFTGFLKYKLEEQGKKLVKVDKFFASSQICSVCGYRNAETKNLAVREWDCPQCGTHHDRDVNAAVNIRNEGMRLVVA

SEQ ID NO: 30333 - protein, 447 aa, unknown
  TnpB Polypeptide
MKRKFTVVTELRKSQNMELIAYLNLCFADYGKAKRETFHKIKNSNRFDKSEHNTFLQTKYDVLKRTANSVISDAQMIFDSVKELKKAEQKKWERKIPAMEKKVEKLEGKLEEKKVLLRQGKHVPLRSYINMKKQLVRMKKDLNRWNQKVDYLGYQIETNKFKVCFGTKALLRKDKRAFIAQRDSQLSFVGCKTESAGNQLFQLSYDNRTNQFQIQLRKDWGGHKNSKDKYVYGKCHFSYYKNKIIEILKKHTSPLSYKVIRKNGRYFLHCTFEIEVKSEEVLTRKNHGVIGLDFNKGFVTLSETNEYGHLIRTDKFIYRFGQNQKTRTDLEQIASKVKNLALETGKDVIIEGLNFQSTKAKTIAKQGKQGRKYNHMLHTLAYSKFVSIVDNCCYRNQVNLIKVNPAWTSWIASHKFCHPMKLNVHIGASYVIARRGQGFYNRVNTAA

SEQ ID NO: 30334 - protein, 386 aa, unknown
  TnpB Polypeptide
MKIFRAYKTELDPNNNQRAIFARCCGASRYVYNWGLAEWKRQYENGEKPSGYGLCKQFNAQKDNICPWIRDLPYAVVESSFANLGTAFENFFRRIKNKATKPGYPKFKKRGVKNGFQVRNTKIDSNQVRLTGAGWVRLKERNYIPINADKYGVYATISERAGRWFISIMCEIDIPDPAPRLGNPLGIDVGIKSLAVLSDGTIFENPRALDQMQRKLKCLQRELARRKTGSKNRNKTKAKIAKIYAKIVNVRQNATHNVSHKIINHTDADTIVLENLNISGMVKNHHIAQALMDASVSELHRQIDYKAGWAGVEVIRADRFYPSSKTCSSCGSIKPQLSLSEREFVCSDCGIVIDRDLNAAINLAALSEPLNGRGLPRELECNNAPQ

SEQ ID NO: 30335 - protein, 483 aa, Fervidicola sp.
MITIQASLSFDSNEDKQEVLDIMRRWSSCTRFAYNRLLEGKSRNELKRELQEIFSLNSRYVDDAIMKAKSVLESCKERGENPGKVIFGGRSLFEKLKKQHINGNAYKKLQHEWQERRKGNLYSRGDKSKKGNLNTRIEIDEYGTRLRINVGERKYAYARIQAGWKKGKSREELLEAISTCGQPYSVELKLKNGKVYAYFTIEENFPEVAITKESGIVGIDINAYPDHIAWSETDENGNLASYGRVPMPELTSGNSNKREYYRWRYAHEVVRLAEEKKKAIAIERLDIREKGKRGDFSGRKSRRIRHSFSYRSLLEKIKVLAKRKGIQVIEVNPAYTSVIGMLKYAPQYMISKDVAAAYVIARRGLGLKEQIPEGYMAILKELDADELEELKEHVKRTVKNKQLKKRQLKEIDEAIKLIQSLGSEPGRGPRPLDGTSLGTCGSGHNLWRVLKVAVVTPLSPERVLRDVSVLKGVLHSGQVGRPG

SEQ ID NO: 30336 - protein, 358 aa, unknown
  TnpB Polypeptide
MKAEKTVVCRITEPNKNKLKKLEREYNKVQRYIKGQDIDIYSATQQAVDKYTDFNSLKKDKEYPWHLRNDTFTAEKAENTKRFNYWAKIPIAEKHGKITVPIKPHTEITKEMKIHDSKIIKKEYGFELHLSVSKEVEPIKTYKGAIGIDMGLNKLAVSVSLPDRQTHCHGTHIGNIQAKYYFLRRNCSNGYVRKKWDNKDKNKIKDICHQTSRKIVNKAKQNNLIIVLGKLKGIQNQNKGRKMNRKLHNFPHWKLRNYIKYKAKWEGIPVIEVSEVYTSQKCSRCKKIGKRHKGEFKCSNCGLKTDADKNAAHNIAKRGIGKSLKTSSDTRSWKSKDLHTMQNQILCVEPRDMAQSKY

SEQ ID NO: 30337 - protein, 418 aa, Clostridioides sp.
MYLTQSNQIRGLNKEQYKVIKEMCWASKNLYNVALYNIRQYYFQEKKFLNYEANYYYCKVNENYKLLQDGVSQQILKVADRSFKSFLNLIKKAKRGEYRFQDIKLPKYLAKNELFILILSTNVINIKNGYINIPFSRDMKKKYPNMEIKIKFPKRLEGKKIKEIRILPQNNGTYFKIQYVYEHSINDLGLNKDNCLAIDVGLENLATCVDNNGTSFIVDGRKLKSINHYYNKLKSKKQSILDKQNYKYSKSMYRLIQKRNNKANDYIKKSARMIIDYCIENNIGTVIVGYNADYKININPEKASKQQFTQISLGALREQVENLCSQYGISYVEQEESYTSKASFLDNDNIPTFDPHSTNEYKFSGRRIKRGLYKSAEGLIINSDVNGALNIMKKSKQNIDFNKLSIGFLASPIRLRVI

SEQ ID NO: 30338 - protein, 427 aa, Streptomyces sp.
MKADVGRKYRAYPTEEQESVLTRWGHTGRALWNVALEQRVYLYQQRGYTLRSVEQCKHLTAARADLAWMGDLPAQAGQQILRHLDRAYDNFWNPAHPAKLPARKKRGHRLSIPFPGQAVEIRRINRKWAEVRVPKLGWLRLRHSRTLGGTIRNTTLSRDGNGWHVSFGVHTGRTPDAPNGKPACGVDFGVAASAFVSTEATPRFMPPSLSKNEKQRLTFLEQKKARQVTYCKKHNGGKYSRRLRRTIGQIGKLKTRQANRRQDFTHKLTTDLAKNHGMVGIEDLRVKYMTASARGTMEKPGKSVRQKAGLNRSILDNASGERRRQLAYKTRMYGSVLVAVPPFHTSQTCAACGRVDPESRKGCGRLFACVHCGHEDNADHNASVEIEARARRTGGTVTNSTRSTPRVRVPATGRRRMCEAPKPARTS

SEQ ID NO: 30339 - protein, 420 aa, Fischerella sp.
  misc_feature (29)..(115): Xaa can be any naturally occurring amino acid
  misc_feature (310)..(415): Xaa can be any naturally occurring amino acid
MDYLIFVNQYPIKLSQLLLRTLARLLATXXXXXXXXXXXXXXXXXXXXXXXXXXXXXXXXXXXXXXXXXXXXXXXXXXXXXXXXXXXXXXXXXXXXXXXXXXXXXXXXXXXXXXXAVSDKGIYHTILGEVIFKEALPQSFGDCRLVKAYGDYYLTVPEEVSRQQSENQGRVVALDPGIRTFITFFSESSFGEIGISANIQIQKLCFRLDKVISKIAKAKCKSKRRLKLAATRLRGKIKNLVDELHKKTARFLVDNFDVILLPTFETSRISKKAKRRIRSKSVRQMLTLSHYRFKQFLKHKAFETSKVVMXXXXXXXXXXXXXXXXXXXXXXXXXXXXXXXXXXXXXXXXXXXXXXXXXXXXXXXXXXXXXXXXXXXXXXXXXXXXXXXXXXXXXXXXXXXXXXXXXXXXXXXXXXRECIC

SEQ ID NO: 30340 - protein, 265 aa, unknown
  TnpB Polypeptide
LQNTNKIHILLIIRQLTNIQIKTCALNRRIRSRAQVEVEDLEKTNLSVGIDLGLKDFVITSDNDRYSSNKFIKKYSKKLSTMQKHLSRKKKGSGSWNRLHIKVARLQEKIMSCRKDKLHKISIDLIRRYDVVCCENLNVKGMVRNRHLAKSVSDASWSTFVTMLEYKAKWYGKTLVKIGRFYPSSKTCHHCGHVKEDLSLSDRYYTCPNCGELIDRDLNAAKNILDEGLRKISAGTVDYTDGEGVRLVYKHSLMKSESHKSLACG

SEQ ID NO: 30341 - protein, 411 aa, unknown
  TnpB Polypeptide
MMKRLQAYKFELKPNGEQTLKMRQFAGCCRFVSNKALAFQQAQYAADNRSKFSYVALANLLPSWKQENNWLADAPSQALQQALKNLERAYMNFFEKRADFPRYKKRGQQDSFRYPQGFTLDNANGRIKLPKLGWVRYRKSRDVLGVVRNVTISFSAGKWFVSIQTAREVEQPLPNSTGAVGIDVGIARLATLSDGSVIEPINSYQQHQHRLARYQRAMSRKVKFSSNWKKAKARLQKYHTRIAHIRRDYLHKATTTISKNHAMVCIEDLQVSNMSRSAKGNKEAPGKNVRAKAGLNRSILDQGWGEFRRQLEYKLTWQGGQLVAVNPRNTSRTCPSCGCVSAENRQTQARFACVECGFEENADLVGAINILALGHLKAAGHAVLACGGTVQSGRPVKQEPTEVTRLELAHA

SEQ ID NO: 30342 - protein, 426 aa, unknown
  TnpB Polypeptide
MMVTMTAKLKLMTTPEQFQALRQTQLAYRDALNFVSRYAFEHGKMSNKVRLQDGTYREIRARYGIPAQMACSIPRQVGGTYKGLWTKVKKNAAVRAAGLTRKRYKGLDAAPKYVSPTLEYQMGHDYGFKTGQQVSILTICGRVDISYTGYHQHMGLIQHGTHIGAAKLWYDKPKKQFYLLVSLDVEVANPTPESQTSVIGVDVGMRYLAVTATPQGSQSFHSGKRIVPKANHYARLRKRLQQKGTRSATRRLVIIGGRERRLKADANHVVSRRIVNAHPHALIALEDLTDIRDRTKRKRGKQASRKQRKANAAYSKWAFAELHTMIAYKALLYESMAIKMDARYTSLHESSLPNVWAYLAAQSPEQGLAVCLSILSLYAPCGFDWCKEYRLANGAGSAGLGQHGCLVSTPRCVGRRSQSTAATTLQ

SEQ ID NO: 30343 - protein, 445 aa, unknown
  TnpB Polypeptide
MVQTLQQNLKNLDADEYEVLRSMCHLSKNLYNKTLYEVRQHYFDNGEYLNYYDAYDQLKTNWNYEVLPSQVAQQTMKQVDRGFKSFFNLAEKKRENKYDADISPPSYLDEDGFYTLEFPSQSFQVKEDHIRLGIPYSYRDEFDCELTEIKIPFTYEEVQAANVKRVQILPKADAQYFEYRVLYEQDVAEIETIDGSWLGIDLGVDNLAACCDWRGRSFIVDGQHLKSLNRHYNKRIAHYQSIKDKQGIDGTTRRIGKLHQNRRYAITDYLNKTVRLIIDYCIENQIETVYVGDGKGWKQNVNLGDKTNQNFVHIPFDKLKQKLKHKLKAHSITFELVPESHTSKCSFYDEEPVEHHDEYVGKRVERGLFEASDGTRYNADVNGAVNMARKITGKPNTELFSSVEGLKRAVDAPQRISLSDLEQSQTLQEPSLEAPPSRKQPKAAE

SEQ ID NO: 30344 - protein, 227 aa, Clostridioides sp.
VIAVKKAYKFRMYPNKKQQELINKTFGCCRFVYNKYLAKRIDVYKNDKETFTYKQCSSDLTNLKKELKWLKEPDKFSLQNALKDLDNAYKKFFKEKAGFPKFKSKKINRFSYKTNFTNGNIMYCGQHIKLPKLGMVKIRDKQVPQGRILNATISKEPSGRYYVSLCCTDVDIEAFENTNNHIGLDLGIKEFCISSCGEFIENPKYLKKSLNNLLNYKENYREKQSVV

SEQ ID NO: 30345 - protein, 413 aa, unknown
  TnpB Polypeptide
MEYSHRYRAYPTSEVAERLEHHLDVHRQLYNHVRWDYDQAPEDNKPSEYDQNNKLPEWKRKWSVFGELHSKAAQATVARFHHNLTALSERKKKGYNVGRLKRQAPADYRSVTYNQSGFDLDEKRGHDKYAYVRFSKIGWVKIRYSRPIPDHATIKEVTIKKETTGEWFVSFGLETDDTNLPEKPDVDSLDVSNSVGIDLGILSYIHTSNGKTVNWLDLEDEYERLRREQRKLSRKEHGSRNYERQRQKVAKVKRRIRRKVLDYQHKLTTWLVREYDAVFVEDLDVAGMLQREGNARNKQDAAWRQFITLLEYKADLYGCHVVQVEARGTTKECASCGVETAKPIWVREHSCPACGFETNRDANAAMNVLQRGFSELGLGWPEDTPVETMTAADTTDFQSVSAGHVIETGSLPS

SEQ ID NO: 30346 - protein, 383 aa, unknown
  TnpB Polypeptide
MQVRWNYKLQPNKGKCALMAEWLVTLRKHRNYCLAERKAGFESNNQHSDQPVMYNYGAFCDIYTQVEYGSFSPLTCPVVKHGVMSAQTLTKQDGKWLSVSGVQSARTTELRNENPFYARIYSGVLQGNLAKLDAAYLGFFQHKRGFPAFRKASNFNSFQYKPGVAKLTVNRTSKKRRCYSHVYLPGLGEMRYLDSRTIPIDADIRTVTVMREADGWHMSVLLNLPESLPEVTPLEMVSSAVGIDMGINKLIALSDGSFIENPKFATNQKTRRQLRIRQRRVNRKIKGSKNRSQAGIEVAKLHKKIADKRNDYQWKAAEKIINTADAIIREDLNIAAMKLRCKPRRIKGRFMPNGQSAKRGLNRSITRVLTLMKFGDFRFMLFL

SEQ ID NO: 30347 - protein, 373 aa, Brevibacillus sp.
VIVNKAYKFRIYPNKEQEILIAKTIGCSRFVFNHFLAQWNGTYKKTGKGLTYNTCSTELTQLKKELVWLKEVDSISLQSSLKNLADAFTRFFKKQNDTPRFKSKKNRVQSYTTKQTNGNIAIEGNKVKLPKLGLVRFAKSREVEGRILNATVRRNPSGKYFVSILAEVEVQPFKKTGFSVGVDLGLKDFAILSTGEVFSNPKWFRKQEENLVTAQRILSRRVKGSSNWNKQRVKVARIHEKITHARTDYLQKISTYIIKNHDVVGVEDLQVSNMLKNHKLAKAISEVSWAQFRTMLEYKAHWYGKQVVAVSKTFASSQLCSCCGYQNKDVKNLNLRDWNCPSCGTHHDRDLNAGLNLKNEAIRLLTVGTTGIA

SEQ ID NO: 30348 - protein, 457 aa, Streptomyces sp.
VTSLPAEARPLHAHTAQAVAYDLAEAIVLGRRNRQQGVARTKLPWRQKSYRRLVFTTGFGWKITRDGRLALSLGRGRERIVLPVPEFPDRQGETVAPDRWGEMKLCWDAADRSWSLRVAYRAPDDGLPDAGDRSDESVPDMRVVTVAVDEGLINPMALATRAPDGGYEVAVINGRSARSLKQRRNKGVAQLQAKSARCSNGSRRHRRLAAARKKLTARTDRSLRDFNHQVTAKANRFIREQVSAHERAAPAEVRVMVRLVVGNVRGIERNTERKRRNARSTRQQLSQWERGTQERQLAYKTGLVIRHVDEAYSSQTCPYCLTRCKVRGRTYACVNSDCSRVLHRDAVGGVNIHTLAVNDGAYVPVAPGIPVRVKYLRALPGWSCDQRGRHSMYQRARLRAGPWSGREARSSARNRATRVDASGAAGVAVSFCEGRRRDREDGVAAPRGAGRAGARTA

SEQ ID NO: 30349 - protein, 422 aa, Campylobacter sp.
MTISHKIELIPNNKAITYFKKAFGCSRLAYNWGLAKWQENDKNGIKVNHLELKKQFNSIKKEQYPFVYEVSKYATQQPFLNLNLAFAKFFRDLKQGKLSYPKFKRKKDNQGSFYLGGDVIKFSEKNAKSYLKIPNLGEVKMREKLRFNGKINSVTISQKANKFYASFSVEIDEDEFKRTHKPKQKNNKTIGIDVGIKSFISLSNGLFIKAPKPLNKLNKKLIRVSRQLSKKQHPKTKGDATKKSNNYKKQSIKLSKLHTKITNIRSDFLHKLTSHLVRNYTNFGIENLNIKGMMKNHRLARAISDVSFYEFKRQLLYKSNYYKNKIIEADKFFPSSKTCYKCENIKQDLKLSDRIYKCDVCKNEIDRDYNASLNLEKLALKKIGLVQAEFTPKDLTALLDDLEINNLITSKVDIGIQQKHYL

SEQ ID NO: 30350 - protein, 381 aa, unknown
  TnpB Polypeptide
MRTYKFRLYPSKRQEIQMKDHLWVEKNMWNMLLEANQKKYDAEKKFLTRNEMQKLVKGTELYSQVAQTLSHRLQKALWRMVKMRKQGKECGYPRFKNIDRMKSLNYPQAGFELDKKLKVTPFGEISIKKHREMEGNIKTLTLKRESSGKWFATFCVEQNKPIPRSNGGDAVGIDLGLKTFAMLSDGTAIANSRHFKKYEEELAKRQRKLSAKKKGSVNRSRAKVKVSRMHEKIADARADFLHKTSTILVNDYSFIALEKLASQEMSTQIFGKQINDAGWGTFANMLGYKAEEAGCQVVFVDPKNTTKLCSCCGTLVDKELCERMHNCPQCGLSIDRDLNAAINILKRATAGQAESNACQRWNEVPSVKQEAAPFRGKSVSQ

SEQ ID NO: 30351 - protein, 269 aa, Escherichia sp.
  misc_feature (118)..(175): Xaa can be any naturally occurring amino acid
VKNVTVSQSCGKWYISIQTESEVSTPAHPSASMVGLDAGVAKLATLSDGTVFEPVNSFQKNQKTLARLQRQLSRKVKFSNNWQKQKRKIQRLHSCIANIRRDYLHKVTTAVSKNHAMXXXXXXXXXXXXXXXXXXXXXXXXXXXXXXXXXXXXXXXXXXXXXXXXXXXXXXXXXXRQLEYKQLWRGGQVLAVPPAYTSQRCAYCGHTAKENRLSQSKFRCQVCGYTANADVNGARNILAAGHAVLACGEMVQSGRPLKQEPTEMIQAIA

SEQ ID NO: 30352 - protein, 411 aa, unknown
  TnpB Polypeptide
VLVHRSLVFHVLWQDPRLHWLLSEFRLLVNESIRVAVKEDIRSRARLVRAAYRDLSARHAVYKQYIPSAFEVALGTLKTYRRRLRRGKRSLVPYVRRPSLKAENQSYRLDRDTGRLRIPIRGTEGVQIHLPLSDWHRSILGDPTWSLGSLTVVPGKVIVVVRKAAPKPFQPEGAIALDTNEDSLDGVVASGNAARSVRMPFDGVRQVQAIHFRRRTMLARKKAHDRRVARRLLDCEGRRERNRVRQRLHRVSKRLVQLAKRSRAAIVLEDLTLRGAGSRSRRMNRRLSSWPRGEIHRQVEYKAALEGVPIIKVNPRWTSKTCPACGARRRDRVGKVFVCLMCDWEMDRQINAGMNILKTALASNETLARAVRFQPGALRDDVVSPLYDLPRGGAGARDEPSGVELGVSRIA

SEQ ID NO: 30353 - protein, 344 aa, unknown
  TnpB Polypeptide
VEEIIRRFESGARYAYARICDSIPILDIEKDVMQKFDLNSRWAKDVVMRAKAAYDGAEKLVETGRLESPRKLIWGGRKNFECRSKGEITNGEWRRIRSNQFWSRGDKSKNGNLNLRIEPAEDNYQLRITIGTRQWEYCQLWIPEKFRAMLNAHLNTEPCYTVRVKRGKDDRYSVFITFDAELPTQSVGFKEGAIGIDLNPSGQAWAEVNVHGQLLGKGWINTPELQYARRGRRDWLIGQIAHQIVGLARSEGKGLVLEWLKFKRGENHGRKLNRIFNNFTHNRLIEAIVREAKQQGIAIKQVNPAFSSVIGRMKYQEVYPHLAVHEAAAYTYWAAEPYALLTCR

SEQ ID NO: 30354 - protein, 400 aa, unknown
  TnpB Polypeptide
MYCCLVKVRYTFRCYPTDRQARQLAREFGCARHVYNFALRLRTDSFKDGKPVNYNASSAALTKHRADPEFAWLRESSSVPQQQSLRHLQTAFSNFFAKRTSYPAFASKHGKQSAEYTVNGFKWDANNRKLTISKVGRLHVKWSRGFTSEPTTCTITKGRDGRYFVSLCLDEPAKAALPKTGSMVGIDLGISRLATLSSGERIANPRYTARHAARLARLQRVLARRVKGSGRWNHQRLKVARLHAKIANCRKDTLDKLTTDLVRRFDVLAIEDLNVRGMVKNHKLAKHISCASFGQFRQMLTYKCAWYGRELRVADRFFPSSKRCNSCGHIHASLGLETREFKCENCGEHLDRDQNAAKNILNFAVGQTVKGRGEITSPKRATARRGKSLRSVKQLGSANV

SEQ ID NO: 30355 - protein, 400 aa, unknown; identical to SEQ ID NO: 30354
  TnpB Polypeptide

SEQ ID NO: 30356 - protein, 366 aa, unknown
  TnpB Polypeptide
MIDEKELVMCLTAKVVIPHNLTPILDELYQKASVCVNRMLEDRTKSSSKYYKEIPCVLAKSLISKYQRNKKLKQVKNLVLPVCGDKGKQVKMVEGGIRVPTFFKKSILPVIFPKPISGFIRQVEFFKRNKKWFMSYSYNTSVLQEQEVQGFLGVDRNSVENVVVCADVMSGKVRKLGPDVSGITKNLRNERKNLQKKRAKNALKKIRRRQSNRIKDINHKVSRSVVDYAKLHSLAIVLEDLGKISKKGKAKRYVQKSQWSFYQLETFIKYKASLLGIPIYFVNPAYTSQVCSRCGSINKPNGKNYKCSCSHFDHRDSNAAFNISANGWFFYEQTVGHSASAVRHIGGPLNQSSEKVVQLESSGGAR

SEQ ID NO: 30357 - protein, 370 aa, Brevibacillus sp.
MILAKKVRLKPTPEQERQLWKSVGTARWAYNWTLAKQEENYRNGGKFLLDGDLRKELTQLKQSEEYSWLYEVSNNITKQAVKDACDAYKKFFKKLAEKPTFKSRRRSKPSFYNDNVKLKVKQNHVLIEKVGWVTTSEQLPTDVNYTMPRISFDGKYWYLSVGVEQEFIQPELSGESLGIDVGVKELAVCSNGMTFKNINKTKVMKKAEKRLRRLQRKVSRKYEMNKEGSRFVKTCNIVKVEKHIRLLHRRLTNIRTNHSHQATSAIVKTKPSTVVMETLNIKGMMRNRHLSKAIAQQKLYEFKRQLQYKCEKYGIRFMEADKWYPSSKTCSDCGEVKKDLKISDRIFKCVCGLVLDRDVNASINLAKLAS

SEQ ID NO: 30358 - protein, 423 aa, Cyanobacteria sp.
MQLVERHIIKSTHLFFAEIDALSFKSKNLYNAALYILRQNYFYGWGYLNYNALQKMMQKSQQYQALPAKVSQQILMVLDKNWQSFWAARSEYLQQPKKFLGQPKLPLYKDKQKGRNLLVYTVQAISSVQLRHGIISLSKTNIRVKTQVPTDAIRQVRIVPKCDCYIIEVVYEQQKSTSPSVQGDGIAAIDLGVNNLATLTSNQLGFVPLLINGRPLKSMNYFYNKHRSRIQSKLRGNRSTSSRIKSLTRKRNQKVDNYLHHASKLVVETLVAHRIGRLVIGLNPLWKQAVALGKVNNQHFVSIPHKRFVDMLVYKCQLAGISVLLIEESYTSVASFIDRDAIPTIGQVLDAPVFSGKRIYRGLYRSNSGVTLNADVNGSLNILVKAFPDAKWIGDKSCVVQPRRISPLKVKTKGKSEMVSRLA

SEQ ID NO: 30359 - protein, 499 aa, unknown
  TnpB Polypeptide
MQRRKITLRIYPTPAQEQILSGWLDLHRQLYNAALEERIDAWRKHHKNISYNEQQNVLPALKKDLPELTPLGSQALQETLRRLDRAFSAFYRRCAAGQTPGFPRFKGKKSFNSFCFPSPAGWCFLPFDKPPLDNSTGDMAKAACRASALKVGSLLIRARGKSRFDSYAPNDLTIKRVAPKIWEASITLRVSDSDCARDRIGNEIRGFDLGVTDKVVFDNGETVENTRFLRNKLDELAKLQRARARCSKKGSRNYKALNQRIARLHRRIAHQRKDELHKLTTNLVKTCSILGSEELNVSGMVRVPKPKPEVGVDGAPTGNFLPNGAAAKAGLNREISSVSMSALLGMLAYKAIEADTRLHLSNTRKVKPTQRCACCGTLVKKHLDERTHLCTHCGFVATRDRNAALVCLIDALWPEYFDAITSKISKDGQRKNLFFPDGFENLIANRLFYAAQDISNIPQVSNISNPSPKGAAHGTGVVIGTDIVELVSQETPPRSALAV

SEQ ID NO: 30360 - protein, 410 aa, Candidate divison MSBL1 archaeon
MKLTYEVPVSNPTRRKQCFLEKVSDKFPKMVQWFLTVFEREGLDFGEKSLNRARKIVKELCYPTKERDSKYNCKGAVRFPHSHYYDTAITEAIQKWNSFLTWKEKSGTVKRFPEIEHYAPVLDSQMFELDLEKGWITVKTGRGQENIHIPITVPNKSHYRGLDEARISSIRFKKKSKGFVFLLVQKSDSPETPSPSELGEGSVMGVDLGERNLASFVTIRLDSQQPEIENAHFEKGKKAKKLEYREEKIRKNLQMRRRASEIPKRKWKTTNKKKNLCEKIANKIRKIATRNDVKAMFVGDLKVPTPKNSGALSKRLNNFPFAKLKEAIKRHLNKAGIFVKTIYEGKTEKHDLGTSQKCHKCGSEGERYKGKFSCPSCSLKDYNADLNAAINIAERGIKSLGKTEGLGAVP

SEQ ID NO: 30361 - protein, 379 aa, Spirochaetia sp.
MFIRKKAKLRLHEEDVELVNSTFGCRRFVWNQLLNSHKEQYEKWKEGGTLEKPKVSISAFREEFKRIKTEYPWLSEVSSNALYETITDLYNAFQRFFKGLSGHPEFKSKRGKQSFRIASRVNMYIEGNRVRFPKSNYYARFSKNTILNDPSSYTVTRDNVGDYFISFVDQIDEIEPEPESKGKFVGIDLGIKSLAIVKPSNREPWELINPKTYAKYQKRRTTLSRRLMKKKNGGNNRNKTRIKLAKLERKVANIRKDLLHKFTTKLIKENQMISIEDLNVKGMVKNHKLAKHIQDCSFGTIRTMLEYKAKRYTKPKVITIVNRFFASTQLCSQCGVLPKERIGLKIRNWTCWNCGTKHDRDINAATNILNEGLRLNQTS

SEQ ID NO: 30362 - protein, 443 aa, Lactobacillus sp.
MKRMSSLAYHFGLKVRFYPSSKQKKIIKLNYDAQRFVYNSYVGRNRNNYRAKGYLAVRKYQVMPFAFSVLNNYETKLAEEVVANNELLAKPKNIRDAYSFLRVKEIDSLAIANAIQNYQKAWNNYRKLGHGIPTFHKKRSDWSYQTNCQYPKQTEAFLDNGTARFIDAKHVKLPKLGVVRIASFRKLIKERLLNHIPTRIGTVTIKKTADDQFYLSMQLGSDIAFVKELPKMQSQIGIDLNLDNFLTASNGAMVANPRFYRKTKKKLAHAQRVLSRRQRRAKKEGRNLRLAKNYQKQRLVVAKLHDKIRRQRNDFLQVLSTALIKNHDLVVAEELRSKNLLKNHALSQAISDVGWRSFLNMLAYKADLYGKEFKTIDPKYTTQRCHQCGSIMGQNGYKKLTLKDREWTCPICQTHHIRDWNAAVNILEKGLGNWQNSKIKKAA

SEQ ID NO: 30363 - protein, 399 aa, Kitasatospora sp.
LIRAYKFLMRPTVGQQQALAEMLRDHCSLYNGALQERRDAWRHVSRTTVRYGGQSAQLKEIRAFDPECQGRWSFSSQQATLRRLDKAFAAFFRRVESGEKPGYPRFRGVNRFDTVDFPRNGDGCRWDSTPHDPVTRVRFQGVGHVKVHRHRAVVGTVRTVSVKREGKRWYVVLTAEQARPDPLPATGSVVGIDMGIANLLADSDGEFVANPRHGRKAAAKLEAAQQALSRCKRRGNRRRKAVETVAGLHRKVRRQRLDHAHKTALGLVRAHDLIAHEDLKIRNMVKAPAPKPDPEQAGAFLPNGAAAKAGLNRSISDAGWGVFLTILHAKAESAGREVIAVDPRNTSRTCPACGHTTAENRPTQDTFHCTGCAHRAHSDTVGAVNVLRAGLARRNARKG

SEQ ID NO: 30364 - protein, 519 aa, unknown
  TnpB Polypeptide
MARTKPKDSPPSVIRCDLLSSNMTAAKERQVRALLAAYRRGAVMLAREQWRLFFETGRFSKNYDEDKATFATVIGAANRVQMCRWQVVGQLESWMSNRANEFRAAVTRSSLAPDTKHMLHVINRLGMWFSRDEITMKGTGEIVPDAVRRLGRSIMRRVMRQHRRPDLSRLSMRLDYRAASLQAPSEATQDGRVGWWVNMSTMEKRSKIAVPLLTYQRHKGRGGQFSNGVLVTEDRDTGRLLFGVASDIGEKCAASRAAYRPERDVMALDFGLSTLFAGDDGALLGRNWLKVLRAYDRRITEIACGMQRRGREPRDSVRYRKTIIALRGWIRTEVGRVLNALVAAKRPATLVLGRLDFRNPALSDRLNRIIQTCGRAVVRAKLSDFRDRFGITSKEVNPVYTSQTCSCCGYVDTRNSPSQGVFHCLWCGSRMHADVNRTRNIGRRRAAPIGFVDQSKAAILAELVIHFGVRRVYSTRSGGRGSTADPRLTNPYFGRATTKTARMSNALSLPDLVVAEPIR

SEQ ID NO: 30365 - protein, 455 aa, Lactobacillus sp.
MLNLPSTTEYVRVRHYRLVMTPELVKKHQINLTVENQLHNYALKYLERAYGYKHLSRKFPGTRTGKTYVIKDEILPGFLRENYGLKRWNSRKVGLHSQAAYQFLLTLLTNFGEYRKVLRKAARMTDQEKENYRNNKHHNNPHHRSWYRKGSLAYLRNRASHQTVSLPDNGQIAILSAHHIKIQDYGSLQVVENISNLRHQKIVTSKIKHKRDGSYELQLVLKTKLKRKQPTAVRGADWNMTNEVIYHTSDDQEFNLGTLVSVKADKYERIIDWLKSRRDKATWLSHKSRRIQRLNDKIRYYNIHRANILTNRYRHIAKEIFDGYDLLAVEKLDAKEMRRRSKELSSKANTAKNRRLAKIKPYELEQWLKQMADKSGKTLVMVDSYKTSQIEYGTDYQEKHSLNGPRKWTSKYTGREIDRDLNASRNILEWGLNPEKHIKLKDYPALKPSSLVVIN

SEQ ID NO: 30366 - protein, 523 aa, Bacillus sp.
MKTTKICQIHMQGETERHHLDRLMTVFCSAVRYSFNRLLEHEKTGDLIKKVNLLFRINKRYAEDAVMQAQAVLSSQKELLPTRIEGVQLKIGKSEKKLEDYQTGKKTPKKVPVEVCIKGLEARLEKLRKKEAALLNHQEKGTIPPVLFGGKKNFHQRMKGKLSNEEWKDLRSNTLYARGDRSKKGNANLRITFHEEEQQFYLEVANPLLTEEGKTKAPRLLFPLRISDKHFDEIVKVVMPDVVGENAKGKPIESYRVYSIELKRKNGKYYVHITYDVKTHGSVLKWNEKINADRIAGIDVNVDRIAISVLTKQGNLLKSKTFYCHEMEYVSSHKRSNLAGETAKEITEYLIKWNVGAIVLEDLSFKQDHDTNKRLNRLTHQFAKTKLQKAIIARGLKFGFRIKKVNPAYTSVIGRFKYSKRYGLSVHEATAFVIGRRGLDFEEKIPKQLVERLCSLVKPHLISLLGSMEESEKRSKNGKQRSKYIGMMLSNMETFQEHHRWKLWNVIHKTLFVKNQELQLKEV

SEQ ID NO: 30367 - protein, 428 aa, Halorussus sp.
MEVRRTVLVKLDVADSDASLLHETISEFLRAANYVVGYAWKGEYKTTSKAKLQRETYDDVRAETRLQANLVQNARNKAADAVQSAVARWKQGDYAGKPHFTAPTLVYDKRCATFNDDHATLSTVEGRITVNYVLPDESRETPHSEYLFNDDYEVTGAELHYRNGEFYLHVRTKADVESETADKGNDGHSTVLGVDLGIENVAVTSTGTFWNGSELNHWHREFEKRRGSLQQRGTRAAHENIQSVGRTETGRYDHFLHTVSKELVAEAIENGCEVIAFENLTGIRKRLPPAKKFHAWAFRRLFDYVEYKAKIVGISAEQVSPAYTSQRCSKCGFTHEDNRPTSDGQDVFECFKCGYSPHADYNAAKNIGLKYLRSAQKSSGGGAPVNVRLNRGTLNVNGDYVPAADGGQNGSPRESPTLHEANGHAVSE

SEQ ID NO: 30368 - protein, 325 aa, Okeania sp.
MAKKTNPRLRLVSAKSRHENVQVLQQTLKTLERAFYEMKSLGKGFPRFKKRMRSFVFPAMLKNCLSNSRVKLPQLGWVKIKQSRPYPNNFQAKQARIIKKATGYYLMINFTSSESVPENIVGNKSLGIDAGIESFVATSTGKLIKSPKFLLLSTTVGADGHLPLQLLQRRLKKKKIGSNNWLKLQKKIAILHEKIANNRQDWHFKLAHQLCDWADNIFVEDINFKSWSRGIVRKQSLDSGIGQFINEILPYICWKRGKYYAKVDKNYTSQECPKCGQIEKKKLSVCVAFRRNRKHNCSHCNYQENRDVAAAPTPIPSREGSKRGG

SEQ ID NO: 30369 - protein, 253 aa, Rhodococcus sp.
MCAGGIQRCTACPPGRVRRWDEDQRHRGSEAGRHQRQEQPEREWLADVASVALVQSVRDSATACKNWFASLSGKRKGRKLGPPRFKSRKDNRQAIRLTRNGFSIRRNRKLYIAKIGELKVAWSRDLPSVPSSVTIIKDSAGRSFASFVVEVDQAPLAEVDVEVGIDLGLATFAVFSDGRVVESPRFLRRAERTLRKAQQNLSRKEKGSRNRAKARWKVARAHARVADSRRNFVHQQSTAIIRDNHAVYVEDLV

SEQ ID NO: 30370 - protein, 410 aa, Methanocella sp.
MVTFLLGYVLSYKYRFYPSTEIKNNIAVALNHCRFTYNKLLELYHNGKIKNVYDACNHVVTLKQEHPELKTVYSKTLQRVGNHLFNNISVVRTLKNRGFNPGKLRYKSEHRFRTLEYNQSGFKLTEKLLELSRIGTVKLILHRPLPEGKIKSVLITKTKSGEYYAILQVETSGIKMLQNDKLQNDKAVGLDMGVRTFCYDSDGNFVDNPKFLEKSLRKIKLLQRTLSRKQGFSHNWVKTKQKLAKLHEYVANQRSNRNHQVSRYYVNNYGVICVEDLDILRMLNRQNRTGKTLRRNISDAGWGDFLSKLAYKAESAGRILVKVNPRETSQKCYHCGNIVKKDLSDRVHDCPYCGVSINRDFNSALNILKKGLELLSEGRKPPGLPAEPMVTGYVPKPLVLNQEAPALRPG

SEQ ID NO: 30371 - protein, 364 aa, unknown
  TnpB Polypeptide
VIKNFKIRIYPNQEQQILINKTFGCTRYVYNYMLKLKQKAYNIFELKLNYVKISSILTKLKQQKIWLYEVDAVALQQCLKDLDAAYINFFNKIAGFPNFKTKRGKNSYRTNGRTIALDQDSKKIRIPKVGWIKFRDKTNFSGLTKINNITISKTPSGKYFASISAEVDITAFTKTKKSCGIDLGLKDFCILSNGTKFENPKFLVNNERRLRILQKSLSRKVYDSKNYEKAKVKLAKFHEYIANCRKDYLHKISIFLVKNYDVICAETLQVKNMIKNHKLAKAIADVSWSEFCRQLDYKCLWYNKKFVRINTYFASSQICSNCGFKNSDVKNLDVREWICPGCGKYHDRDINAATNILNQGLTLL

SEQ ID NO: 30372 - protein, 413 aa, unknown
  TnpB Polypeptide
MSKREKPPKEKKPTKTYQFRLYPTHKQERTLERWLVLCCEVYNAALDERKSAYRMAGVSLSYEDQCAQLPGCKEGRPDLAEVPSQVLQDVVKRVDLAFESFFQRVEEGQKPGYPRFKSRFRYHSLTFKQFGNSFHVLAGGKNNRGILVLAKLGQVKMVMHRAIMGTPKTAIVKRTPSGKWFVNITVERCEKELQEKQLPASHEEVGIDVGLSTFAYLSTKEEIANPRFFRQEEVALSRAQRKLSKAAKGSKEREKKRKVVARTHERIANRRKNFIEQEVCKLVARFGFLAVEALVVRNMVKNPKLAKSIADASWSQFFTRLLCKAEEAGRVVVKVNPAYTSQTCSACGHRQPMPLSVRVYECPTCGLVIHRDHNGSLNILADACQAVGRHSRVIPEAPGLEPWGVVTNVDCLA

SEQ ID NO: 30373 - protein, 395 aa, unknown
  TnpB Polypeptide
MFKAFKYRLYPTTSQAEKINQNIGCARFVYNQLLDDRIKVYKETKQKSKKTYCDLKKEYIFLKDADSRALLHARENLDAAYDKFFKEPSTGFPNFKSKHKCRWSYTTDNNNDSVRFDGKRLKLPKVGYIKVIEHRLHEGRIVSATISHERSGEYYASVLCETEQPELLPVSEKIIGIDLGLHDFIVCSDGKRVKAPKYFRKSEQILAKKQRAFSRTQNGSNGHEKARLKVAKCHQKIKNQRNDFLQKLSTKLIRENQVICLEDLSVKGMEKNHKLAKSVTDASFAKFVSMLEYKAEWYGRKVIKIARFHPSTQLCSSCGYKNESIGGLKGLKKREWICPSCGEVHDRDLNASINILNEGLKTLNLRDAGDSKFTVRHSDISSIAGEVLALEAHPL

SEQ ID NO: 30374 - protein, 356 aa, Caloramator sp.
LLKAYKYRIYPTKEQEEYFAKVFGCVRFIYNKMLHDKIEYYKQTGEKLNNTPAQYKKEYSFLKEVDSLALSNAQLNLEKAYKNFFRDKKIGFPKFKKKKGYQYYTTNNQNGTVTLEGGYLKVPKLKTKIKIKQHRQFEGKIKSVTISKTPTGKYYASIFVEEEIKELSKTDRKVGIDLGIKEFAILSDGTKVENPKWLRKTEKRIKIIQKSLSRKQKQSKNYERTRQKLAKLHEKISNQRKDFLHKLSSKIIHENQVIVLEDLQVKNMQQNHKLAKAITEASWAEFRRMLEYKAKWYGREIIIAPQNYASSQICSECGYKNSDVKNLALREWKCPKCGTVHDRDINASKNLLKLAM

SEQ ID NO: 30375 - protein, 516 aa, Caloramator sp.
MYTIKLKLYKPSNRKREIIDEAMKNYSLAYQYLLDKAYYDLKRIEKDFKDSRGSYSTMSVIKWIDKDLSKELNRFSIEPFKDALKMEFASTLVGYLKLKQNRKQVNFPCAYISDEKLESIYSDITRDLLEGKKDISCYESELERLFKKNRPKSLFFGRYDKNRNYCLLYDEKTNRYFVKLYLLNSKSLKRKKININENRKLKYIYKGFDEVKDRQRRECFIILPLSFGKYQEGYLKKALDDPSILKVARLVKEKDEYYILVTLDIKMPDKIEILNFMGVSRGIYKDIFYTISDKMGNEIESGSVSNNNLYCVANYIAEKAFEKKCQVIMHRNFNMGDKLKWSDSKGEVSPKLHTKEYNKLFKILSYKLPEKGLPVPVKVSCKSIYTTCPSCGANTIKNRFSENLYICVYCGYADNIEHLGSLNTSRRLIKYMQDKIKIKVEKTKDKLRFVNKDLNLNYIPQNPYDCKDEFIGELKRIVKEFYKTDSNRDKNYKKRLSLIKKIGNCENIFEKIQIID

SEQ ID NO: 30376 - protein, 409 aa, unknown
  TnpB Polypeptide
MKSRRVEKHAICRTSHYFSDLCDMTHKSKNLYNSALYAIRQHFFQTKKYLSYATVAGEFARSNSDFKSLPRKVSQQTLKLADQSFKSFFGLLKTTKKSEARLPSYLEKSGKYVTIFTKQALSFTKPGFVKLSGYGVFIKTDKQDIQQIRVVPKTNYFDVEVIYCVDEPETKTDNCRYLSVDIGLNNLATTASNVIKPMLINGKPLKAINQYYNKRKAELQSRLGDKTKTSNRISAITRKRNDKIRDYLHKASTWLINQLDSNSINTLIIGENKGWKQEINLGKKNNQNFVSVPFNKFKQLLTYKAKSRGINVICQEESYTSKASCLSNDHIPVYGSEPNVMNFSGYRKSRGIYRDKCLGLEINADVNGAYNILRKAVGDFTVDPIEACSWPVSVKISLDTNPKLCHYWH

SEQ ID NO: 30377 - protein, 425 aa, unknown
  TnpB Polypeptide
MKRTNTFEVVPQSDEDGELLRRLLDASAALWNEINYERRQNYADPDADVWEIGEYRGRYGGVLGASTVQQIERKNREAWRSFFALQKKGEANGKPGYWGNEREGRDLRTYIRNTSYSVEWGEFSRLEILVGQDLKDEYGLGYRERLRLEVRGEPNWKEYDKQGRLELYYDDNAQTFRAFQPVTVDNSRLAQPLASEEAALDIGANNLVACTTTTGQQYLYEGRDLFERFRETTREIARLQSLLEDGRYSSNRIRSLYRRRTRRRDHAQDALARDLIERLHTEGVSTVYVGALTDVLDTHWSVETNAKTHNFWAFRAFIDRLACTAEEYGISVELRSEAWTSQECPQCGSTDRTTRHRDTLTCPCGFEGHADLTASETFLKRQTAVSRSMARPVCLKWDDHRWSESPRSPRSNEEYTNPQVASVGR

SEQ ID NO: 30378 - protein, 423 aa, unknown
  TnpB Polypeptide
MFKTQKNHIRCDKKTYKILRILTRLSKNLYNFTLYTVRLYYFNNGKYLPYERAYHLVKHDENYRLLPSQVAQQTMKVVDRNMRSFFHVLNERRKGNYNRPIHLPRYLPKDGYFVCIFQKDMFKVNGDRIRLSLGRNFHKEFGVRYLEFKLPPTVIGKKIKEVRILPRCKGLWFEIEYVYEVEPEKVDLDYRDYLAIDLGLDNFATCVSTSGTPFIIEGRGLKSFNRWWNKKKAKLQSVYDKQGIKMGRKMAWLLKKRKNVINNFMNQAVNYIVKFCLANGIGNIVIGELKEIKQNMNMGKINNQNFQYIPYGLFKQKLKAKCEYYGINYIEVDEAYTSQTCSVCGDVNKNNRKHRGLYICKKCGSTLNADINGAINILGKVAEESVVRRILGSGLVNRPVRIRVVDFRSNHQTPHEAPSVRAG

SEQ ID NO: 30379 - protein, 458 aa, Moorea sp.
LTLYFWGSIIRLSPEKPVKQMQLGYSYKLKPNRHQKVTMNRWLEMLRAQYNYLLRDRNDSYDQVKAPRLGNYCDLRSGGEVCPLTCSVSKNFSVGYPWKNNKKNPRRSAYEAQSSNLPILKKERPWYKGIHSTVLQQTLRQLDVAFSKFFKGETGYPKPKRRSRFRSFKYAPGQVKLDKNKIYLPGIGWMGFHNSRPIPKGFNLKSVTVRRKTRGWFVSLQIEDKTVPANPVKDKSEINPLKVKGCDLGINKLVSISNGRTIANPAKQKSFRRRERRLRLRQKAASRKRKGSRNRGKSYVRVASLHERITSKRSAYHWDVANQLVDGTDALVFEDLNILAMKSRCKPNKNENGGYVRNGQSAKRGLNRSISNAAWGELVKKIEVVAAKSGVTVVKINPKHTSQTCPNCNHVSKENRKKEKFVCTNCGYYDDADVNGAVNIKLRGLKKLGIDPRDARLR

SEQ ID NO: 30380 - protein, 621 aa, Mycobacterium sp.
MAAMGGQLRRIGDPVVAAAPVGARVRTRLHLTADEAAALGEVGQFLGSVYRRELAGRITLGRLDRKAHAVWRAERKRAVTAVASSRWAGAVTRAVEDQYQLGMRALDAEVTDLRAAITVLESRCALRPGEVGAPDRDVAGGPRRRSRRAVRGYRTAAERFCKTRRLAALRARLDGAQDALAAGRPSITVGGNRRWRTRQNLTAAGLSELQWRDRWDTARMFLTADGESGKTGGNETIRVDESGHLRVKVPAALTDRFGTHLHIAAPVAFNHRGDEWLSRVVARWAVRYDIMFDPDRGRWYLDASWTTTTVGVPELDELREHRVLGVDLNADHLAACVLDTSGNPVGEPATIEVATTGLRASHRDGRVRAAITTLLDLAHHHGCAAVVVENLNFTDARSTGRETLGRGRRGKRLRRTVSGIPTRRFRDRLTAMAARRGIAVIGVDPAYTSKWGRQHWRNPLQQQTSDPTAVTVHHGAAVAIGRRGLGVPIRRRPAGPRTQQRMRAGTPPARPDQQPGTTRRCRSSGTPTRPPRRRGVPVYQSTPTASGQHRSGRNTEQTQFRSIPRNGPAGTSDAAGDEFGETDLVGAAVAEREGAERPGVGDTVGGVGAQREPLSPWCPGG

SEQ ID NO: 30381 - protein, 439 aa, unknown
  TnpB Polypeptide
MKIYSTYSVKIKHYNHIFKDTVSFYRKATDFLISVCLDEWDSISAIEGKLLQQQYVERLTHATKDNPTPQYDFDGKFYKMPCYMRRSAINEAIGKVSSYKSNLANWKDDPIGKEPSYPKAGYVFPSMYRTVMYDQTDDYTAQLKVYIRNTWDWITVDLRKSDMDYIIRRCRTRKQCAPTLQKRGKEWFLDFPFKETVSLGDTPIYEQTIVAVDLGIYTAATVSVIRSDGTILGRHFCKLSKETDHLTHSINRIKKAQRQGNCNTPRLWAKVKGINHDIASKTASYITNIAVLYNADTIVFEHLDKNGKVRGSKKQMLKLWRSQEVQSMVANKAHRLGMHISHICAWQTSRLAYDGSGTVSRGKHGGFNTYELCKFQTGKTYNCDLSASYNIGARYFIREILKSLDESSRLDIEAKVPQCTKRSACTFSTLISLNAVLVS

SEQ ID NO: 30382 - protein, 300 aa, unknown
  TnpB Polypeptide
LVLSEKSHKEDLWYKQLPSQTAQEVCRLLDKAWKSFYALKRTGGIETPRPPRFKQESIPITYMQMGIVHERDTDRVRLSLPKTLKKYMEETYQIHENFLYLENKIFRGMDQIKQLRIYPPEKGSCKIIVVYEVPDQEELPQNGHELSIDLGLHNLMTCYDSENGKTFILGRKYLELERYFHKEIARVQAQWYGQQSGKGVKHPVTSKHIRKLYKRKQDSVTDYLHKITRYLAEYCREQEITCVVTGDIRNIRREKDLGHRTNQKLHSLPYNRIYIMLEYKLKRYGIRFIKQPANKKSRLN

SEQ ID NO: 30383 - protein, 393 aa, Salmonella sp.
MPDGQQERQMRRFAGSCRFVYNKALALQKERYEQGEKKLGYAGLCKILTEWRNSAEATWLADAPVHPLQQTLKDLERAYSNFFAKRADFPHFKKKGQSDSFRYPDPKQIKPDQGNSRIFLPKLGWMRYRNSRHITGIVKNVTVSQSCGKWYISIQTESEVSTPVHPSVSMIGLDAGVAKLATLSDGTVFEPVNSFQKKQKKLDALQHQLSHKVKFSNNWHKQKLKIQRLHSRIANIRRDYLHKVTTTISKNHAMIVIEDLKVKNMSKSAADTVSQPGRNVSAKSGLNRSILDQGWYEIRRQLEYKQLWRGGQVLAVPPAYTSQRCACCGHTAKGNRLSQSKFRCQACGYTVNADVNGARNILAAGHAVLACGGMVQSGRPLKQEPTEMIQATA

SEQ ID NO: 30384 - protein, 370 aa, Salmonella sp.
MKRAYKYRFYPTPDQVELLAQTFGCVRFVYNSILRWRTDAYYECQAKTGYIQANARLTALKKEPELAWLNDVSCVPLQQSLRHQQTAFSNFFAGRAAYPAFKNKRHKQAAELTASAFKYRDGKLYMAKSKIPLDVRWSRPLPSVPSTVTISRDTAGRYFVSCLCEFEPVSLPVTASTVGIDVGLKDLFVTDTGFKTGNPRHTAKYAKRLALLQRRLSKKKKGSKNRAKARLKAARIHTKIADCRLDNLHKLSRKLINGNQVVCVESLKVKNMIRNPKLSKAIADASWGEFTRQLAYKGEWAGRSVVAIDQFFPSSKRCSGCGYISKSMPLNVRSWLCPECGANHDRDVNAAINIKTAGLAGLACGESVNP

SEQ ID NO: 30385 - protein, 356 aa, Lactobacillus sp.
MTTVVKGIKLRLYPNKAQIDQLWQLFGNDRFVWNHMLAMANQRYENNPASRFVGEYDMNYLLKPLKKEYPFLKLSDATSLLVVNHNLALAYQNLFQHRGGHPRFKSRRSAKQAYTGQSICTVEAKRRLKLPKIGSIRTSKTGHLANGKIKRYTISHDATDRYYISLQVETEVHDLPKTNQKIGLDLGVSDLAIDSNGVKYGTFNAQWLKKQAQRWQAKFSRRRHQATVAMRQWNHHHKLLKMELNDYQNWQRAKMTKARYQAKIANQRKDYLAKAIANASWYQFRTMMEYKCDWYGKQLVVVSARNTSRICSVCGHNGGAKPLAIREWTCSECQTHHDRDINAAVNILKRGLKATG

SEQ ID NO: 30386 - protein, 616 aa, Nocardiopsis sp.
VGWCADLVSAMTTELLKAHFNAADVNTLAAGVDAAGRRLPSNAWMAPRRLGWSIAPPQGVRVNDRIMRMAQEMAGRILRSAQWRADLTTGVLAVWPADPAKRTPAEWGQVRARVSGGKHLPSTIIGSRTRQITAFAHKHGRMPVDVFDLEGVPRAARMLVLSACDAQQATLERHESDPGRILLRLKLPTRPDPRTYADWTWVACPLALPPTVPPSAVLHLPALRPRDGKVRADVAYSHAVPQARRSGHTVALGVDWGLNTLLSAGAVRLHGDGHITALGSGAMFRAGGVLAKQHRLRRQGEFLHAKTDHHQRLTTGDAAHPLHTKHAVLAAEARRVSAKRSRLNDALAASAARWAVDQAVAAGATVIYVEDLRSIEARGMGRTMNTRLSQQVRGRVVGRMHHAAAEVGIAVVTVPARGTSKHCPRCLAPLGHRKTPDRLTRGWKWALCPDSGCGRQGDRDTGAWQRVAARGLTHQTRTVTDHATGAMGIRTVVDTLETRAVTAPATTRTRQRDRSKTGPTRRRLTRPAPRRRRAPSPTRPHGRAGQRPEGHAPPDRSRLPRAAHRHQGVNTISTPTIRHRPRGAALGAGFHLHAHATPPRGQIPLPDTTSYLGLPS

SEQ ID NO: 30387 - protein, 447 aa, Halobacterium sp.
MSKRHLDIQPQTSVVVRRTNTVAVRPLSDDDEQLLLDLLDASASLWNELNYERRQQFFDGESVWDTDDYRKQYVDVLGSATAQQVIRKNKSAWQSFFAARENGEDTAPPGYWGNEEDGRELRTFIRNDQYTLETGERSRVEVPIGQALKDKYGLGYHDRLRLEVCGAPKWNGEQGRLEIQYDETDDTFRAFQPVTIPDSRQDSPLASHEAALDVGANNLVACTTTTGRQYLYEGRGLFTRFRETTEEIARLQSKLREGRYSSHRIRRLYRKRTRRRDHAQEALVRDLMERLYAEGVATVYVGDLTDVLSTYWCAEVNAKTHQFWAYRAFIERLSHTAEEYGITVEVQSEADTTRTCPACGEQENTDRDGDVFRCPCGHEAHADLCASRTFLERQAGKEVGSMARPVRLKWDDHNWSEMPYSPERASPNEKRTNRSTSNGKLASVGAA

SEQ ID NO: 30388 - protein, 518 aa, unknown
  TnpB Polypeptide
MGSVTRAFSLRPYVCFDKGTGVGLDLYNVLEEVRLDAELCASEAIKHITVNNLGKLSEHDRLKPAVAGLRMGMRFSVTGRSTGRSRFERMVCEYAVSQLRSWRERQRVYVRKSDKYVSAGYKHTVRQSKPSSLKPRLALSVTDKQYHAIRRTGSSIELDMVVNGRWVTFKFKTPDRFLEEGVRIIAPTVTVNEKDRVVFNWYVELPVERSEFSSRYVIGVDVGITNHTTAVVRDITTGQVIETSFMNRRVRSLENKIKRTKTQITALHSKGRVGEVEAHRKALSNRRKELAVLIGQEIADMSWEYGNALVSVEDLSHIKNTMKNGRWVRGLIIKRITDMVESNGGRVMTVPAAYTSRKCHRCGTMLDMTDYHHPVCATCRVSWDRDENAAANIAEKLKDKERHKKACQTRKKHASQKLRRNSKGSLHPLKHPLKKTIPTPKAPQNQPKNRDNHMIHHTQRVVHNREGVFPILCAADWSLCHGNVSVPAVASTLGDRCSDNKPHDYPKRRSRPDDLRLH

SEQ ID NO: 30389 - protein, 499 aa, unknown
  TnpB Polypeptide
MSRTYPRVPSAAFNENGESLDLSKVLDDVKKDAELVTRYALKEMTEQNLALVSSFDRYKPAEAGRRMGLFLPVEVKKQFKSGASRLEKMFQEQTVTALRSWASRVSVTNQTRNDYVSAGWKRTVRDSRPKNLQPRLALSAADKQYRRMSVTDERIVLEMVVQGKWVTLYFPTPPQLLKEGVTPGVPNIWIDSQDRVVFGFHGTVDPARPEFSSRYIIGVDVGVTNPATYVVWDSTKEEIVEQSLLGQRARSLHNKIKRTQTQIASLKQQGRDDEAVPHREHLSNRRKELSILIAQEIADTAWRYDNALVVFEDLSHISDTMRFGRWFRGEVYRRTRDMLESDGGRALKVNAAYTSQRCYVCQTKLDTSDYSNPVCNSCNITHHRDINAAANIAQRANHSKACQTRKRHSTKTKRVRRSKCRMKPLKHPGTKNRPTPKAPQNRPKTHISTPRGEVSVRMCPTDTRVSAVDHMRWFQTNSGTTTPKETQSTNTTDWIYPKE

SEQ ID NO: 30390 - protein, 448 aa, unknown
  TnpB Polypeptide
MKVAKSIYNACLNECLKRLKAVKANKEYHALVKTQSSKERNQCLKEIELSYKYSEYDLHSWVTQIKQYFEGHLGINEVQKLATRAFNTVEKLHYGKAKNIYFKSFTDNMSVENKSNKTGLRIKNSKIIWGKLSIPFKIKKNDKYAQLALLDKTKYVRVLKREIRGKERFFVQLIQEGLPPKKYQTSTVENRIGMDIGTSTISIVSDNKVSIKELANIKTPYKKIRRINRAMARSKYFANPQNFNDNGKKTLKKWNYSNKYLKLKSKRKELFRKLSIIRKQTHEETANEILSLGLDIRVETMHFHSLQRRAKKITYNQNNGKINKKKRFGKSISNYAPSMLLTIINRKLKYQNCELKQIDTYSVKASQFNHTTGEFTKKLLSDRWKNIDNKLIQRDLYSAFLIQNTTDDLKTIDIDLCNLKFDNFVKLHDIEIQNIKKSQNKLLHWFVA

SEQ ID NO: 30391 - protein, 385 aa, unknown
  TnpB Polypeptide
MKRAIKSNFKCIREDLNRLFACNRISALVWNKILELQREKFRSKSDLQKALKDLYPINFQSVQAVVDKYCAACLATKSARDCGLANKYPWRRKNNYPTTWKVDGFKLVGNRLKLSLGTFAGKRQPPIEVKLPKLTLGKLSGVKPQQISLIWNGWLKLAIVVDDGRANAPAIQSDKFCGIDLGEIHSIAAFENGGNAVIITGRLLRSVKQYQLKKLAEFSQKLSKCKKKSRRNKKLRRAKRRMLQKTNAQIRDLNHKITRSFVTWTVENGVGKVYVGNPEGVQRKKRRKTVNQKLSRWNFGKHLEYLTYKLAAVGIELEKISEAYSTQTCPKCGRRHKCDSRNYRCSCGYIAHRDIHGARNILSLGLSGRICITTSIKNVKYLRTA

SEQ ID NO: 30392 - protein, 381 aa, unknown
  TnpB Polypeptide
  misc_feature (169)..(185): Xaa can be any naturally occurring amino acid
MNAASTAVKLKNYISYNSLTISMLKAYKFRIYPTKSQRTKMERTLDLCRWTYNETLEIRKTAWEDEGKSLSKYETNNLLPEWKENKPELKEVFSQVLQNVHERVDLALKAFFRRVKAGEKPGYPRFKGIGRYDSFTYPQKGFKVDSGKLYLSKIGEIKIKLHRPIEGKXXXXXXXXXXXXXXXXXGLESFATLSNGVKIANPRFFREEEHELARVQRKLSKAPKGTPERKKALKVVERVHERIANKRYEFAHRISNQLVNRYGLIAFEDLNIKGMMHNHNLAKSIGDVAWNMLVTLTSYKAASAGSMVVLVDPRNTSKMCSRCGILVQKDLSERVHNCTQCGLSMDRDWNAAINILRLGLQSVGIQSVQARPFSRAGVVTG

SEQ ID NO: 30393 - protein, 435 aa, unknown
  TnpB Polypeptide
MQTIKLPIQNLSKENISFIKEIQRQQSIVIRFAYNRFSENKSEKEIRLLVKKLNQINFLDSWLIQSAIKEAEQIYKSSKDKTILFGGKLNWLNYIKKKISKEKFKENRLKDIVIQGEASKTGNRKFELNIDDNSILFKFNKNNHIELKLPKLRKNYFKLLSKLQVLAENKEVSYSIKLDPEFIYISFEEFKKEETILNKNRVFGIDMNPNSIGYSILQFDKENNYKVINSGIINISNLTKDLKVSSDNPKQIYQNNKREFESFEICKLLVNKTKEFNCSKFIAEDLEFKIKDKKFGNKFNRLVNNIWNINKFQNNLNKRCNIEGIEFVKINPAYSSFIGNLENINYPDPISASIEIGRRGYKKFEKNWFYPKLNVENLKNLWKEEINWSLIKDWKQLFEQIKNLKLKYRVSLDLSKFKVFRNKCERSLVDLLCFV

SEQ ID NO: 30394 - protein, 394 aa, Mycobacterium sp.
MSRFRLLPTPAQQAVLLEHCRHARFVWNLAVEQQRMWQPGRPAPGYNEQSAQLTEVRAEYDWLAAGSQTVQQQALRDFAQAMRNYFAGTHRRPTWRKAGVHEGFRQVGVKPRHIEKLNRRYGRIWVPKVGWVRLRRTRAMPAEIKSYRITQDRAGRWHVAFAHVPDPIPGPGNGSVVGIDRGVAVSAALSTGELLHAPGPTSGEQARLRRLQQRLARAQHGSNRRARTKLAIAKLKVRETDRRRDWVEKTTTDLARRFDTIRVEDLDVRAMTRSARGTREQPGVRVAQKRGLNRAIRGQGWGRLVARLDHKAAGRIERVSAAYTSQRCSVCVHVAPENRKSQAVFACVACKAGPCNADVNAARNIAAGRAVPAQGDLAAGRSVNCEPQLGSLPE

SEQ ID NO: 30395 - protein, 283 aa, Streptomyces sp.
VRQDREPTRLLCRWVETSNTSLNGTGASCVADATALTRSVATLKGLTGSVIGIDMGIVNFLADSNGGFVANPRYGQRAAADLKEAQRALGRCKRGSKRRRKAVAKVAALHRKVRRQRLDHAHKTALALVLEHDVIAHEGLKVRNMCKAPSPRPDNKGRYLPNGATSKAGLNRSIADAGWGVFLAILHAKAESAGREVIAVDPRNTSRRCPECGHTAAENRPTQKEFRCVNCGHTAHADTVGALNVLRAGLVRRDAQGHSEKPPCSRDGGVTLVDNTERLSSVF

SEQ ID NO: 30396 - protein, 293 aa, Shewanella sp.
YYVSFCYENGKDESELSSNSEHLAFLQGSTKEYLEEHTIGVDRGIAISVHAGSMTFDFYDNQKKNMTKAERYIKRLQRKLARQQKGSSRRNKTKHRIATHHAKKANIRNDFAHKTSRSLVDSKAKVIVFDALSTSRMTHKPKAKQNEQGRYLPNKAKQKAGLNKSILNVGWHMIETYTKYKAYQAGKAVFKIPAPYTSQECAKCDHTHPDNRKSQELFVCGKCGNTDNADNNASLVIKKRAINLILDTGTVLSDDGVLRTKSDSGRGGNRKTSRANNSTSSVQRSVKKEKLAA

SEQ ID NO: 30397 - protein, 385 aa, unknown
  TnpB Polypeptide
MKKTRGYKVRIYPNIEQEILIDKTIGCVRLVWNYSLMEQNAIYDLFKDYKELYKSHKYKTQAKWKKIFPFLSEVDSQALATTNQELLQTFKNFYKGSHKEPRYKSKKNPRRSYTTHTTNNNIRIEGNCIKLPKLGWVKLKTQRKKLPNDTIIKAATISVTTTGKHYISLRIEYEQEPVIRNNDILRTIGLDFSTTHFYIDHLGKKANFPTHIEKTLQKIKKVHRKMSKQVKGSNHREKTRLKLAKLYEKKTNQLKDYHHKLSNQLIEHYDIIGVESLSLKEMNQEKYYRQRIQTMGYRRFIDILTYKAEDNGVLLHKVHKYYPSSKTCSLCGAIKKTFPVSQKIYKCDCGNVLHRDMNAAMNLATKGMITYLTNYIEDRTASIAW

SEQ ID NO: 30398 - protein, 432 aa, unknown
  TnpB Polypeptide
MLVLELKLHGTDSQYQIIEEMIRTARFIRNSCLRYWMDNCGVGQYDLSKLCAVLAKEYEWANKLNSMARQASAERAWAAIKRFYDNCKAKKPGKKGFPRFKKHSHSVEYKTTGWKLSSDRQSLTFTDKFEVGTFKLIGTRDLSFYQLEQIKRVRVVRRADGYYAQFCIDVEQTGEHEWTGRVVGIDVGLEYFYTDSDGNTVENPRFLRKSEKALKRLQRRVSRSQKNKKNRKKAINRMKRKHLKVSRQRRDFAVKAALSLVRSADLIAYEDLQVQNLVKNHHLAKSISDVSWSLFLQWVEYFGKVHGIVVVAVPPQYTSQDCSKCGHRQKKTLSTRTHQCVKCGLKLHRDHNSAIEIKKKGLKTLGATSTVGLTGIHACEQNDLCLDEETHLSKPTQSLQEICRAIYGIPHYSCECEARSNLVGEDVKSFKL

SEQ ID NO: 30399 - protein, 491 aa, Marinospirillum sp.
LKTRETYKKVKRAKTPTFIVELPVSVSQETERQLTARLLAGTRLYNAALGEALRRLDLMRESKDWQAARKLKGKQRTDAFRSVVKKFELTSASVSAFATRCKNEAGWKSRLSANETQRIAETAFAAAEQHSYGKRGRPRFKSAKRPLKSFSGKTNKAGIRYRPELGIVEWAGLILPIQYPPAGKDRWLDEALKAKTKFCRLVWRNVKGKRRWYVQLAQAGLSPAKEKNSTLPNNEVGLDVGPSSVAVVSETASDLLAFCPTIEQPWKEIRTLQWAMDRSRRATNPHCYNENGTWKKCAKVKVVSKNYLALKQAVAELERKLAAERKRSQGQLVNDVLRLGNIIKTKKLSYKAWQKLYGKSIKTKAPATFIAGLKRKAESAGGQLIELNTQRLKMSQYDHVSGEYTKKTLSERWHFLGGKTSESALLVQRDCYSAFLALCVIENEHQPSQLHARWPVVKQLLEQAGWCRQIEVANGGTIVLPTAKPSERLAC

SEQ ID NO: 30400 - protein, 401 aa, unknown
  TnpB Polypeptide
MLKFKLELSKQQKRLFLEQTIAYTNAISYILEKNLKDKSTNVKKLHRLYYKEVREKFNLPAQLAVNVIRETSAIYKTLWAQFKELKRRKPNSKSVKKFWDKPPKRKSLIAKYTHNRTFSVKPDKLVVSLSTYAGRVKNIPIKGWNKHYEYLKQGKISDPILVYDKSSKTFFIYIPITLKVPQQKPRQIVGVDLGERHIFGIASTTEQKELIDIPDEYKHRKQRYHSLRSELMSKGTRSAKRKLQKNSRREKRFTENVLHIMAKQLISKYPNAKFVFEDLTQIRQNRITYRGKNKEARRHAEQWPFASIISKVIYKNTIQYGIESEKVNPYFTSQTCPVCGHVDPNNRPNKGEVFTCTNCDYTEHADIVGAINIALRYIVKKQDENLKGLLVSQPNAPRELT

SEQ ID NO: 30401 - protein, 367 aa, unknown
  TnpB Polypeptide
MLVAYKYRLYPNKEQQAYFAKCFGCVRFIYNRMLSDKIDYYKETKQKLNNTPAQYKKEFEWLKEVDSLALANAQMNLQAAYNNFFKRPEVGFPKFKSKKSHKFSYTTNNQGGNIYVSDRYIKLPKIGLVRVKKHRDFDGLIKSVTVSQNPSGKYYVSVLVSQEDKEKLPINNNEIGIDLGIKEFAITSDGEMIENPKYLRKSEKKLRKLQKNLSRCKKGSKNREKCRIKVAKQHEKITNQRKDFLHKLATRIIRENQTIVLEDLKVKNMMSNHKLAKSIADVSWSEFVRQLEYKADWYGREIIKIDTWYPSSQICSNCGHRDGKKALSIREWTCPNCGTHHERDINAAINILNEGLRMRTVGTTEIA

SEQ ID NO: 30402 - protein, 409 aa, unknown
  TnpB Polypeptide
MKLNLQVRLYPNKTMKTILDSLCDYRRYCWNQGLELWNTLYEARLIGLPVELRAKIKASSADKTIEFSEEEQTLRALFPAPAERKVRDELVAQKADWQTTFSSRVLQLAIKDLAVAWNLFFKNPKTAGKPCFQSRKKPKQGFKTDSARIIDGRLVLDQPQTYKGAWSSIRFKGANIPDGNLKLCAVTRTKGKYIATITMDVEVVELPKTGKKTAVDANVDHFDTTEGQTSLKPECLDPLYERVRTYQRQLARKRKVNKNYRHSKGYQATRAKLQATYERIRNIQNDLLHKFTTDLYREFDTVVIEDLDVKGMQMKKKAKNLHRSLFGRFRQFMEYKAEKFGKTLILADRFYPSTQRCSNCGHVKTGDEKITLSGNAKHGTKHHEYVCYHCGYEDDRDHNAVLNLLALAK

SEQ ID NO: 30403 - protein, 704 aa, unknown
  TnpB Polypeptide
MLRRKIYRENDNRFLELRSKIGQYSNSVCDITHFNKFCIHNNNTWFNTSIYNIDEKYKGNILPEHIDLSKADDRDFTRKTMQIIMYPNDYQKSIFDKWFDSFARVYNATIIFLRKHLPYGTIKEFKMLYNQNKILNNILKNITRDKNELSKLKLKLDSLYSDLNNLNLIVRKKKNDINKIERIKINITNTGLSIKRLNINIQKLYCSAKPYKCFAKPYETLKIHKYDMLNFQNIRTNDLKTIKESIKEKYSYGIRDEPKTCIPSHSLDGAIKLACSSYKTSIDNFMNNRIKRFRIRCRNLNGKTKLMEIESVYFINGINGFQIKESVLGKMEYTYNGNPYTLTENNTSNIHYDGNVYRLLMPVKIEDSEKSTQSKYVVASLDPGIRVFQTIVTNEGMIKYGINANKMISNYLTKIDKLTDKKTTKNEIIKCKNILENLKKKLTKVQKKLLTASEKNKEYCNITINKLLESIYYYEQKILQLMNEPNKIEKNTIEIEIERCKNTIKIHEENYKLYAENINDEIGEIFRKYIQRMKKLLKCIKFNEQRIEKLTKINENPKKKEKYEKYMRYRKENKSKKYYEIINRKVKEMHWKIARELGSNYETIIIGKLSIHSIVQQDNLDSMTKRVGQLMNHYKFRERLVYKCRTLGSEVIVREESYTTKTCPKCGHFNDWIKAEKFIECESCKKKYDRDGGGATNILIKSLK

SEQ ID NO: 30404 - protein, 535 aa, Microbacterium sp.
MPEKAHGTPSGYTFWNCRCKRCNKVARASSKTRTRVPRVKPDLTQMPEEDHGTLRGYNYWNCPCDSCRAMGSMMRADARSRKRAEHDGPVDVRRYSYRIYPEPETVDSLRRVFGSCRFVYNSYIALARERYAAEGKHPSAYDASKLLVTEARRESATAWLAEVSHAALSAAVHDAADAYQRFFDSAAGRIKGRRVGRPNFKSRRTARKTARFAENAFSIRGGWQNTRRGGGRLHLANIDQDIHVNWHRPLPGYPSAATVREDPDGMFWVSFIVRVPLEEPKQPTREPRAAGVDVGLNDYAAIAYSDGTREKIANPRHYRHAENRLRRADKNLSRKTPGSNNYAKAKRTRARVHRRVANLRENHARQLASKLSRENQTVVIETLNIAGMANTNMAKSINDAGWGQFLRFLEEACTRKGVDLIKAPRFYASTQVCSICGESDGKKPLAIRTWQCTCGVTLDRDYNAASNILAAGPAVYACGRDVRLQLAEAVPDEAGSHRSEAVPRRRKRAGRRRVQASSDPRKLKGFRGLVENRGA

SEQ ID NO: 30405 - protein, 444 aa, unknown
  TnpB Polypeptide
MTIIRSDRLRIHADSPAQRDALAETLALYRRLVRDLMTVAFTHWPSVGPAKGNEAVAVIEGLIHPTTKRPSVRYRYFQNRYYKFPSYLRRVAIMDAVGQVRSFMSRYGDWLDGQRRHPHSRPPKLTASTNTFPSLYGGQCIKLNEEATQAFIKVRCRNDWLWMSFRLSGKLRYRGRGSAKSPLLTFNGKQWGLSLPEAFTPAAPVRTPKRVLAVDVGINTAATWVVIDDQGTVHARGFLRRRDKDREHRLMQRIRSKARKQTRHGSRLPADFCARDHQRLTRLADNQAHQISRKLVNLALTHHCDAVVAENLKGWRPKAGRKRSPMKARFHRWFHRMLVDRIQSKTQEVGLRSVLVYARGTSSQAFDGSGPVKRDESNYSLCTFASGKRYHADLNAAYNIAARGLVYYQGGRRKPSARAGQPTSARTPGTPVTLSTLWRHAEAA

SEQ ID NO: 30406 - protein, 290 aa, unknown
  TnpB Polypeptide
VSRRFKLARRLAAGTARIVSATVSRTAGRWFVSFTVQVDRAIPGRHARPGSAIGVDLGVTTLLTGVDDQGHIITVPGPRALRSSLRALRRASRAHSRKAPGSANRRKSAARLARIHARVADVRADALHKATSGLAARYQTVVAEDLNVAGMTRNRRLARAIADQGFGMARRMLGYKTAWHGGRLVLAGRWFPSSKMCSGCGAVKAKLALSERTYRCGCGLVTGRDINAAANLLNLAASGAESLNACGGTVRPGQAGHVPVNQEPGTAQAGQTGTASGQPLAAEQELTHAR

SEQ ID NO: 30407 - protein, 290 aa, unknown; identical to SEQ ID NO: 30406
  TnpB Polypeptide

SEQ ID NO: 30408 - protein, 401 aa, Clostridium sp.
MTSTNIEKNTIEKGFKYRIYPNKTQINQIELSFKAKRYVWNYFLNINKHRLNHHKNILNYTKMSRLLTLLKKKNIWLKQCEKSVLQNTLKVQYETFLKFFKKECGFPKFKSYKNNYQSVKMNYMKTTAGGNIKVKEKEIKYTSTGKYRKQFCKIQIPKTADIRISYSRQYQGRIVNSTLSRDTDGKYYISLCCVDVPQKNKNKTGLVVGIDLGIKEFATTSDNKVISNPKYYRKYEDKLIKAQRKLSKRKKGSNNRNKQRLIVNRYHKKIYNCRIDFLQKLTTRLTSEYDIICMEDLNVSGMLQNHKLAKSVADASFFEFNRELEYKAKWYDKIYQQIDRFYPSSQLCSNCSNQSQQTKDLGIRTYICSKCGLEIDRDYNASINILNEGLRIVNNKKVVSM

SEQ ID NO: 30409 - protein, 528 aa, Nocardia sp.
LSTPRYRCPARSATPCAFCRTTTCWPPTRSSAWCPRRARSGRGAGHDLRQRARPVLLSVAGVMMPGVTRSGVPNGRVVQAYRFALDPTSGQVDALRSHCGAQRFVYNWGLRTIKANLDQRNAERSCGIADDDLTPLVGWSAYGLRKMWNQVKDDVAPWWRDNSKEAYSSGLANLAAALSNWTASRSGDRSYRRVRFPRFKSGKALLSCRFTTGAFGLAPGTDRRHLRLPRIGMVRTHESTRKLARRIEAGTARIRSATVTSSRGRWFVSFSVEVARTHRAPQLPDTVVGVDLGVMRLAVLSRPVTGVSDEHGMVANADHLEHAQKQLRRLQRRAARRCGPDKRSGATPSKRWQRTTTKIARLHARVANARVDGLHQLTTALADRFGTIVIEDLNVTGMLRNRRLARRIAGAGWGELRRQLDYKTRWRGGRLVVADRWFPSSRTCNCCGVVKAKLRLSDRVFGCEMCGHTADRDINAARNLAAIAATVTGGGSSPSCGATVNEPAGNPCKTSSAGSGYRHGKPHEGNAA

SEQ ID NO: 30410 - protein, 296 aa, unknown
  TnpB Polypeptide
MQHVCMQWNVLRSQGRRHVPDPWQDIAQEALIDYVLLSCRPLLSGLQVVGLDSTAIECDVQVGSIELEVVLRVSCPEFQLLGDTLYRFLDEALRYPSDHLLAVDPGPMLLQKVQRRLTVDPDSILFEHVERSVVDSLEGVLVDQLRCSLPGIESLEVGDHLNSQLLEGYPLTFKELTSGWAEIVFPDTTCSRRIPVFLAPNQYPMCSSRKCPTCGRYDSRIGALFECECGLNLDRNVNASIDLLPTAVSKRLEVAGGLRFDPGAFRHDAMMILYEPAMAARSEPNGMSEETAVVPP

SEQ ID NO: 30411 - protein, 369 aa, unknown
  TnpB Polypeptide
MGGGWDRVLQMRATPEWQATRAMPKGRERTKAFRDLRVRFRLSEYDFHADVAKHRKASGRGHLLGINECQKLASRAWISVERHLYNGGSPRFISSRRGLHSIEGKTNRTGIIWKADQQCVTVCKRVYRVRVDKRDDWLTRALQDPTDPTKPRKVKYCRIVREMRKGKERFLLQLVAEGTSPLKHAYAGKDLRMAIDPGLGSLTYATEDGTIAKVQIAPSADTDHRAVRKLQRAMERSRQATNPDNYETVEVVRHGKKHKSLKVKSGRLQWRFSKRYESLRAELAEIFRLSAATRKREHGEVCNWLLGHAGHIIVEDNSYKAFQRGRFGKTIGRHAPAALYAQLTNKAESAGLLVEVVSPKKLKPRSTIC

SEQ ID NO: 30412 - protein, 410 aa, unknown
  TnpB Polypeptide
VRTAYKCRAYPDQAQASLLNRTFGCIRVAWNRTLAWRRQRYHADKTGTSYAEASAYLTAMKTTDELAWLNEVSSVPLQQAIRHQQAAYAAFFAKRARYPRFKSRNGRQSAEYTRSGFRYRDGRLHLAKMDAPLAFTWSWPDTDPAAIDPSTVTVSRDPCGRWYVSFAVDVPGPESLPATGWVTGVDLGITDFAVTSDGQRIANPRHLERQARNLARYQRRTARCQRGSANRAKARAKAARAHRKVRAARADFLHKASTRLVRDHDVIVLEDLSVQNMVRNRRLARAISDCGWGTFRAMLEYKAARYGRHLIVIDRWYPSSKTCSACGYLLAELSLGTRMWQCPSCGTRHDRDINAAKNILAAGLAVAGDNLPGHACGADVRHPGSSRVQSAVEQEPRPVRAGIPVLQGRE

SEQ ID NO: 30413 - protein, 248 aa, unknown
  TnpB Polypeptide
MLLSHKTSIKICPEYSNIIGHMCYAASKLWNVCNYERHHYKELGLEKYPDWYYQKKAHKGDLWYRQLPSQTAQETCKQLDKAWKSFYVLKKTGGIKDPNPPRFKQDNIPVTYMQMGIRHEKGSDQLRLSLPKDLKSYMEETYGIHEKFLYLENKIFRKMDRIKQLRIYPPKNGKCDLIVIYEIEDPEQLSQNGHYLSIDLGLHNLMTCYDSGNGRTFILGRKYLSVSGKQKELSVTGLKTPEIIKVAA

SEQ ID NO: 30414 - protein, 373 aa, unknown
  TnpB Polypeptide
MQKRTASIKLVTTAQESALLNAVQRESARVCNTIVLLAHKNNCGNHVKLHRLAYYPIRATTNLGSQMVCNALKAVCNAFKSMKSKKAKELPVSRFKPTSRVHYDKRTYSFKDGALSLCTLSRRIVLPMALGKPQKEYLRIGTPKKAQLIYRNKKWFFNLVFDIPDVPLSPSSDKVLGVDLGENVVAATYLRKLYGGRQLRHKRDCAVAQRKRLQRKGTKSSQRKLKKTSDKEARHIKHTNHSLSKAIVQEALNSGCFVIALENLTNIRDRIKATKRVRYRLHGWAWAQLQRFIVYKAQAVGLKVVFVNPAYTSKTCALCKELSIRVKHRFVCKVCGIQRHSDLNASLNISRIAASADGATGAVNHPNMEAALA

SEQ ID NO: 30415 - protein, 502 aa, Streptomyces sp.
VKRFQPQPGFVVQAYRFALDPNASQEHALRSHCGAARAAYNWAVGWVEASWWQRRAEETYGVPEAALTEWRPWSLPSLRRAFNEAKHTDPRFADWWEANSKEAYNTGLANAAAAFDNYAKSKNGKRRGKRMGAPRFKSKRKARLSCRFTTGTIRVERDGRHVTLPRLGTLRTHEPTLKLLARVQAGTARILSATVRHERGRWFVSFQAEVKRDIECVARPDTAVGIDLGVKALAVTADSTGEIRTIANPGHYDAARKQLRRASRIVSRRQGPDRRTGRKPSRRWEKANAARNRVHHRVANLRENALHKLTTSVAAEYGTVVVEDLNVAGMLRNRRLARQIADAGFGEIRRQLDSKTRQRHATRLVVADRWYPSSKTCSGCGAVKAKLPLHVRTYECDACHLVIDRDDNAALNLAALAAAVVTGTGVAGDQDTPKRVSKPRGADQKTRATRPRRKAGAGRGGQVAQLCRASGRRKRETVLKPKLSRFGDVTDLPGRNARNTET

SEQ ID NO: 30416 - protein, 365 aa, unknown
  TnpB Polypeptide
MQKGIKFRIYPNRDQKNLINQTFGCCRLIYNKGLDMRSEAYSNGHKIGYPQTSAMLTELKKCEDFAFLKAVDSIALQQSLRDLDRGFANFFQKRAAYPTFKSKHNRHQSYRTINQGGNIRIVGRHIKLPKLGFVKIRQSMEVGKINNVTIECTPTEKYFAVLNVEFEPQPRKNKGGCIGIDVGIKDFYSDSNGNVVPNPKFLEKSMSKLIREQRKLSRKQKGSRNRNKQRIKVALIHEKITNQRNDFLQKQSTLLIRENQTICIEDLKVKNMLRNHKLSQHIASVSWSMFFGMLIYKAAWYGNDIIKVPTTYPSSQTCSCCGYKNPLVKNLAVRTWKCPNCHTVHNRDTNASINILNKGMQMQSA

SEQ ID NO: 30417 - protein, 308 aa, Ruminococcaceae sp.
MITAKKVRLLPTEGQEGQLWKSAGTARFAYNWALDRQIGHMKATGKLGKIKDNELRKGLTELKRTEKYSWLYEVSNNVAKQAVKDACEAIDRFHGEGKKHGYRYRAAATKSGRELDFTDFEGFPRFKSRKRSKASFYHDTEKLRVYSDHVHLEKIGKVGLAEHDRIPTDRKYANPRITHDGKYWYISVGVEQEFEKPELTGETIGIDLGIKELAIVSSFDKPIGNINKTAEVRRLKKKLKRKQRQISRKYEKNKIKTERAYKFTKTKKHREIRERSKADTPKAGQHTLEPHTSGDDQDSENQAVEGSR

SEQ ID NO: 30418 - protein, 351 aa, Shewanella sp.
MHTKTLKVRVKDKHQIVLTQQARSVNFVWNYINELSSRSIKERGRFLSAFDIHPYTKGANKELGLHSQTLQCIAKEYVTRRVQFKKVRLNWRKSGGAKRSLGWIPINTGAAKWKNGQVFFNGHYYSVWDSYGLSKYQFKTASFNEDAQGRWYFNVVVEIETQASSGTASVGIDLGCKEAATDSNGHKVVGRQYRQLEQQLGIAQRANKKHRVKAIHAKIKNRRKDDLHKYSRQLVDGNAAIFVGNVNSLSLAKTKMAKSVLDAGWGMLKTMLEYKCAHAGVVFEEINESYTTQTCSCCGEIPASSPKGRAGLRIREWSCSSCGATHDRDVNAAKNILAVGHDRLAVGIHPL

SEQ ID NO: 30419 - protein, 430 aa, unknown
  TnpB Polypeptide
MKPWHRAALRFSVVMILAHRIALDPTQEQANYFARAAGTRRMVYNSALDEWNRQYASGVRPNAMRLKKQFNAIKYAEFPWLTEIHRDAHAAPFDNLSSAWKQFFADVKAKLSAHAPVFKKKGRCRDGFYVANDKFEIDGNSIRLPKIGWIPLKEALRFDGKIMGANVSRTADHWFVSVQVDVADQTYKRPRTAHDTVGVDLGITTAAALSTGEKIVSPRPLRKALRRLKIRQRRIGRKVEAAKIKAGLTPGARLPKGTRLPQSANRLKSARSVARLYERIGNIRADFTHKLTTRLCRENQTVVIEDLNVKGMLEHEKLARAISDVGIGEFRRQMIYKAQRFDTTLILADRWFPSTKLCSSCGEKNESLTLKDREWTCQSCGTHHDRDINASINLKRLAPSQLHYPWRALLATAAPLLGQPSTGRESNVCQ

SEQ ID NO: 30420 - protein, 384 aa, unknown
  TnpB Polypeptide
LLKSFKTEINPTEEQIVKINKTIGACRYIYNFYIAYNKKLYEDDKKFMSGKSFSIWLNNEYIPNNPDKQWIKEVSSKSIKKSIENGYNAFLKFFKHKNNFPKFKKKNNLNVKMYFVKNNQTDCLSERHRIKVPTLGWVRLKEKGYIPISKDGFIVKSGTISYKAGKYYISVLINIPEQNIQINNNPGIGIDLGLKDFAICSDSSIFQNINKTNNIKKIEKKLKREQKKLSRKIVSSMEGASTQKNFVKQKLKVQKLYQRLTNIRTDYINKTINSIVKTKPSFIVIEDLNVSGMMKNRHLSKAIAQQKFFEFKTKLINKCKECNIELRIVDRWYPSSKLCHNCGHIKKDLKLSDRIYKCLECGYTEDRDINASLNLRDAKTYIII

SEQ ID NO: 30421 - protein, 396 aa, unknown
  TnpB Polypeptide
MIKTFKTRIRPNKEQEVYLNKCFGYRRFIYNNALEYFNTLLKYNNNVIDKDLKKFFDKFDYITHIYSKKEKGPGFEWTKEYNKSIKNEVASDVNLAVNRFFKDIKNKKRCKLHFKRKVHGNGSFRIYSKHKTNVMILDMKLFSFIINREFGHMSLKTYEDISFLYHHDIKTMTISMKNFKYYVSFTYEIDVPKHKHEKDTIGIDLGIHNPVVCFDGKDIINPKFPKGIIKKLEKRADKFSTIVSKKKYDKCNPSKNYIKARTKLNYIHGKIVNIRMDYIQKVSTFLTKTYRNIVVDEFSFKELLTESDGIKRINRGIHRVGAFTFMQVLKYKCHFYGSEYILAEPNSTITCSECNHKLKTKLKLSQRVFNCPDCGYIDDRDNNAAINIYKSYKNLY

SEQ ID NO: 30422 - protein, 417 aa, unknown
  TnpB Polypeptide
MANLTVTRTYIGTIKNPEQVRDGLDSLGRSASKVWNVARWTADRIWSQTGEIPDAGTLKAYMKGRECWNDLNAQSSQKVIEELSDAFQSWFDLRQKEPEASPPGYRKHGDTRPRSTVTFKTDGFKHDPENNRVRLSKGQNLKNSRSDFLLCEYQTRPDVDLSDVTRVQNVRAVWTENKWELHFVCKVEVEAEDSVGDGVAGIDLGISNIATVAFPDEYVLYPGNTLKEDKHYFTRAEYDTEGEDGPSERAERARQMLTERETHFYHTLTTAIIRECVQRGVGTLAVSWPEDVREADWGKTGNKKLHTWAFDRIYQYLAYKGEERGVEVLKENEWDTSKTCSACGDDTDSNRVERGLYVCSSCELVGNADCNGAENMRQKITPSPHGEDRSNGCVAQPSVHLFDRESGRFAPREQAVP

SEQ ID NO: 30423 - protein, 384 aa, Lactobacillus sp.
MVLRTQKVRLYPNKTMQKVLDDLCDYRSYCWNAGLALWNDMYEEALILDDKRLRPNEYKVRNELVANKADWQYRLSARCLQLAIEDLSKAWKNFFDKAQVDWGKPRFKSKKATRQGFKTDRAKIIKGKLRLDKPHGIKKWYDIRFKGAKSLDGELKVVSIYRENGKYWASLPFEIEVANKAKTNRVTAVDVNVGHFNYTAGQINTLPKRLNHLYQRIKYYQKSLAKKRTVNGKRATKSNNYVKTRAKLQRDYRKVANIQHDIMQKFTTQLVEEYDKIVIEDLAVKEMQMTHVASKGLQRSMFGYFRQILSYKCNWYDKKLILADKYYPSTQRCSKCGYIKTGEEKVGLNGNLKYGTKHNEYICYECGNIMDRDENAVLNLLALI

SEQ ID NO: 30424 - protein, 390 aa, unknown
  TnpB Polypeptide
MVVRKVSQRIPFTPSKMQAALLEQCFGARRFAYNQQVEAFNSYDKDTNPRPKYPGVTDMKGANEWLRDSPIPSNALSNTIMDFRKAQSVYFRKAEYGKNRPRFASKNDNVQSFRNGKPMRHMEGNRYPLSRKLGSVRIRRRDRIRYPLESLSSWTVKRESGVYYLVLLFDVDVRPKPPVGGQVGIDVGVKDFLTLSTGEKVNYPDRLHQLEERVRWEQRKLSRRVKGSSNYRKQKATVAKAYAKVRHYRENFQHQVSHRLIEDNQFIGMETLAVGNMTRKAKKKLDDSGKYTRNGQSAKRVMNRSILRNGWSSFVEKLAHKAQWYGRTFVQVDRFYPSSRLCHDCGRKYSGLRLSEREWVCDSCGVLHDRDVNAALNILGEALRISQARE

SEQ ID NO: 30425 - protein, 425 aa, unknown
  TnpB Polypeptide
MLVQHRVVTECRSYQERVKAANGESSKYVSQGWKRTVDASAPSYGEDYVNLGAVDKQYAVIENNPFLDGEIILRMVIRGTWYRLIFSFDNKRFTEGKVTLPVVKVEDGTPVFIFTVVTDNPVVQFSGDYTIGVDVGINNYATVVVREVATGRIVYETTLSQRVHSLWNSVSASGVQVRALRRKAATLLRDRQARMFALDEAQLHRQAASRKKRELAILAAQEIAVLSHVWGNAVVAVEDLGWISNTMQNGRWNRGALIQWLTHYVSQNGGWVVPVNPANTSQLCYKCGAKVTHPTHGMSVCPEHGVMNRDVNAAANIAARAVPRVAKARITRAKNRKLRPQAPLKTPVARNSLKYPGRDRAKSAPTSKRKNHHLISKGVILPSCPARVNVTTVLADQGACGALGTSRAALKQGNKTYEYRLCSLI

SEQ ID NO: 30426 - protein, 252 aa, Bacillales sp.
VKVAEPNKIPIGVKYTNPRITYDHKYWYISVGVEVAETAEKSTGISIGIDLGIKDLAVVSNIDKPFKNINKTKEVKRLKKKLKRKQRQVSMKYEENKTSLRKAGENRYKFTKTKNTQKLEKEIKLIHRRLTNIRLNHIHQTTNEIVKTKPSTIVVEDLNVSGMMKNKHLSKAIQEQNFHKFITTLQYKSKLNGIEFVKADRFYPSSKTCSNCGDTKKDLKLKDRVFVCPSCNFKIDRDKNASINLSRYPKSA

SEQ ID NO: 30427 - protein, 386 aa, Lactobacillus sp.
MLPLMTLKAIKTRIYPTAQQQEKITANFGYCRFVWNQLLDMQKQRYANGGSYVNEFGMNYLIKCLKKEYSFLKAAESTSLLHVSRDLHHAYQKLFKEHKGLPKFKSRKFPKQSYQCNAVNHNIQVIDQHHLKLPKLGCLRFKAGRQPFGQIKNVTIRLSATGKFYAIILVKTDIKPLKCTGKAIGIDMGVADLMITSDGIKYPTIRFDKQLGKKKQYWEKRLARRRRQAEKEITWDKHNQVPEPRELADFKNYLKAKHMVAKYHEKIANQRDNYLHNVTKELVEQYDVIRIEDLKAKNLLKNHKLSRAITNQSWRKLRLMLEYKCAWYGKQLFIINPRKTSQICSICGYDDGKHTLDIRQWTCPNCGINHDRDINAAMNILKATAS

SEQ ID NO: 30428 - protein, 392 aa, Lactobacillus sp.
MLITYKIELKPTNQQAWLIDQQISGSRWAYNLFLDINRQRYECGYHYMNAYEFSKWFNHDYLAANPDDQWIKELYAKSVKQAFIDADTAMKRFFKKLSGYPHWRSFKRGQGSYYFVKNSQQQIIACERHRIKLPKLGWVRLKEYGYIPTDAEHFVIKQGRVKFKAGRYYLTCVIEQADPIQLTLVNDPIGIDLGLKNLAILSNGLVYGNQNKSSRLKKIRKQLRRLQRKLSRQYCALKARKQKEGRSATDLNLAKTQLKVQRLYQRLTNIQIDYQNKLIAIVVRTKPLWVALEDLNVSGMMKNRHLAKAIAQQGFYNFRVRLIAKCQQLGIPVHLTERFEPTSKLCHNCGTKKVSLKLSERTYHCPNCHYTNDRDLNAALNIRDTKNFVLAY

SEQ ID NO: 30429 - protein, 346 aa, Methanoregulaceae sp.
MILTYKLRHGRDFTDELQKAFAVAEFAVITRSRTSKDVAPIGLKSVIANQVLKKYGRQKNLKKIRHVNLIVPNQGIKVDRDARSIWVPCLKLRLPYPFPDRFTKINQIEVNKEFAFVSCTIPDASVDPPTCFIGVDRNTTGHIAVAANPDTGKVIKLGKAALHIHKKYAAIRTRLQKQGKYRVVKRIKNHENRIVKNPNHHVSTCLVSGAKGLHAALVFEDLSGIRQTKKQYRSFNYALHSRSFYQLQQFVAYKAKLLGVPVLYVDPAYTSQDCSRCGARGNRLRKGFTCPVCGHVDHADANAAFNIALRQKSRVDRIQTGMYTMGALIPHDALFECGATSEPHVL

SEQ ID NO: 30430 - protein, 384 aa, Methanoregulaceae sp.
MLITVRIKVCPTGDQARSIIATMERFNTACDAISETAWLNRTFGKYTLQTILYRDIRSDFGLSAQMAVRAIAKVAESYLADRSVQHTFEPDGALVCDQRLLSFKGSDRVSILTLDGRIVAPIIVPDYRDIDRAKIKGQMDLVSVRSEFYLMVVVDVPEEPMIEPDEVIGVDMGIVNLAATSDGETFSGDRCTTVRKKFAAIKAKLQRAATWDAKKHLKRLSGRERRFKRDMNHIISKKIVGTAKDTARGIALEILNGIGARISVTKAQRLAIGKWAFFELGTFIRYKAQEAGIPIYFVDPAYTSQQCSVCGYTSTDNRKSQAEFLCVQCGHHENADSNAAKNIAGRADVNQPIALRPPSKRCGSWKGKPTTGVMGIMPTTFSRG

SEQ ID NO: 30431 - protein, 461 aa, Moorea sp.
MQLGYVYKLKPSPQQEAIMIKWLDMLLSQYNYLLRDRSDSYEQVKSPKLGNYCDLRSHGEACPLTCSVSKSSSVGYPWKNTKNPRRSAYEIQSSSLPVLKKQRPWYKQIHSTVLQQMLRQLDTAFTKFFKGEARYPKPKRRSRYRSFKYSPGQVKLDGNRIYLPGIGWMGFYNSRPIPDGFTMKSVTVRRKSRGWFVSIQIEDKSVPLPPVKTRDEIDPGRVKGCDLGIRKLVSISDGQIIANPAKSSKFNRQSRRLKLRQRAASRKRKGSKNRKKSFKKVGSLHERIENGRSVYHWETAKKLVDGADALVFEDLNIKGMKSRCKPKPNENGGYDSAKPTLRERNGQSAKRGLNRSISDAAWGELIKKIEVVAAKSGIPVIKVSPRHTSQECPKCHHTSAENRSGEKFVCTECGYHDDADVNGAVNIKNRGLKKLGINPSQLPSVRSRSVAYGQGKLRPRR

SEQ ID NO: 30432 - protein, 259 aa, unknown
  TnpB Polypeptide
MIKPSGLSITVKTQQKYIHQVRIVPRCSFYVIEVIYEDERPKSAVDPASYAGIDMGIDTLAALTSNQPGFVPVLVNGRPMKSTNQFYNKRKAELQSKLGHSGTTKRMERLTTKRNRRIEHFLHTAFRWIIDDLVAHGIGTLVIGKNDAWKQEANMGKRNNQNFVSIPHARFISMLTYKAELVGITVIITEESYTSKASFLDRDEMPVYGPDQKEKPTFSGKRTHRGLYRAKDGTLINADCNGSLNIIRKVAPDAFGSEG

SEQ ID NO: 30433 - protein, 421 aa, unknown
  TnpB Polypeptide
MLQLRAYKYELTPTAEQCSMLAQFFGAKRWIYNHFLAENKRRFLNKEKHLSNFDCNTEITKLKQQTDTSWLKGIDDWCLKHASEDLATGFKNFFDSVKGKRKGQKVSVPQYKSKHTRQSYRTRGVKIDFEKNIVVLPKIKSVECIIHRKFNGTVKTSTISKTPAGKYFISILVEEDIALLPSTGLEVGIDLGLRDLMILSSGIKFDHPEQMLLKAKRVLKKQQRKLSRKKRGSKNYEAQRLIVAKCHAKVTNIRNFYYHDLSRWLVNNYDAIYFEDLNVSGMLKNRRLARKIQESAWSTLVSMISYKSMWAGRTVHKISRWFPSSKTCSSCGHKLTKLDLGIREWTCPDCGAHHDRDLNAATNIKNFGQLDCYDQIIPSGETTEVGIKIPVTLMKHSSKIEKSSSVRASLNGDRVRKSNCL

SEQ ID NO: 30434 - protein, 287 aa, unknown
  TnpB Polypeptide
  misc_feature (44)..(44): Xaa can be any naturally occurring amino acid
  misc_feature (63)..(63): Xaa can be any naturally occurring amino acid
MFSVKLALKLNNREATLMAKHAGFRRVVFNMGLSLRTQMYSEGXFSDSKVINEVKKVLTNRVXKQPEFAWMNQLSSRVYQNALIDLKDAFSRYRSGKSGHPTFASRRNKQSFTVDSSNGKVVLSAGNTIKIPTLGTFRLHEPLECSFVSQTFTLSKEGSHWFVSFCVDVERLPIQQLQDSIGIDLGVKVFATLSNNQVFDAPKPLKRAKTKLAILQRQASKQVNGSNNQRKTYNKISRIHSRISAHRKDFLHKLTTYLAKTFKLIKIEDLNVKGMMANHKRRKLYPT

SEQ ID NO: 30435 - protein, 171 aa, Bacillus sp.
VPLLVETEVQEPPKMHSYIGIDVGLKDFAILSDGTPYKNPKFFRSLEDKLVKAQRVLSRRMKGSSRWNKQRVRVARIHEYISNTRKDYLDKISTEIIKSHDVIGIEDLQVSNMLQNHKLAKAISEVSWSQFRSMLEYKAKWYGKQVIVVSKHLLPVDYVLVVDIKIKTLKI

SEQ ID NO: 30436 - protein, 418 aa, unknown
  TnpB Polypeptide
MEREVFKAVELNLLPLTGAKQDELSALFSEYLATANEILSTLKFERPRSSTKLHHLTYTYIRKKSKLPAQLVCAARQDVWAKRKHKIAKFKRLSVAYNVPRSGSLRTTKRGNPILSVATLNGRLGLPIAQDGAWRRLKQLLDDGWAFTEFKLLNPQMVRVTLKREFEVAEPEPDQAIIGVDVGVGTLAAVTVFKAGKIERQLYFGRDVWQVKRDLGIRRSKLQAHASKGSRRARRVLRELGGYERNFDKTRCYQEAHKIVALAKQYDATIAIEDLRGLNNAKLNRKSNRKVKRMPYSMFKQALQSVAWQEGVEISLVSARYTSQTCPRCSAKGVRKGSSFKCECGFVANADRSASVNIAKLLWERNKHIQAPLACFAQPSQSGAVVNQPVLCHDGGQVLVRNHASHHEHMSSFSKGGS

SEQ ID NO: 30437 - protein, 380 aa, Cyanobacteria sp.
MLSSASLELPATVVYTALKTKLKLTPAQAVLMAKHAGIARFTFNWGLGTWIALYSEGLKPNALVLKKFFNNHVKPVYPWMKEPGICQKVTQYAFEHLGRAFGNFFSGKACYPKFKKKGQHDSFTIDASGRPIAVGGTRLKLPTIGWVSTYEVLPHVTTKKFTISQEAGNWYISFTYEIEPEVTPKSRDFIGVDLGVKQLATLSSGLVIANPQALKKARSLLARLQRQLQRKHKGSKRYHRQKLRLAAAHKRVKNIRLDATHKGTTYICKNHAVVAIEDLNVSGMMANHKLAGAVADANFYEFRRQIEYKAQRYGSCVVLVARWYPSTQLCSNCARQQPMSLSDRIYECSACGFVAERDFNAAVNLEQYARRAKPSLDTEG

SEQ ID NO: 30438 - protein, 402 aa, Actinomadura sp.
MARQVKRAFRYRFYPTDEQAVELSRTFGCVRLVYNRALEERTRAWYTEQRRISYVQSSAALTQWKKTEELAFLGEVSSVPLQQALRHLQAAFAAFFDKRARYPRFKSRKKSRASAEYTRSAFRWQDGRLTLAKMSEPLAIAWSRPLPEDAEPPTITVSRDTAGRWLVSILCADTIGRLDPAETAVGVDAGVTSLVTLSTGEKIFNPRHERRDRERLARAQRDLSRKTPGSANRDKGKARVARIHARIADRRRDFLHKLSTRLVHENQVVVIENLNVRTMVRNHSLARAISDAAWRELRTMLEYKADWYGRELVVIDQWFPSSKMCSQCGLITGPKRLNVREWSCECGAQHDRDVNAARNIVAAGLAVSACGAGVRPQRDSSRTGQSATKQETQPATVGTPRL

SEQ ID NO: 30439 - protein, 413 aa, Pelotomaculum sp.
MRCTTAHFRQVVSYYLQIFQEHQELIGYSQWLKAAETMTHRTKSNPHPVYPFDHEYSNLPSGFRRAAISEAYGLACAWQSSYEKWQAKKQKLEKKNPQRVAEGQKPVKFKEHPPQYPVESNSWLGYYKTEYKWLDKHHILLKLYTGSTYSYRKVALLQPLTIPPGYATGSPSLIHKPIGWELHIPIVLVEKSGLQEINKLVKTAATKICVVDLGVNRHAAMTIQDTKGRVYATKFISGAQDNHLRKRYLEKIVALQAQTRVIPEGERFAKDIWDKVSNLNNDIAHRVSRQIVNFTKDHKAKIIVFEYLDNLKPEKGTKSHWLNRKLGYWVKGRIFRYTQYKGLHVGIVTSRVSPKNTSARCPYCGFLSIERYTPGKEKGVDLARCTNCGVKGVNADFIGTLGIGLNFRLKHCS

SEQ ID NO: 30440 - protein, 546 aa, Actinobacteria sp.
MPKVDLPPGWVHQAYRFEIDRPGRHPAIASHEGARRFAWNWALSLIEAQLQARSAYRLLALRQGATMSEAEAWARSMAPVPWSKAQLRRIWNEGKHLATARSDEERTAAGEVIEARKVYETLAIRQGASAAEARRFGDRRLPGLGWWAENSKEAYSSAFESLEAAFKAHFDSRSGKRQGAPVGWPRFKGRAGRGSVSFTTGPIGVLDRHHVQLPVVGRLRVKEPTDKLRLRLANCSARILRASLVSEGARTYVSFSVIAERHRAAPRSQGVCGHDVGIAALVTGSDGAVTQNPRSAEAAQKRISRYQRRMDRQHRAASPACFNSDGTHVAGTCHWKERSRRAQKNRARLARAHGRARDIRRDALHKATHRAVSTYALHVVEDLNVSGMGRRGRGKRGFNRAARDAALGEYRRQLAYKCPWYGAWLWLASTWFPSSLTCSSCRAKKERLSRRARVFRCDACGTEMDRDLNAAKNLAALAELACVCLMAQMATGIPVDWSKLPIRPYGWEPDRDTRSSRGCARARGLRAEGGERKTARSTEAHMSKVA

SEQ ID NO: 30441 - protein, 385 aa, Streptomyces sp.
MKLVTQVKLLPEADQAAALRSTLRTVNEAANWVSGVAFEQGVPREYELRKHTYAELKARGLGAQAAQDVIKKTRDAYTTLKANIKAGNYGKPGSKRRTKAESKPISFRPQAAQPFDDRCLSWQYDAGAVSIWTVAGRLKNVRFACSPDALKMLREHRKGESDLIERDGVFYLVAVCDIPEPELHEPDGFVGVDLGIVNLATTSTGYRAAGRGLNRHRARQIELRRKLQAKGTQSAKRLLKKRSRKEARHTADINHIVSKTIVTTAERTGHGIALEDLTGIRSRVRLRKDQRTSLHSWVFAQLAAFTEYKAKRAGVPLVYVDPAYTSQQCSECGHIDRRNRRSQATFACRACGFLANADDNASHNIARKGVTVWTAGRESRVPAIP

SEQ ID NO: 30442 - protein, 365 aa, unknown
  TnpB Polypeptide
LGPDLGQSVYSSYLLFEEAWSTSTADRLTTQRTALRADPRTTQLLHALSSVKGVARCRSYRYLLQPTASQRAALERLLCRQCELYNAALEERRGAWKWEGRSVNYVDHCRTLTDLRGVRPDILENGVAVCRGTLKRLDRAFGAFYQRSRNGKTPGFPRFKSVRRWDSVQWEDSGGWHLNLEQSRLRLLGVGEVKMRLHRSLRGTPKAMTVSREGRRWWVSVRCTDVPAKDLCHTGRDVGIDLGICAVVSTSDGDVVSEGRYGQRARNRLAEAQQSLSRKQRGSQHRDRAVERVARAHRKIRNQRKDLAHKLSRSLVNDYDLIVHEDLKIVNMVRRPKRVRTGDGTSVRRGAAAKAGLNRSIHDAG

SEQ ID NO: 30443 - protein, 249 aa, Spirulina sp.
LGTKSINIGTLAPLRAKVKTVTIKRTPLGELFMIVTVDTLSEPQVKTETGNIAGFDFGLKTFLTCSEGFKIDAPLFFKQSLNAVRKASRELSRKQKGSANRERARLNLARKHEDIAHRRRDWFWKLAHRLTNQFDVLCFETLNLKAMQRLWGRKVSDLAFREFLQILEWVATKKGKRVVYVERWFPSSKTCSSCGHILEHLDLETRHWRCPSCSTENDRDENAAMNIKVAGASAIGLGDVRQALPAIAV

SEQ ID NO: 30444 - protein, 395 aa, Actinoallomurus sp.
MRFRLQPTHTQEQVLLEHCAQARFMWNLAVEQHASWRPGRAGAPGYGEHSRQLTEARKAFGWLAAGSQTVQQQALRDFAQAMFHFFAGTHRRPTWRKADRHEGFRIVGRRGRHWDVRRLSRKMGEVRVPKVGWVRFRWSRMVPDEVKSLRVTRDRAGRRHIAFALIPPSMTGPGTGEVVGVDRGVTVSAALSTGELLSVPGLRDGEAKRLLRLQRRLARAKPGSNRRERVKTAIGRLKSRETDRRTDWAEKTSTDLARRFDTVRVEDLKIKTMVRSARGTVEVPGRNVRAKAGPNRSIHAAGWGRLVMRLEDKAPGRAERIDPAYTSQICNACGHCAAESRESQAVFRCRACGHADHADVNAAKNIAVGRTVTARGGRPLGGPVNREPQLVPSSA

SEQ ID NO: 30445 - protein, 395 aa, Actinoallomurus sp.
MHVKRAFKYRFYPSDAQAAELSRTFGCVRKVYNMALAARTQAWTQRQESVDYNATSAMLTTWKQTEELAYLNDVSSVPLQQTLRHLQSAFTHFFAKRAKYPRFKSKKKSRKSAEYTTSAFRFHDGRLRLAKMAEPLDIVWSRPLPLGARPSTVTVSQDTSGRWFVSLLCADPTAQPLPATETTVGIDAGLAHLLTLSSGEKIANPRYERRDHARLAKAQRAHARKKKGSANRAKTRLKVARIHARIADRRRDHLHKLTTRLVRENQTVVIEDLSVRNMLKNRRLSRAISDAAWREFRTMLEYKARWYGREVIAVDRWFPSSRLCSHCGTRRDTMSLGVRTWKCECGTTHDRDVNAAKNLLAAGLAVSACGAGVRPQRSTPGGQSAMKQEFLQREP

SEQ ID NO: 30446 - protein, 394 aa, unknown
  TnpB Polypeptide
MRNAIKSYFYCNKNNLNMLFACNKISAMIWNKILDLQHEYRKNNNGKWISKAELQKKLKGIYPLNSQSVQAVTDKYCDARLATKNARDKGLENKYPYRHKSNYPTTWKKDSFKLDVKTGKLKLSLGIFEHKIQKPLEIKLPKSTLLAIGKSKIQQISLIWDGWLKVAIVIEDGKEETEKIQSNVICGIDLGEIHSIAAFESGGNAVMITGRYLRSIKQYQAKKLAEFDRKIAKCKNNSLRYKKLRRAKRRMLQKTNAQIQDCNHKITRTFVKWAFENKIAKVYVGNPEGVQRKKKGKKVNQKLSRWNFGIHIKYLEYKLAEAGIKLEKINEAYSTQTCPKCGRRHKCNSRNYKCSCGYAAHRDIHGARNILSLGLNKKICITTEIKEKKYLRTA

SEQ ID NO: 30447 - protein, 377 aa, unknown
  TnpB Polypeptide
MADPQDNTVIRTFKYRLLPSRKQHRALAKILESQRELYNGALQHRIDVYQKSDKGVSYFQQQKELTELRKDNYFSGVPLRLQRWTLRRLDDAYQAFYRRVKGGAKLGFPRFKGRSRWRSFGFAEWDGISLDAGRLRFKGMPGGLRVHFHRALAEDRPLACTFTRDAKGWYICLQYRVPVIQLPKTGQIVGLDVGVTNLCALSTGENIPNPRIAKRTERELRAAQRALSRCKRGSKRRDKVRAAVTRCHAHIKSARYTGLAQISARLVRENDEIYIEKLNVKGLAAGMLAKSVHDAAWSTLKKMLTYKAEGAGRELVAVDPRQTSQTCPECGQVAKKKLSERIHRCDCGCVLDRDHAAALVILERGRSGSRMRQRKAA

SEQ ID NO: 30448 - protein, 377 aa, unknown; identical to SEQ ID NO: 30447
  TnpB Polypeptide

SEQ ID NO: 30449 - protein, 447 aa, unknown
  TnpB Polypeptide
LVQQAINQGVEVGRSFLQRKKDGRVHKPCPEVRRVSIRFAKDSWSYKKAVGSVAPVRLALSLPGGRREVWIKPHRRFWLYWWKALRGEAELVSTLMLKRRRGKWYAIFVFDVKPREEPPAEAVAFDVNENTVAVARLSLLSTVDAVAQWNRQYVDPAVYSIKTDFSRLAKRYEAVRSAKLEELKQKYPFAGRDEEERRQNVADTREFRKFVKRLREKRRKEGRVRQIVREVTKSPALIITEELGKNPQEEMIGLEKKRVKKRELRHRIKQTPFRKILRAVEEKAAEVGSVVVYASSYRNSKVCPIHFTLLRDNGSWHALHCPHGHVVDRDAAAVLNMLWKITPEGVVKAVWWDVKEARKRLKKRRGLVPREAVRKANPIIPRPVAYAVWASLMALKAGDKRPAVLARAAPMTPAQDADEDGARAPPRRAPAPGEEVSIGSSKAHSAS

SEQ ID NO: 30450 - protein, 396 aa, unknown
  TnpB Polypeptide
MPRYRLEPTRQQADTLLRHCSDARYVWNLAVEQHAWWRPGRESAPGYMEQSRQLTAVRSANPWLAEGSHTVQQQSLRDFAQAMASFFHGYCARPTWRKAGRHEGFRVTGQRGKHWDVHRLNRKRAEVRIPKLGWVRFRLSRPLPEDVKSFRITLDRAGRWHVAFAAIPAPIPGPGTGEVVGIDRGVKVSAALSTGEMMTVPGLAVREAARLLRLERKLARAKRGSSMRGKARAAIARMKAKDADRRRDWTEKASTAIARRFDVIRVEELKVRDMTRSAKGTRDKPGKNVAAKAGLNRGIQRSSWGKLVERLEDKARGRVEKVPPAYTSQRCSACGHVAKENRKSQAVFRCTACNFACNADVNAARNIAAGHAVNARGGDRVAGPANREPQLALLVS

SEQ ID NO: 30451 - protein, 388 aa, Moorea sp.
LYKTIPIKATFTDEEKAFWIFQCEQANSLINCAIYYTKQKHYNWLEQQKESFTTYWKGDDLRSGWKTYKCSTKYPELDQALKLNPHYKAMAAQSAQQTLLTVGESIASYNQLVGLYYKEKVDRPKLLRYRKKGGLAAVTFPRQALSYKNGYFAPSISRETKPHLITEIALEPPGFIDPDWVKEVTIRPYLGELWIDWVIDDGFEPVSHNPNLDYSQAWSFDHGGDNWLTGVSTHGKSLIIDGRKLKSMNQGHCRLVAKYKEGKPDFYWDANLDRVQRKRNNQMRDGINKAARFIINRCLNDHIGNLIIGWNEGQKNRSTMGKRGNQNFVVIPTKRLIERLKQLCLEYGIKLTITEEAYTSKASYLDEDPLPKYGEKPNGWKPSVRFVG

SEQ ID NO: 30452 - protein, 576 aa, unknown
  TnpB Polypeptide
MTQLTEQFHVPEQHHGPCDRLTTLVEIHTRRLLAEEYWNDTHLDAIGDHSGHSYTYIRDDDYDAFADVEESLYSRFKRCVYHRVTHVLDAHADEFRAFQFVRETVGERKIQSIGWRRLRTRLFDRDSPYIEWRVLESVVEQLNTCYDRHGRFPDTYTELIGTPEPNGTVPYAPDKGDYHIHELTVEAGDVVVVLNAPDSLSPDSSHDWTEHEIRFPTHSRFNNMLDAGELKAPTLHTSEHGYTLDVPVAVPEQDSDTVEDRVLAVDLGVKKQATAVVLDAGEGARHEQVGPPTFVDHPSKERLFRLRADAEGINNRLAELRRQGKAHTERFEHLLSEYRQTRRKERRLREQIQHDVANQLVWLAAENGCETIVFESLGQIDSPDTSGTVAWSISSWARGDLLDLVTYKTELVGLEVETVNPWGTSRHCPRCGVEGRTVKAPDDHTEQRHGGHFHCPACDYECDRDVVGAVNVGRKYLDGSKMEEANPAAYTEAGNHASFPSPSGARSAGVQSATEQQEMASGRQTQLSQYCSSSLTAKRRETDTGGLHRTHGSHTGQQLSSGSLTQYVLASTTECG

SEQ ID NO: 30453 - protein, 308 aa, unknown
  TnpB Polypeptide
VDGEPQDAWLCPDRRSAYGSETIRGIPLAERSGQYGTSRGSSESRYRIPEFLSEAGEISALQVDGKIKLPKIGAVKIKLSRTFEGRILNATVSRTASGKYFVSLCVELDRENLLRSNDGGEIGLDVGLLAFLTDSNGNTVDNPRMLKRLMRKLVREQRRLSRKMPRSVNRGKARIRVARVHERIANIRKDFLHKLSTRLTDENQVIAIESLSVKNMMRNHRLAQAIADVSWSEFFRQLEYKAKLREGRILKVDPFYPSSQICSHCGHQNTEIKDLGIREWICPECGSHHDRDTNAAKNILRKALENAA

SEQ ID NO: 30454 - protein, 407 aa, Faecalicatena sp.
MLLSRKAVFLPTQEQEKILEHMGYAAYKLWNVANYEKRNYKELGMERFPDWYDQKKRLKENFFYRNLPSQTAQDVLQQLQEGWKSYFTLLRTNGVKNPGPPRFKKEKMDITFLKDAIRQEPGRIRLSIPKQLKSYLKSLGVDANYLYLKTKRFSDIHIKELQIKFTGKKYTAVAVYEMENIPLEVDNGHYLSIDIGIRNNFTCYDSAGKTFIIKGFLNATHYYDKKIAHYQGISDAQQVAKGIEYPKKSKKVLSLYNKKKNKVDDYIHKATRYVADYCQKMDIHTVVIGDMKGIREGSSLGRMNQQLHALPYAEIIQKLEYKLAYNGVRLIRQKESYSSQCSPASEKVGAKYAQKAKRRQRGLYVDGVVIYNADCVGAYNILRLYLQKKGMSFPEIRGLSAPLKVSV

SEQ ID NO: 30455 - protein, 390 aa, Cyanobacteria sp.
MERAFNYRFYPTSEQESLLRRTLGCVRLVYNKALHERTQAWYERQERVGYKETSLLLTAWKKREELDFLNDVSSVPLQQGLRHLQSAFTNFFAGCAKYPNFKKKHLGGSAEFTKSAFKFKEGQVYLAKCKEPLAIRWSRQIPSGCVPSSVTVKLHRSGRWHISIRFDDPTIKPLPVNDKAIGIDLGISSLLITSDGNKVTNPKPLKKHYRKLRRLQKSLSRKQKGSNNRYKARIKLARVHQKITDTRGDHLHKLTTQLVRENQTVVVEDLAVKNMVKNRKLAQAISDASWGEITRQLEYKCQWYGRNYIEIDRWFPSSKRCSNCGHVVEKMPLKVRQWECPKCGIHHDRDINASRNILAAGLAVSVCGASVRPEQSKSVKATAKKQKPKS

SEQ ID NO: 30456 - protein, 220 aa, Synechococcus sp.
LEPRPAGHPQQCDHHHCASFVVEVERPKLPASSKTVGIDLGLASLAVTSEGEKIAPPKFLRSALQRIRRLQRSLSRKVKGSHNRQKARLRLARAHVQVADQRLDHLHKLSTRLIRENQTVVLEDLNVSGMVKNRKLARAIADAGWRLLRTLLESKAEIYGREVKIISRWEPTSQTCSACGHRDGKKSLSVRAWRCSACGAEHHRDVMPHATSSPPGWRRG

SEQ ID NO: 30457 - protein, 414 aa, unknown
  TnpB Polypeptide
MKGKDNSMKRTYEYRAYPTTKQRKIFTVWLALLRSIYNQALAWRIEAYQASGLTVKWTTQANALPDLKQESEAFAGLHSDVLQDAMRRLDKAYKAFFRRVKTGDEPGFPRFKGEGRYRSMTFSHLAKRLIRNVRRKYARVVVPKVGHLKIRYHRPLPDGKIKTLTISKKASGWYAIIVVEVPDPVEVPVETTLGVDVGLNSFVVDSDGEHIANPCHYRTSEKRLGKHQRVLSRRKKESKRRAKQREIVARTHQRIANQRKDFQFKAAHRILERCDEVAVEALQIKNMLKNHYLAKSISDAGWGSFRLKLQSKAANAGKQFTEVKPHHTSQKCSGCNEVVPKKLWVRIHDCPYCGLVIDRDHNAAINIKKAAVALRGGVVVTNIPETPVQTGTEARNPINPRERATSPIPSGWGN

SEQ ID NO: 30458 - protein, 375 aa, Aigarchaeota sp.
VEVILGVPFSYSINGEVRRLLEDFRDMINFCIDYAYRRKITSYARLRKGVYEEWKKRWDYSTHFCHSACKIALAMLKNHRRRSREGKPEARKLFMQLDPQLYKFYGDSIRISVKPRRFLYIDLKYGEYQRKFIDAWREGKLKTGEVTINEAKIIIPFKKDVDLTNPKDWIAIDVNESNVTAVSSNPHILKIESNLRTTHTTYFNIIRSIQKLSKFKPKTAERLLKKYSGRRKHKAADECHKISKKIVSFASEHKMGVVMEDLKGIRKRIDYGRRLNRRLHSWNFRKLQFYIEYKARLNGLPVIYVNPKGTSSLCPVCGGKLAPNGHRLVSCECGYEDDRDVIACLNMLRMRGAPLPPKALHEPLTVEVRGRDESL

SEQ ID NO: 30459 - protein, 368 aa, unknown
  TnpB Polypeptide
MKQTMLLKLAPTTEQAQALLDTMHTFNRAATSVAAIAFAEKSADKFSLQKLVYGELRTTYKLPAQLAIRCISKASEAYKRDKSIQPTFKPEGALVYDERVMSFKGLTTVSLLTLSGRVLVPFLIGSYQESRMGSIKGQADLLYRHGTFYLAVTLDVPTPAPDEVTETLGIDLGIINLATDSEGETFSGHGVEQVRTRHHALRQRLQKRGTKSAKRHLKNLSGREKRFRTNTNHVISKRIVHKAKATRQALAIEELRHIRPRTEARLRHSQRARQSSWAFGQLRHFLSYKAALAGVPLHTVDPRNTSRTCSECGHCAKANRKSQAAFVCQACSHTDNADRNAAINISRASVMVPIVSSGSRSGCSQIGA

SEQ ID NO: 30460 - protein, 406 aa, Moorea sp.
MRSAYQYRLRLTKSQAAKIDKWLDMLRHQYNFLLADRFNWFEQNRCSVNSCPIVCHLPELRNNPDYFSQKRTLPQLKKDRPWYSDIHAHVLQDCVKRVDLAFKRFLKGDANGKKSGKPRFKEKNRYKSFTFPSLSKNPINGNVLTLPKFGKVKMIYHRSIPEGFKIKTATITRKADGYYVTLSLQDDTVPEVIPIDSVSNPIGIDMGLKSFLVKSDGSEVPIPHCYRKAQKRLKKIQKAVSRSKKGSNNRKKAVSKLGKAYKKVADTRKDFHFKTAKELLGDHDLVAHEKLNIKGLARTKLAKSVLDAGWGQFLSILATKAENAGLLTKAVNPRNTSQNCSNCGKKVPKELKDRIHSCPHCGFTADRDVNAAMNILNLAVGRPVTSKACRVTEPLGGVGKKPALSR

SEQ ID NO: 30461 - protein, 335 aa, Clostridioides sp.
  misc_feature (269)..(325): Xaa can be any naturally occurring amino acid
MYPNKKQQELINKTFGCCRFVYNKYLAKRIDVYKNDKETFTYKQCSSDLTNLKKELNWLKEPDKFSLQNALKDLENAYNKFFKEKAGFPKFKSKKTNRFSYKTNFTNGNIVYCGQHIKLPKLGMVKVRDKQVPQGRILNATISKEPSGRYYVSLCCTDVDIEVFENTNNQIGLDLGIKEFCISSCGDFIENPKYLKKSLSKLAKLQRELSRKTIGSLNRNKARLKVARLQEHIANQRKDFLQKLSTKLIKENDIICIEDLQAKNMIKNXXXXXXXXXXXXXXXXXXXXXXXXXXXXXXXXXXXXXXXXXXXXXXXXXXXXXXXXXRRIKTNNNSK

SEQ ID NO: 30462 - protein, 387 aa, unknown
  TnpB Polypeptide
MRKLLKSFKTEINPTEEQKVKIRKTIGTCRFIYNFYLAHNKELHKNGKKFMSSNQFRIWLNNEYLPSHPEYSWIKEAYSKAVTQAVNNGQTAFTRFFNHDSAFPNFKKKGKSDVKMYFVKNNPKDCRCERHRISIPSLGWVRIKEKGYFPTTKDGYVIKSGHVSIKADRYYVSVLIEIPNDRIANNSNEGIGIDLGLKDFAIVSNGKTYKNINKSAKFKKLEKQLIREQRILSRKYENLKKGESTQKANIQKQRLKVQKLHHRTDNIRTDYINKIIAEIVKTKPSYITIEDLNVSGMMKNKHLSKAVASQKFYEFRTKLQAKCKENGIELRVVDRWYPSSKTCHCCGAIRKDLKLSDRIFKCDCGYVEDRDFNAALNLRDAITYEVA

SEQ ID NO: 30463 - protein, 479 aa, Clostridiales sp.
MGVILELTETQQAYLDNLMARYCAAVRWSFKRLLEGKGVQDIRQGVQVKFNLNSRQANDAVYDAQSTIKSQHELVKLYCENARAKVEFTQKRIAKAKSSKQKANLQKRLEKEQRKLSYWQKHLEGKTFPTVVFGGKKLFLERCKGNITRAEWQEARNNRYLSRGDKTKGGNLNTRLYEVDGQIYLDIAAEQVQTEKSVRYNRITVPVYLAHKPSQKTGKINGRNYRQMVLDYLKTGAAYQVEIIRKDGRYYIHVTIEEDMPVPYHAQGAVGVDTNPDGLGVALTDYLGQYRGSQWLRQGEWTYARSNRRDNLIGETVKKVVALAKETGSALVIEDLKFKHDKSVTTKFNRMSHGFVWSKFLADAERRAFREGVPVFKAKPAFTSVIGILKYQHQYGLSNHQAAALVIARRGLGHVSERVPKLLADRFIKAKEGFSKINNWQQWAAVKKAILKQLKKKEKKGVNSLVSWQVHRKQLLGAG

SEQ ID NO: 30464 - protein, 406 aa, Lentzea sp.
VAAAVADAVEATERLFGTVLCVKTVVQVKLLPTPQQELALAATLYACNQAAGFVSRMAFERNVMSRNELQKLCYREIKDRFGLSAQPAVRVVKKVVNAYAALYANIRAGNLGSEKSRRWTKAVSKPIGFGEHAAQPFDDRCLSWQLDARTVSIWTTAGRLKHIPFTGSSSQLETLREHRQGESDLMFRDGRWFLVATCEIPEKPQFEPADWIGVDRGIANLATTSDLDNFQGRRLQRYRRWHARKRAELQARRTKSATRRLKKRARREARHATHVNHRIAKDIVAVAERTGRGIALEELRGIRDRVRLHRHQRATQSSWPFHQLERHITYKARRAGVPVLLVDAHYTSQMCPRCKHTAGSNRPTRDRFCCRRCGLAGPADIVAAVNIRDRARRAWVLVNVPLPAAA

SEQ ID NO: 30465 - protein, 434 aa, unknown
  TnpB Polypeptide
MSKSVERNVYAYSYALPFCGNGDLLVAMHKAKNLYNATLWYYRRALDEHHKAKEEGRDPVIEYPDYYKMERKFRDEHQINYFDLPQKVSQQVLRDVQSDWASFVAHVVRNKALPKGHPDKKEKINPPHYKYRDGFARLRYTKQAISFKKYPGKACPSGLDIALDIPPFINPYRIQQLVIEPDGADYIRVTFIYKVDVVELLADNGRIMGIDLGVNNLAACGTNFCRGILVNGRPLKSMNQYYNKRMAELRSENEILLEKETSRKVETQRHHVTRAMERLTRKRRYKIKDYLHKASCCIFDFVAANGITTIVVGKNAGWKQECNLGTQNNQNFVQIPHARFIEMLSYKAAAMGIALIVTEESYTSKCSFIDNEDICFHERYTGRRIKRGLFRAADGTLINADLNGALNMIRKVVPNAFADGIEAVIVPPVRALVA

SEQ ID NO: 30466 - protein, 442 aa, Limnohabitans sp.
MQSGATFSYQTRPQLDAGQEAALTAYAALYGRVERSLFAAMQTKASMNDLKRQFLLKYGITARQFNAIRVGLEGKIDSIKARRPELIGELQSRIKKAQKTIQKIQERLETLRKPEAAFKKGKTVKTLSPEDRALAISKAAFKLHQKKRRLHILQTKLAAMQTDQKDGHVRLCFGSKKLFHSQFDLEANGYADKSAWKADWQAERNSQVFILGSQDETAGNQSCPAVVAADGTLTLDLRMPNACEADHGKRVQIAGVRFAYGHDKIVAALASSQRIAAKTKKGADTIKRIGSALSYRFVRDAKGWRIFVSCSVPAAALSTRQDLGAIGVDINANHLAVSILDRFGNAAKHLRIDTHTYGKSSDQAKAIIGDAAVKIVAMAATSGKPVVVENLNFAKKKAELEGARRAMARMLSSFACNQVIASIKAAAFRAGVQVIEVNPAYR

SEQ ID NO: 30467 - protein, 386 aa, unknown
  TnpB Polypeptide
MRTILIKLPRDRCDIEYIKRLMTLTNLAYRDYEVWTPDLPRTIQHRLYGFKNFMESLVFGTTPKKWFAKTWVPLKTLRIYADGSMKGDGGASVVLDFRSGVIRLRQACKNELRYVVEIPMPKWVIERVGEGGDIKFAMIGLKGDEPYLALVAERDVEPYQPSNYMLVVDANAWNNGIAWGLIKDGNIIKWKLERPRLSEIESLHNLSVRLSKEYGKLKRLGLNETGKARRLWKEIKKIRRKIYAKLRDYVQKLVNRLVRKALRHKALVIIDDMIEESRRELLEMKIPSGLRKLYLAYTRRFVKLLITQLEWYGIPYKLKRLPSTVCPICEHELIQGEGRTMSCPNCGFKAPRDKIPMYWAIKLKSDWERRNTNKPFPFGVGYGACS

SEQ ID NO: 30468 - protein, 390 aa, Lyngbya sp.
MVEKAYRYRLYPTPEQESLLRRTLGCVRLVYNKALAARTEAWYKQKERVGYSQTSSMLTGWKKLDELDFLNEVSCVPLQQGLRHLQTAFTNFFGGQTKYPNFKKKRNGGSAEFTKSAFKFKEGKVYVAKCKEPLPIRWSRQLPKNCKPSTITVKLDPSGRWFVSLRVDDPTNHQLKPINKKVGIDLGITSLFTTSDGVKVSNPKHFDKLYKKLRLAQKSLNRKIKGSKNREKARVKVARISAKIADCRRDHTHKLTTQLIRENQTIVVEDLAVKNMVKNHKLARAISDANWGELIRQLTYKAEWYGRELIKIDRWFPSSKRCSNCGYITERMPLNIREWDCPKCDSHHDRDINASINILAAGLAVLVCGATVRAEQSKSVKPSAKKQKPK

SEQ ID NO: 30469 - protein, 288 aa, Candidate division WPS-2 bacterium
VPSSSSKINAGLNVPGAGNIALRKGRKIPTKFGRGWVVERNGRWYLCVEYELCAPEKRSTRSVLGVDRGVHVLAATSEGELIRNLAVGERRKRAIARLQREMDARTSKDPHGRCINRNDPLRIAAVKRYARSREKAANARRDYAHKVSRRLVGSADCIALERLNLANMTRNAKGTCAEPGCGVSAKAALNRLILDSGFGLLQRMIAYKAESAGVTVVSVDARFSSQTCYRCGNCDRGNRRRRRFSCGSCGFTTHADVAAALEIRRRAQRTLSSEPIPVEEAGRRVTAA

SEQ ID NO: 30470 - protein, 561 aa, Oscillatoriales sp.
MVSHNTNMAKYVKPNEAANTLGVCLRTLRRWEAEDKINTIKTPSGQRRYDIEKFIKKESEPEGGRATVIYARVSTRPQKTDLDRQIERLSTLYPGAEIVKEVGGGLNLRRKGLITLLGRVLRGDIAIIVVAHKDRLARFGFDIIEWLCEQFDCKIVVLNQISLSPHAELVQDIVAILHSFSSRLYSIRRLENQIKQELQVESKAQEGEDYNKAIATLKAGEKITSAYSLRDYVLGLNLPDWVKSAPSHPKENAIFDAWDAWKQAKSVKGEASFRSCRQPSQSIKFHKVNFNGETWFPSLVKGLNFRATEPIQKTEFATQLVRDKKRWFACIPIIEEAKTKELDKVIALDPGVRTFLTGYDGDSFQEFGKADIGRIQRLCSHLDKLMGRGSKASRKQKRRMLEAASRLRIRIRDLVDECHKQVVNYLTSQYKVILLPTFETSQMVVKSKRKLRTKTARQMLTWGHYRFECHLKQSAKKRGVVVIDVNESYTSKTCTKCGHKHSKLGGSKTFKCPNCGHEHDRDWGGARNIMIRALRDGSFTLSINSESIAIAYALFVQGCAA

SEQ ID NO: 30471 - protein, 390 aa, unknown
  TnpB Polypeptide
MITAHKIALDPNNVQATDFARAAGTARFTYNWALAEWGRQYEAHKLDPTLPRPSECALRRQLNAIKRDQFPWMTEVTKNAPQMAIRQLGVAFKNFFAGRAQYPKFRKKGVRDRFTITNDQFDIDGNRIRIPILGWVRMREKLRFSGKILSATVSRVADRWFVSIAIDTPEPLPQAENQGAVGVDLGVRTLAALSTGEKVVGPKAHKALLGRLRRLSRSLSRKVKGSANRKKAQMKLATLHARIANVRSDAHHQLTTDLTRRFSVIGIEDLNVRGMASNRSLSRAVSDMGFFEFRRQMEYKAARRGGEVFVANRWYPSSKTCSDCGHKVEELPLKVEQWPCPVCGVVHDRDINAAINSMVLAASSAASACGESEQSGLSLKQESSTEATYG

SEQ ID NO: 30472 - protein, 460 aa, Micromonospora sp.
MSARVMQAYRFALDPTPGQVRDLERHAGAARFAFNWALAAVKANLAQREVERSYGVADDELTPALGWNLPALRRAWNTAKGQVAPWWAECSKEAFNTGLDGVARALKNFSDSRNGKRAGRRVGFPRFRARRRATPSVRFTTGPIRVEADRKRVTLPRLGTVKLHESARKLARRLEAGTARIVSATVRREAGRWFVSFTCEVKRAERAPARPHAVVGVDVGVTHLAVLSTGELVDNPRHLAAASRRLRRLARRTSRCQGPDRRTGARPSRRWDRARAGLARAHRRVANLRRDGLHKLTTRLTGTYGTVVIEDLNVAGMLGNRKLAKAISDCGFGEIRRLIAYKTTWNGGRLVTADRYYPSSKTCSGCGAVKPKLPLQVRTFTCEHCGLSLDRDLNAANNLAQLVTSTTGTGVAGDPTPQGANGRGADQKTTLAVAGGDETSTPHRHQPDKTGTFVRQRANH

SEQ ID NO: 30473 - protein, 405 aa, Micromonospora sp.
MLTGRRYLLAFTEEQAAYAERVGSICRAVWNTALEQRRDYRRRGASISYVEQARQVAEAKKDPACVWLADAPSHTLQQTLRDLDRACRTHGTWKVRWRSKVRNAPSFRFPDPNHIVVRRLNRRWGEVRLPKFGPVRFRWTRPLGGVIRNATVSRDAGRWHISFCVEDGIASAAPSGKPPIGVDRGVAVAVATSDGELRDRAFATPGEQQRIRRLQQRLARSRQVHGHNRRSRRRDAARAQLARLHARIRARRVDFAAQTAVRLVRSHGLVAVEDLPIKRMTASAKGTVERPGRKVAAKAGLNRAILSKGWGEFLLRLEHSARYHGATVVKVNPAYTSQTCHACGHVAPDSRESQAVFRCVACGHQAHADVNAAKNILAAGRAVAGRGDLAVGRSVKRQPPERLTA

SEQ ID NO: 30474 - protein, 492 aa, Blautia sp.
MYDMANSNRKKARKLHEAKQAKKAETAQKAKSSKKAKTAEEKQIKYTVTAEQQADGTFEFRGGKGGFNITAQKNKALEPYGKCIHNYGVILELIPGDKQAAINQQIGNARVVRNDYLSKRIDYYKENKETLTVSKYKKDYLPALKKEKEYLNGTDKFVYENACRNVDDAYNRFFKGLSGFPKYASRTKPNGNSFTTNFTNNNIELKMIDGIPHVKLPKLGNIRFILPKGKVLADIQPHGVSIRAATVSRESDGSYRISLRMESVIDKPVFPTFINAREIISVDLGLKEFGVFGNLEESIPVPNPRWIQVHTKRLRRFQQSLSRKQYDRKTHTGSKNWEKARTKVTKEQRKIADQRMDFHHKLSRAITDNCAAFICEDLAVKNMMQNRHLSKSIASVGWSQFLTMIQYKMERAGKYFRKIDRWYPSSQTCGCCGYKNTDVKDLSVRKWICPKCGTWHDRDVNAQQNIYKTGAKMLQDEGIKIVGLPVTNKSSN

SEQ ID NO: 30475 - protein, 350 aa, unknown
  TnpB Polypeptide
MLLSKKTSIKVSREYANLIGHMCYAASKLWNVCNYERQHYKETGMEQYPDWYYQKKAHKEELWYKQLPSQTAQEVCRLLDKAWKSFYALKRSGGIETPRPPRFKQESIPITYMQMGIVHERDTDRVRLSLPKTLKKYMEETYQIHENFLYLENKIFRGMDQIKQLRIYPPEKGSCKIIVVYEVPDQEELPQNGHELSIDLGLHNLMTCYDSENGKTFILGRKYLELERYFHKEIARVQAQWYGQQSGKGVKHPVTSKHIRKLYKRKQDSVTDYLHKVTRYLAEYCREQGITCVVAGDIRNIRREKDLGHRTNQKLHSLPYNRIYIMLEYKLKRYGIRFIKQPANKKSRLN

SEQ ID NO: 30476 - protein, 405 aa, Anoxybacillus sp.
MMANRVERHIIYPNHPYYTMIDEYCFRSKNLYNFANYQVRQTFFQHGTYLSYNKLDKLLKTEGMDADYRAMPMAQSAQQTLRMLHQNWQSFFKSMKDWAKNKDKYTGRPKPPKYLKKDGRYVLVLTNQSCKVVDEHITFPACFQGFRLKTNMKGKLQQVRFIPKHRHIIVEVVYKIPIPPQKQDHNRCISIDLGLDNFATIVNNVGKQPIVINGKGLKSVNQYYNKQMSHYRKVAKQMNGLDWTKRMSKMTEKRNRIVENFMHQASAFVIKHALSLDCDTIVVGMNKDWKREVHLGKRTNQAFVHIPYQTFLHQLQYKTKQHGIRVIVTEESYTSKCSFLDMEEIKKQKQYKGTRIKRGLFQSENGTLIHADVNGAYNIMRKVFPKAFANGIAGVGLHPIRVHVA

SEQ ID NO: 30477 - protein, 424 aa, unknown
  TnpB Polypeptide
MNILDVLIIVVYFFGLIAIGVVVSRKIQNHEDSVVAGRSFGSTKSGIAPFYSDKYAKIGFQVSELFDDELLKEKEELWAENLLTIQGHLEKLTVPGRDGREPKYIPPGGKLPVYFRRSAMNKAAMAVKTAASVESFPEKIDANITFFKGMYKDLTDTSVVLKLWNGKKWIWVLCGLTGRPFPKEAAILSPTLVHEEKWLMFHVPVKQENSDARTAKERMQEGARVCSVRFTNTDSFAVCTVLDEGSRQLAVKNCRGGNAYRHHCKALMKKVEASRAFTDKDNVSQPNRKYYMHLKHLNEHYAHQVSKEIIDFCKEKHTGILVLPEYDEDFSRISMYRSGNYSPLHLSIRIRNYLKYKAWAEGILVLELRADGTEKQCSICGATGKKQGSVFICQNGHQVNRFLNGARNLGRKCQESFRKNNKPS

SEQ ID NO: 30478 - protein, 520 aa, unknown
  TnpB Polypeptide
MKRSTTPTFLLELPLVVDPGQAKRLPAHFETARALYNALLGEALARLHRMRADPAWQAARAIPKTQKRERAAAFSRLRQEYGFSEYALHTFAKGANCTWIADHIDAATAQTLATRAYQAVNRMCLGRAKKVRFKSKGRGLDSIEGKRNDAGLRFVLQPPEEGNQGWLVWGKDRIPAIIDWNDPVVKYGLDHRIKYARLVRRKASSPQAKGADCQGYRYYIHLILEGTPYQKLKKKPGHDVIGLDLGPSTVAIVPREGEARLVPLCEELRPDARKKRRLERKLDRQRRANNPQNYDEKRRVKKHGKHRLTWRNSKGYLATRRRLAHHERKLAAHRKSLHGRLVHEIIRVGNDIRIEKVSYKGWQKRYGKSVGLRAPGMFIDHLRRTVAKTGGTLHEFSTYTTKLSQYCHSCRTYTKKPLAQRFHNCTCGIGPIQRDLYSAFLAAYLDPPDYLPSSAQYHVYWEGAEQRLRAALERLYQRANEGQVLPRSVGITLAGARLPKSLDPNRQELLYQHGRLEALG

SEQ ID NO: 30479 - protein, 362 aa, unknown
  TnpB Polypeptide
MVEQDDILHETMQQFTESFNAVCRTDWEQHNGNADTLHHLTYRHCKDALPNLVSDLHIQARQKAAEAIQSAIAREKKGLKTGCPQSLGCPPRYNLHTFILDWETGIVNLSTSKGRMKIPFNVSQYAQYAIGCPTSNADLIFRKNKFYLHVVVVLPDVEFVANEKAIGVDLGVTRPAVSSDNRFHGSRHMKEVVKRIFRLRRDLQANGSKSAKRHLRCLAGREQRFRRDCDHVISSSIVKDIDAGTNIVLENLTNIRNLVKGYNGEASRRLHSWSFLQLRSFLKYKPEARGCQVVIIDPRKTSHRCSRCGFTYRGNRRSQSEFLCRKCGFHLNADLQASRNIRDKYLVGWSISSSDALPYTSV

SEQ ID NO: 30480 - protein, 570 aa, unknown
  TnpB Polypeptide
MILSNKKEYHERKVIIMADLEIESKTTIRSNRIYFDEGNDDFKDFVAFSVYYNSAKMSAYNLKYNIEYNGFQFGKDPNEPSKNDTEYRYMKRKYPLLNSMYLNDALKEADGLIKSQIELFKLEKEKKQIQLDTITEKRKKLVDRLEDFERIKKQILNRSKKIKNGESLLGVKFPTYQGAHHGLKDTNKNTFFIEDREVSLAEYESYIDSKIKTLRRNVGLMKVSIEHKTATLNKIEKPKKVCFGCKKLFKAQYTKFHNHNFWKREFYFNKYNTMTLSGRADVEGGNTRIRYDERDHILKVPYCDRNGKKKVVFLKNVLFPSGQDLIDNYIRTQNNALKNKSAERMPICYTFIIKYDKNWRPYVVVHATLSLPKKKHVNYDISTGVVSIDINADYLALTELDKNGNLIYERVIPFHIYGKSKGSIDHELSKVTNEVIDYCRKKHKCLVVEDLNLEKLKQSMKYKSKKYKRMLSGFAYSKILTLLNGKAYRNDIYIYKVNPAYTSQIAKLKYMKKFGVSIHIAAAYVIGRRGMGFKEKIPKYLTPLLKVDFPTDQEIEEQVRRTNKRRPKKK

SEQ ID NO: 30481 - protein, 738 aa, unknown
  TnpB Polypeptide
MHVQFVNIRTGAEFSTASGRFSSGIYDVVPEEVVVRAYANGVSFKHVPAPERRAYQVAVAQRVRELGQDVALKCQQYAPAVIDLFARWHELEAHAQLLEAESLTELMPPMLELATALKLKVTDLAPDKLLAKLRYAFTHRNPKYLAAVFAAYCRDRSNLGQASFLRLVAAGRGFLDAQDKVELLQAHFSAERDEFLSFLLFRRATWTELLLTRHYHTAYSWARNFVVGAANKFQAALQTAGVQLPEGRALTAPEVQQAVSEIVKEVQDALAEKQEAGGDVSRIQRLLNSLHLIEVNPDVITTFFEPNSTDTPLTWKRLKAYANTLRGISFSAIRKVIVRACSHRPEWQHAIERCLRLFTPEAALKRPFHERVGLNPLPIDLIMGSKYVIYRPGNAAQLQALLLREGRIWFEIPQVPLATGRQTVKVVWVAQKSVLRALKNGAKVKSFRFGMPQGPGKTIKVTIMLEGTESVFLGTAYLQSPPETELYSQILGEERVPPNQILGLDVNRPSEWLLTAKDDLGFGQILEQILAHWREAEETIATLQQKRERTHNWKRRRKLKAEIQLHHQRRAHLKQQLFHAARIHLGRVIQALGVTFVGVEGNLTRETRDKRGGLAKAIAGMPDHLELVARAILAVNQRYQRAVKCALVRKEGTSQVHHACGGRIDRIGDLGTCRTCGQEVNVHQNAAANVEAATERLVGQHLQLILEIFLSLNIPGGAPSTCTRPGTQPPDLPKRVKV

SEQ ID NO: 30482 - protein, 353 aa, Haloactinospora sp.; identical to SEQ ID NO: 10

SEQ ID NO: 30483 - protein, 462 aa, Haloactinospora sp.
VNTGATHHQAYLFALEPTPEQAQALSSHCGAARFAYNWGLAAVKANLDQRTAERTYGLTETELTPALNWSAYGLRKQWNAAKHEAAPWWGENSKEAYASGLANLSAALKNWNASRTGKRAGKKAGFPRFKSKRSRKSFRITTGTFGLDEADNRHVKLPRIGRVRTGESTRKLARHLERGSARVLSATVSFQRGRWHVSFTVEKTTAAPAPASVGGAVGVDLGIKHLAVLSTGATVPNPKHLDKAQRKLRRAQRRVSRRRGPDRRTGQASSARWRKARAAADRLHTRAANARRDHLHKLTTRLVAGFDTIVIEDLNISGMVANRRLARAVADTGMGEVRRQLDYKTAWSGRRLVVADRWFPSSKTCNDCGAVKAKLRLSERAFACETCGVVADRDANAAANLADLAEVASSPSCGARINEPAGNPRKTSFAGDGYRHGKTPPSRAGSRPRRKATAQDTFSHVS

SEQ ID NO: 30484 - protein, 425 aa, Haloactinospora sp.
VKRERGHKARMYPTPGQANALEAQAHAARTMWNLLHDWWTQVSENRRIDLKDAEQAIKQARADIDWLAELPAQAAQAVLKTYVQAWRNCWGGRAGKPTFKSRLRSRMAVDVPQGRDLAIRRLNRRWGTVRVPNIGMVRFRWTRGLPVGKHADAHNKVTGARLVREANGWHIVFRVRTDVKEPAPHTGPGVGIDRGVAKPLALSDGTVREHGPWFTVGEEEYLRRLERKSARQRRHRTLGHPTSNRLRRTYDQIAGLRARAKRRALDWQHKTTTALAETFGVIGVEDLTITSMTASARGTVDAPGRNVRQKTGLNRSIAGEAWGRTVTLLEYKLADRGGHLVRVPAPGTSRRCSACGVTTSGNRDSQDRFACKAPGCGHTDNADTNAACNVAHAAKQQAPQDIAGARTWSPRRQAGYEASTASGPH

SEQ ID NO: 30485 - protein, 234 aa, Microcystis sp.
MEKAYSFRFYPTPEQESLLRRTLGCVRLVYNKALHERTQAWYEKQERVGYVQTSSMLTEWKKQEELDFLNEVSCVPLQQGLRHLQTAFTNFFAGRTKYPNFKKKHQGGSAEFTKSAFKFKDKQIYLAKCTEPLPIRWSRQIPEACEPSTVTVRLHPSGRWHISIRFDDPTIKPLPVTDKAIGIDLGISSLVITSDGDKVSNPKHFKKHYRFFVTWYGSIGGHKSTKSLSGKRLN

SEQ ID NO: 30486 - protein, 272 aa, Microcystis sp.
LHNNSRRAKKKQNKQSIRFPQHCKLKDDVLVLPKIGEVHCQVSRQPEGTLKSVTVSVNPSGEYFASCLYDDGQDLPQKSSEGKAVGIDVGLTHFAITSDGTKHGNPKYYRKYEQRLARRQKKLSRKQKGSNNRNKARIKVAKVHSKIVRCREDFLHKLSRKLVDENQVIVVENLAVRNMVKNPKLAKSLSDAGWGQFCTMLKYKAEWDGKTYIEVDRFFPSSKTCSNCLNRVDSLSLDIRSWQCPKWVENHDRDINAAKKCDSFSRNLEIGG

SEQ ID NO: 30487 - protein, 390 aa, Microcystis sp.
MLVVEAKLKNGTPEQYQRLDEAIRTSQFVRNSCVRYWIENKGTTRNDLQKLCAVLADNKETPYVKKLNSQARQSAADRAWQSINRFYQNCHAKILGKKGFPRFKKHSRSVEYKLTGYKLSDERRKIKFTDGFKAGEFDLWCSQKTLVYYSEQQIKRVRVVRRADGYYCQFLIDVERQEYHKPTGQITGIDLGLKEFYTDAQGNTVENPRYLRKSEKRLKKAQRRLSKRFRQGKKQSNNYHKQRIKVAKLHLKVSRQRKDKAIKDALALVQSNDLVVYEALKVRNLVKNRKLSKSISDDSWYQFTEWLNYFAKIYRIVCVAVPPHFTTQDCSVCGTRVQKTLSTRTHQCPNCQTALDRDHNAAINILKKGLKYLGNHLNGTVGQTETDPNA

SEQ ID NO: 30488 - protein, 292 aa, Microcystis sp.
MLTDWKKQEELNFLNEVSCVPLQQGLRHLQTAFTNFFAGRTKYPNFKKKHQGGSAEFTKSAFKFKDKQIYLAKCTEPLPIRWSRQIPESCEPSTVTVRLHPSGRWHISIRFDDPTIKPLPVTDKAIGIDLGISSLVITSDGDKVSNPEHFNKHYRRLRRASKSLSRKQKGSKNREKAKIKVARIHAQITDSRKDHLHKLTTQLVRENQTIVVDNLAVKNMVKNPKLSQAISDVSWGEITRQLAYKCRWYGRNYIEIDRWFPSSKRCSNCGHIALENAVKCSRMGLSRLWNTP

SEQ ID NO: 30489 - protein, 269 aa, Microcystis sp.
VEYKNSGWKLSEDRKKITFTDKKNIGTVKLKGTRDLNFYPIDQIKRVRIVKRADGYYVQFCLSVDIREYAKPLEPTKRCVGLDVGLKVFYANSDGETVEIPQYYRQAEKRLNRLNRKKSKKFRKGQPQSNNYQKARKRYARKHLRVSRQRKGFVEKEALRVIKSNDFIAQVNLNIQGMVKNSKLAKSINDVAWSIFRQWLEYFGFKYGKATVAVPPHNTSQNCSNCGQKVPKSLSTRTHTCPHCGYVEDRDINAAIKCDSFSRNLEIGG

SEQ ID NO: 30490 - protein, 366 aa, Microcystis sp.
MLKREVWKKPTRFDFTGSSRLCVIIFAYGVVKCLLGKTFRAILRIFYQYRPRFHTETRRAFYPTPEQESLLRRTLGCVRLVYNKALHERTQAWYERQERVGYAQTSSMLTDWKKQEELNFLNEVSCVPLQQGLRHLQTAFTNFFAGRTKYPNFKKKHQGGSAEFTKSAFKFKDKQIYLAKCTEPLPIRWSRQIPESCEPSTVTVRLHPSGRWHISIRFDDPTIKPLPVTDKAIGIDLGISSLLITSDGDKVSNPKHFKKHYRRLRKAQKNLSRKQKDSKNREKAKIKVARIHARITDSRKDHLHKLTTQLVRENQTIVVENLAVKNLVKNPKLSQAISDVSWGEITRQLAYKCRWYGRNYVEIDIL

SEQ ID NO: 30491 - protein, 211 aa, Microcystis sp.
MPFYIRVPSLITPVHCITQTEEPHYQRLRRASKNLSRKQKGSKNREKARIKVAKIHAQITDSRKDHLHKLTTQLVRENQTIVVENLAVKNLVKNPKLSQAISDVSWGEITRQLAYKCRWYGRNYIEIDRWFPSSKRCSNCGHIVEKMPLNVREWDCPDCGTHHDRDVNASKNILAAGLAVSVCRATIRPEQSKSVKAGAEPRKGKKQKPKS

SEQ ID NO: 30492 - protein, 232 aa, Microcystis sp.
LSVGALIEFYFKLIICITIPEEPNFFAGRTKYPNFKKKHQGGSAEFTKSAFKFKDKQIYLAKCTEPLAIRWSRQIPESCEPSTVTVRLHPSGRWHISIRFDDPTIKPLPVTDKAIGIDLGISSLVITSDGDKVSNLKHFKKHYRRLRRASKSLSRKQKGSKNREKARIKVARIHAQITDNRKDHLHKLTTQLVRENQTIVVENLAVKNMVKNPKLSQAISDVSWGEITRQLA

SEQ ID NO: 30493 - protein, 310 aa, Microcystis sp.
MRPQWALRALSDAWKRCFKKIAKPPNFKNKGKQDSFTLDGNIKIAHQKIKVPVIGWLKTYERLPDGYQPKSVTFSKKANRWFIIFKMEVEQQTTNKTYDVVGCDLGIKSLATLSTGETFEGSKSYRKYEKQLARLQYLNRHKVKGSNNWNKAQRQIAKLHFKIANIRKDTLHKLTTYLAKNHGQIVIEDLNVSGMMANHKLAKAIQDMGFYEFRRQLDYKTQLYGSELIIADRWFPSSKTCFNCGYKKESLSLTERVFECEQCHVVCGRDLNASLNLASLAVSSTVSVCGVDSADTTTVKQEVNVKFAHE

SEQ ID NO: 30494 - protein, 221 aa, Microcystis sp.
MFVLEYKVKPKPNQIEAINEAIRTTQFVRNKVLRYWMDNPGVGKTELFRYNTALRKEFKFVDDLNSHACQTAVERTLRAITRFYDNCQNKVKGKKGYPKFKKHSRSLEYKVSGWKLSKDKRHITFTDKKGIGTLKLIGSRDINYYQPDQIKRVRILNRADGYYVQFCIKLDPRDTVKPLTPSQKATGIDVGLKFWLFWFLCVNEVYTDSFFFQNSPKSLAQ

SEQ ID NO: 30495 - protein, 315 aa, Streptomyces sp.
VTPGRGCGRWAGCGRWRPVRTIPLEAARANGMVGVDTNADHLAAWRLDEHGNPVGAPLRFGYDLTGTADHRDAQVRHALIRLLHWARRHRLAIAVEDLDFTAETTREKHGRRKRFRKLISGLPVARLRARLVSMAAELGIPLIAVDPAYTSRWGAQHWHKPLTGKTRKTTRHDAAAVAIGRRVLGHPIRRRTAPPPAHRSDEQGHRTVQAGAGSPGREAVPDSGLRPRAAPASPDHGHDPCRPDAERTRSTRTPNTVRGVRLSTNPGNRTHSRSVSRNGRAGRARSARSSPRRRPGGLGRRPARRDSARRPRRRR

SEQ ID NO: 30496 - protein, 408 aa, unknown
  TnpB Polypeptide
LRWASTAALRQKDISRNVVFPCILLSLFSKLETFRLPQRIIQQGATALKLIAQVKLQPTPEQVAALRQTLEAANAACNVLSEWVWQEQTFGQWALHKERYNTLRAEFNLPAQVAVRAISKVADAYKLDKRTQRQFRPHGSIAYDDRILTWRTEKQFVTIATLKGRLKIAYVCGERQKQLLVHQQGETDLVYRNGEFYLLAVCNVVEPEPQDIDDALGIDMGIVNIATDSDGNRYSGKVVNALRKRHRTLRAKLQARQTPSARRLLKRRRLKEQRFASDVNHQISKKIVSLAQRTNRAVTVEDLTGIRTRTRVKKPQRATHHSWAFFQLRSFVEYKAKCKGIPVFAVDPRYTSQRCSECGHTERANRPNQHTFCCQSCGFSAIADCNAAYNLRDMGRAELSTCRTQRAA

SEQ ID NO: 30497 - protein, 362 aa, unknown
  TnpB Polypeptide
MLKAYKYRIYPTSEQKIYLAKTFGCTRFVYNQMLSDRIKSYEENKDLDIKKVKYPTPAQYKKKYEWLKEVDSLALANAQMNLDKAYKNFFRDKSVGFPKFKSKKTNRFSYTTNNQSGTISLDGNYIKIPKLKSKIKIVLHRQFKGVIKSATISKTPSNQYYVSILVDTENIKLPKTNNKIGIDLGVKEFAICSNGDRFDNPKNLRKSEKKLAKLQKDLSRKQKGSNNRNRARLKVAKLHQRIANQRIDFLHKLSTKIIRENQSIVLEDLQVKNMMKNHKLAKAISEVSWAEFRTLLEYKATWHERKIIIAPSNYASSQLCSKCGYKNSAVKNLSLRNWTCPNCGANHDRDMNASINLLKLAI

SEQ ID NO: 30498 - protein, 459 aa, Petrotoga sp.
MQLENILNTKKQGDKMMGLKKNNYNTRQRVIQFELNPNKAQDIVLNALTYAASKLWNVANYERMQWKKESGNPYPNWYEQKAKLKENFWYKNLPSQTAQELLKQLDEGWKSFYKLKKSGGIKNPKPPRYKHSNFNIRFLNNGFTVSDGIIRLTVPKQQKEYIKQKYDLDINFLYIKVPNEYKNFVGKIKIIEIIPIPKNKKYRVNIIIDLPTIEYKQDSNIYMAIDLGINNLMTCYISTGKSIIISGRQLLSINRYFDKQISYYQSIANAQQAACQIQYKENTKRIQQLYTKRRKQVNHFLHTATKQVIDFAEQEGVSKIIIGDISHIRDDKNMGKKNNQKFHKWPFKKVEELLIYKAQDRGIFVEKQDESYTSQCSPYAEEISKVTAQKSNRKYRGLYVVNGKVFNADCVGAYNILKKYLCRIGKTNPAVVALDTPEMYRWNGHHFIENPKLANLLAM

SEQ ID NO: 30499 - protein, 489 aa, Moorea sp.
MPRKVDTTKRVSTQVIPIVGMTKSVELELLSTMKKLGIVRSESYNKLGSISHWGLDWKKAYPKVREFRTPESLGLPSKLMEWTVSDVAKAITAQQAACIEGLIKKIYKRFPGKENQKVRKDLFKQLKTLAFLDNPLLHRLVRQEFQRGHSWVKNQIVYQQGGYSCKRVSRRTYQLELAGLKRGKRNRILVRSNRKIKGQIRLIYNHLLQRFEIHLLVVHGTVEIPVERRFVGVDKGYTEAFYDSDGQAYGQGLGKLATKKSDRICAKNRNRGKLWAIHKKLEKIDPAKSARILENNLTRKTENRRYRKDQAEILSVIGKASKSIFKGESLKVFAEDLTQPIKNKRQSKAMSRKLNSWMKGVMRDSLQKWANWTGSVVTEVQPSYTSQVDSVTRTLLGKRSGDSFTRFNGVVLQADCNAAKNILDRGTDKEISRYMTRAEVQAVLLRRTARFLKGMGLSLADAVELGWLDSKHEQSSGFQGTPCRDARNV

SEQ ID NO: 30500 - protein, 583 aa, unknown
  TnpB Polypeptide
MSRKKIEVPEETIEITRMRERHSHVLTDVSKVGQIKAMAISYQDVVREIAHRYWPTEYLPQVLSYPQGAITARRKSGEAAACPLPSHYQGQAVLDGLDVIRASWKQTFAAVRSKAGRRFPDIIETTKDENGQQTSLKPIQNPIRHEINWFLCWPELLVRIMAGEVVSPLDKEGKMRPEFASNDHTMICHWLNRALHSLRAGQPQIKKRLSLEAEPSMLRIYKTPPPPKKRLPGKGQISQRHFEVFVSLQGLTPYHPIKIPMSGHDLSVLDGPGNVRIDIEKDAHGRERIVFRKAIKTEVVARTGTKTVGIDKGAGIAIAATDHDAEHAKHFGTESGAVLLKRTNKQYRRRRSQFATQADKLNGRWTARGRFHGNPHPTAAQKRTARHIRRNNLGSDRKDSELRRARAEVSNTNGRAVREMVEFYPDTKTFYEEKLNFTSANKQHKTREVNRMLNGWAKRDLSRKLELHISASGARREFVNAAFTSQECPCCHWTHGGNRQGASFVCLHPPCGYTGHADSVASSNVRSRGSDGDITTFTPVKKVKEILLARHADSDARCASRGPGHQPRPAVPGLGLLDSVELF

SEQ ID NO: 30501 - protein, 583 aa, unknown; identical to SEQ ID NO: 30500
  TnpB Polypeptide

SEQ ID NO: 30502 - protein, 416 aa, Chroococcales sp.
MIVREAKLLNGTKSQYQAIDDAIKTAQFIRNKAVRYWIDNQNVGKADLYKLCKDLAKEFSFAHALNSAARQASAERAWASISNFYTRCKKGEKKKGYPKFKKHCRSVEYKVSGWKLSDDGMSIVFTDGFKIGSLSLYCNKETREDLLRLKINRVRVVRRADGYYAQFCFDADRKEVGQYTGNVVGLDLGLKYFTKDQNDNAVSYPQFLRKSERRLKKAQKRLSKKFVKGKKPQSNNYHKARNRCGRVHLKIQRQRKDWAIKTARCVVHSNDVVVYEDLKIANMVKNHHLAKSISDVSWYQFTQWLDYYGKIWDKAVVAVPPNYTSQDCSSCGHRVKKSLSTRTHSCPRCKVEICRDTNAAINILKKGMKVLGVEWQSNSTSGQEESGSIERKLGEKTTSTIDEQSDIASGLLRTKN

SEQ ID NO: 30503 - protein, 434 aa, Chroococcales sp.
MITLEFKLKGKEIQYRIVDEMIRTFQFVRNKCLGFWMDGYKVAEGDRTRSCPNAFGQGRAVKLSEVNAEATRVRHNPEWEWAGKLESSSAQAASERAMSAIRRYYENCKAKIPGNIGFPKFQKNNRSVEYKVAGWKLSPDRKRITFTDKFKAGTFKLVGSYDLNFYHLKAIKRVRIVRRSDGYYCQFCVAVERNISINPTTGKCLGIDVGLSKFYTASDGSSIENPRYLRKAERALKRVQRRVSSKFRKPKKKGEKVKQSNNYKKACKRLGKKHLTVQRRRKDFVVKTAKALLESSNFIAYEKLNVKKLVKNRKLSKSISDAAWTQFTGWIERYGMLYKRPVVAVPPQYTSQDCSGCGTRVKKTLSVRTHICPNSKCQLVIDRDENAAVNILVKGLNIAGIVLNSSTVGQTGINASGQTNLCLLGENLADKWTG

SEQ ID NO: 30504 - protein, 382 aa, unknown
  TnpB Polypeptide
MSCRAYRYRFYPTPDQVINLNQTFGCVRYIYNRSLRYRQDAWYERQENISYPQSSTLLTAWKKEPEHVWLNEVSSVPLQQSLRHLQTAYRNFFQGRAKYPRFKKKDDQQSAEYTTSAFKWDGESLKLAKQSEPLNIRWSRRFKGKPTTVTVSRDTAGRYFVSLLVEEETALLPVINATVGIDVGLKDVAVTSDGVAYGNPRHTARYAARLAKYQRRMARKQNGSKNRHKAKLKVARVHAKITDCRKDFTHKLTTTLINENQVICLENLAVKNRVKNPTLAKSISDANWDELVRQLEYKAGWYGRTVVAIDRWYPSSKRCSSCGYTLDKLDLATRHWVCPECNMTHDRDVNAARNIKAAGLAVLACGETVNPLVAKAAIGSTR

SEQ ID NO: 30505 - protein, 471 aa, unknown
  TnpB Polypeptide
MQAWQYRRLLDGDTLWNRADMKHVDSNLSERFKRSALNHAVAGLKSWQTLMQDEFRTLVTRSTLPVEVKRDLYRVNVRQAWYHPRLHLPVIVVDETTGRETQTGETQPVPPATLKLARQLVKHVKRHRVSVPNLSRSRTMLLDGPVAQFEPSRSDTFSHWVRISTLTKNEPVWIPLDSYPHAAQSIGRWAALTQVRVDRDGSVTFKQVKKSAPTPLLEHANADDDPSVLGLDFGMRTLFASTAGDLVGRTLYPWLVEVDAQLTQLTANLQRQGIKPTTSKRYRRFQQRIRDHVTNEVNRCLNRLVELHNPSEIVVERLDFRYGGLSKRLNRILTRLGRTTIATKLKTLTETRGIRVTLVPAAHSSRECAGCGYVDKANRKTQHVFMCGFCGRHCNADANASQVVKSRRSWPVETRWHSRATLLERLDAAFEQCWGVHPSVIRMRRRLVSSESNPRPTADGLNVHYHAPRVV

SEQ ID NO: 30506 - protein, 495 aa, unknown
  TnpB Polypeptide
MGMGHRIERRERTLRYRLYPTRPQEQDLLLQGHGARALWNLLHTWWLLARKDRRATWKHADAQIKQARRDIPWLALLPAQASQQVLRTYQRAWDDYWSGKSGRPKYKARRGRLGIDLPQARDLKIVSESQKWSSLQVPLVGRVRYRQHRKTMGTITGARIIREANGNWFLCIRVTQTVRGANRERKQEQPAAGADRGVIVPVAVSDGALHTHDAWLTPKEVERFHRLERAGARKRTAREACGGRVSKRERECYRQLAVLHARVRRRRLDWLHKTTHLLANTFSMIGVEALHVKGMTAAPKPKPDPTQPGVFLPNGAAAKAALSKRILAEAWSEGRTLLAYKMSDRAGRVIPVPAAYTSLTCHQCRTITSGSRENQAVFTCRNPSCGWSGNADYNAACNIEWLALQQLALVLDAPTRVFSSALGVGLKLTPAGGIPVAARSGYEPEAPIGTSSQAGVEPSGWDSGIKHGEPDNGYPATADPIIVYVPPEASAFTRR

SEQ ID NO: 30507 - protein, 384 aa, unknown
  TnpB Polypeptide
MRRAYKFRLYPTKKQEKIFFFTLNRCRELYNAALSERRDSYKYTGRGVSYYEQKRDLPEIKNKIREEYQAIHSQVLQDVLLCLDNAMQAFYCRVKNGEVPGFPRFQERNRYDSFTYPQSGCTLSERHVILSKIGRVQVKLHRAVQGDIKTATVKYEAGQWYIVFSCEVEQSAPLEAVESEVGIDLGITHFAALSDGTYIGSPRFIQGAYINLKRKQQKLSKCKRGSHRRDRVHKQVAKAHRKVKNQRRDFHFKEAKKLVTHHQVIVFEDLQLTNLGKQVRPKQDEVTGMYLPNGASARSGLIKSILDNGLGQFVDIVTAKAEEAGRQVYKINLKNTSQVCSACGVKGPKKEVFFITLYHLHQENEEEVCDGKRRFAGYREGCSF

SEQ ID NO: 30508 - protein, 310 aa, Bacillus sp.
VKYEWLKEVDSLALANAQLNLQTAYKNFFSGQSDFPTFKNKKSRKSYTTNRVNGNIMLFHGYIKLPKLKLVRLKQHREIPQNHSIKSCTISLTPTGKYYVSVLTEYEKEIVQKEVESVVGLDFAMAELYVSSEDEKANYPRFYRQMLNRLAKAQRVLARRVKGSVRWNKQRICVVKLHEKVANQRKNFLHHKSKELATNFDVVAIEDLHMKGMSRALRFGKSVADNGWRMFTTFLAYKLQEQGKQLVKVDRWFPSTKMCSNCGNRKDMLLSERTYECSCGLTISRDYNAAINIKREAIRLLASVSVNSTK

SEQ ID NO: 30509 - protein, 472 aa, unknown
  TnpB Polypeptide
MAAKCIRSESHALGTTAAQREDIARTLHKYRLTVRALATVIQTHWPELSKSNSKCFALESLFHPTAKRPSARYSMLDRWLGKMPSYLRRAAIEAAYGLVSSYLSNYSNWLDDAARERGSRPPRLGFSNVFPPLYGGNMIKLGADWRSAEIKLLKADGQWAFSPALRVKGRLKRLVTHATLCPSLILRGSKASLSCPVEVRPVPVQGHHRVCAVDVGINTAATAAIVDLTGTVIARTFLTCGRHNDQRDGLQAQIAHKQAASHGGSGKRLGKGFCQALYARIAGLNLDAARQLASAVMAFAARHGATAVVVEDLKGWRPTGRGGQRKRFHRFQHRYLVKYLTYRCEERGLRLLSVYARGTSYYAYDGSGPVKRDKKNACLATFSNGRRYNADLNGAQNIAARGLAILLGLKPHKELTGVARKGSPGRTGKSSGRPTRIPLVLADIWAYARMAAGHTVTATGVSLDAPTTARSA

SEQ ID NO: 30510 - protein, 405 aa, Streptomyces sp.
VGTSSVKRAFKYRFYPTNAQAAELMRTFGCVRKVYNLALAVRSEAWSVAAERVGYGQTSAMLTAWKKTEELAYLSEVSSVPLQQALRHLQNAFVGFWCKRSRFPRFKSKRKSRAAAEYTRSAFRYADGRLVLAKMAEPLDIVWSRPLPAGAVPTTVTASRDSAGRWFVSLLCEDTPAPMPASTTAVGIDVGLTSLITLSTGEKVINPKHEGRDRKRLTRAQRVLARKEKGSKNRAKARVRVARVHARIADRRRDHLHKLSTRLVRENQTLVIEELAIDNLLKNHKLARAINDAAWRELRTMLEYKAAWYGRELITVDRWFPSTRLCSACGVLAEAISLAVREWTCQSCGTGHDRDENAAVNLLAAGLAVTACGTDARPQRESFSRSGRSVSKQETPPVRVGIPSI

SEQ ID NO: 30511 - protein, 374 aa, unknown
  TnpB Polypeptide
LKVRPEAYRWLNAAAIEVNTVWNWANEISAKATQPYAGQPKWLTGFDLNNLSAGASEYFAHIGADTIQRVNCEYALKRRQFRRARLRWRVSRGSRRALGWVPFKAASLKREGAALRFCGKTFRVFEAGRLEGVRWRQGCFAQDAIGDWWLCLPVLLRVERSVALRQAVGIDMGLKATAVTSDGERLEAGRFYRGIEAAIAQAQRCGHKRQAKRLHRRAANRRRDALHKFSRRIVDQYQHIVLGDVSSTKLTQTRMAKSVLDAGWGMLRTQLQYKGEHAGRRVTIVSERFTSRVCSQCGSLSGPQGLRQLVVRRWACSVCGAEHDRDVNAARNILTAGLRCRASVRGNESQYSLIPPSSAFRVCEARIEAARAAA

SEQ ID NO: 30512 - protein, 356 aa, unknown
  TnpB Polypeptide
VIRTVKIASPLNKGKLGEVHQFLETYQNCVNYFIARLWSEQRFNGKYLDEEYIEAAKQRFNLTARLIQCAGKQALEVAKSQRKKSKRQQQMPRFKELVANLDSRFWEITAQQNSFEWLKLRSGFTFYLPFKKTRMWNKWFDKGFTLSKSIRMLRKRNKLFIEFLFEKNAPELKTEGEVEGLDLGYANLAVCSDGQLAGEGINGYIKGFAKREKHTHKQIEQRAFHELKGLDLNGVKTLVIENLKNVKLKTRGMFSREHNRRLSHWLYARVTKWLEQRCEETGVQLVRVSPWKTSQFCRFCGNWDRRNRRGDKFRCVHCGHEEQADSNASQNLKLLGLAEVHSLRSLQPQMAYLSIK

SEQ ID NO: 30513 - protein, 369 aa, unknown
  TnpB Polypeptide
MLKTFKYRLYPSKKQITTLNQTLEECRKLYNHLLKERKNIWEKDKKSISCFEQCNTFKQLKTDKPNLKIVHSQVLQNVAIRIELAFQSFFRRVKSGEKPGYPRFKGKFRYDSFTYPQSGFKIIEDKSVVQLSQIGKIKIKLHRLIEGNIKTCTISKTATNKWHVTFGCEVEPKPLPQNTEEIGIDMGLESFAVLSNGEIIKNPRFFRRGEKILAKAQRKFSKQEKGSIKRNKVCKVVAHIHERIANKRLDFIHKNARNLVNRFGIIIIEDLSINNMKKDNFRCINKSIGDAAWRMFADLLSTKAEEAARKVIKINPAYTSQTCSQCGQRHKLKLSERVFECPYCHLSLNRDFNASLNILSLGMKRLASA

SEQ ID NO: 30514 - protein, 412 aa, Streptomyces sp.
MKLVVQVRLLPTPRQAATLEATLVACNEAASWCSRVAFERDVKRNFALREHTYAEVKSRWGLGAQAAQHVIKKTCDAYAVLKANLRAGHLGRPGSKRYRRAIEKPIAFQDTGAQPYDDRMLSWQIAERRVSIWAVSGRVKGVAFTAGPEQLAALTLYRKGESDLVCRDGMWFLLATCEVPEGPLNADPAGFLGIDLGIVNIATTSDGEVMAGRVLNRIRARERKLRTKLQKKNTPSAKRRLKKRRRKEARRAKDINHRIAKHVVAEAERTGRGIALEDLTGIRERVRLRKPQRATHSSWSFAQLGAFIAYKARRAGVPVLYVDPAYTSRTCAECGHIDKANRVSQAWFACRSCGVVAHADRNSSRNIRARAWELWRRGAPSTVPASPSRQSGGAGRKRSITASDARCANPSL

SEQ ID NO: 30515 - protein, 375 aa, Clostridiaceae sp.
MITSMKVRIEPNNKQNSKLFQSAGTARWAYNWTLSKQEENYKNGGKFLSDRVLRKELTKLKHTEELRWLNNYSNNITKQAVKDCCNSYKKFFDGLSNKPKFKSRRKSKLSFYQDTEKIKFTETHVRLEKVGWVKLSEHTRIPTNSKYSNPRVSFDGVHWYVSVGIELNQTPVELIDKSIGIDVGVKDLAICSHKEEPYKNINKTKKVKKLEKKLRRLQRKVSIKYEKNKEGRSYVKTGNIIKLEKSIRKLHKRLDNIRTDYRHKITTEIVKAKPSRIVMESLNISGMLKNKHLSKSAQQQSLYEFKTMIKYKAERYRIEFVEADKWYPSSKTCSKCGYVKPKLSLSERTFVCECCGTIIDRDRNASINLSRYKVS

SEQ ID NO: 30516 - protein, 373 aa, unknown
  TnpB Polypeptide
MVANRAYKFRIYPNDEQRILFAKTFGCVRMVYNHWLDRKIRQYEENKTNVTYTICAKEMAAMKKTEEYGFLKEADSIALQQSLRHLDTAFQNFFKQPKTAFPRFKSKKRNKNSYSTVCINGNITLSNGYLRLPKIGQVRLKQHRSVPSEYRLKSVTVSQAPSGKYYASILFEYENQVQEKELQKFLGLDFSMHELYRDSNGKEPAYPGYYRNAEKKLAREQRKLSKMQKGSNNRNKQRLKVAKLHEKVSNQRKDFLHKQSRQITNAYDCVCIEDLDMKAMSRSLKFGKSVSDNGWGMFTTFLRYKLEEQGKKLVKVGRFFASSQTCSVCGYKNAKTKNLALREWDCPQCGTHHDRDVNAAVNIRNEGMRLVNA

SEQ ID NO: 30517 - protein, 333 aa, Cyanobacteria sp.
AAERTWSAISRFFDNCRKKVKGKKGFPKFKRSCRSVEYKTSGWKLSPNRKAITFRDGKNIGTLKLKGTYDLNYYDIKQIKRVRLVRRADGYYAQFAIDAKVRVESNLTGKMVGLDLGLKFFIADNEGNTEPCPQFYRKSEKQLNRANRKKSKKFKRGAQVQSKNYHKARNRYARKHLGISRQRKEYCKRVAYSVIQSNDLVAYEDLNVKGLVRNRRLAKSISDAGWSTFRQWLEYFGFKYGKVTIAVPPHKTSQNCSSCGHIVKKSLSTRTHVCPHCGFTEDRDVNAAINILKLALCTVGHTGTYAWGDLPSWAVGVILSFNGESTNQESPHL

SEQ ID NO: 30518 - protein, 385 aa, unknown
  TnpB Polypeptide
VSALEKGYKYRIYPNKQQEEQLKDMFNAKIYVWNYFLNINKHRLNHHKKVYNFAQMCLLLTHLKKKKQWLSQCEKSVLQNTLKTQYQTFLKFFKKECGFPKFKSYKDNYKSIKMNYTNNNIEIKEKEIQYTSTGKYKKQNCKIKLPKVKQIKIAYSRQYEGRIVSATLSQDTDGKYYISLCCLDVPNNNIVDKTGAVVGIDLGIKEFATTSDNEIIHNPKFYRQYENKLIKAQRKLSKRKKGSKNRNKQRLVVNKYHKKIYNSRLDFIHKLTTKLVKDYDIICLEDLNASGMLQNHKLAKSIADASFYEFKLLLQYKARWNKKVVSIIDRFYPSSQICSNCGHQSNQTKDLGVRTYICEECGLEIDRDYNASINILREGLRILSI

SEQ ID NO: 30519 - protein, 362 aa, Halobacteriales sp.
LEELAEAFTSWYGKRKSDSRGNPPGYRKKNYYDDDGNCLHEEHPRSTVSWKQNGIKHDSKNNRVRLSKGANHKEYPKAWEYILVEYETRPNVTIENLQQVRAVYDQQKGRWELHLVCKDEIETPDAPGNETAGVDLGICKFAAVADSTEEADLYPGNRLKQDGYYFPKEIATCDDSGGDEATRLHHKWSERRTHFFHSLAKHIVQRCVKNGVGRINVGDLEGVREDENGESKNWGKHGNLDLHGWAFDRFTKILTYKAKVEGIEVVAVSEHCTSKTCCACGKKDDSQRVERGLYVCENCDAAFNADVNGAENIRLDLNQSNSESSARLDQDRSTGWLAQPSVYLHDRSRGFQPRSAVVDCKP

SEQ ID NO: 30520 - protein, 325 aa, unknown
  TnpB Polypeptide
MSKFVSRVERHVITKYDKNYSNIKEICHRCKNLYNYCNYILRHSLFRGEGLPKEYDLTGLLAKENQDDYRALPAQTAQQVIKLLYKNWKAYFKSLKSYQKDKTKFNGCPRIPKYKPRGEKGHYVAFFTNQQVKLKNAEVVFPKQANLKPIKTKTSSIEQVRIVPATSCFIVEVIYEKEITPAETIDGSVASIDLGVNNFVTFLDNQGNQPFIINGKGAKAYNQYFHKEKARLQSELKQGKYYSKNIQLLGLRRANFMQNFLHQSSSIVIKALKERKISTLVIGLNEDWKQKSNIGKANNQNFVSLPHRKLIDQLVYKCEPVNANQ

SEQ ID NO: 30521 - protein, 491 aa, unknown
  TnpB Polypeptide
MISKQLERSKEIYRCVNLFTKQNRIKDQRLNEIFKLYAKGYKSALDYMFKEFNLTKEENRFQAIKSMVKKDLGDKLFKDIDDKLTKRIQTNIYAQAYNLYKSAQMLRKFYIVSILVTQKSKRGNKNLYHDYKDYIKLFDYNKDATLKSIHRYVRQKLARTPSKKLKVMLLDSHSVQMQKSENENSINNRWLRVIPIKNKKEILIPYRANAYKDRNKLNSYQFIKTESGVFKINIVQTIDKDDEKYKDNDKIVGIDFGISDFVACDNKIFGQKFIYWLIEKDRRLAKLQATLQKNDIKPRNSKKYCALVSKIRAYTKNEVNRILNLIVSEHKAKTIRLENLEFRNQTLSKRLNRLLSKFCNKIVEEKLQRLLDVYDISVEYINPVYTSQTCFKCGYVSKNNRNGRKFKCRCCGYKANANINASNNIARRSCDINRSKNQVLQTCFDKFLSKFSCMRLANNFVVISSLKSSAVAINNKIVRNPALFAYLDAKT

SEQ ID NO: 30522 - protein, 389 aa, unknown
  TnpB Polypeptide
MLKGFKYRLYPTNSQKELLAKHIGSSRFVYNLALETKNTAYLGSKHNFSPFDLIKQLPELKKECEWLKEVNSQSLQQSIQNMDIAFKKFFKGAGFPKFKKKSNSGSFSVPQNVILENDLLVIPKFKEGIDIVLHRPIEGTIKSATISVTPIGKYFASILVDTNEIIPQKAIINESTTIGVDLGIKTFLVTSDGLEIENPKHLRKAQSKLKYTQRKFSKNKGNRTKKRLALLHEKVVNKRKDFLHKTSTKLIRENQTICLEKLAVSNMVKNHNLAQAISDVSWSTFVTMLEYKADWYGKNILRIGRFAPSSKTCSCGVINKDLKLSDRTWTCKSCGVTHDRDILAANNIKVFALKDKLTTEHSLKNQGKLPTLVGALTLEARPIASGVGG

SEQ ID NO: 30523 - protein, 317 aa, unknown
  TnpB Polypeptide
MRTVSSCGVEIRKQNIPVRQTMEIYRQAVGYLTEIYAQVWEELRKIPETKKRFNTAEHMVHMTKKNTARFDFDLRFPKMPSYLRRSAIQHALGSVSSYKTRLGQWKETGVLSGRPKLTCRNHAMPVFYRDVMYREGAEGKDEAYLKLYDGHDWKWFRVYLKRTDMEYLRRNWKGKKASAPALEKRHCRYFLRFSYTEEVTLTKTPVKEQIICSVDLGINTDAVCTIMRSDGTVLGRRFIDHPSEKDRMYRTLGRIRRSQREHGSAQTQGRWAYTKRLNTELGKKIAGAIVRYAEENHADVIVFEYLEMQGKISGKKK

SEQ ID NO: 30524 - protein, 392 aa, Kouleothrix sp.
MRTIQTTHRYRLEPTDEQATQLRRFSGARRYIWNWALRRKKEYYATNKKGLPLSVLYTELKDLKQQPETAWLREMDSQALQQVLQDLDKAFQAFFAKRSGYPQFKSKKLDRPRFRIPQRVTIAGTFVQVPKIGRIRARIHRPVEGVTKSATLKQEPDGHWYVAFVVEQAAAERTERPVTTHVGVDLGLKTFAVLSDGGHVANPRYYRTQMRKLRCAQRVLSRRIKGSRNRTKARQRVAYLHQKVKQQRADFLHKVTSHLVNHFDLVSIEDLSVRGLARTKLSTNVLDASWGAFRQFLTYKAERRGTYLMVIRRFYPSSRLCPACGAINADLALADRSWVCSCGVVHDRDLNAARNIDTEGLRLFTHHVAVGQTETQNACGVLVRPATAGAGR

SEQ ID NO: 30525 - protein, 459 aa, Desulfurobacterium sp.
LTEEQEIILGYLTYHAGRLWNQANYLIKNKLAKPDYRDLYNKLKDESLHLRSLQSRCAQIVLDELSRGWNNFFKFLKDPKKFKKKGVSVVKPPSCVNPEIPHRVVTWDKTGFKIEGSRIRLSLSKNLKEYLLKKFGYSPAYLWIETGYKDLENLKVLNIQIVPYKSYGQVSFKAVVVYEKKVPEVKLQSNKVLAIDYGISNFATCVIEKNPISYIIDGRGLKTLLRKKLKKIFNLQKRVDNLKNKGLPTIKLERKLHRLWKSVKNLLRDYAHKVSSLITKLAVLNNVKTVVIGKVQESKNKENNLPDLVNQMFKLLPHGKATEYLRYKLKEVGIEVKLIDESYTSVTDSCDENAGVKKESKGNGRRIKRGLFLSPIKGLINADVNGARNILRKFKRKWFDLVTGLKKVVRVRIYEFGKGISESLQIAGIGVEGSVNLPGGIRVGTTYQTPSEAYDFSRR

SEQ ID NO: 30526 - protein, 421 aa, Desulfurobacterium sp.
MNGLKQEKIKETLNATRKRRKRQIPRVYQLKLQNLSKKDRKKLDRLFLEAKWLYNYIIADIENRLTKDSWKLKQVKIKTPEGFEKRDINTLSSQMRQGIIERIKHSLKSLKKAKEKGIKAGKLSFKSEIRSIPLKQYGITYKISGDRNRIKIQGIKKKFRVLGLHQLIEDCEIANGLLVKKPSGYYLYVTCYLQKEKALEEIKKKQTRQPIGIDLGIKHQITLSNGEKISWYVEETKRLKKLQKTLSRKQKGSKNYFKTKLKIQKEWEYIQNKRKDTLNKAISHLKKFFLIAIQNDSIKGWHEGYFGKQVQNTGIGGITARLKRLATLIPVFFVDRYEPTTQVCSFCGHRQKIPLSERTYKCPLCGKEIDRDVNSAKNILKIAVEKLKGEGKLLKTLPVDCGEVTSVEWAITHGEAGSLPL

SEQ ID NO: 30527 - protein, 440 aa, Desulfurobacterium sp.
MKRIVKVKLYPTGEEKQKLRQLQLRCSYLYNRVNYILRQQYFSFGNVKVSNGTLYRLAKDLPEYEALPSDIAQEVLKKLSEDWKSFLNLKKLEKKEKLPPNIKKVSPPKYKKDRKKKQTLPMNIYIKTDRSYRLGNYEFELTVPKDINGKRLKVKAKYSIYYENIRNFGRAEVFCKAGEWWCYVTVNLQQEEKQPLGKRLAGIDFGIRNFLTLAVETDKGIEVFQFKSRELIKDYKRWDRKIATYQSILNRSGTKTSKKLQRLYIKRDKKLKQSINSMLNKVIDICVSRGVEKIYIGDLTGIRKDKDFGKLNVLLHNFWIRNYTLKRLKEKLSEAGIGIKPIPEHYTSSRCFKCGNHIKRPHQHYVVCENCGKLNADLNGAINILKRGKKNLSLEIVSFYQFKWIRGRVNSWIPIVMGEGDKPPCSLFLRLQNPSHFNEG

SEQ ID NO: 30528 - protein, 137 aa, unknown
  TnpB Polypeptide
MTRKAKKGSTRKRQKTGLNRSILDVGWGMLRSVLAYKLDEAGGVLVEVPTRKVKPSQTCPNCGHQEKKTLAERTHICKQCGYISDRDVAAAQVMLSWALGTSVLDDERQALLQKNAPLQCGSLKQLSSMKRRKLPAL

SEQ ID NO: 30529 - protein, 440 aa, Streptomyces sp.
VDVQTEDDVPTRAYIGIWVPPWRHEPKGIVIDMQLRYSFRLYPSAGQRMALARAFGCARVVFNDALRARETARSAGLPFIPSRELSKQLTTSKKTPERAWLTEVSSVVLQQSLRDLDTAYKNFFDSLKGKRPKMGPPRFKSRKDTRQSVRFTANAGWKVTPGGKLRLPKIGDVPVRWSRTLPSASSTVTVIKDSAGRHFASFVVETDPETLPATDSAVGIDLGLTHFAILSDGTKISSPRFLRRAEKNFRKAQRDLSRKAKGSSNRAKARIKVARAHARTADARREFHHQLSTKLIRDNQAVAVEDLAVKGLARTRMAKSVHDAGWSAFTTMLEYKAAKYGRTLIRIGRFEPTSQVCSQCGVKDGPKPLHIRTWTCGACGAVLDRDINAAVNIAKAAGLAVSACGARVRPGLVPAQREETGTHPKPQPVTTGRQAGISVF

SEQ ID NO: 30530 - protein, 420 aa, Scytonema sp.
MLVFEAKLEGTKEQYGKLDEAIRTARFVRNSCLRYWMDNKDIDKYDLSAYCAVLAKEFEFAANLNSMARQASAQRAWAAISRFYDNCKKNKQGLKGYPRFKKEQTHGCVEYKTSGWKFSSDRRYITFSDGFEAGTFKMWGTRDLHEYQLKQFKRVRVVRRADGYYAQFCIDQERLEKREATAHNVGIDVGLNHFYTDSDGQTVANPRHLRKSEKSLKRLQRCLSKTKKGSKNRAKFRNKLARKHLKVSRQRKDFAIKTARCVVMSNDLVAYEDLKVRNMVRQRVGRVPRLEATGEPVRVRNRHLAKSISDAAWTQFRSWVEYFGKVFGVVTVAVPPHYTSQNCSNCGKVVKKSLSTRTHTCHHCGHTQDRDWNAARNILERGLRTVGHTGTLTSVDETDQYLGEETPSSKSTRGNRKPKK

SEQ ID NO: 30531 - protein, 285 aa, Drancourtella sp.
MDSAYRKFFKEHAGYPRFKSKHNSRKSYTTNYTNGNISVDFDARKIKLPKLKQVRAELHRKFTGQIKSATVSQVPSGKYYVSVLVETYHETFPETEGKIGLDLGIKDICVTSDGRKYRNPKILSKMERKLVKLQRQLKHKEKESSNYYKAKRQIALCYEKIVNARKDYLHKLSHEIISENQVIVSENLQIKNMVKNHHLAKFISDVSWYELTRQLTYKAEWNARKYVKIDTFYASSQLCSACGYRNTGTKNLSVRKWICPKCRAEHDRDINAAKNILAEGLRKIA

SEQ ID NO: 30532 - protein, 260 aa, Halorubrum sp.
MESDEWDKQGAKLRYDQQTDTYYLHVSVKQKRDDTQEEAEGRTVLGVDRNVDGYLAVTSSGAFIGNADLLNHKRREYERRRGNLQQTGTRSAHLTIQSIGDRFANWSENYLHHVSKEVVTEAVANGCETIVLEDLENIRERMSDLSKFQQWAFRELSRKITYKAKAEGITVEVVNPAYTSQQCSHSECGFTHEGNRDGDEFVCQKCDKELHSDYNAARNIAARYLRNRRKSGSGGATNHLALKSGTVNGSGDFTLTVSRG

SEQ ID NO: 30533 - protein, 383 aa, unknown
  TnpB Polypeptide
MPALIKAFKIRLYPTKEQEALMWRHVGACRFIWNHFLNLQEERYKAGEKFMSAFDMSYLMPPLKKQEEFQWLNDIAAQTLNRELADLADAYKDFFKKKARHPKYKSRKRSKASFPTAQIIYFEDGKVTVGKIGKVKYKTDFDLPQGKGNKFTNPRISNICGKWMLSFGMDCPEEHPELNAGTSVGIDLGIKELAVASHQKQMITVPNINKTDEVRRLEKNLRHLQRSVSRKYEAAKKRTGRYEKSNNILKEEEKIRRLHHRLDCIRQNHVHQATHYFVSLLPERIVMEDLNVTGMMKNRHLSKAIGQQGFAEFRRQIAYKSDWNGIETVYADRFYPSSKTCSVCGHIKPDLKLSDRTYVCSECGAVLDRDFNAAVNLENYVPQ

SEQ ID NO: 30534 - protein, 432 aa, unknown
  TnpB Polypeptide
LERLSKTLTRTVVLECYANKYARKALREIESVYREMLVEMVNYAVKYKASQETLHRVFYEEFREKFPWLPTRVIKGAYRDATRRAKSFRERVKKGKVYKDEPEVKRITITYSDSQDWRLEDGVVKLRTHRGWVELPYRNHKQLYRYLYGGWRLASELRFKILGRKIIVYLSFTRELEVSYDPGNVIAVDVNENNVTIALFKDGALSNVYRVETSLGRIVVAYSERRKSVTRGNSAKVREVRRRLRKLREKERKLDVLRKTVKLIESLAIENRAVVVVGNINEKAKKKMEENVGNKLRHRIHQWSIKKLIELLDEKPIHIVKVSEKGTSTRDPFTGRRIGRFEPLVIRTAVKGFGRVKVVKAVLRVTWVGGRVLERDVVGAVNIGLKYLNSDGSPVALGPTGAHGVWVILVIPHRGPAPLTGLQIFVNTVKYR

SEQ ID NO: 30535 - protein, 372 aa, Thermofilum sp.
MYEDVIHKRNGSIPKGLLYYADEWREMYENTKRMREEAGKRTLPKTPPLLLLVKFVMPDGSVRGKKDAACIIDLRRGELRIPSYGIAQKLRRSLVRALVEENSLEPRPDFVLMVTRRGFLRLIASRAPPRKDASALQLICMDENLGHGLYATLIRFGGEKVRVTRGPTFKPPNAALLRRIAAQLQSAADTGTTVELRALIERAYEELGEGREVEGWELYATPDRLRELKRRIGARERRLNEEWRNGVVSWVRSVVRANADARAVVLVDEVIAETAQSGMLRRGSERLRNLCLYEGAEYVPLRASGRYCPRCNAMGVEVARRIFKCPRCGLEWHRDRMATFTLALNYAKLTENEALRKALLEWLNEHPRALLS

SEQ ID NO: 30536 - protein, 349 aa, Halobacteriales sp.
LRQIRNHAVRDYYNSDYNDRPSDYDQHNKLTEWADRWPSFADPSRHAAQQAISQIHRDLETLQERRNEGYNVGRLTWQGAGEFRSVSYNQPRRWNVDHNTGNDQFVRLRLEKIGWFTIRAERDVPPADEIDEIILKQETTGYWYVSLVSSVERVPEKPPLSEIDPEDCVGVDLGITSYIHTSENLSVGTLDLSDEYDRYAREQRKLDRKEHGSANWEKQRQKVAQAKRTIKQKVLDYQHKLTTWLVQEYDVVAVEDLDVKPMLKTSQNAKNKQDAAWSRFLELLEYKADLHGTHVEKVKPEGTTKECAVCGVETAKPIWIREHSCPACSHTDDRDLHTSARACGCKARR

SEQ ID NO: 30537 - protein, 255 aa, unknown
  TnpB Polypeptide
LGGNRIKIGNRVYQYWNSREIEGVVKTVTIKRTPLGELFMVVVVDSSEPVIEVEPSRIAGFDFGLKTFLTCSDGSKIESPQFLKQSLNEIKKASRQLSSKNNGSANRERARLNLARRHEDVVNRRSDWCWKLAHMLTDRFDVLCFETLNLKGMQRLWGGKINDLAFREFLQILEWVAKKKRKIVTYIDPWFPSSKTCNCCGHILESLELSVRVWRCPSCSSVNDRDENAALNICAVGASTVELGDVRRALPAITA

SEQ ID NO: 30538 - protein, 238 aa, unknown
  TnpB Polypeptide
MAKIFHNVVIKQVNGRWYACLMFEFPDSQAIHPGTEKCVGVDVGLHHLLALSDNQVVDNPHWFRASLTQLRILQRQASRRQKGSHRQLKSYSAIPRLHEHIANQRLVYLHKVTTFLTHEYILIAIEDLQLAFMDQNKHLSLSSHDAGLGEFRQLLQYKAEEAGARVVAVPPKNTSQCCSGCSDLVKKDLSVYVHDCPYPGLRLDRDVNAARNILNLALNNPPGRVGQDLTWPTGACVS

SEQ ID NO: 30539 - protein, 362 aa, Bacillus sp.
MLKAFKYRIYPNNEQRIFFAKTFGCVRFVYNKMLADRIESYQESQDKPDKSIKYPTPAQYKVEFLFLKEIDSLALANAQMNLNKAYANFFRDKSVGFPKFKSKKDRHRSYTTNNQKGTVCIEKGYIKLPKLKTLLKIKQHRQFFGLMKSVTISQTPTGKYFVSVLVEEKEQLSPKTDEKVGVDLGLKDFAILSNGIKYENPKWLRRLEKRLAFLQRSLSRKKKGSNNLNKARLQVARLHEKIANQRNDFLHKISNEITNENQVIVIEDLKVKNMQKNHKLAKAISEVSWSKFREYLAYKTAWKGRDLIVAPKNYASSQLCSCCGYKNKEVKNLNLREWTCPECNSHHNRDINASINLLKLAM

SEQ ID NO: 30540 - protein, 420 aa, unknown
  TnpB Polypeptide
VLKAYKYRIYPTKTQITLIEKHFGSARFLYNYFLDYRQKEYAKGNKKVNYNVTQEELTKLKKQEEFLWLNECASQALQMSLRHLDGAFGRFFKKLGAYPKFHSKKNTHQSFTVPQNIKVANNRVFFPKFVKDGIKTKVHREIPENATLKQATISRQNNQYFISILVDDGTSIPKPIKAKNAVGIDMGLSNLLITSDGVKYENKKYTIKSQTKLKKLSKRLSKKQHSRKKGDTTPQSNNYKKAKAKVQKLHTKISNQRKDYLHKISNEITNQYDIICLETLHVKGMIKNRKLAKGIADVAWSEFMRQLEYKSSWRGKTVIKIDKWFPSSQICAVCGSNTGRKPLHVRMFDCPECKAKNIDRDINASINIRNYGIGQLDNRNTAGTVEIQACGVSSDGVVVYNTATSHDMMKQEAQPSLAVG

SEQ ID NO: 30541 - protein, 590 aa, unknown
  TnpB Polypeptide
MRVGRTVQPVSYELRLPDAVQAAALRMLDASRVVINATVAALWERLDDFGERETKYAYKQVTALIASSDPHGDRQWRCEAEQAGRILRGQAERKKRFALVLPLLEQGMIQPKSEHKPAGKNRPAIKAALARLRDEDSDGGREVQLQSLIEQACNYYLTHGCFPDTYEDMQPIPVLKVGILPYAGDDGGEHGQAHRLHLDLEGRCCVFAFRAPDQSGHWSPTWTEPQTRLALPDPVMERLQEGECLAPTLREVAQPDGTRYAVLDLIVEVPVAPLPDLKGVQRVLGWDWGVRTLVTATVLDLEGNRLSPPLFLDTGGFDGRQAHTRRHIDRLKHKVAKLEARRDQFAVGDPRRAPSERKLAVLRREIACCWRKYEARNNDLAHLAANMLLLLASVWGADVIAGESLKSLKSEGRGRGAKGRWVHWRNNAQIRGALWRCLRYKSHLSGQHLAWQHAAGTTHTCPHCGKPAHTYASPALDAPVLDAGAWLRCMACGWNGARDYAAAINIALLGVASLLHDLAHPEEQPPPKHPTMTTKSLNSESYTGSGLALRLPPTPLRGCLARGKMFVNGWSKSVTLHSAFSQETMLRLCG

SEQ ID NO: 30542 - protein, 380 aa, unknown
  TnpB Polypeptide
VERAYVVRIYPNKAQRSRIERTFGCRRWVYNRCLEVRKAAYEATGKSPSRWELDRMLPAWKAEHPWLREADSHALQQAVRDLCSAYDHFFRRVRQGGKPGYPRFKSKSDPGQSFRTNWGVSVPDERHLRLPKLGAVRARVSRPVEGRIVSATVKRAPSGKYFCVLSCTGCPEAPMAEGEVPVLGIDAGVRDLMVRSDGVRVASPRALAKAERRLAKEQRRLSRKRKGSRNRAKQRLKVARAHEAVADRRKDAVHKATTQAMRESQAIAVEDLNVEGMKRNRRLATAVSDASMAEAARQLEYKCAWHGRPFVKVDRFYPSSKTCSACGHVLPGLPLSVREWRCPECGATHDRDLNAATNIAREGERILREGTAGHAGTAGV

SEQ ID NO: 30543 - protein, 361 aa, unknown
  TnpB Polypeptide
MKLTAKIKLNPSDDQRVMLHETLQRANSACNTISEIAWENKAFSKFKLQKLCYYAVRRKFDLSAQMVIRALSKVADGYKLDKNTKRIFKKHGAFPFDSRILTYKLDTMEVSIWTLDGRQIMPFQAGKRQLELLQNQQGESDLAFIRGEFYLLVTCDIEEPAIDDVTDYMGVDMGIVNIATTDDWVKYSGSHVNKVRHRNRSLRKKLQKKGTKSAKRLLKKRSGKEKRFAQDVNHCISKKIVKKAKRTGRGIAIEDLTGIRKRVRLRKSQRTQLHSWAFHDLGAKLVYKSQKYGVPIVYVDPAYTSQKCSNCGYISKSNRKSQSIFSCTSCGFVAHADVNGAMNIGVRGTESVNVPYAVSAS

SEQ ID NO: 30544 - protein, 190 aa, Salmonella sp.
MAKNKIPLDVRWSRPLPSVLSTVTVSKDAAGWYFVSCLCESEPASLPITSSMVGIDVGLKDLFVTDTGFKSGNPRHTAKYAARLAPLQRRLSKKTKGSKNRAKARLKVARLHAKIADCRQDALHKATRELINDNQVVCVESLKVKNMIRNPSLSKATADAGWSEFVRQLRYKGEWGGRSVVAIDQCFPSS

SEQ ID NO: 30545 - protein, 369 aa, unknown
  TnpB Polypeptide
VLKAYKYRIYPNSEQRIQIAKTFGCCRFVYNQTLAYRKEIYEKEKKSVSKTDCNNYCNRELKKDYEWLKEIDKFALTNAIYNMNTAYQKFFKEHAGYPKFKSKHDNHKSYTTNFTNGNIAVDFETGKIKLPKLKAVKARLHREYSGQIKSATVSHVSSGKYYVSILVETEHKELAHTNHNIGIDLGIKDLLITSDGEKFDNIRTTKKYENRLAKEQRKLSHKIKGSKNWNKQRIKVARIYEKIHNTRIDNLHKVSHKLISENQVIVTEDLAVSNMVKNHHFSKAIQDCGWYELTRQLQYKSDWNNRQYIKIGRFTKSSQPCNVCGYININTKDLSVREWTCPECGTIHDRDINAAINILNEGLRLLSVA

SEQ ID NO: 30546 - protein, 306 aa, Burkholderia sp.
HEVSSVPLQQALRHLQTAFANFFAKRARYPNFRRKDGAQSAEYTASAFRWDGTSLKLAKMDAPLAIRWSRRIPSGAKVTTVTVSKDSAGRYHVSLLCDDVVCAKPTSTGKVGIDFGLTDFVVLSTGEKIAAPNAFRKNEARLAKLQRRLARKQKGSVNRTKARLEVARMYARTADSRRDFLHKLSTRLINENQVIAIESLAVSHMLKNRRLAKSISDAGWSEFVRQLTYKAKWYGRTLIGIDRWYPSSKRCADCGHTVASLPLKVRAWDCPGCGMTHDRDINAARNVLAAGLAVSAHGESVSPMSL

SEQ ID NO: 30547 - protein, 412 aa, unknown
  TnpB Polypeptide
VNFTRAYKTEVALNDKQTTACKRHAGAARFAYNWGLARKQAAYAATGKSPSAIDLHRELNTLKQTELSWMYEVSKCAPQEALRNLDSAFAHFFRRCQLKKAGKLKGKVGYPQRKSKKQGLGSFRLTGAIVVFPAAIQLPRLGRLRLKERGYLPTAGVKLLSATVSEQAGHWYVSVQVEQAQEMPTTTGPVVGVDLGVKTLATCSDGTVIPNPGPLKRRLKKLKRLHKAVTRKQKGSNNRKQAARTLAKHYRRVGHQRANTLHQVTTRLTKTKSVIVIEDLNVTSMLTNHHLAQAIADVGFAEFKRQLLYKAQWYGSRVLLASRWEPSSKTCSGCGWVDEDLTLADRVFRCEHPGCGQVLDRDQNAARNLATLAGSSSDSQNACGAGSAGASRWAGVKLPAVKQEPNTRCASA

SEQ ID NO: 30548 - protein, 469 aa, Xylanimicrobium sp.
VARHTTFQWAADPTVEQRRAMARHEGAARFAFNQGLRLHLNARNASKIPWTGFDLINAFYAWKKSEDAGRRFVVDGVGAAELEVTGLAWRSEVSAPVFEEAVVDLGRALGAWTDSRRGKRKGRAVGHPRFTKKNDERGSFRTRNRISRTKAGQRSTIRVGQNDPRSVTLPGIGVIKVHDDTRHLRRMIDKGRARIVFATVSRRGGRWRISSNVEAADLHPAAQHPTCDADDHSGWAGVDRGLHAPVVVALADGTQTLRIAAAPKALRVAQPVTRRLQKSVSRKVKGSANRRAAVRRLAHHHERVRARRHHFLHQVSNVLVKTHDRLVLEDLNIAGMLANHRLAAAISDAAWGELARQITYKQSWRGGQVLTADRWFPSSKTCSGCGDIKQMLTLADRVFTCEQCGHTIDRDHNAAVNLATWGDKHHPQVPDPEARGRVTNAHRREGSGPRSRADETSPDDVGTLTSSAA

SEQ ID NO: 30549 - protein, 475 aa, Thermocladium sp.
MSSSGQFLGNEERELIPPAIPGEGIKEIELKNRRTNVVRLLPNGFQERKLRRLANISAKLFNEVNYERRQEFFREGRVDLKGTYDKYYGKYKDELGSANAQQVLNKNNEAWSSFFSLLKLKKEEKLPPHMDRVSPPSYWKDGETGGRKLMLVVREDNYVVDEKNHKLVLKYFKMEIRFTGRLRWLGKQGRLEIYYDEVGNAWFASIPVEVGVEVTKTGRRSKHIVRGERKAIQVKSPKGSKMASIDLGINVLASVVIDDGTWLLYKGVRAKEDYFYLQNKISEVQSMSDKMKNLEEYEAYYELNREKRRLFKKLIRRLLHLYRNFASHLLRELHELGVSTIYLGYPFNIAQQRGNKFTVNMWSYRKLMEVIELKAQEYGMRVFEVIEYNTSKYCAYHGVEVVRGPRGVVNCPKGHKLHSDLNGALNILKKATGIVISAIKRPLSFIVDHNRVAPIMGRNPLDLGEPSPNGGEEVS

SEQ ID NO: 30550 - protein, 233 aa, Thermocladium sp.
MLRMVRGSYSRAAASSPNTNYSKKIRSVQKLLARHRQRTSRRLRLLYDKRGRFLKHALNSMVRKIMGELIVRGVGEVVVGYPKGIARGRGNKLTSNFWSYNYTIRRFEDVGEELGIRVISVPEPNTSKDCSLCGDAHEGGRVKRGLFKCPRIGVVINADLNGARNISYIPESLGSVDGGLSVMRDRGNGLKTQPVVYRWTNGAGWVNPTSCEVVRMKAMNHEPMNRPRGTSTL

SEQ ID NO: 30551 - protein, 455 aa, unknown
  TnpB Polypeptide
MEEKQDIEISQEVVSDEVQAQVNDEKKPREDFKVASIIIPECNVLLDMMHESMLYYDQALFFQRNEYFKTNNRKEGKYGPYKIYTANELDKMLRNCLRTDIRYSEKERKMHNRGISYITRQVVSQWKGWRSAVKDYKKEPEKYKAMPEMPKYMHRRKKYNVLRLDDHAYGWVSENKIRLAKTDCIIDLPSHLNSSNVRMIVMQKYYNKIKINVVYVDKEEKINNAVDEGSAMGIDLGVNNFCAITINDKDNSYIIKGGGVKSLNQLYNKNMADIKSKLEKCNKRKVSKKINSECMHRNRRMYEFIHTVANKIIDLALENRVGSIVIGHNPGWKQDINLGKVNNQKFVSIPFNDLINALQYKVEKYANLKLIVTEENHTSKCDHLAKEEVCHHDTYKGKRKTRGLFVSSIGKIINADINGAIGILRKVHAFTDAQLMRLRDRGDIVSPKVFRIINF

SEQ ID NO: 30552 - protein, 459 aa, Vibrio sp.
LAILGFSYNISDKLNPEQATLFAQWIGAANVIRNQKINEYKTFLKNKTPELIAQGYASIKNNPELLFLKDIPVQLLRNAASLVFSDAEAARKGLRKFPKIKNKFKKRSVVLTKEMFFVEPFENGSRIVINNHAKAKRRIVFSLVVPHKPEQIGNQIRLSRQGAKFTLSGSFDDGRLALDEKQILSDLSYLSYEELELKTTGVDRGISLHLCSSDGFSVTYSPEEIARKKRRAKKIAHYQRILARKKRLNQNKTKACETNQQRIVQARISRIQAKESDCRNNHNHHISKALVESANQIIGLEDLNLTGMTKRATPKKNEDGKGYARNRARAKSGLNRSLLGVALGQLANYIAYKARKVGKIVISELNPVNSSKECACCGSLNTERPDQATFICLTCGNRDNADSNAAKVLKKRLIHYIKENTFAKSKTRKSIVARKKKLADRTDTSIKTRDKESAVLTSS

SEQ ID NO: 30553 - protein, 409 aa, Vibrio sp.
MIQNMKILRAFKYRLKVDEEQQSAFWKQAGACRFVWNLFLKRQQYRLNRGHYVENYATMCLHLTQVKKHFTFLKEVDSTVLQQTLKDLDKAYKDAFDKTHPYKRMPVTKKRSKCNNGFRYTGRFKVEGRHVYLPKLGNFGFFKSRDIIGKIKNTTVTHKAGHWYVSFQTEYERAERPHHSKSMVGVDLGVKRLATLSNGFYVNGLSALKTHSKTLAKLQRKLAKKVRFSNNWKKLKKKIARLHSKISAVRHDFLHKFSSYLSKNHAIIVFEDLKVKNMIQSSKGTLGEPSKQVKQKSGLNKSILEQGWGMLMDFCKYKQQWKNGMVLKVDPKGTSQTCSCCGHKSKANRLSQSEFVCEKCGLTINADDNASLNILASGHGVLACGNPNSLEFCKQESTGFVRSQPLLIK

SEQ ID NO: 30554 - protein, 344 aa, Vibrio sp.
MFFVEPFENGSRILIYNHAKAKRRIVFSLTVPLKPEQIGNQIRLSRQGAKFTLSGSFDDGRLVLDEKQILSDLSHLSYEELELKTTGVDRGIALHLYSSDGFSVTYSPEEVARKKRRAKKIAHYQRILARKKRLNKNKTKACETNQQRIVQARISRIKAKESDCRNNHNHHISKALVESANQIIGLEDLKLTGMTKRATPKKNEDGKGYARNRARAKSGLNRSLLGVALGQLANYIAYKARKVGKIVISELNPVNSSKECACCGGLNTERPDQATFICLSCGNRDNADSNAAKVLKKRLIHYIKENTFAKSKTRKSIVARKKKLADRTDTSIKTRDKESAVLTS

SEQ ID NO: 30555 - protein, 443 aa, Vibrio sp.
MRSERVLIKPNHDDYSSCKKIARLSKQVFNQALYYKRQAFFRSEFLSFSNLDQLMKIHHKSLYDSLPNAGSQAVIKKLSGDFDNFWKALNDWKAHPEKYTEKPQIPKYKKQGQLKTFLLPAKPISVKESHILLPKKMNISPVISRFAEDKKANSSCDIFKEIRIVPHGSCFWIEIVYDETQSKNHFKQNVKLNPDNKLAIDIGINVLMAVTSNQANFKPVLINGKPIKSINQYFNKQKAKLMSQSKKRKINRLSIKRYNQIRDYFHKCSNYILQLCLKHDVGEVIIGKNKNWKQAVNIGKVNNQKFVSIPHFQLIGQLKYKLEAYGILVREREESYTSKADSLACDKLPAYKKGVSHIFSGKRVKRGLYRSSTGKTIHADVNGSLNILRKASNDDFIEGLIRSGCVFQPSYWTPNGSVVKKSKPLDCFSDGADFKLHLNGIAI

SEQ ID NO: 30556 - protein, 253 aa, Vibrio sp.
INLDKAFSNFFNPKLKAKFPKFKRKHGYQSSYHCTGLKILENAIKIPKCKPIKAKIHREISGTLKSITISKSSTGKFYASILVDCGKYKNLRRKQKALIRCKKGSKNRAKARLLLAKAHERVANARNDFQHQLSKRIIDENQAIIVETLKSSNMLKNKRLAKRIADAAWGAFVSKLAYKSDMYGKWLIKCDQWLPSSKTCSCCGYKMDKMPLQIRVWTCPSCNEVHCRDTNSGKNLRNAGLIELKAAGLTVSA

SEQ ID NO: 30557 - protein, 415 aa, Cyanobacteria sp.
MLVLEFKAKGKTTQYTAIDEAIRTAQFVRNKAIRFWMDNRGVGQKELYRLSKTLREEFPFAKALNSSACQASVERAYSSIARFYDNCKKSVSGKKGYPKFKKNCRSVEYKTSGWKLSFTRKQITFTDKKGIGILKLKGTWDLNFYQLDQIKRVRLVRRADGYYVQFLVDAENKETLKPTGKTIGLDVGIKEFYTDSNGHTEPNPKFYRAGEKQLRFRQRRVSRKKKGSANRKKAVNRLGRVHLKISRQREEHARRVARCVIQSNDLVAYEDLRIKNLVKNHCLAKSINDAGWYQFRKWLEYFGVKFNRITVAVNPAYTSAKCSSCGTLIKKSLSMRTHACICGFVLDRDWNAAINILELALSTTGHVGTWVLNPNASGDSTSTLVGAILSGQVGSMSEESPSMQERGVSILQRRI

SEQ ID NO: 30558 - protein, 367 aa, unknown
  TnpB Polypeptide
MRKTFKYRAYPKKDTATNTLNAIELCRELYNLTLEQRILAYNQRKTSLSCYDQINQLPELKKEFPEYKQVPSQSLQDVCERVNRAYKNFFKRVKQGETPGFPRFKGKGWYDSITLKQAGWKIEGSYLIIKKFGGFKIKFHRDIPKEAEIKTINIRKTITGKWFVSFSCDNVPQDILPKTNQSVGLDVGCESFLTDSNGLKVENPRFMKKSQDKIVKLQQKLSKQKKTSNRRKRAKCYLAKTHEKIQNQRFDFQHKVAKHYIDRYDEIIIEGMKSWNTKWKSLNRSMRDVAWFQFFNILAFKAENAGRKVVKVNPKNTSQRCSSCGEIVKKDLSVRQHDCPFCKLSIDRDFNSALNILKLGSSFRVLC

SEQ ID NO: 30559 - protein, 379 aa, unknown
  TnpB Polypeptide
VEDKRHLQNQVQRKGYGYSMGKKQGYIITTKCLRLRCRHPEWLSETQDFYNQIQKFYYDLFLEHSELRGENSQVCLREIERLSIHSAVTYYKGMYRDFESGEITLRIWNGSEWRWMRCRLYGKAFPEGAQLMSPSVILDWKYEMLHVPVKEIVQDSSTAKERIAEGRNVCGIHFTNGDAFAVASVMNCGGKELAVRYFKGGKEYTHRCGKVLEKIEKSRKSRGENAGGRVNQKYWMHLKYLGEQYAHQVSLNIVTFCKEQDVSVIAFPKYDEEYRRHVLKGAGNFGTLHLSTRIREYLTYKAWKEGILVLDVNAKEMHRICAICGSEITQQDKESKRFVCEKGHQGDGYLNVARNAAKRCLEQFQKKAGKEKNVSAKKS

SEQ ID NO: 30560 - protein, 412 aa, unknown
  TnpB Polypeptide
MKQQVKQLSKEDYKNLRELCHIAKNLTNEAIYNVRQYYFKESNYLNYEKNYALLKTSENYKTLNSNMAQQILKEVDGMFQSFFGLIKLAKKGRYSFKDTKLPKYLPKDGFATLVIGFVRLKENQLTIPYSQKYKKEHKGITINIPPKLVGKKVKEIKIIPKSKARFFEIQYVYETEEIQSNLDINHALAVDFGIDNLATCVTSEGKSFIIDGKRLKSVNQWFHKENARLQSIKDKQNFGKGCTNKQEQIRRNRNNKVNDYMSKSARIIIDYCLKNKIGTFVCGYNKPFKKNSGMGKQNNQNFVNIPFGKLREKLEYLCRLYGIHYVEQEESYTSKASFFDKDEIPIYHADNPQNYTFSGKRVKRGLYQCANGKTLNADVNGALNILKKSNVVSLRGLYDRGELDTPIRIRVA

SEQ ID NO: 30561 - protein, 357 aa, unknown
  TnpB Polypeptide
MRLQKTIKAKIFALTRIKEAMLREEYDNFQACLKGLDVPLYSATKQQAERLLYKIRRQNGGKLKRREYPMILRRDVFNVRETENKLAKFWVKIPVHHVRGGIRAPIQLSRNQEHLLSLSIREARLFWRGDHWSLHITVMKEVEVKKPRSPSTVLAVDLGERYIATSVVIARGVMRNPRFYGKRVRGIRRHYAWLRRRLGERKLLYVIRRIGHAERRKVGAVLHNVSRAIVDEAKRHKATIVLGDLKGIRDRARGRRMNRIVSNMPYHRLTLMITYKALWEGVPVFKVKESWTSIGCHGCGAKGTRASQGLFRCLSCGLEYSADLNGAINIFKRFSEQVLENGAVFDTAHNSGVMNRA

SEQ ID NO: 30562 - protein, 387 aa, Clostridium sp.
MWKLLKSFKTEINPTEEQKVKIRKTIGTCRYIYNFYLAHNKELHDNGEKFMSGKSFSVWLNNEYLPKNPDKLWIKEVSSKSVKRSIENGCIAFTRFFKHQSAFPNFKKKGKSDVKMYFVKNNPKDCRCERHRINIPSLGWVRIKEKGYIPTTKDGYVIKSGTVSIKAGRYYVSVLVEIPDMLIDSSNNDGIGIDLGLKNFAIVSNGKTYKNINKSARLKKLEKQLRREQRCLSRKYEYLKKGESTQRANIQKQKLKVQKLYHRLDNIHTDYINKIIAEIVKTKPSYITIEDLNVSGMMKNRHLSKAVASQKFYEFRTKLKSKCDDNNIELRVVDRFYPSSKLCHCCGSIKKDLKLSDRIYRCDCSYVADRDLNAALNLKDAKTYKIA

SEQ ID NO: 30563 - protein, 376 aa, Escherichia sp.
MKRAYKYRFYPTTEQAELLAQTFGCVRFVYNSILRWRTDAYYERKEKIGYLQANARLTALKKEPEYIWLNDVSCVPLQQSLRHQQAAFANFFAGRAAYPAFKSKRHKQVAEFTASAFKHRDGELYIAKSKSPLDVRWSRELPSAPSTVTISRDSAGRYFVSCLCEFEPVSMPVTAKTVGIDVGLKDLFVTDPGLKPDNPRHTAKYAKRLTLLQRRLSRKQKGSRNRIKARLKVARLHAKIADCRMDNLHKLSRKLINENQVVCVESLKVKNMIRNPKLSKAIADAGWSELVRQLQYKGKWAGRSVVAIDQYLPSSKCCSCCGFTMQKMPLNVRKWHCPECGADHDRDINAARNIKAAGLAVLAHGEPVNPESQHAA

SEQ ID NO: 30564 - protein, 374 aa, unknown
  TnpB Polypeptide
MKTLKFKLYSHKRNKYLKRSINAAGVIYNHCIALHKRYYRRWGKHLNCAKLQAHIAKLRKRKEFWQSVGSQAVQDICQRIEKAYQLFFKHNKKGVRPPNFKKVKKYKSFTLKQAGYKFLTGNRVKIGSRVYQYWNSREIEGKVKTLIIKRTPLGELFMVVVVDSSDEPEIKLTTGKIAGFDFGLKTFLTCSDGTKIKSPQFFKQSLNAIKKANRHHSRKVKTSSNRERARKNLVRTHENIVNRRTDWFWKLAHDLTDKFDVLCFETLNLKGMKRLWGILVSDLALRDFLDILEWVAHKKGKAVVYIDQWYPSSKTCSCCGHILEKLDLSVREWRCPSCQSVNGRDDNASKNIQTVGASMVRLGDVRRSENAIAV

SEQ ID NO: 30565 - protein, 373 aa, unknown
  TnpB Polypeptide
MYNLCNYTIRQEFFKTQKVKKYGELNKELKSTDAFKELGSNSAQMVTKILCKSWKSFLIAVKDYTLHPEKYLGKPKIPAYKKKNGRFICTLTNMQTHIKDGYLYFAFKRMKPYNNLIKSNVKGHHLSTRIIPKGGCYIIEIVYEDDENIQKLNSNRIAAIDLGLNNFVAMVNNIGESSIVINGKGIKSYNQYWNKKMSRLRSIAKTVNDLNWTKQMQNLTDKRYFKIEYFMHCASKCIVNYCIKHDIGTLIIGKNDKWKQNSKMNKVTNQNFVYIPYETFINKLEYKCESVGINLIKTEESYTSGTSFLDNELPIKENYNKSRRIKRGLFKSNNGEYINSDVNSAFQIMRKVFSNVTTNEIVGAYSHPVIINL

SEQ ID NO: 30566 - protein, 433 aa, Natronococcus sp.
MEGVIRTVKIKLDVPNQRCDDLHQTKNHFLHCANTTAEWAWRHPNDYCITSKQNAEKALYDQLRNETELTANLVQKGIRRAIEATKSGVARLKKGDDTSQPHFDAWSVVYDKRSATFHRDHVSLSTVNGRIECDYVIPDDTEETPIGAYLLNEDYEFRMSTLQYDRHSESFYLHVRMRRTESEKESSTPTSENAKHRTVLGVDLNVDGSLAVSSTGAFIGNADEMNHRRREFEKTRGSMQQAGTRSAHLSIQSMKDREHRWMQDELHRASNQILEEARNHACTHIAFENLTDIRKRMAGAKRFHAWTFRRLYQYVEYKAEMFGLEVEQVSPAYTSQRCSSCGFTHENNRRSKHKFVCQKCEYELNADYNASKNIARKLLKKLHSGQKSSGGGAPCQCALTSGTLNLNGDFRASVDSTAEGESTDKPTTSVVGS

SEQ ID NO: 30567 - protein, 487 aa, unknown
  TnpB Polypeptide
MQQVCFIKQDYDKTVKPFWNDACKKLSDNLFLPYADNNKTNFTIHYFSSFIRKLTPVYTSHFPLSFKSHVISSPDVIVKAVKKIRFYFNSSEQKTKYEQMMMVARRAYNLTVDMCNNGKYIDEKNKPVDLRILVRTIVRKECIESGTVFDVNVCDQAVRIAKSKFITVCKDNKKKKNNLTGKTSFSQLGFRSRKDKKQTFSHPRMGKEGAVCIKSLGKIRLTEKLPDECYGKNVDVTMDHGRWFICVQKNIVVKGNHLGCAESQGQDKMVAEKEVKVIALDPGSRTFITGFNEHEVMVYGKEYSVKCLLPLAKKMRKLYSLREKLSQHKLYKKELSDNLQWIKDRLRYIEKNLNRLACKRQDRVNHLHRTVAYNIVRNYDVIYLPDFETKPMVKTKGRKIGRKAVHDMLSLSHYKFKEFLLWTAKKYGKEVIIVNESYTSKTQSWNGVVNEKLGSSRTMKDGTRIIDRDINGARNIYLKHVSQLTNN

SEQ ID NO: 30568 - protein, 377 aa, unknown
  TnpB Polypeptide
MLKAYSIRLYPTNEQETFLNAQFGAVRFVYNKALSIISSKYKRHGLKLYAKKDIKPLLVVAKKSRKYSWLKQFDSLALQQATINLDKAFNDFFDKTKKNRYPRFKNKHGYQSSYHPNGKVEDDGILLPKLDGVIPARIHRVIEGKIKSITVSRKPTGKYYASVLVENNKEYPVLPTVIKESKIKGFDLGLTHYLIDSEGNKYANPRHLNKALRNLRRKQRALSKKVKGSKGRMKARVLVAKCHEKVSNRRNDYQHKLSRRIVDENQAIIVETLKTINMLKNRKLSRYIADAGWGELIEKIAYKSKEKGIYYDKIDQWYASSKTCHNCQYKLTTLSLNVRQWQCPCCGEEHDRDINAAKNIRSEGIKKIKNKYPVYIV

SEQ ID NO: 30569 - protein, 490 aa, unknown
  TnpB Polypeptide
MQQICFIKQDYDRTVKPFWNDACKNLSDNLFLPYNDNKKTNFTIHYLSSLIRKLTPIYPSYFPLTFKSHTTITPDIVVKAVKKIRFYFNSLKQKTQYEQMMMIARRAYNITVDMCNNGLYSAGKGKSLDLRIPVRNKVREEINGSDTVFDVNVCDQAVLEAIGDFIKVCNSNKKKKSKVSQDFNHSSYSKLGFKSRKYKKQTFSHPRMGKKGVCFDSLGKIKVTEKLPDECYGKNVKVTMDHGRWFICVQKNIIVKGNHFSCPESQGKNKMISEKEVKVIALDPGSRTFVTGFNEHEVMVYGKDYSVKCLLPLAKKMRRLYSLREKLSQHKLYKKELSDNPQWIKDRLRFIEKNLNRLACKRQDRVNHLHRAVAYDIVRNYNVIYLPEYETKPMVKTKGRKIGRKAVHDMLSLSHYKFKEYLLWTAKKYGKSVTIVNESYTGKTQSWNGIVNEKLSSSRTMRDGTRIIDRDINGARNIYLKHISLSLTNS

SEQ ID NO: 30570 - protein, 444 aa, unknown
  TnpB Polypeptide
MVKKAITHLKLDQANLGKLRKLDELAAEYGRVVQAYVDHLIAHGVRRPDSFAEVPERDVPTVLSDRWQRCAWQQACGIVRSWYANGHQQPPLLRSVCLQANANVVVIEPSRSPTFDFWLRISTLEAGKPIRVPVTLYRRARETLAEFPKLCTGVTLNRRDGQWYATFVVERRAPKSKSSAVIGVDIGMASIVSTSQGRRYGQVSPELRRRVERAAAKRRRKQKLNACLKRQGRPTVSLRDERAEAFARNEIGRALNQMLSDLPGGAAVALERLSVRDMRGRSRQMNRALRASQLGYVRDKLKFKLDERGIRYRSVQAAYSSQQCSRCAFTFPLNRRSQGEFRCLWCGYEANADENAASNIAERFGDEELNALPFRKVETVLAVRFMRRLPGARSASAGLELRIPVGRVFGAGDAPRGKEAACVLPAGRQDAPDSQSARSTPVVK

SEQ ID NO: 30571 - protein, 373 aa, unknown
  TnpB Polypeptide
VSKVTAYKAFKFRLYPTKEQTEQINRTLGCCRYVYNHMLERRIKAYKRRQESFSYIKMQNLLPQMKEYLPWLAEADSQALKYACRCLDDAYKGFFKNGRGFPNFKSKHNHNQSYTTTNAKSIHVSDKAIKLPCLGWVPYRKSRDVEGEICNATIRRSASGKYFVSILCKIEVEPKPVIDTVIGLDVGLKSFAVDSNGCEYPNPKYLRKAEAKLRREQRRLSRKQKGSANREKQRIKVARCHEAVANCRSDMLHKLSAKLVNENQIICVEDLNVKGMLRNHHLAKSISDAAWAEFFRQLEYKAAWAGRTVVKVPTFYPSSQTCGNCGYQNKEVKNLGVRRWACPACGCTHDRDINAANNILMKGMGLLATPAAS

SEQ ID NO: 30572 - protein, 228 aa, unknown
  TnpB Polypeptide
MGLNNLFAAVISDGSALLIKGGKIKSEYYWWKREIATYQAIRDLLRNAGFSKWVGYHEKYLKAMYKRDERLRHLYITAIRFLVDELYDRGVRKLYIGYLYMLSQDNGNEYNTNVWWFRKIVLWIVNIFMEYGIDVEIVPEDYTSRECSICGNKHKNGRIYRGLYECKKAGKKINADINAALNIARRLGHRIRIARKLESYLVTHNGVKPLIPLQRANTRDPEVRNPAP

SEQ ID NO: 30573 - protein, 378 aa, unknown
  TnpB Polypeptide
MERTIVCKLNQTPAVEAAFQKTVAAFADASMIALRCGTEAKTSNKVRIQHLCYKDIRTQCGLSANLAVRAIARAAWAMKAARQKNRVVKAFKPTSIDYDQRIFDFREREEQVSLTTVEGRVRVPLILGQYQRDALRGKKPTAAKLVLKNRDWYIHIVISEEPGTKIEAISAIGVDRGIYNLAVTSTGKFHSGRKAMHIRERFASRRAKLQSIGTTSAKRVLKRLSGKERRWMRNENHRISKSIVEEAVRKKAVIKLEDLKDIRTRLKRFSRVWNRKINAWAFAELETMIRYKAERAGVTIISVPAKDTSRTCPRCGIVDKTSRSGAHFKCAVCGYRLAADLSAAKAISGRHACPERARVMEPMVSSPHCAPQKQAAGL

SEQ ID NO: 30574 - protein, 484 aa, Streptomyces sp.
VKKFQPQPGFVVQAYRFALDPNAIQEHALRSHCGAARAAYNWAVGWVSASWWQRRAEESYGVPQAGLTKWRPWSLPALRKAFNAAKHTDPRFAAWWQENSREAYSTGLANASAAFDNYAKSKNGKRKGARMGVPRFKVKRKARLACRFTTGTIRVDTDGRHVTLPRLGTIRTHEPTVKLLACVQAGTARILSATVRHARGRWFASFQAEVRQDLLPVARPDAAVGIDLGVKMLAVMADSTGQIRAVANPGHYERARRQLRRACRIVSRRQGPDRRTGQKPSRRWEKANAQRNKVHHRVANLREDALHKFTTSVAAEYGTVVVEDLNVAGMLRNRRLARQIADAGFGEIRRQLTYKTRRRHGTRIVVADRWYPSSKTCSGCGAVKAKLPLHVRTYQCDACGLVIDRDDNAALNLAALAAAATTGTGVAGDQDAQSVSKPRGADQKTRATRPRRTAEAGRAGGATLPHQQQTEARDRPQAEALTLW

SEQ ID NO: 30575 - protein, 230 aa, Actinomadura sp.
LSPPGGFGACARTPADAGISSLVALSTGEKIANPRHERRDRARLARAQRDLSRKTPGSANRDKARRRVARVHARIADRRRDFLHKLSTRLVRENRTVVIEDLTVGNLLKNRTLARATSDAAWREPHCLLEYKCDWYGRDLVVIDRWFPSSKLCGTCGTVRERLPLDVRQWTCDCGAVHDRDVNAARNILAAGLAASACGDGVRPQRDSSRTGHSSAKQETQRATAGPLRR

SEQ ID NO: 30576 - protein, 369 aa, Psychrobacter sp.
MKTLKLRLKDKHAKQLTQLSGKVNFVWNYVNELSFKHLQRTGKFFSAYDLAEYTKGSGEYLGLQSQTIQAVSETHAKSRKQFKKAKLRWRTNNPKSSKKSLGWIPFKKSAIKHLATRQSGKKALKSTLQLSLAKGQKLIIELWDSYNLALYDLNTLELVQDARGRWYACITVKAQADAKVQSGKGQVGIDLGLKEAATTSNGDTLTVKQTQKWAVKLATAQRAKNKKRVQAIHAKIKNTRRDLIHKFTTQLVKDNALIVIGNVKSKPFTNKKTKLAKSTYDASWFELKRQLDYKCKHAGCRFEIVNERYTTQTCSSCRQIGDSSPKGRQDLGIREWTCECGVTNHRDVNAAKNILAVGLDRLAVGIPSL

SEQ ID NO: 30577 - protein, 384 aa, Psychrobacter sp.
MIRGHVIELSPNDNQATYFARACGVARLAYNWALSQWQSQYQEDKAYRDHCKDLGIEIDKDKLNTPSQGKLRRKLNDIKRNQYPFMLEVTKCAPQLAIMQLGDAYKRFFRGESKYPKFRKKGVNDRFSLSNDQFAIKDKKIRIPNLGWVKMCESLRFEGKILSAKIFSRGGKWFASIAVQFMDPPKLSKRTGKSVGIDLGITDLLTLSDGTKIKSPKPLKCYLKKLRRLNKALSRKQKGSKNRGKAKTKLSRLHYKIRCIRQDSLHKLTTALVTEFDVLAIENLNTKGMMKNRKLSRAISDLGFYEFKRQLIYKANDKGKTVKELNRWFPSSKTCSNCNHVLAKEDLPLSIRVWDCPNCLQTNDRDLNASINILSHADKVLTHH

SEQ ID NO: 30578 - protein, 380 aa, unknown
  TnpB Polypeptide
MIKSYKVRLEPTKEQIEMLYKTSGCARFVYNWCLNFQKERYEQGEKFVSAMGMSKYLTALKKQDEYSWLKEVDSIALVGAYTDACTSFKNFFRGCKKGKKVGYPKFKSKKHSTPSFMPRYDNIRFNENQVRLTKIGIVKLSRKNYVPIVKKYSNPRVTFDGLNWYISVGVEEAENISSELNGTIGIDLGIKDTAILSTGKKYKNINKTAHVKSIEKRLKKLQRQVSRKYEQNRQGKQYIKTNNIIKLEKEINKIYKRLANIRNNYNHNMTADIVNMNPAKIVIEDLNIQGMMKNKHLSNAIGKQGLYEITRQLEYKCKFKGIELVKADRFFPSSKTCSSCGYIKKDLKLSDRTYICPKCGNVIDRDLNAAINLANYKTEQ

SEQ ID NO: 30579 - protein, 400 aa, Nonomuraea sp.
LIGMSRYRLQPTPAQEAALLEHCGHARFVWNLSVEQHEHWKPGRKSAPGFAEQCRQLTEARAENEWLRAGSIIVQQQALKDFAQAMSNFFAGTHRRPSWRKRGQGEGFRIVAVKPGDVRRLSRNVGEIKIPKVGLVRFRWSRAVPQGVKSFRITRDRAGRWHVAFAAVPEPIPASGTGETVGVDRGVAVSAALSTGQMLNVPGLRDSEKARLLRLLRKLARAERGSNRRGKVKAAIARLKARETDRRKDWVEKISTGLARRFDVIAVEDLKISGMTRSARGTIAEPGRNVRQKAGLNRGILTAGWGRLVERLEHKAPGRIVKINPAYTSQRCSACGVVDRKARESQADFRCRSCGYACNADVNAARNIAHAAGHAVSARGGTPLRGPVNREPQRDLLLVR

SEQ ID NO: 30580 - protein, 194 aa, unknown
  TnpB Polypeptide
VTQSATFKRDACGHWFVSLVSAMEMPAVALPLPSAERTVGVDLGVKDVVVTSDGERVAAPRFYRAAQRTLRRAQRRQSRKVQGSRKRAKVRAKVARVHQKIATKRNDFCHKLMTALVKNHDAVCLEDLNVTGLAKTKVAKSILDASLGTIRRQVQYKGIWYRTHVVAVDRFYPSSKLCHECGYQHDGLTLADRM

SEQ ID NO: 30581 - protein, 405 aa, unknown
  TnpB Polypeptide
MYTTLYKLFRAPRNRNLKRLTWIAHDIWNYFLGWQRTRYALGLPYMSYGEMSRQFTILRKAHPEVFAHWRELDSWAARDILRRLDEGYQRFFKKLAKRPPKFRSWRKPYSFTMCPSGFGFADPEEGDFGLGIYDDKVRIMKRHYRFNLSRPILGNIKTVTVKADALGDFYMSVVTDHIATEAAPKTGQAAGYDFGIKTMFTCSDGTQRESPYFYSTGASQLKSAQQKQSSKEKGSNNRERERLNTARVHRKIKRQREDHHWKLAKQLVHQYDVLFFETLTFEGMKRLWGRKVSDIAPYAFHLKLKQQAKKHGKKVHYIDRFEPTSKTCSGCGEPQMLMDLSVRQWQCSSCQRKHHRDVNAAINILKVGASTFGLEGVRLAIASNPRRLHPKSIPHDPHRKATDSL

SEQ ID NO: 30582 - protein, 927 aa, unknown
  TnpB Polypeptide
MHPTNVAKSTNHKSGSDVEDDAANAAFMKESVAPTDQSLPAETARPPGVCEDNDDAGRTVACRLDVTTVRNNNKTLSKLQALARTMHDVRRDAHELITHHVHRVLKANEESPDLTEQSTVYRFFVAVTNSDNEGKRPELDQAIAATRAACMPALVRHAVPIGFARAMDLDCVKYCASVKTQIHRSFRKRVGRVVALRLRLDDATLATLSTEEKKAHRWATKRAMEAATSPSGSKKLSGVHATVVDAVIADLKLGDIDLTYGKGAPKSMAYVLKAAPCRFLPALRLINIELEAAGAARFRLVPMTTNNVPGFTTIDQQLLKNMGFVSKEAKAKINKRMVKRCADVAPYTAELKRLRSVIRAHEAEWKEADFQLNRQRYLNFLPEWEAKETLRLGALEAELEQRDADDRAAVGKKRTRVSKKSTALKRRAVPKKPVLTDEHAADDARESCVRDTVLAPTRAAIAAIETDPAYQKLVDAAANEKRDTFEAVFDIRKAVRRPDRWAHSLSTDGFSMRLLMKRPQRTPKTNRDNQLTAMPQRGIFTVEQLVAVTTEGVRLPDDELERILRLSPIEQNLALQAALDKAHGGVCPFFVMGVDPGKRELIVATNPNAAPANRAARLASPPTTVRYTAAQRAFDIAPGKYILSHKGRKDPVRVARAAKAQQYRRSTRPDDAAALQAAVASMARHASSAATGAGFKDYTDARRAALPLLNAVYADDMLHRRLRWKAFVDKQKSLQALVNRLAKVERAHGKQLVLSYGAWGMQAGVAGSPVNKGLPPAIGVGLLRHLARFFVVVVVPEHFTSKTCYHCGCHECGNHPTIAEQHRPRRDAKALVRRDKRLAQLEQQGGNEVLEAKAHKFYTRTIARVPEVRGLRLCPKCKRCLNRDNNAANNIGLQFKRLLLGLGPIKALDKDEIQLHKATVTLDGGDL

SEQ ID NO: 30583 - protein, 397 aa, Methanobrevibacter sp.
MKCVNQGLKVRLYPDEDMMIKINQNIGNSRFTWNKLLEDYQNTYKLFKLHGYTKLKCNMTTFNAMLNMLKKEHAFLYLSESSSLQQVYRDLIHAYNKFFNGESCYPRFKSKKHDKKSFRIQNNRNIKIKPHTIILPKIGEIHYRTSKKYHEKLKNIKINNVTIKIENGKYYDVFNIETEIPKFPKTNEAVGIDLGIRTLATLDNGLKIANLDVTYEENMIKKYQKRLSRQKHNSNRYKKTLKTYWKWIDQKKNKINDYYHKTTTQIVKKYDIIILEDLNIKGMFKNPKYSPKLQRIGWKKFVEMIKYKAEIYGKTFRQVSRWYPSSKICSNCGYYNKDLKYETEWECPQCHKIHDRDINAGKNILERGLTNLIEETMNLWSRGDSTVILLSWESISP

SEQ ID NO: 30584 - protein, 537 aa, Bacillus sp.
MAKETTPSFVLTLEMETNPSIISSIESDLEVGRVIYNSCLGELVKREKQMKRTKKYKKVRRCLRAVSKKLSYYETQENKEKMTFYQAEKKQLISELFDIQKQFHLSEYSMHDYLKPIRSHFSDTLNVDIAQKVATRSWNTIKKKLKGEAKKVTFLKSGEMVSFEGKKNSTGWFYRTKQIVFGKSKIDVKIKENDVYIQEALSAIESNLEFEYKTQNGERRNASHKVKYVRVLKRVIRGNVRYYAQLTVQGFPPAKRKKDGSFKHQMGTGRVGGDLGTSSIAVVGENEVLLTNLAENVMNRSRRIRLIQRKMERSKRTMNPNYFNENGTIKKGKKTWIFSKRYMKLKSELKELHRKQANSRKQSHNILSNKLLTFGDEHYWEEMNIKGLQKRSKKTEISEKTGKFKRKKRFGKSIGHRASAMFLSILEHKVKTNGGIFKKVNTQKFKASQYDHKANDYKKKELKERWHIFDDGTKIQRDLYSAFLLQNSNRAGTKANKRLCEKTFEAFKTFHDKEIERIEKQDTFVLNSGIRLKRKLP

SEQ ID NO: 30585 - protein, 223 aa, Geitlerinema sp.
MLTGWKTEEELQFLNEVSCVPLQQGLRHLQKAFSHFFAQRTQYPKFKKKRNGGSAEFTRSAFRWQDGQLWLAKCSEPLDIRWSRQLPKGAEPSTVTVRFNPSGRWHVSLLVDDDTVKPLPQAEKSVGIDVGIAHLAITSDGEKVENPRHLTKHDQRLRRAQKNLSRKMKGSRNREKARRKVAKIHAQITDSRKDYLHKLSTRLVRENQTIVVEDLSVKNLVKN

SEQ ID NO: 30586 - protein, 371 aa, Clostridia sp.
MKKSFKYYIKGNKETIEKANQVLELCRILYNLCLEQRQFVWKNYHKSISGYDQVYELPSLKKFFPQFRKVPSQTLQEVVERVNRAFQNFFRRVNNGEKPGYPRFKSFGRYDSLTLKQAGWKLVGKELQISKIGDFKLFLSRPIEGDIKTVTIRRASSDKWHATFSCDNVLCKPLPKTGKSVGIDVGCESFLTTSEGEKIDNPRFFQRTKKLLTKRQRSLSRKKRGSKRRNKARILLSKAHEKTYNQRRDFHFKVARKLLQAYDVVCIENMSHFKSYRSLNRSMRDVAWFGFFNILLFKAEEAGKEVIKVPAKNTSQLCSECGGPVPKSLSVRIHKCPHCGLSLDRDINAARNILRLGQSLQGAGALVPAMN

SEQ ID NO: 30587 - protein, 375 aa, Moraxella sp.
MLKAYKYRIYPNQKQAIAFEQHFGCVRFVYNWALALQNRYYKIFGKSLSRSKIQSQLVKKKKTGKFAWLNEVSSQSLLNALLNVHTAFTNFFKGRAKFPRFKSKKIPQRSYQCPQHCTINFEQDIINLPKIKGIKTVFSREFVGNIKTVTISKTATGKYHASILVDTDSILPTPTTIEPSLTVGIDLGISHLLNLSDGSKFDNSKHLAKASKRLSAQQKIFARKQKTSKNHQKQKLAVARIYQKVCNQRLDLHHKITHKLICESQATSYALEDLGVKNMVKNRKLAKAIHNVGLGQFVTLLTYKANWHGKNILKVNRFFASSKICSHCHYKLDSLPLSVRNWACSSCQTHHDRDINAASNIRKQALADALGLSVV

SEQ ID NO: 30588 - protein, 434 aa, Escherichia sp.
VTKTRRTCIRKTQCLPRRISVSLFIDQSIIWPVKRLQAFKFQLRPAGQQEREMRRFAGACRFVFNRALARQNENHEAGNKYIPYGKMASWLVEWKNATETQWLKDSPSQPLQQSLKDLERAYKNFFRKRAAFPRFKKRGQNDAFRYPQGVKLDQENSRIFLPKLGWMRYRNSRQVTGVVKNVTVSQSCGKWYISIQTESEVSTPVHPSASMVGLDAGVAKLATLSDGTVFEPVNSFQKNQKKLARLQRQLSRKVKFSNNWQKQKRKIQRLHSCTANIRRDYLHKVTTTVSKNHAMIVIEDLKVSNMSKSAAGTVSQPGRNVRAKSGLNRSILDQGWYEMRRQLEYKQLWRGGQVLAVPPAYTSQRCACCGHTAKENRLSQSKFRCQVCGYTANADVNGARNILAAGHAVLACGGMVQSGRPLKQEPTEMIQATA

SEQ ID NO: 30589 - protein, 481 aa, unknown
  TnpB Polypeptide
LADRGQGSNARSRAPVRQGRPDRRASGGGACVQGPHRPSAASRIPVPTDPREGVVVAVVFRGLGWLRVGGDGAPLYRASVGCGAGVMRRAYVFRLRPTARQHIALAACVDSHRELYNAALAERRDGWAHSKTRINYGDQSAQLTDIRAERPDVAVWSFSSQQATLRRLNKAFAGFFGRVKTAKPGVKPGYPRFQGKARFDSVQWPKDGDGARWLPETKRVYLQGIGQVKVELHRQVAGRVKTIQIKRQGRRWMLVLSCDDVPTNPLPATGQQVGIDVGIMSFATTSAGEHVDNPRWGRQAADKLAAAQQRLGRAKRGSNNRRQRRETVGAWHRKIANQRKDFHHKQARTLIEGYDLLVVEDLKIANMMRRAKPVADEDNPGQYLPNGARAKSGLSRSIGDAGWGGFVSILRAKAEDAGRIWIEVDPRHTSDGCEKCGYAAAENRVTQATFVCRRCAHRAQADEMAARNILRAGLALHAQAA

SEQ ID NO: 30590 - protein, 496 aa, Carboxydocella sp.
MPKKHEKNKFSMTVCGEFFPEIYPTYRSSKWSRGEEDPLTTEMRLFCACMRWAFNRLLEGASRREIKKSGQELFGLNSRYADDARLKAQALLDSQTELLELENEETEKKLGRARKKLSLAMRKLAKAEEKGAASEVIEKLRLAVKGRNKRVVSLAKRLAELKDYREKGTIPEVVFGGRRLWQKVCQGRAAREKWRHARRNRLYSRGDESKGGNPNIKIFYEGRYLVHLTFELVRVQEPDFAKGCLAIDTNPDGVALCNVSASGQPEPWPEGFSVPYPGNLGKYEGEFQVIPYPNGFLYIRIPDLAHTSSFRRSYLIGVLAKVVVDIAFFSGKPIVLENLNFGKDRLDTNKKFNRMASNFPFAKMVGAMYRRATKEGVPFKLVSPRHTSTIGYWKYMKRYAVPVHCAAALVIGRRAMGFRERVTEELRQLVSQIKQNLTRKVNPDRPGEGKGMTRGVRACLRRLGERLSVHNGLAPCQQEAYNSVWPDLKLLALSVR

SEQ ID NO: 30591 - protein, 428 aa, Xenococcus sp.
MISFTYEYKLKPTKKQIKDLEMCLDICRAVYNWNHRERKDWIQSRKSPINRCSIVQEYVIPADKPFPNYNIQANNLTQAKKQYPHLAQVHSQVLQSTLKRLEQAWDDFFKVESRGFPKFKNQNRFRSFVYPQIKRSNLAVRPRAADRRKGTRTKTKDTKIRLPKIGWLRIRKSRQYPTGMTPKQLRIVRKATGYFAQIIFVSTESVPDILPGETSLGLDAGISSFVASSRGELIKTPEFVLKAARKLKSLQRRLKNKIKGSNNWLKLQKKIARLHFKVANRREDWLYKLAHHFCSITDNIFVEDINFKSWQKGLFGKQIGNSAIGKFINQILPFIAWKTGVYYEKVDKDFTSQECPNCGLSTGKKNLSQRVHNCQYCGVTLDRDVAAAKVIENRGIVAVGQPVNFKNACGDRGAGIEQLTLFDLVTGL

SEQ ID NO: 30592 - protein, 370 aa, unknown
  TnpB Polypeptide
MTIKQKSYKFRLYPNQEQKIMFAKTFGSSRAIWNMMLADKIKYYEETGKILNNTPAQYKKFFPWLKEVDSLALANVQLNLQKAYKSFFQSGFGFPKFKKKRHHQSYKTNNQKDSIALDNNTIKLPKIGWVKVKIHRKVTGIIKSATISMTASGKYYVSILCESEIAPLPKTGSNVGIDLGISYFAVLSTEEKIDNKRFLKQLSKKLVKEQKILSRRALVAQKSSKKLSESKNYQKQRLKVAKIHEQIANKRRYFLNKISTEIVKNHDIICIEDLSSKNLMKNRKLAKAIGDVSWHQFARMLEYKADWYGKTLSKISRWHASSQICSDCGFASGKKPLYIRKWTCQNCGRHHDRDINASINILHEGIRLVS

SEQ ID NO: 30593 - protein, 293 aa, unknown
  TnpB Polypeptide
MKIICGFQFELHTTDEQRSALSRNAGCRRFVFNKALELQNERKKNGLSLLRYKELCLELVKWKKEEKTVFLREAMSQPLQQALKDLDRAIADSFRPKSDPARKEWPKFKTKDIGDGFRIPQFRPEHIDDANGRVKLPKIGWMRYRKSRPLAFKCADGSMKSGTVRQIHIKKDCGHWFVVFTTEFDIEMPDPKALDVGIDLGVVHAVATSDGQFFDLNTGRIKELEKEIARYQRKLALNRSSRLKLAKEGRAEAFDKTKPSRKRRRLLEKLQKLHRRVRNIRRDFQMKTAHTLA

SEQ ID NO: 30594 - protein, 342 aa, Halococcus sp.
LQVVLERLYDNLEGLSQLKENGYRVGSLNWKPPREYQSFTYSQRGFKLDKKGGRAVLHLSKIGDIPIELHRKIPDDGRLKQVTVKQEPTGEWFATFGVEVDREPPAKPDNPERCVGIDVGVLKFAHDTNGFALGSLDLSDERNRLDRERRKLSRKEHGSNNWERQRKVVAQRYADIKRKRRDFLHRVSAYYAREYDLVAVEDLSVRGMLESPSNSRNIASAAWATFRRMLAYKCEREGTHFVAVEPAGTTKECAQCGVKTDKPLWVREHSCPACGFEADRDVNAAVNVLSRGLADVGVVHSERTPVETALPTGTDVSPVPAKRVLEAGSPALNEASVKARTE

SEQ ID NO: 30595 - protein, 376 aa, unknown
  TnpB Polypeptide
MNKAYKYRIYPNKDQQILINKTFGCCRKVWNLMLSDKIEHYKQTKSFGKQTPAQYKSEFTYLKEIDSLALANVQLNLEGAFRNCFDKKRKTNTEFPKFKSKHKSKKSYTTNFVNENILIIDNKYIKLPKIGKVKTIFHRLPNPEWKIKSATISQMGDGTFYVSILFEFEQDIIQSKLENVIGLDYASNGLYVDSNGNKGTNHKFFRESQKKLAKEQRRLSRKVGSNKDEVKSKNYLKQLHKVNKIHRHVANQRLDNLHKISTEIANQYDTVCVESLNMKAISNKKFHNGKATMDNGYGMFCDMLKYKLAERGKSFVKVSKWFPSSQTCSCCGARHKEMKDLSIRTLKCDCGLEIDRDYNAALNIKKEGLRLLNLQK

SEQ ID NO: 30596 - protein, 416 aa, unknown
  TnpB Polypeptide
MYEERNCKIRETGKATRERHANMDCRVISVKIQENRLSKAKLEKLKRFFLEGKWLYNAVISTETLTLDNTKTVQVKVRDTFEEREITALSAQMKQSVMDSVKTNVLSLSKVKEKGLKIGRLKFKKECNEINLKQFGKTYAIKGKNKIRVEKIGVLVVNGLGQINLGEVEFANAKLIQKPSGFYIHLTVYSKKQLQQETSKEALGLDMGIKDQLTFSNGVKVNFYLEESEQLKGLVRKLNRQVKGSNQYKQTLNRIKRIYEHQNNKKNDIVNKLNSVLKQNYIICFQDELLNQWKRKKSKRRFGFGRKVQHGILGRVKDKLKKNSTNAMLESSVPTTQTCPVCGCLTKHSLDKRIYHCNHCGFENPDRDTHSANMMVLLSGYETYRSLNTDAVSTERMVGLLDNLSELGVVVTTNSM

SEQ ID NO: 30597 - protein, 520 aa, unknown
  TnpB Polypeptide
MSIPLIYRDEVAETIPVKRTQRIHHQYEDSISYICHLSKNLWNQAHHLVYGYYKKFGHVPSYEEVDSVLNKKSYYKKDGKYCEEYDNYHKLGGATAQQILKVYIKEWISYLKGKKGYFVNPNKYTGKPKEPGYKKKDGEFILIFTNEQIKFKERKDGSIWMTFPKKIDNKPSRLKDLKILLGKVNDLDSYLLERLMWNKFDIVRIIPKGTGYWIEIVYDQEVLKNASDIYKLDEDIIMSIDLGVENLVAITDTIGNRPIIIKTEILKANNQWYNKRRSELQAIYDRQKIGCLMKRDNNNKDEKIRYLVNKTGGKMDIITENRNNSVMDDLHKVSRFLINHALSIKSKTIAFVRNVGWKQKVKMGRRNNQNFVQIPHKKLIDMTRYKGDECGIDVVDDTEEYTSKCSFPDSEDICFHKEYKGKRIYRGLFEASKGFRINADVNGSYNFLRKIAERTIKNKIKFDYVYPKFNVFDIMEGVVVQGLVPKRLSLRFDDKKLSQFGNELLVERPIILTISNVNIF

SEQ ID NO: 30598 - protein, 479 aa, Actinoplanes sp.
VVHRTARIGLRLTRAQRQRCFGLLRSAGDVWACVLEINAWRRRRGDQPAASYQELCRLLSASGPGTFGELDSSGARSVLRRYCDAWFSAAARRKAGHAEVRFPRRRRALMPIRWYHGTFTITGRQLRLPAARGCLPLHVRLDRLVPYPAGTVRSVTLLFDAGRLGIDVTAELPVTTYPHHARPDPDRVAGVDLGIIHPYAAAGLDDGTALLVSGRALRAEHRLHLADTKGRRRATAARAPKPGQRGSRRWRKTRRRARLAETRHRRRTRQALHEATTTLIGWAVDKRIGTLTVGDPRGVLNQNAGRRHNLRLRQWQIGRTLQILQDKAALAGIRVHLVDERGTSSTCPACGKKISKPRGRVMTCQHCQFAGHRDVAAAFTIATRTPGGATTTPAQPCSGVVTHRRAGTHLPGRGSARRDPRRRPPRSAAEGSLGRRRPAPPPVTGRRSPPVVGSRSPTPVDEDPQHDRSQPGQRWWTPH

SEQ ID NO: 30599 - protein, 374 aa, Herbidospora sp.
VRCGTDKYRFYPSPGQAEELSRTFGCVRLVYNKALEARTRAYEEGRRVSYGQSSAALTAWKRTAELGFLNEVSCVPLQQALRHLQAAFENFFARRARRPVFKSRKKSRASAEYTRSAFRWREGRLTLAKMDGPLDIVWSRPLPEGAEPSMITVSRDAAGRWYVSIRVEEKIEPLPAIEAMVGVDMGITALVTFSTGEKILNPQYERADRRKLARAQRALARKIKGSGNRAKARSVVARIHARMSDRRRDHLHKITTRLVRENQVIAVEDLTVRHMVKNRNLARAISDASWRELRSMLAYKTTWYGRELLVVDRWFPSSKLCSECGARAASMPLSVREWVCVCGASLDRDVNAAENILAAGLAERRNACGAGVGP

SEQ ID NO: 30600 - protein, 385 aa, Nitrospiraceae sp.
  misc_feature (381)..(381): Xaa can be any naturally occurring amino acid
LRSLSAPHAVYADFDKRFYKFPSYLRRKAIAEAIGHISSHMSRLARWQGNGKGREPKFQPRCNSFPALYKGNMFEWVENGKAKLKLYNGSDWIWFTVPFSPIDLKKRFQEEEGWVRQNPMLAQKGRAWRLHFPFERKVVVKKEDFVRPVLSVDLGLTTLAVCSVVHSDGTVTHREFISYGGEKDRLEGILGEIAKKSAQTCLIPEGEKLCAKDWRAVVNLTEEIAHQCSSEIVKLAVKHNCQGIVFEHLGKLKLPRDCYGAKRLRRKLQYWLQGRIQRYCRYKVHAQGLRFSRVLARGTSEYTYDGSGKIRRIGNRQIAVFSGGGKMYNSDLSASYNIGARYWIREYSKSLCRKAEVVQADKSSPCAARHQQVLASLISLXATSV

SEQ ID NO: 30601 - protein, 399 aa, unknown
  TnpB Polypeptide
VCDDLDSLGFAASKLWNVARWTCDRIWDETGTIPGHGVLKAYLKSHERYADLNSQSSQAILEELAEAFDSWYSHRENGNENANPPGYRKHGDEHPRSTVTFKEDGFKHDPHHNRIRLSKGRNLKDGRRDFILCEYATDPDVIVQTVQQVRAVWTGSDWKLHIVCNVEINDPDPPGDRVAGIDLGICNVAAVAVGGDALLYPGGALKEDDYYFQKERAKCDDSFSCQAQRLDGKRDERRTHFLHAVSTDIVAECAARNVGTIAVGELTGIREDADWGDHGNLNLHGWAFDRFTEMLEYKAAEHGISVKRVDERGTSKSCGSCGTTDDSQRVERGLYVCEGCGLVANADVNGAENIRQKVLPSLACDGGDRDNGWMAQPAVRLFDKSTGRVAPQEQVTREP

SEQ ID NO: 30602 - protein, 302 aa, unknown
  TnpB Polypeptide
VIIVNKAYRYRLYPTIEQKIMFAKTFGCARFIYNKMLGDRLDYYKETGERLNNTPAQYKKEFPWLKEVDSLALANAQINLNKAYNNFWSNRKHFGKPRFKSKKTGHASYSTNNQHGSVRIEGNKVKLPKIGWVKLCLHRPLMENSTIKTVTISKTPSGKYYISILVEYENQILPIIPKNFLGLDFAMHGLYVASDEDNADYPNFLREAEKRLVKAQRKLSKRQKGSRNRHKQRLRVAVLHEKIANQRRDFLHKKACYLADRYDAIGIEDISVKAMAKRKKGGKFSFGKSISDNGWSMFTSML

SEQ ID NO: 30603 - protein, 437 aa, unknown
  TnpB Polypeptide
MLNFNYCYRIYPDATQEILLLEWLDICRNAYNYGLREIKDWCNSRKCQIDRCSVESEYIIPADAKFPTEVNQLNNLPKAKKEFPRLAEVPSQVLQQTIKQLHIAWAFFQKRGFGFPRFKKYGQFKSLLFPQFTRCPVSNNHLILPKLGAVFINLHRPMPSGFVVKQVRIMRKADKWYAVVNIECGVSVPDPMPYGHPIGVDVGLDKFLATSDNVFVRPPKFFKSRYRQLKSLQRRLRRKKKRSKNYEKARLKVARLHHKIDNTRKDFHFKQAHRLCDSADMVFMENLDYRVSAKGMFGKHMLSAAFGQFRSIVKYVCWKRGKFFSEVDARGTSQECPECRGEVKKDLSLRIHNCPHCGYTTHRDVAAGQVIRNRGMELISTSGLGGKETVCAAELPGVGSNSTPRQVAKPRKGDAGSRRFPPRKEAHLKGKTRKSHP

SEQ ID NO: 30604 - protein, 162 aa, Salmonella sp.
MKRAYKYRFYPTPAQVELLAQTFGCVRFVYNNILRWRTDAYYERHEKIGYTQASARLTALKKEPEFAWLNDVSSVPLQQALRHQQAAFSNFFAGRARYPTFKSKRHKQAATFSDAAFKYLVHGKEQNTPGRALESPVAILTVDHHHFQRRIRTILRLLSLRI

SEQ ID NO: 30605 - protein, 241 aa, unknown
  TnpB Polypeptide
VTVILDSAGRYFASFVVQAADAPLPAAGAEAGIDLGLTHFAVLSDGRKIANPRFLRRAERKLRKAQRDLSRTKKGSANRARARVKVARVHARVADTRRDWLHKESTRIIRDNQAVYVEDLCIRGLARTRLAKSVHDAGWSAFVSMLEYKAARHGRTFVRIGRFEPTSQVCSACGVKDGPKPLSVRGWTCGGCGAVHDRDVNAARNVATAGRAGALNACGGDVRQGPALAVAGETGTLRGAA

SEQ ID NO: 30606 - protein, 547 aa, Nocardiopsis sp.
MAGTGTRRLRSIADPFLVPAPTGVSVRDRLKGLTPEDEAVLRAVGAHLSSLASTDLATRCADGTSHGKESWAVRKREVTAVSSSRWAGAITRASNEQWALARRSQLAHLHRLQAGIDTLRHRLSQPLGAKGAKGVPGGYSCRREWHAKSRRLAALEHRHAVAVADWEAGRVHVVRGGKRLLNSRHHLDRAQLTETGWRARWEAARFFLQADGESGKRYGNETIRITPEGQTSIRLPAPLADLANAPRGRYVLSGRVAFSHRGTEWADRVEADGAVTYRIHLDTGRGPGQGRWYVSASWTPQAVPALPMQAALARGAVGVDTNADHLAAWRLDTHGNPVGDPRRFAFALSGSASHRDAQVRHALSRLLRWATASGVRAIAVEDLDFSTDKSREKHGRRKKFRQLISGFPTARLRSRLVSMAHTLGVAVIAVDPAYTSRWGAQHWQKPLTTKRRKVSRHDAASIAVGRRAQGHPVRRRTAPPPHHRSDGAGHRTAQAVLGSSGREGSRRSATGSQTRSVPPRRRENAATQPIQNRSGWVQCQRDPRGHF

SEQ ID NO: 30607 - protein, 233 aa, unknown
  TnpB Polypeptide
VQQDGMCSAKGCMRVLDIAATHKLGTLRITKKGDKYIAQIAYEIAESAVKTDGNVMGIDLGIKCPAVAVTSNGKTKFYGNGRQNKQKRRKFTAKRKKLGKAKKLKVIKKSRNKEQRWMTDQDHKISRAIVNNAAASGVKTIKLEELSGIRQSARTSRKNNHSLHSWSFYRLAKFIEYKAALAGIEVVYVNPAYTSQTCPRCGKRNHANDRNYVCSCGYHTHRDRLGAVNILTA

SEQ ID NO: 30608 - protein, 559 aa, unknown
  TnpB Polypeptide
MSSAKPSTPEAPERTLCAMKLRVYPTGPQAGRLGHWLYCAHRFRNEAAAWLQDWRKQRAIWFANNPFAKELKGEALNAVLPPHLAGHPINACSSWLTARLQQARTAVPRELGLPAEERSMRVIGEAVHTRLKSLTRPERDELTDAWLLTVPRTVFDQVLQDLKKTWSKALKDRKDKRKKPAGFPKPRKFSYGMSIRVQLAADKNQAVRDHWAQGRVFIPGLGKLDFRDSGYVLPKTPPSLFTLGRDAAGRIHATFVCVEGEGPWAGDGSLKRKGRLERKRLREQGQGVLVGGYAPLPVDSETGLPTIDAVDLGLTDRAVTTSGQKSGRVRHLKRYAKRVRFLNKKLSRQTYGSKRWQKTKRDLGRTYTKVTFQRDALLNEQAQELVKSNAILCLETLFLGFLMKNRSLAGSAADAALGKFQEKLEHEGAKKGHLILRCGQFDASSKTCSVCKMKNKELKLRHRSWTCGDCGTHHDRDINAAINIQEMALVRATSHLSTVPESGIGAGLPTGLHPDLALFIARGGLTALLGPRSSESRAGEACVLPEQSRLARRERVKRD

SEQ ID NO: 30609 - protein, 346 aa, Microcoleaceae sp.
MLTMNYRYRVYPNTAQEELLKEWMDTCRVAYNYGLREIKDWFNSRKCMVDRCSISHEYIMPADSPFPGEAKQLNALPSAKKVFPRLGKVPSQVLQQALKQLHRAWEGFQKVGHGFPRFKKFGQFKSLLFPQFKQNPVSGIHIALPKLGLIPINLHRQIPSGFVVKQVRIINKADIWYASINIQCDVNIPNPSPQGHPIGVDLGLSKFLATSDGAIVKSPKFLKVMLRKLKLLQRRLDRKKKRSKNYEKQRIKVLEFITQLIIPVKISTSNKLMSFAGQPIWSSWKIWITESSPKECLGNKCLRRDLDNSELSPSMCVGSAVNSLVRLVLGGLPRSVLSVVQKLERI

SEQ ID NO: 30610 - protein, 186 aa, Escherichia sp.
  misc_feature (186)..(186): Xaa can be any naturally occurring amino acid
MRRFAGACRFVFNRALARQNENHEAGNKYIPYGKMASWLVEWKNATETQWLKDSPSQPLQQSLKDLERAYKNFFRKRAAFPRFKKRGQNDAFRYPQGVKLDQENSRIFLPKLGWMRYRNSRQVTGVVKNVTVSQSCGKWYISIQTESEVSTPAHPSASMVGLDAGVAKLATLSDGTVFEPVNSFQX

SEQ ID NO: 30611 - protein, 364 aa, Escherichia sp.
  misc_feature (206)..(284): Xaa can be any naturally occurring amino acid
VKRLQAFKFQLRPGGQQECEMRRFAGACRFVFNRALARQNENHEAGNKYIPYGKMASWLVEWKNATETQWLKDSPSQPLQQSLKDLERAYKNFFRKRAAFPRFKKRGQNDAFRYPQGVKLDQENSRIFLPKLGWMRYRNSRQVTGVVKNVTVSQSCGKWYISIQTESEVSTPAHPSASMVGLDAGVAKLATLSDGTVFEPVNSFQXXXXXXXXXXXXXXXXXXXXXXXXXXXXXXXXXXXXXXXXXXXXXXXXXXXXXXXXXXXXXXXXXXXXXXXXXXXXXXXLAVPPAYTSQRCAYCGHTAKENRLSQSKFRCQVCGYTANADVNGARNILAAGHAVLACGEMVQSGRPLKQEPTEMIQATA

SEQ ID NO: 30612 - protein, 370 aa, unknown
  TnpB Polypeptide
MLKACKYRLYPSNQQEEQIQKTLGCCRFVYNRTLSYRKGMYETKKESMNKFACNNYVNQILKKEYEWLKEVDKFALTNAVYNMDSAYKKFFKEHSGYPKFKSKHDSHKSYITNFTNGNITVDFKKNTIKLPKLKWVKSKIHREFTGIIKSATISQVPSGKYYVSILVETEHIPIESTGCMVGVDLGIKDLLITSDGEKFDNIRTTKKYEKKLAKEQRKLSHKEKGSKNWNKQRIKVAQVHEKIHNIRINNLHKISHQLISENQVIVSENLSVSNMMKNHNLAKVISDCDWYELTRQLTYKADWNNRQYIKIGRFVPSSQTCSCCGFINVETKDLSVREWTCPKCGVHHDRDINAAKNILNEGLRLLEKTA

SEQ ID NO: 30613 - protein, 518 aa, unknown
  TnpB Polypeptide
MRHKPTPSFILCLPLQVNSQQATQMHAHFECARQLYNALLAEAMKRLNRMKADPAWQVARSLPRSDKPARTQAFARLRTQYGFSEYGLHEAAKRLRTSWLASHIDSLMAQRLASRAYQAANRVCVGEARRVRFRSQGRGLDSVEGKTNTSGLRFHLQAGAQGNQGWLSWNGEQIPALIDWQDVVIRHGLQQRIKYVRLLRQRASSPQAKGADCRGFVYCVQLILEGHPLQKPKNMPGKGAVGLDLGPSTLAIVPQEGQARLLLLAEELAPDARKRRRLQRHLERQRRANNPQHYDAQGRIKKRQGQGRRVWRESHRYQKTRRRLATTERKLAAHRRSLHGRLANEIIRLGDDLRIEQVSYTSWQRCFGRSVGLRAPGRFVDAVKCVVARTRTAQLHEIPTHHTKLSQYCHACGTYTRKPLWQRFHCCPHCGLGSEVLIQRDLYSAWLASVLDPIRLTFPSRGQLGMHWQSMEACLSAALEATREHASAQGFLRRFGMPGVRACRPARLADPQQESVAS

SEQ ID NO: 30614 - protein, 367 aa, Paenibacillus sp.
MLVNKAYKFRIYPTKEQEMLIHKTIGCSRFVFNHFLSKWNDTYKLTGKGLTYGVCSSELPNLKKEWPWLKEVDSIAIQSSVKNLADAYSRFFKKQSNAPRFKSKKNKVQSYTTKYTNGNITIDGNKIKLPKLGLVRFAKSREVEGRILSAAIRHNPSGKYFVSLLVETDVQSWPKTNQEVRIDVGLKDLAILSNGEVFENPKFLRNMEQKLIREQRILSRRVKGSANWNQQRMKVARIHERIVSARTDYLQKISTHIVKNHDLIAIEDLQVSNMMKNHKLAKAISEVSWYEFRTMLEYKAGWFGRTVIAVGKTFASSQLCSCCGYQNKEVKNLNLREWTCPSCDTAHDRDVNASKNILAEGKRLQSA

SEQ ID NO: 30615 - protein, 226 aa, Lachnospiraceae sp.
MDWAFDEGAVYGTAKLIFRHGKFFLYVPVTINVPDTPALSSCKKVVGIDRGIRFLAVACDGKKTSFYSGAVVKQKRAHYKELRIQLQKRQTSSARRRIRAIGQRENRWMNDVNHCISKALVCDNPKGTLFVLEDLTGIRGATERVRTKDRYTQVSWAYYDLEQKIMYKAVRCGSALLKVDPASRKHEIHTFQCTACGYTSNDDRIGAMNLQRMGTKYLLKAQVSDI

SEQ ID NO: 30616 - protein, 377 aa, unknown
  TnpB Polypeptide
MARDFGCVRHAYNFALRLRTDSFKNGKPVNYNASSAALTVHRNDVAFAFLRESSSIPQYQALRHLQTAFSNFFAKRAAYPKFASKHSKQSAEYHSTGFKWVAAKRNLTLSKVGRLHVKWSRGFTSEPTTCTITKGRDGRYFVSLCLDEPAKAALPKTGRSVGIDLGISRLATLSTGERIANPRHTARHAARLARLQRVLARRVKGSGRWNSQRLKVARLHAKIANCRKDSLDKLTTDLVRRFDVLAIEDLNVRGMVQNHRLAKHINCASFGQFRQMLTYKCAWYGRELRVADRFFPSSKRCSSCGHVHENMPLDYRVFECAGCGKQHDRDENAAVNILNFAGGQPVKGRGETVRPVRASARKGRSLRSVNRPSSKDV

SEQ ID NO: 30617 - protein, 377 aa, unknown; identical to SEQ ID NO: 30616
  TnpB Polypeptide

SEQ ID NO: 30618 - protein, 374 aa, Caldicellulosiruptor sp.
MLKAYKYRIYPNKDQKEFFEKTFGCCRFVWNRMLEEKLEALRHGKKIPRITPAKYKKQHPFLKEVDSLALANVQLQQEKAFKNHFKNPKHFKLPKFKRKKDKQSYTTNNQKPKNGRETIRVDFEKGLLHLPKIKSGIKAEFHRRFEGRIKLATVVKTKAGRYYVSILVDVDDPRNKVKEPQNFVCGIDLGLKSFATVVNDKKCLKIEYPRYLIKAEKKLKRLQRQLARKERGSKNWEKARGKLAKEHEYVKNAREDFLHKLSKAIIDESQVVVVESLNVNGLSRTKLSKYVLDSSFAKFIDFLKYKAEWYGREIIEADMTFPSSKMCSKCGHVYKELELKDRVWRCPECGEVHDRDENAGKNLRDYGYRRIRGK

SEQ ID NO: 30619 - protein, 368 aa, Desulfotomaculum sp.
MYNPKEHRNYKFRIYPTKTQAETLTNWLTLCRLCYNAALADRKNHYLRNKASLTRTKQQTILKLDKDKHPQLKEVHSQVLQEVLLRVEKAYQAFFRRVKAGENPGYPRYKGMGQYNSLTYTQFGEGLGACFKEEKLALAKIGLVKIKLHREIPGKVKTCIIKRETTGKWYAVLSVEEYPVLYSPNWKKTGLDVGIEKLATLSDGEQIPNPKPIQKSEKKVKCAQRDLSRKKKGSKNRDKARQRLAKIHERIRHQRQDYLHKTANYLVWKYGKIVAEDLQIQNMLKNHHLAKSIADAGWGYLFSMLSYKAESAGREFIRVIAHGSSQECSQCGAIVKKDLAERVHRCPHCGLVLDRDHNAAKVLEKRVS

SEQ ID NO: 30620 - protein, 401 aa, unknown
  TnpB Polypeptide
MLVYEAKLEGQNEQYERLDEAIRTARFVRNSCLRYWMDNRGIGRYELSAYCAVLAKEHEWADKLNSMARQASAERAWSAIARFFDNCKKGKAGKKGFPRFKKHQTHGSVEYKTTGWALSEDRRYITFTDGFKAGTFKMWGTRELHFYERNQIKRVRVVRRADGYYVQFCINQQRIEKREPTNSTIGLDVGLTHFYTDDKGNTTENPRHLRKSEKALKRLQRKLSRKKKGSANRTKARNKLARKHLKVSRQRQDFAVKLARCVVKSHDLVAYEDLQVRNMVNNRHLSKSISDAAWTQFRQWVEYFGKVFGVATVAVPPQYTSQNCSNCGKVVKKALSVRTHVCSHCGHTQDRDHNAARNILEIGLRTVGHTGTLNVSGDIDLCVGEATPPRKSSRGKRKPNS

SEQ ID NO: 30621 - protein, 410 aa, Streptomyces sp.
VIVMQLRYSFRLYPDTSQQTALAKAFGCARVVFNDAVRAREDARTAKQPFLTAGQLSRKLITEAKQTKERSWLGEVSAVVLQQSLRDVETAYRNFFASLKGTRRGAKVGPPRLKSRKDARQSIRFTANARWSITGSGRLNLPKVGAVKVKWSRTLPTTPSSVTVIKDAAGRYFASFVIDTDPAADAARMPQTDRTVGIDLGLTHFAVLSDGTKIDSPRFLRRAEKKLKKAQKELSRKLKGSKNRAKARLKVARAHAKVADARREFHHQLSTKLISENQGIAVEDLSVKGLARTRLAKSVHDAGWASFIGMLEYKAERFGRTLVKIDRFEPTSQTCSACGAVDGPKPLNVREWTCGACGTVHDRDTNAAINVKTAAGLAATACGAPVRPGAIPAQREETGSHGFPTGNRAA

SEQ ID NO: 30622 - protein, 477 aa, unknown
  TnpB Polypeptide
MVRTAYNQLLNKRMKDVVNLLQTRYGIENWRWCQWAIVQAQATIDAQRALLPLYAEMYQEKICRVRRKMKRTADPLKKTGYLTRIRKLERRKARVEKHIDVGTVSPAVFGSRKLFKKIPKDNVLCEEWRRRRTNQFVSEGQANKKGNANTRITKRDGYVLEVRNWSDDFEVKLHVPKHYQQLLNAVLVSGIAYSVRVKRGRNYQVLVSFEVDEAVQPWNGNRIAAIDVNPKGLAVTIVSPDGNLFASRWFREPALVHARTEKRNWLAANLVKRAFRWAKGYECNAVAVEKLKFGMAQESGHGVNRVCSNFLRKKLIELIRLRALKLEWVCVEVDAAYSSVAGKAKYGRNFSGFNGHQLAALVLGRRALGYGEKLSVAQVKTIPKRRRMYAVKTISQSHRHLFLTPRLPADGRIDGEDAKGTSALTERVTPHTAITSGNAKRCLGLSLLGGGCSENESGARGHRVNPPQKVKLDSVKS

SEQ ID NO: 30623 - protein, 421 aa, unknown
  TnpB Polypeptide
MKALIYVVQHGSLWLKMKRAYRFRLYPKEKQVEQLEQTLTLCRRLYNAGLEHRIVAYRNGQSTTYLQQQNDLPLIKKEFPEYASVHSQALQDTLKRLDKAYKAFFRRVEEKRKGKNVKAGFPRFKGENRYDSITYPQSGFRLLPNGHLLLSKVGEVRMFMHRSPKGKIKTLNVKRDRCGCWFAVLTVEKATVKKKVRQAVGVDLGLRNLVALSNGETLPAPKFLRRSEKKLKFLQRRVSGREEGSGKRRKAVLRLAKGHRLVERQRTDLLHNLSHELARCDVVFEKLNVAGMLKNHCLAKSITDASWSRLVGMTVYKAEEAGGRVVLVDPKYTSQECSLCHTRVKMLLKDRVFRCPRCGLIICRDVNAARVTLGRVGRGTAELTPVENSPLLKSFSKRVQGSGKPQPLGRGGCHEGLCENS

SEQ ID NO: 30624 - protein, 409 aa, unknown
  TnpB Polypeptide
VLNALKLTANKQKIFNGIFSEYLRILNETLKSLPNAGSSTQLHHLTYNRIRETSFLPSDVVQEARKDVWAKRKTVKEGFRRCSIRFNQRWFRYVKSERGNPLFRITYAPSKSFMVPVRVDGQLERFNRFAGEWWSFRNISLLRDGRIVVVLEKEFPAPADDKRFVVGVDVGSTTLAAVTVYDSVKGKVAKQLYLGRDVAIKQRRFQDRRGRLQAHADCGSGKAKKYLKKLRRKEHNYVTTRSGQVAREIVVLAKKYNASVAREKGNFRSRKHEKNRKANRKINRIPYSKLNGFLASNCEEAIVSNPKVDAYHTSKWCPHCGAVNPGHHSKNYALYRCKTCGLIVNSDRKASLAIAVKSVLERTVQDVTKPCFVQFSSTRVPVNGLVRPNAAKSGSAVRSTNRPMESHPF

SEQ ID NO: 30625 - protein, 407 aa, unknown
  TnpB Polypeptide
VLNILKLTANKQRIFNNIFSEYLRVLNETLKSLPEAGSSTQLHHLTYNRIRETSFLPSDLVQEARKDVWGKRKTVKEFKRCSIRLNPRWFRYVKSERGNPLFKVTYEPGKSFVIPVKIDGQLECFNGFVDDGWAFRNVSLLQDGRVAVVFEKEYPAPENNKRFVVGVDVGSTTLAAVTVYDSEKGRVAKQLYLGRDVARKQRLFQERRSSLQAHADNGSGKAKRYLKRLRHKQRDYVKTRSGQVAKEVVELAKKYGASVAIEKLGFRSRRHEKNRKANRKINRIPYARLKEFLASDCEQSGVLLNKVDAYHTSKWCPHCGAVNPGHSSTNYALYRCKCGLTVNSDRKASLVVAVKSALERTAQDVTKPCFVQFSSARVPVNGLVRPDAADSSSAVRSTDRPMESSSL

SEQ ID NO: 30626 - protein, 381 aa, unknown
  TnpB Polypeptide
VGHLRIPRALQRRRRKRDRPTGHAQEQRSMAVVLRPQRERRGRELRTYIRNNQYTIQWGKRSRLEIPVGQELKDEYGLGYHERLRLEVRGTPKWDGKQGRLELEYDEVSDTFRAFQPVTIPDSRLDSRKIEDFPEVENASRFRNSPLASEEAALDVGANNLVACSTTTGNQYVYDGRELFGRFRETTDEIARLQSKLREGRYSSNRIRRLYRQRTKRRDHAQNALVRDLVERLYDEGVATVYVGDLTDVLETHWSVRVNEKTHNFWAFKKFSHRLACVCEEYGISLEVESEAWTSQTCPECGDHKKTDRHEDTLSCPCGFEGHADLTASETFLRENSDCEVRPMARPVRFEWDDHDWSGKPHPQESPKEQRTNPQVASVGR

SEQ ID NO: 30627 - protein, 532 aa, unknown
  TnpB Polypeptide
MGDRYGHIKRSLFKDSIRSSRKPVTFKNVYLVKYGITARQFNAIRYDLDGNISSAALTLKHRIDKLENKIKSAGKWIKTKEKYIADVRKDEKLFEYEKTASIKSLRFAVHNKKRKLHASEGKRAKLKDDLSKGRMRICFGSKKLFYKQFNLDENGYESHDKWRSDWKRARSSSSFCLGSKDETAGNQTCTLGADGSLRIRVPNHLIKQYGKHLTVPNVKYPYGQEYIGQALLCGQAITHRFVRGEKGWHLHSTVNIPENKTVTGKPQEIGCIGVDVNENEIAVSETDRYGNLVRHATYPACVKDRTTAQTEAVYGDICARIVALAVKTGKSIAHETLDFEKKKSALKEQGVTYARMLSGFAYSTFLIMLDRRAFRAGVRVFLVNPAYTSVIGRNNYMSYHGISSHEAAALAIARRAQKYSESPIPSRTASPLPARKRGEHVWKLWSKIKTRGGCGSHHSLYQRRSLQDSPGCAEMQKKLPAMSTAQFSRPPASRSLTGKVPRVIPIHEHRDLVESGREPLTLTGGITVRPPS

SEQ ID NO: 30628 - protein, 491 aa, unknown
  TnpB Polypeptide
MAVEKTIKLYSEQLTLDELMSLEILLDYRESCKNYFYSRFSGIEYLDKLNFRDIRDSLLVKDVKDEMKKFHLPARTWKMDLSEVISNIKTMWSNMKTEIKHYIRNNENLTDEDRHYLFYVLKSKNLWAEAVQTKNITETKKLSKIKISKSKEYLINLLCRYTRMAKPKISVSRNLKSIQFDTGMYDLVDGILSLQTQNKGQRLLIKLRNKVTIKKGDIRIVLNRDHRILEVHKLILVPETEIDKKEDVGLDKGYTKMFSSSSGKEYGIVLGDLLNRSCDFINKKNKARNYYHSLVRNLEKELKENKKLTDEEQKKIKQKIERIKKNNLSDKTYKKHRNRHKEIIKSYVNHEIKRLILTEHPSRISLEDLTFESVSKGNNKHYNRKMNLWIKGYIDERINYYAKKYDIEVVYVSAAYTSQFCSICGARLDKRTGIHNEIGHCPNCGEIDANINAAKNIKSRLYDSIIQLYTPYKKIEKILLDRYEKNVKRKK

SEQ ID NO: 30629 - protein, 373 aa, Geobacteraceae sp.
MKRTICIKLGTSSEQDRRLSLLQREFAHACNVLVPLAVENSCRNRVALHHLGYYGIRETVPDLGSQMACNAIAAVAQSYKSLLSNNPKFKKSIWPAINFRDTSSVHFDKRTYSIKGNAISLFTTEGRIIVPMKLGEFQKDFLDKGIPKEAELVCRSGKFFFNLVLDLPEAEQREPGYVAGVDLGENNIAAMNTGKLFGGGKLSHDRDKFLALRGRLQRNGSQSARQLLKKVSGREARHVTHVNHEVSKAIVAEAVRNECSTIAMEDLTNIRKRIKAGKRTRSRLHRWAWAQLQFFVAYKSQPVGIGVEYVNPAYTSQTCSVCGLLGTRVKHRFSCTCGSLAHSDLNASRNLARLGATAVASTGAVNRPYVGMV

SEQ ID NO: 30630 - protein, 519 aa, unknown
  TnpB Polypeptide
MIQPELKAYRRCPDRHVLVLETNLTYVEKCQIFHYADLIRKAGNELTGIMKKRYDQLVRTKRYRKLKRLYKKYKDTDNKKALKDVCNQMKEMQKQYDVTWDYCRTSMIPIGKKYGINAVFALTKAEDVFRGIDKCLYSDGETVHFKKRGDLPCIRAKQLNRGIIMKQMNFKFKDMEFGVKIKDRYEQEEVEAVLYYLKNAELMDSMAANTYRETDICVSTYRPCYVSLVCKKIRGKLRVYVHITIEGVTKPKQDRFGNFKHNKGKGIVGCDIGTQTIAYTTETKAGLKNLAERGSCIEVNERKERRIYRAMDRSRRAMNPDNYNEDGTIKKGKKKWTYSNRYKKLRTKHTELCRINAINRHLAIHEDVNELRSLGDIFVTEPKNAKKLQKKAKTGKRRKRFGRSIKNRCPGYFQSQAKRKFRIYVEVPNDYKASQYDHTSDEYIKKSLSQRMYKLQDGTMVQRDLYSSFLLYCIDLNTNKIDKNKCIHEFEKQYKNQNETIEYIQVNQIKVMNSGIKVN

SEQ ID NO: 30631 - protein, 402 aa, Escherichia sp.
VKRLQAFKFQLRLGGQQECEMRRFAGACRFVFNRALARQNENHEAGNKYIPYGKMASWLVEWKNATETQWLKDSPSQPLQQSLKDLERAYKNFFRKRAAFPRFKKRGQNDAFRYPQGVKLDQENSRIFLPKLGWMRYRNSRQVTGVVKNVTVSQSCGKWYISIQTESEVSTPVHPSASMIGLDAGVAKLATLSDGTVFGPVNSFQKNQKTLARLQRQLSRKVKFSNNWQKQKRKIQRLHSRIANIRRDYLHKVTTTVSKNHAMIVIEDLKVSNMSKSAAGTVSQPGRNVRAKSGLNRSILDQGWYEMRRQLEYKQLWSGGQVLAVPPAYTSQRCACCGHTAKENRLSQSQFRCQVCGYTANADVNGARNILAAGHAVLACGEMVQSGRPLKQEPTEMIQATA

SEQ ID NO: 30632 - protein, 276 aa, Okeania sp.
MKSFKTKLKLNNYQKTILAKHAGVARHAYNWGLATCIKEYEETKKRPSAITLHKRLVAEVKSINPWYYEVSKCAPQQALRDLERAFKNFLTIPSRGFPLFKKKGRKDSFYLEGSIKIIQGNYIQLPRIGVVKTYEILPNCRVKNVTISKRADSWYISFKYNFESKPTEKIGETIGVDIGINTLATCSDGSKFANVKAYRKAKKRLVRHQRAVSKKVIGSKNRRKAVKKLAKLHKKVADIRADALHKLTTWLAKNHRTIVIEDLNVSGMLKNHNPPL

SEQ ID NO: 30633 - protein, 458 aa, Ruminococcus sp.
MVREDTELFNYLKNISLLANNLYNATLFRMRQILTAANKDQGRWTDNEKGVQVEIDRLLEVNSNLRRPTRENPYVSYPFVYHLMYVNRNPDYFSDGLPSQTGQQVMKNAVQNMKAFYKAKADWRKHPKKYSGEPKLPGYKKSGGQSTYCFTNQQVRICGDEIRFPCTDITAKKPKNVKDEWTLKQVNVVPNRNVISLQYVFEDHQRYKEKKEPNRIVSIDLGIKNFAAMTNNIDQPGILFKGGWLRHINYWYNQKMSSARSSQTEGTTKPFHSTARSRAWGTKRENRMNDYMHKVAKIIIKFCEANEIDTLVIGDNKGWKQKTDMGKDNNRDFVSIPHDRFKQILEYLCDWNGINYVEQEESYTSQASYLEGDEIPVYREEDSKKPKFSGYRSIRGTSRLYQCGDGRIVNSDLNGSANIGRKAFPELYRCTEKTFNRIRVYRTMDELKNFQLERDCAN

SEQ ID NO: 30634 - protein, 364 aa, unknown
  TnpB Polypeptide
MKKRYNYRIYPNKIQRLYLESIFSINRFIWNQFLAANIRYYNHSKKFHFFNELCLILTECKNIEGYEWLKSVPSSSLQQTLRYLDTAIRDSYKKKKGFPKFKKKYDKNSFTLTNLQYGIKNNKLRIANQKSLMKVKWHRELPSKPSSCTIIKDNIGRYYVSFVVEVVPKIVPSTKSIIGLDLGIETFCSTSDGKKYKLPKLKPLYKKVKRQQKDLSRKKKGSNNFYKQKLKLAKSHMKIVDKRTNFHNKLVSILINKNQVISIETLKVKEMAMKGNKHLSKLIGQQGWSLFITKLISKAAECNRIIHKVDTYYPSSQICSNCGYKWGRLNLSIRTIKCDECFIEHDRDINAAKNMITNYLKTVQ

SEQ ID NO: 30635 - protein, 158 aa, Burkholderia sp.
MILVYRYRVKSLNGLLNKQSRAVNDVWNFCNDTQKLALDLVRRFDYIAVGNVSAKKLAKTRMAKSVYDASWSSFRNKLRYKAIAHGVTFEEVDESGSTQSCSSCGSKDSTTRPKGIAGLRIREWVCGGCGVLHDRDTNAALNILRCGRASPGVGILSL

SEQ ID NO: 30636 - protein, 461 aa, Halobacteriales sp.
MRPLSDDGEQVLRGLLDASAALWNEVNFQRLMRYNDEDGFEGDVWDADTGAIEGQYKGVLGASTAQQVIGENSQAWRSFFGLKDAYHDESNNSVTEHPDPPGFRGNEDDGRVLKGVVRKDAYTVEWGDRSRLEIVVGGTLRDKHNSPGSRLRLEIAGDPNWADYEEQGRLDLWYDKIDSTVRASQPVTVSDDVRATPLASETAALDIGVNNLVACTTTTGKHYLYEGRELFQRFRETTREIARLQSKLEYGRYSSERIRRLYRKRTRRRNHAQEALCRDLLDRLYAEGVDTVYIGGLTDVLKTHWSVETNAKTHNFWSFKQFTERLACTAEKYGIAVEVRSEAWTSQECLQCGSTDRTTRHQDTLTCPCGFEGHADLAASETFLRRHQNSESSDWRTRREASRQRHTEQAVRPMARPVWFEWDDHEWSGTPHPHESPKGQRTDPSTAHHSGNVASGKTQAG

SEQ ID NO: 30637 - protein, 387 aa, Escherichia sp.
VKRLQAFKFQLRPGGQQECEMRRFAGACRFVFNRALARQNENHEAGNKYIPYGKMASWLVEWKNATETQWLKDSPSQPLQQSLKDLERAYKNFFQNRAAFPRFKKRGQNDVFRYPQGVKLDQENSRIFLPKLGWMRYRNSRQVTGVVKNVTVSQSCGKWYISIQTESEVSTPVHPSASMVGLDAGVAKLATLSDGTVFEPVNSFQKNQKKLARLQRQLSRKVKFSNNWQKQKRKIQRLHSCIANIRRDYLHKVTTTVSKNHAMIVIEDLKVSNMSKSAAGTVSQPGRNVRAKSGLNRSILDQGWYEMRRQLKYKQLWRGGQVLAVPPAYTSQRCACCGHTAKENRLSQSKFRCQVCGYTANADVNGARNILAAGHAVLACGGCQQTG

SEQ ID NO: 30638 - protein, 371 aa, Nonomuraea sp.
MCGMAQLVKRAYKYRFHPTPEQAEELARTFGCVRLVYNKALEERTRAYTLEGRRVSYVESSARLTEWKRSGEYDFLSEVSSVPLQQALRHLQAGFANFFAKRAKYPTFKSRKKSRLSAEYTRSAFRWRDGRLTLAKMDAPLTIVWSRPLPEGAEPSTVTVSKDAAGRWFVSLLVEEKISPLPPVAANVGIDAGITALATLSTGEKILNPKHERRARRRLAKAQRALARKEKGSNNRAKARRKVARVYARIADRRRDHLHKVTTRLVHENQVIAVEDLTVRTLVKNHSLARAISDASWRELRTMLEYKASWYGRTVVAVDRWFPSSKLCSACGALQNRMPLSIRDWTCACGTVHDRDVNAAKNILAAGPAES

SEQ ID NO: 30639 - protein, 393 aa, unknown
  TnpB Polypeptide
MYLIERHVIENNKELDELCFKSKNLYNRALYLVKQHYFETESYLNFFGVNKLMVDSKDVDYYALPTKVSKQTLMSLDRNFKAFFSLLKKKQSGGYDKNVRIPRYLDKEGRYVTIFPKDAIFKKPLRKGIIKLSSLSIEIPTKKANESNIVEVRVLPRNNHHVVEVVYKVDEVKSKSDNGRYASIDLGLDNLATVSSNVDKPFIINGRPLKSINQYWNKEKARLQAHLKGNKRTSKRIKNITNIRNNKVIDYLHKSSRKIVNFLVSNNISTLIIGYNEEWKQNINLGRTNNQAFVNIPFLTFINQLDYKCKLEGINVILIEESYTSKCSFLDNEPIEKHENYLGKRIKRGLFKSAKGKLINADLNGSLNILKKVVGEFEYPIEVCSTPLRVTLK

SEQ ID NO: 30640 - protein, 369 aa, Thioalkalivibrio sp.
LNAPAKTVIKTLRVRVKDRHATVLERMAFEVNQVWNLANEMSFEAWHVPVPGVGWIQGAWSSAFDIQKALAGINKQRGWMIGSATIQEVIAVHAKTRSQFKTSKLRWRVSSGPRRNLGWIPFKSRAARFAGGKVRFVGQSLGVWDSYGLDAFPFRAGSFAQDARGRWYFNVQVEVPTQPLSQGQSAIGIDLGLKDVATCSDGTRLEAKTPYRALEAKLGLAQRANKKQRAKAIHAKIKNQRKDALHQFSSELVKKNAVIFVGNVSSTQLAKTRMAKSVLDAGWGLLKTQLQYKAIAHGVWFEVIDEAYTTQACSCCGAISRNSPKGRAGLGIREWTCLACGTRHDRDINAARNILALGHERLAGGIPRL

SEQ ID NO: 30641 - protein, 209 aa, Campylobacter sp.
MNTFFKMRYHRDLPNTYKFNQITIIKNHNKYYLAFSIIYDESNISLISSKDFDIKKAVDIDLNINEITLSSGELIATNSKLLSRAEYDLAFKRLQRKQSRRILKTKKEKTKLSHNFKKTQLKLNKIYEKSSNIKKDSYHKITSKLIQEFDLLAVEDLQIKNMSKRAKLKNIKAKSGLNKSILNISFYQFSQYLEYKAKHNGKFFIKVNP

SEQ ID NO: 30642 - protein, 437 aa, unknown
  TnpB Polypeptide
MKSIKVKLYINHYQSIVLNTLSNEHRLLYNHLLSFVKIDFNFKQLNEQYKFFKSSNNLTIQSKPAQNTCRRLINSIKSFYKLHKKDKAYKFPYKFKSWKYFTTMEFDWNNGGGGFSLNDNVLEIFLEHNGKKFHKNLVIELPEYCNIITKDNVKTLQILKEDNNYFAIFTYKESKKEIIIKHEKIIAIDPGLSSILTIYNPVDNEAIEIKNNQFHKKISKQIEIIQSKRDKKKRGSIQHKKFAKLYKRVFKKLSNKNKDFQHKLSRQIVNLCVNKDVTKVIYGDIKTKNLVINDMNCKESKKENIEKNSRLKAKEHGLNKSTQNQGSLSRFKTFVEYKIKNEGIEFVKQNESFTTQINCLTNKLFDNKIKLSNRLVTLTKDLCISRDVNAAINIYVKNLGKPIVKGEWLAHIKMLKSYEMLLDIFSNELILNKVKIA

SEQ ID NO: 30643 - protein, 418 aa, Pseudomonas sp.
MIIRQGFKYRLDTSEAQSARLRVLCGHARFVWNHALARCNEALATEGQFVPRYETMAKWITAWKRNPDTEWLKEAYTDNLQQKLKDLDTAWQRYFKKVADAGRPQFKKKGRCRDSVRFVNFAKYCALQGSRVKLPAGIGWVRFRQSRAILGEIKNCTVGYEAGHWFISFQTEREVDRPLLQATGAVGIDMGIERFATLSDGSYTAPLNSFKRHQEALRKAQQAMSRKTKFSSNWKRAKARVQHIHHRIANVRRDYLHKASTTISKNHAMVCIEDLKVSNMSASAAGTAEQPGRNVRAKSGLNKAILDQGWFEFRRQLDYKLAWNGGWLIAVPARNTSRTCPICDHVSPDNRKTQAQFLCVQCGYAQNADVVGAINVLRRGEALLSNEGPDLARLACEVNGAVRPSAAGTCWPSNRLNA

SEQ ID NO: 30644 - protein, 452 aa, Kibdelosporangium sp.
VAAYRFALDPTRGQERALLSHCGAARFAYNWAVSWVRAAWEQRAAEASYGIPEPQLTPWRPRSIAGLRKVWNQVKHDLAPWWDENSKESYNTGLAGAAAAFDNYTASRNGSRAGPTMGKPKRKRKHTAARSCRFTTGTIRLEPDRHHVTLPRLGTLKTHESTRKLARRIEAATARVLSATVSLRSGRWFVAFQVELQRDDPAPHRPDAVIGVDLGITHLAVLSEPVAGVSDEHGFIANPRHFDAASTRLRRACRRVSRRRGPDRRSRQKPSNRWRRANAKRNRLSYRVANLRADGLHKLTTALARHAATVVVENLNVAGMLKNKRLARKIADAGWGKLRRLLGYKTRWRGSVLHVADRWFPSSKTCSACGVVKTKLPLRVRVFRCNACGMVLDRDLNAARNLAKLVAELRESGTGVAGHPQPSGCNGRGADSKTRPSLAGGRETSTPQRLGV

SEQ ID NO: 30645 - protein, 405 aa, unknown
  TnpB Polypeptide
MQRAIVLQTEPTKAKQRILNEFSASAAELANSLLKQRKSRKLMDLHHETYSASKAKTSFNSQVICDIERCVVNAKGHTLNAITVKFNVPRNARAFSLSYDFVELGIRPKQRIAVPLRKNRNWQRYKDLLGNGWTCKTYGLTTSRQIVAFLNSPKREMPTRKNVIGVDVNSKCFAVSVLTPEGKVLKQLYFGKDIWIKRKRIMERRSKLSSLADKGSHKAVQSLRRLRTKEQNFVKNRIGEVVKQITELALKYNADIAIEDLKRFRPKGRRFNKEVLRIPILLFKKTLEARCFDKGITLTTLDAYHTSKWCTHCGAVSKGHSSSNYALFKCSCGQVVNSDRKASLAVAVKSLVVRNQHGSKQTCFFQFTASRVDVNRLLRSCEPLVSDVVHSKSQVMESPLPLGVG

SEQ ID NO: 30646 - protein, 425 aa, unknown
  TnpB Polypeptide
MLRPIAALIASPSYCRYRGMEVTKTVKAKVVELTVVKRLALEAEYANYQKAVLRAEVLIEELNITTLKQAGELLYDEGSEYSLKKQANLYSAAYQMAFKRALCTRGRSKKEQPLRLRNDTFDVREIRNDIAAYWAKIPVYGQHGGVKVALKMSPKHEELLRDPELQTCDSELLKRGDGFYLHITVKKRIDTAPSNSGKLAVIGIDAGISNTATSVVWRDDSITGVVLHSGKRLWHKTRQARARLAKLHKQAFSHNSYHCITKALDNETAVGQKLGNYSRDYLHKISAQIIGQAIDLRAQGYGVVIACEDLKHIRKRISGKLQWWAFRKLLDFVKYKAQWAGIAYIEVEPANTSRTCPKCGHYNKNSRCGLAFKCTECKYNANADLVGAINVAMRFPAFLELQTRGKGRHESAQEVIAATPKAMML

SEQ ID NO: 30647 - protein, 442 aa, Moorea sp.
LYPTASQQSKLFYARSLHQLLYNACLAHRRYEWKVNQKSVSYFEQQNILPAFKECWTEYKGLYSTSLQATVKRVDLAYNSFFSGLRKFPRFKSIRDYSGWTYPSASGWKVNSNGKHGTLILNDLKIKIRMRGKAKYWGKPTTLTVVYKPRLNQWFASITLKVDTPEPLYGAESDLSYESVVAYDLGTETAITTFDGSEFNEIENQRFTRTLEPLLKNAGKAKRRKRAPNRRQRVKPSSRWKKANKRESQLKRKIGNQRKDWQHQVTSDLASRYDIGVTEKLNTKGMTRKAKNSSKRQRQKAGLNKSILDVGFGSLNKMLTYKIELKGGIVLQLPTKQLKPSQRCPKCGKVHKEWADISNRYHVCDECGFEFPRDKTSTMVMYNAALGKQPGYGNDLDKRGFSSSTSKTSKHTGSMKQLGKMKRQKSRSQDGSAETPSLYRAG

SEQ ID NO: 30648 - protein, 396 aa, unknown
  TnpB Polypeptide
MIVLEFKAYGTSSQFSAIDEALRTFQFVRNKALRLWMDGLGKTQFDLNKYCAVLAKAFPFADKLNSMARQSAAERAWSAISRFYENCKKGLPGKKGFPQFQKDCRSVEYKTSGWKLADDRKSITFSDKNEIGRLKLKGTRDLHFYQLDQIKRVRLVKRADGMYVQFCVQVDRTEQIEPSGTAVGLDVGLKEFYTDSNGEMVENPRFLRKGKKVLKRSQRRVSRKVKGSINRRKARQVLGKRHLKISRQRKDHAVKLARSVIRSNDLVAYEDLRIKNMVKNHCLAKSINDASWYQFRVWLEYFGKVFSKITIAVPPHYTSQECSSCGVMVKKSLSVRTHICECGCELDRDHNAARNILSRGLGMAGHVGTFMLDMSNTSGESTSTLAGVNLSLQVGS

SEQ ID NO: 30649 - protein, 536 aa, Sharpea sp.
MNDEEYKKILKKFHKLSDRHILAVETDMPYSDVLRVVALSDKIRKAGNELVGLMRKNYDQLLRTKRYRKLLKLYGDTEDKNKRKALAKQLSEMQISYNITWDYCRKSMIPIGKKYGIDAVFALTKAEDIWRGIEKCLYGDGGVIHFSKYGDLPCIRAKQINRGIPMSVKDNRLQFRISKNICGIQINDRFQQDEVDAVLSYLANSEMIDDKAAYTFAEDAYCIDTYRPCYATFVPKLIRGKYRLYLHLTIEGKAKPKYDKHGNPRHKYGNGMIGADIGTQTVAYTSDAEVGLKNLSERGDSIQASEKKERLLYRAMDRSRKATNPQNYNDDGTIKKGRKTWKYSNHYKRLKAKHSELCRINAVNRQLAINEDANHLRSLGDTFVTEPKNASRLMKRTKETTVNSKGKINKKKRFGKSIKNRCPSGFQSAVERKFKATGGTYIEVPNDYRASQYDHTADDYIKKKLSDRLYKLLDGTEVQRDWYSSFLLYCYDFRTGDIDKDKCNAEFERCYSKEKALITWIKANKIRILNSGIKVT

SEQ ID NO: 30650 - protein, 325 aa, unknown
  TnpB Polypeptide
LKEVNSQSLQSSIVNLDRAFTNFFKGHNDFPKFKSKHKGTQSFQVPQFVMIENDKIFLPKFKTGIKIILHRKLKGEIRTVTISRTPTGKYFASVLVDNKKEPLNKKPIRENTSVGIDLGIKSFIVTSDGLQVDNPKYLKNSLLHLKYLQRQVSKKVKGSNSRKKSVFKLAIQHEKVANQRKDFLNKLSSKIISENQTICIEDLTVSNMIKNHKLAQSISDCGWSMFVSMLEYKASWYGKNLLRIGKFEPSSKLCSKCGANNDTLTLADREWLCANCGTLHNRDLNAAINIKTFALRNHLTVERSRKNLMELPTLVGALKSEAPTL

SEQ ID NO: 30651 - protein, 645 aa, unknown
  TnpB Polypeptide
MSVEFQDSTSKYKCLSYYSNNKYDDEIWSHLGSIGKNVYNISLFCKKSYDAFKDTLYKKLYDKLLKNNNFDVDEYIHDEVFNNHEQYAQINRHIKTNNDYIYKRIKYEITLTNLNITTDNVEQIINSYLWMLKKDPNIYVDDQNYNILYTNIITNIIFSFYKSSYRIIEECLLEHRKFPFICQDIIDDVRNKKQMYSLPNKPNYVNIIKREFKCDIKTDQNYVGRLVYKKLDSNYGKIDSTMIGTIIEKIYKSYSSFFAARKTNKLAQLPKYLYDDDKLTLNYVGNKCKLNKTENYIRVHTSKYLGKNLQIINPNYCNIAPNKFIHKKHMTLKKQFCKNKTAMNIKSTTKNSYFYDKFYVFKHDENIIDSNHIYVPYPKLLHDKEIKTIEIKFINGKIKYCVNYINKIVIEKKEVIVESTDSISVDLGVKNLMTIYDPTGEQHIIPGNFIVSTNYHYSHLIGKAQSNNNKKKINKLLIKRDNIINNHFNMIVKCLELKYSHKKMIIVGYNKQWKRKANLGKRNNLTFNKIPYLLLIKKMKDKFKDKDIIIKLNEESYTSKCDALANEPIKFQETYLGKRTKRGLFSSSKNKLINADINGAINIMRKVFTNYENTCERIFNPVRINICREVLHQRITGNSTPYKTE

SEQ ID NO: 30652 - protein, 256 aa, Phormidium sp.
LVLGNYQIGKLKGKTPTSATLSKHRDGKLYIHIQVKDDVPPPQEAKDVIGIDLGRRDLAVTSEGQSWSGESVNRIRERFARVRASVQAKGTKGAKRLLKRLSRRERRYQSWVNHNISKQIVRRAKDTQSIIALEDLTGIRERTNRQPRSQSERRRSNSWAFYQLRLFIDYKAIQEGVEVVRVRPAYTSQTCHNCLHIHPQKGKSYRPGKTFKCGHCGWKGDADLNGATMIKLLGESVSLPKTRNPLSCSWLDRVTG

SEQ ID NO: 30653 - protein, 409 aa, Moorea sp.
MIILEFKAYGKKPQYFAIDEAIRTARFIRNSCLRYWMDNKGVNKYDLSKYSKVLAHQFPFANELNSTARQASSERAWSSISRFFDNCKKKVPEKKGFPKFQKRGRSVEYKQSGWKLSPDKKSIVFRDKKGIGKLKLKGNWDLWCFDLKQIKRVRIVRRADGYYVQFCVSVDITEALEPTGTAIGLDVGLKDFYTDSVGKTEPNPRFYRIGEKRLKFYQRRVSRKKKGSSNRKKAVNKLGRTHLRISRQREEHAKRLARCVIQSNDLVAYEDLRVRNLVKNHCLAKSINDAGWYQFRKWLEHFGTKFGRVTVAVNPAYTSQNCSECGEVVKKSLSTRTHTCKCGCQLDRDHNAAINILKRALGTVGHTGTWILDPNVLGDLASTFPGSDLVKQVESANKESPRLKTGECQ

SEQ ID NO: 30654 - protein, 324 aa, Moorea sp.
MIVLEFKAKGRKHQYSAIDEAIRTVRFIRNSCLRYWMDNKGVNKFDLNKYSAVLAKKFPFANELNSTARQSSAERAWSSVVRFFDNCKKKLPGKKGFPKFQKYCRSVEYKQSGWKLSPDKKSITFSDKKEIGKLKLKGTWDLWRFDKKQIKRVRIVKRADGYYVQFCISVDVIEELEPSKSTVGLDVGLKEFYTDSDGNSEPNPRFYRTGEKRLKFYQRRVSRKKKGKAVGHATRTSNRRKAINKLGRQHLRISRQRQEHAKRIARCVIRSNDLVAYEDLRVKNLVKNHCLAKSINDAGWYQFRKWLEHFGAKFGRITVAVNPA

SEQ ID NO: 30655 - protein, 271 aa, Burkholderia sp.
MIAVDRQLLARVRITGMILVYRYRVKSLNGLLNKQSRAVNYVWNFCNDTQKHALKCSKKWPTGFDLNVLTTGSSKELGIHSGTVNATCEQYAKSRSQRRRPYLRYRGRKSLGWVPLKSRDLKREGDALRFAGNTFRVFHSRPLPEGKIKDGTNFAQDARGNWFLNIVIEIARTRMAKSVYDASWSSFRNKLRYKAMAHGATFAEVDESGSTQSCSACGSTDSTTRPQGIAGLRIREWACSGCGVVHDRDINAALNILRCGRASPGVGILRL

SEQ ID NO: 30656 - protein, 368 aa, unknown
  TnpB Polypeptide
MNYLCIVKLTLKIKLIPLDEQAKLLTDTIIEFNNACNEISNVAWDNKTFNTFKLHHLTYHHIKSSFKLSAQLVVRAIAKVSDSYKIDKKIKRVFRPMGAITYDSRIMTYSPNNIVSLSTIDGRTKIPFICHRPDWLPYIKGEADLLCRKGKYFLFQTVEFPDEEIQDIEEFIGVDMGLVDIATLSNGKSFNSKELQNYREKRQNVRSSLQSKGTKNAKKVLKRLSGKERTHGTIINHTISKNIVQLAKSEGKGIAIEDLTGIKFSANSKGKKFRTRVGKWSFNQLRNFLTYKSLMNGVKLITIAPAYTSKTCHNCFHIGNRKGKVFECKNCNSVFDADYNAAINIGLLGVAINQPEKPSMLYCKVHSS

SEQ ID NO: 30657 - protein, 372 aa, Clostridium sp.
MNVVYRFRIYPNKIQQELFAKTFGCVRFVYNRMLAEKKECYEKTGKNLKVTPAKYKAEFPWLKEVDSLALCNAQLHLQTAYKNFFQDPSFGFPKFKSKKNPVKSYTTNSVNGNILLKDGKLKLPKAGWIRIRQHRKIRKDACLKGASVCLEADGRYYVSLLYFCEEKPVEIRNIRQAVGLDFSMKELYVDSNGKHAGYPHYFRNSEEKLAKAQRKLSHCRKGSNRYKKQQKKVARIHTHIAHQRKDYLHKESRKITNFYDIVCIEDLDLKTMSGEHHFGKSVHDNGWRMFTDFLQYKLEREGKKLVRIDRWYPSSRTCSCCGKIKHDLKLEERVYLCSCGNRMDRDENASVNICREGLRISGIILEKSEKAS

SEQ ID NO: 30658 - protein, 374 aa, Shigella sp.
  misc_feature (323)..(374): Xaa can be any naturally occurring amino acid
VKRLQAFKFQLRPGGQQEREMRRFAGACRFVFNRALALQNENHEAGNKYIPYGKMASWLVEWKNATETQWLKDSPSQPLQQSLKDLERAYKNFFQKRAAFPRFKKRGQNAAFRYPQDVKLDQENSRIFLPKLGWMRYRNSRQVTGVVKNVTVSQSCGTWYISIQTESEVSTPVHPSASMIGLDAGVAKLATLSDGTVFEPVNSFQKNQKTLARLQRQLSRKVKFSNNWQKQKRKIQRLHSCIANIRRDYLHKVTTTVSKNHAMIVIEDLKVSNMSKSAAGTVSQPGRNVRAKSGLNRSILDQGWYEMRRQLEYKQLWSGGQGXXXXXXXXXXXXXXXXXXXXXXXXXXXXXXXXXXXXXXXXXXXXXXXXXXXX

SEQ ID NO: 30659 - protein, 322 aa, Shigella sp.
VKRLQAFKFQLRPGGQQEREMRRFAGACRFVFNRALALQNENHEAGNKYIPYGKMASWLVEWKNATETQWLKDSPSQPLQQSLKDLERAYKNFFQKRAAFPRFKKRGQNAAFRYPQDVKLDQENSRIFLPKLGWMRYRNSRQVTGVVKNVTVSQSCGTWYISIQTESEVSTPVHPSASMIGLDAGVAKLATLSDGTVFEPVNSFQKNQKTLARLQRQLSRKVKFSNNWQKQKRKIQRLHSCIANIRRDYLHKVTTTVSKNHAMIVIEDLKVSNMSKSAAGTVSQPGRNVRAKSGLNRSILDQGWYEMRRQLEYKQLWSGGQG

SEQ ID NO: 30660 - protein, 404 aa, Marinospirillum sp.
MIMRKYTYKLYPKPKQAEALLGQLRLHQQLYNAALQERIEAYQKCGISITYNNQQASLTQIRAEHPEYKALSCTSERMTLRRLDKAFSAFFARVKRGHTAGFPRFKSLSRFHSFDLLDTKFQHGERKHGCLFIKGVGHIQARGKSRLLGKIKTSQVQHKHGSWWLSLTVEAEPDRECIEKKACGIDWGIEKLITLTQPGGEYFSIKNPRYYKTGEAQQTALEQSITKKKRGSNNWKRACKALSCFKRKQANQRKDAQHKLTSAIANRYTLVAMEELSIKNMSRSATGTCEQHGKNVKQKAGLNREILDTAPAALMSMIRYKVEETGGELVSTPTRKIKPSQRCPRCHHTHKGNRTTQANFTCTACGFHQNADVVSAYNSAAWALGLGREHVPEVFASKPLLSTA

SEQ ID NO: 30661 - protein, 430 aa, unknown
  TnpB Polypeptide
MRLTFQYPVYPTKTQETTLFGWFDHLCELQNSARHDRLVAYETEGVFVSLSEQQTLLTQVREKYDDFRAVPQDFQNHTLRRTDKAFAAFRKRCKNGDTQKGYPRHKKRVRSLTWSLRKYTKVVAKKTEDTDKQTIRVRQNPIRETGWKHDRLKVPELGEVKIYMHRPLQGDPKEVTLVKKASGWSAHITCELPDTPKVEPTDAIAVDMGTTHYLTTSEGEKEDNPRWYRQAEGLTRKHSKDLWRKKLGSHRRKKQQHKLALHHERTTNRRKDFIGKLVYKLYHHEKNNVLVAENLSTSNMVKNKHLSKSISDASWATFFKWCADIAERDGLHFHQVDPKHTSQTCSCCGQKSVKKLSLAIRTFRCQFCGRVLDRDHNAALNILFRAAAALRGERWVATLYEARNKNEARDKGLQNATQLTLFDAIASPSL

SEQ ID NO: 30662 - protein, 176 aa, Escherichia sp.
MHGSDLMLSYQSWIIVTIEGWTGPSSVHERVASARADFQHKLSRAIVDENQAVIVETLKTANMMKNHHLARAIGDAGWSGFITKLEYKATEKGVHLVKLDQWFASSKTCHCCGHKMSEMPLHKRIWQCPECGVEHDRDINAVLNIKRKGIQELQAAGLVVSAHGGQRKSVTQTVAA

SEQ ID NO: 30663 - protein, 364 aa, unknown
  TnpB Polypeptide
MANRAYKFRIYPNAEQRELFAKTFGCVRFIYNRMLADKIKHYENTGLKLSNTPAQYKDEFAWLKEVDSLALANAQMNLQAAYNNFFRDKKVGFPKFKSKKTHHHSYTTNNQKGTVALIGGKLKLPKVGIVKIKQHRQIPENQRIKSATISQEPSGKYFVSVLVEYDYETPERHLDKTRALGLDYSSHSFYVDSQGREADYPKFYRNAQNVLAKEQRKLSLMKYGSNNYEKQRVKVASIQEHIANQRKDWLHKLSRHLADTYDIICVEDINLQGMAQCLTLGKSTNDNGFGMFCDILKYKLEEQGKRLVKIDRWFPSSKMCHVCGCINENLKLSDRVWTCSCGEVLNRDHNAAINILNTGLNQID

SEQ ID NO: 30664 - protein, 363 aa, unknown
  TnpB Polypeptide
MVGEGTAAGMVAGGGDERLSPHDHPTAHRCAVMSSTAGIHSNTDVREAYGLSAQLAIRCIANVCDAYTLDKQTRRTCKPHGTIAFDDRILSYDISKQTISIWTLDGRLRLSYHAGDRQKAYLAYRHGESDVVSYKGAFYLLAPCDIPDPNEHDVEGVLGVDIGMVNRATDSDGNTYTGHQIEQKRQWYVRRRATLQKVDTPSAKRRLKQLSGTQKRFQKDVNHCISTQLVATAKDTLCAIAREDLTHIRQRTERTVRTSYRSRHSTWAFAQLRQFISYTARMAGVPVFLVDPAYTSQTWYQCGHVGRHNRTTQAHFCCQACGHTAPADVNAARNISYRAAVNQTLVSSLRAEAHAQVRLALGS

SEQ ID NO: 30665 - protein, 297 aa, unknown
  TnpB Polypeptide
VDKFALTNAIYNMDAAYQKYFKEHAGYPKFKSKHDNHKSYTTNFTNGNITVDFGCDRVKLPKLKSIKAKLHRNFSGQIKSATISQVPSGKYYVSILVETEHTELPHTNQNTGIDLGIKELCITSDGKKYENPKIIRKYEKKLVKLQRQLAHKEKRSQNYYKTKKKIALCHEKITNTRKDYLHKMSHEIISENQVIVSEDLQIKNMVKNHHLAKSISDVSWHELTRQLEYKAKWNGRKYVKIDTFYASSQLCSVCGYQNTETKNLSVREWICPVCGTNHDRDINAAKNILEEGLRQIA

SEQ ID NO: 30666 - protein, 572 aa, unknown
  TnpB Polypeptide
MTTKLLSVKKKNDRNFITVECLLAFDKDEDKEKVLNLMRKFSSMVRFAYKRLLEKIERKELKKLLAQKYRINTRYSDDAIFLAQQTLNACLQRGQNPKKLVFGSRELFEKLKKMHLIGKGREKLRQEWEERRYGFLYSRGDKSKEGNLNLRLVNLNNQWYLRINLGNGEYVWAKVVRSVKREKDRWINLVWDFTQAERTGNWFAYTVRLKLKNGKIYAQISKEEKFPEIIVTRENGVIGIDINAYPFHLALAWTSRDGNLEKYERISLNGLLDGNTDKREYLSWQVAHQVVEIAKREGKAIVVENLEKIPKGRRGDGMPKLRQKLQKWIYKGLLEKIEVVCKRNGVQVIKVNPAYTSVIGKLKYSPMLGIDKDVASAYVIARRGLGFKESLPKNYRKLLEDKEFLSYSVAKVEDRIARLKKEIEGEKNEYKRNKLKSELRKLKRELKLLLKFLLDSGKSEPATQEPVNREMERVRGPTQVGQESWRVLSVALAFSCLESFRDFSPLKRVILLGDWVGVAKRKGLVPLPGQGTTALYKCSLYSFGDQAEGTHNEGLIIAPTLLALPPTCLASS

SEQ ID NO: 30667 - protein, 304 aa, unknown
  TnpB Polypeptide
METIYKAFKYRIYPNQEQAVLINKHIGSCRWIYNYALNKKVEAYKKDKTRLSRFDISKDLPRLKKNEETNWLKETNSQSLQMSLKNMDEAFTKFFRDKKGFPKFKSRHRSKQSFNIPQNVKVDWGNRKVSVPKIKNIRFALDRVPDGEIKSATISRTPTNKYFISILVDTGVKEPKKSKIKEETSVGVDLGIKEFAITSDGEKFDNPKFLKNDLRRLKKLQKQASKKVKGSNNRKKANLRVAIIHERIANKRNDFLHKLSTKLISENQTICLEDLSVENMIKNHKLAQAIQDCSWSKFNQLPRH

SEQ ID NO: 30668 - protein, 346 aa, unknown
  TnpB Polypeptide
MVLTYRYRVKNAKGLLALAGLVNLVWNYCGGVQKQASKALRRWPSAFDLIQLTRASRELGLHSDSIAGVCFAFARARDAAKHRPRWRKSLGARRSLGWIPFNAPRAIRMDGNAVIFQKHRYRLWLHRPIGGRILCGSFSEDARGRWYLNLQCEVETRADCGVESVGIDLGLHSLATTSDGEKIENPKWFARHAAKLASAQRAGRKGRVRAIYAKIRNARRHRLHQVSLSLVKRYQKIIVGNVSSSQLAKTRKAKSVLDAGWSTLRGFLRYKAIAHGGEYIEVSERFSTQLCSECGSLGGPRGLEGLGVREWDCTCGAHHDRDVNAARNILSSGQNVALRLTGSPGL

SEQ ID NO: 30669 - protein, 404 aa, Streptomyces sp.
VIRAYKFLMRPTVGQAQALSEMLRDHCSLYNGALQERRDAFRHVSRTSIKYGVQSAQLKEIRTFDPERQGRWSFSSQQATLRRLDRAFGAFFRRIKAGETPGYPRFRGVNWFDTVDFPKDGDGCRWNSTPHDPVTRVRFQGVGHVKVHQHRVVVGKVKTVSVKREGRKWFVVLTAEQDRPEPLPPTGSVAGIDLGIASFLTDSNGVHVPNPRHGRKAAAKLEAAQQALSRFPRRKAEDRTKNHQRAVEKVATLHGKVRRQRLDHAHKTALALVREYDFIAHEDLKIRNMSKAPTPKPDPGTPGTFLPNGAAAKSGLNRCIADAGWGVFLTILYAKAESAGREVIAVDPRNTSRTCPECGHTAKENRPAQEKFHCVSCGHRAHADVVGATNVLRAGLVRRDANQA

SEQ ID NO: 30670 - protein, 380 aa, Deinococcus sp.
MDEAIRTAQFVRNACLRFWMDGEKVSKNDIYTHTTKLRAEYEWAKKLNSTAVQAAGERAWAAISRFYDNCKKGVKPVGYPRFKKNVRSVEYKQSGWKLDAPNKRLTLTDGFKVGVMKLKGTWDPRLYRLEDIKRLRVVKRADGYYAQFLVDVERHFDLMPSGKTIGLDVGLKSFYTDSNGDDEPNPRFYRQAEQSLKKLQRRVSRKVKGSNNRKKAVARLGRKHLKVSRQRKDHAVKLARCVVASHDVVAYEDLKVRNMIRNRKLSKSIRDASWREFRLWIEYFARIMGKIAIPVNPAYTSQICSGCGQTVKKDLKTRQHVCGCGVNLDRDYNAAINILKLGLRMAGHAKTGEATPETLVETEEDLRLRASVAEARIPPF

SEQ ID NO: 30671 - protein, 377 aa, unknown
  TnpB Polypeptide
MSRKANNLYNQCVYFAKNSENLSEDLKNLDKVMKSFPDEHDNYRSLGYARCAQQILRLFHQNLRSYFASLKDYKKNPAKYTGMPKFPKFRKSGDRFQVIFTDQSVKLDNRIATIAPRTFENKLFVRLRTNSAKKLCQVTFVPRNDYFLVYVIYETDDPVMSLNSNNVAAIDIGLINLATVTFSEQHEPILYRSDLVKINEDFNRLNAEYVSILKKTQDKNTSKRRKRLSEKYAGLIEDRLHKISRAIVNDLSQRGVSTLVVGKNTGQKIGNKLKNFVQVPLFRLIEMIKYKSELAGIKFIQVNESYTSGTSFLDNELPTKTFYNKERRKFRGLFLSNNLKRINADVNASFQIMKKVYEKFAYDSSVKYTNPIVKTIC

SEQ ID NO: 30672 - protein, 484 aa, unknown
  TnpB Polypeptide
MRYAYKRLLEGHKRNELKRQLQGIFNLNSRYVDDAIMKANSILKSYQERRENPKKVIFGGRKLFEKLQKRHINGEAYRKLQREWQEKRRGNLYSRGDRSKKGNLNTRVEIDGLLTRLRINVGEREYVYATIQPGWKMKDGTYTDRNQLLQAISISGEPYSVELKLKSGVVYAYFTVEEVFPKPAITRANGVIGIDTNAYPKNVAWAETDEQGQLVRYGEIPMPELESGSFDKREYYRWQYAHRIVQMAKEKQKAIVIEKLNIQDRERRGDFSGRKSRRIRHYFGYRSLLEKVKLLAKREGVEVIEINPAYTSVIGVLKYAPQYMVSKDVASSYVIARRGLGLRERIPHNYMMLLSRLDTNCLEELKEYVKKVVKDPYVRKKQLKEIDRVIEFLQSSGSESGRLSEPLDGTSADGRKKNTCNLWRVLRVAVVTPLSPEKVLRDISVLKRVIFSGQVGKTYKGVSSCFLGQGLWLSQIPPAGAGKA

SEQ ID NO: 30673 - protein, 751 aa, unknown
  TnpB Polypeptide
MIRAYKYRLYPDNEARAYFARCFGATRYCYNFCVREYDKACSEGRQLSGFDIAARLREHMNGVKWMADVDYEIKESAPRRFDNALGKFKRHEADRPREHKKGDRPTMSYTTQGAIKVDFKHHLVQLPKIGVVNARLHRTFSGDITSATIKREADGHYYVCLNVKNDEPEAPLKSHTTEGTIGIDVGIRHLATLSNGDHFEMPDTSRITDRITFLKNRLEKQTPGSRRYNRTAFQIAKLHHHIANIAKDTHHKAAARLCRDYDTICMETLNVAGMKRGKPGEKTAGDVVFNAQLHRMALALFIERIQKKAADTGTNFVGIDRFEPSTKRCHVCGYVLPAISLDVEAWTCPECGTRHDRDENAAINIRNKGLEQLQAMPPKAARIETLPLAEGNVMPAKKATAGCNLRTGKGKAATDQPPKAQIADGTAPPRIFKEPQFEIPEELKYFKVVPLTTRAGITPRQFRKWLNQLTYGEIPDDMKAMHDHMLNVIKQVSDDLRRIKIKNDNDREGSYKVLGKMNKMVRADWLIAEVMPVVPNFTIWRSRRRKPDEIRTVNRIISRQFPDRLIEMVTRLKAYAYETQREQHFYTDPTEGFMLKKLYFGVHLKFNRVARRAGITTYALSRWFHERYKNGEKEFSYEDISRLLQTVKDIASQLRGMEIADTKPKRIERQLKAMEHEVWLKQILCDAGFFQAEDEQKLDEAYNKWRAADKTEEDIATVNQVVCYELPELIDRFVASELPALQWEMQSVARQ

SEQ ID NO: 30674 - protein, 226 aa, Actinomadura sp.
VNLATTCDGTNHQGKGLKKYRRAQARRRAELQKKKTAGSRSAARRLTRRKAREGRHATNENHKISKQIVADAQRTGRGIALEELRGIRDRVRLKRHQRATLSSWPFHQLGTFLAYKAQRAGVPCIEVDPAYTSQTCPRCGHVARNNRPDRDRFCCRRCGLAGPADHIAAVNVRQRARTAWAFVSMPDPTPEQGKGDATPARQPAAKGSATRCERPSRKLSRSRPRS

SEQ ID NO: 30675 - protein, 444 aa, unknown
  TnpB Polypeptide
MQKIYNVTWDYCRTSMIPIGKKYGIDAVFALTKAEDVWRGMEKCLYGNGNTVHFSKHGDLPCIRAKQISRGIPISVRNDKLQFKLGKTSFGIQVNDRFQQDEVNAVLSYLVEPEIMDNKAVNTLIEDAYCIDTYRPCYATLVPKMIRGKYRVYLHLTIEGKTKLKYDKHGNPRYKYGKGIIGADIGTQTVAYTSDTEVGLKNLSERGNSIQTSERKERLLYRAMDRSRRATNPQNFNEDGTVKKGRKTWKYSNHYKKLKTKHSELCRINAVNRQLAINEDANHLRSLGDTLVTEPKNASKLMKRAKETTVNSKGKFNKKKRFGKSIKNRCPSGFQTTVEKKFKTTGGTYIEVPNNYRASQYDHTVDDYIKKKLSDRLYKLQDGTEVQRDWYSSFLLYCYDYKIQNIDKNKCITEFDNCYKKEKALITWIKTHKIKVLNSGIKTA

SEQ ID NO: 30676 - protein, 399 aa, Bacilli sp.
MLRAIKIRLYPNKEQELKLNKVLGCYRFVYNQMLARKQQEYKENNKSLGLTDLSKYFHGELLKDENYAWLKEQNTKVMKQSIRQMLSAYEKFFKQHNGFPKFKSKKDKQSALFPLEAISKNNKFETRKITLTQPLKDIRFRCSDLYFNRLKQYHDMIRSATLSKTKSGNFFLSILVELPNEDVVKYHQTNEHVGIDLGVKDFVITSDGEVFENKHFYKSQEQKIAKLQRQISKKQKGSNNRNKVRIKLAKAFEKLSNQKEQYIHSVVNDLLTYYDIVFMEDLNVQGMLKNHKLAKAIQEIGFYRFKSILTYKAFNNGKQVVLVDRFYPSSKTCHICGYINKGLKLSDRDWICPECGEHHNRDLNAAMNILLEGERIIGVRSTEFTLVENPTVDDRGIAS

SEQ ID NO: 30677 - protein, 389 aa, Lactobacillus sp.
LTLKGIKLRIYPNGFQIQHIEMNFGCVRKVWNVMLAMQKDRYENNPDCKFVSNFDMNILLPLLKKEHPYLKQVESTSLQCANKDLSEAFKNFFEEHTGYPRFKSRKYPRQSYQSKCVNHNIKQINNSYIKLPKLGEVKFKCGRDIPEVIKSVTIRRSPAGKYYAVLTVEDENQVFDKTQAQVGLDMGIADLIITSDSVKYPTIRFDKALAKKKLNWERKLARRRSLAVKDRAKTKKIGLIEPRPLEDYKNVQKAKRIVAKYSEKIANQREDYIHKITTQLVRDYDVITIEDLKASNMLKNHNLARAIANQSWRMIRTMLEYKCEWYGKELVVVNPFKTSQYCAACGYDDGKHELDIRQWICPNCHSNNDRDINASRNILNKGLEQALVK

SEQ ID NO: 30678 - protein, 530 aa, unknown
  TnpB Polypeptide
MEKVVIPKKELEKYYLKTFSLHEKRRDFAIQIQNYIKDYKHFENMLIILSRECWGAEHYDIVNLLHNKVTMKAVSQKAKGKEKTKDNIKKVCDYFKNNDLFHEMVDFSKKNLNGHNVSMIVARLKKDWDNSKNKRDEYFKDPSKFKGKPQFPKPKKLQNVFQYSIPLEGSKWSTKKLNKNRLGFTLSKRQILTFVNANHAYLKNKKIKSMTISLSHGHVYYNFNYVEKINKKVKHNPLKSVKKEAGLDIGVVNLASLFINDFNSSSLILSGRNFKHYNSTFNRKLAKLNELISKEVIEFKEIKNKKGELIKVPLKYSEKGIKLRFIKSNLFEKRKRYFDDQFNKLSKKILQFLKSNHVTHLVISKNLSFTKQTGEIQQRKKTKQNFYQIPFGKLLNLIEEKSVTFNIEVKDIDEAYTSKTSCLSSNVVDIQALSKTQKITPTDLNGNRGVNQKRGLFRDSLLNKLLNSDLNGAANHIKLGFPDVDLSVYRNHLHKVCNPIKITSTSELDKLLNDLKNSEVEKKTTLQKAA

SEQ ID NO: 30679 - protein, 213 aa, unknown
  TnpB Polypeptide
MRLVERHIIKDNRFEDVCLKSGLLYNYVLFNVRQGIFSGDYINEYEFSTKLCKENQVDFRNLPSVVSQQVVAQVFSVTKSWMKSKKEYEKNPSKFLSRPKLPKYKKGKKQNMVVFTKNSCRLKEDGCIHFIKNIIRPIKTKIGDNKLCQVRIIPQATCYVVEVIYEKKEQDLNLDKDNFLSIDLGLNNLCTCISRYQAFHCKRQDYQVLQSVV

SEQ ID NO: 30680 - protein, 381 aa, unknown
  TnpB Polypeptide
VAIVKKSIRVRLYPTEEQENLFDKTIGCCRFVHNQTLADCKQSYEQTKHFPSKNERIKNLVFLKEENEFLKEVDSHALQQSVRDLNYAMDNFFKNKNHFGFPKFKAKHNSKQSYRTPWNNGSADIVDNKHIKLPKVGRVRTKRFDIPNKYRIFNITVEKTATGKYYASICIEVDIQPLPKTGKQVGFDLGLVDLLIGSDETRYERPKFAYDFKDKLAQEQRKLSKMRTKLERANLNLEDCKNYQKQKHKVAKLHEHVANCAKDSNHKLSRRLVEEYDFIAMEDLNVSDMLKNHYMAYAIADVRWAQLINFIKYKCQWYDKEFVQVDRIYASSKICSCCGTCHKDIVNSLSVREWTCPDCGAHHDRDVNAAINILKQALSVA

SEQ ID NO: 30681 - protein, 429 aa, Bifidobacterium sp.
MLRAVKVALDPTPRQARQLESHAGAARFAYNAALTHVRRQIGGFIGGLDFSYYALRRWWNEWKGELAPWWPQNGKEAYNTGLEALGAALSNWKKSKDGKRKGRRVGFPKYKSKSGSAPKVAFTTGFKQPSACDPNSVRLPRIGRVHTMENVAGRVGAGHVTRITVSHHAGRWMAALTVDDTAMAQAAPKPSRRWVGVDLGVRTLATLSDGTVIANPRNTKRGERRLRHASRALSRKTVGSARWRKAKRKVQRVHAHMADSRMDALNKLTHMLATRYSDICIEDLNVAGMVRNRSLAKAVSDCGFAELRRQLAYKTVRHGSRLHVIDRYHPSSKTCSACGAVKAKLSLAERTYACAECGLVLDRDLNAAVNIERYAARSAREALNARGTDTRPATASSGRQTVMKREPSSPPGVRLGAGSRKAPMSTRTN

SEQ ID NO: 30682 - protein, 609 aa, unknown
  TnpB Polypeptide
MRPIDCDFVSLTLTLPRPKDELEKVLLALTHQSKNLANTCLFVIRNAFTAYEYDKETGLNVLKKELHSHQIDIIDHYNIHIALINKKRIDKHPAFIQKELAKGKALEDIREAKLIPLLAPVLSNLAAVLLDSTLLDNVVKTWSNEKHDIVYKRIPAVMAQQNLATIKDNFSSYFNAAKQYGKNPASMTGRPRMPKYHDKQGRAALEIPLVAVRTHLPTLKGKVVYEDYQENNQLDPELLEVFSRFSVDEMVKKACQKRGWTDYKAQHLRIVPLKKGLKMEVVVRVKNAYPEHSFLATIYQDHKDTLAAFKKPKEYSTWLLNHLKELPADQLPNICGIDLGIKNVGTLSYSTGHKAEVHSGAVINKTLGRLNYKIDSFLSSQASPRAKELQAKQAELAKKAERLTTEEHNELKKLQAAVYGHDTYQRLSNYKRQWLQNYLHQLSHGIIKNCVAKKIDVIVIGKNLGWKQEINLGKKTNRSFCQVAHATLIEYLTYKAELQGIAVVTTEESYTSQTSFVDNEELSIYDETPSTPEAKALRPAKAGKRSTVNRNWFIHKNRVDRLKIVHADVNGAFNIIRKVFKNFAYHVKLTLKFTIYTMNSKQGVLKLQL

SEQ ID NO: 30683 - protein, 383 aa, Cupriavidus sp.
MTGMPLVYRYRVKSLNGLLNQQSRAVNYVWNFCNDTQKHALKWGKKWPTGFDLNVLTTGSSKELRIHSGTINAVCEQYAKSRSQHRRPCLRYRGRKSLGWAPLKGRDLKRSGDGFRFAGNTFRVFSFRPLPEGKIKDGTNFSRDARGNWFLNIVIEVADTQARPPERGVGIDLGLKDLAPLSTGEKVENPRHLGRLEQALAKAQRARKKRQATNLDARIKNGRRDFLHKLSHRIVRDFDYIAVGNVNAAGLAKTSVAKSVLDAGWSSFRTMLAYKAIVHGAWYEEVDERFTTQVCSSCDAMPPETPKGIADLGIRQWVCSGCGAVHDRDVNAALNVLARSGHRSPAEGISSLSGGEDVNLPPSVRACAAAHQRCRPSSRRASA

SEQ ID NO: 30684 - protein, 462 aa, unknown
  TnpB Polypeptide
VKPPATRIFPSCCTASAYTGPFAPGLKLGSSEPSDPLSHSPAQRSCPRRVSPMLSSMRRTFEYRLYPTKKQAAAFDRALWSCRKLYNAMLWQRQLAFHGYGPKQSLSIYDQKRQLVELRKSDPAYGSLYTHLLQDVAIRLDRSFKAFFRRCKAGERPGYPRFKGRDRYNSLTYFEASNGSVRIKGGRVSFSKLAENVRLFIHRPLAGTIKTATLRRKASGWYVMFSCDDVPPDPALKAGTGEVGIDMGLTTFAMLSTGETIKNPRFARKAEEGLVAAQRRIARKVRGSGNRRKERHVLARHWERVTNQKKDHAFKTARSLVQRFGFIGVEDLDIRDMVQNDEKKSVHRSISDASWGNFLLTLSYKAEEAGTTVVRVEPRGTTQECSGCGTVVHKTLRERVHRCACGLVLDRDLNAARNILQRARHLQEGHAGHIPELPQPARTGPPSRRVPYPSVDAGSPCL

SEQ ID NO: 30685 - protein, 388 aa, Methanocaldococcus sp.
MPKPPKVKKLKNIDKFTFELNKKSFEVNNNYLILKLRYNSKTKKWKKIKIKLPPYVKNITSVRITYYLGLFYVDIVNEVYIEELKPIGNYKAGIDLNVNNFVVLTSTNPLLKSLIISGGELKAFNQWWNKLKSKIQSKIDLTKNHIEKLKSERKEVPKKLYLKLKSLIRRFRLLCIHRKQWFDNHLHRFTKYLALFLFITGHDKVFVSNNILRAKNRCNLSSKANERFVYLPFRVFIDKLAYKLKWFGIVLIEVDESWTSKSSCISDDIHKIQNLVDKVRNKLSLCGERIKRGLLLVKKLNKVFNADVNASYNILKIGCRIKDLSKLFNQKLLMKKLCNPIKVRVFKFIEILQSVIPESPVVRAGDRVIVKSLLCGGNGFIPECFIIQ

SEQ ID NO: 30686 - protein, 308 aa, Methanocaldococcus sp.
MRLSTSNGRIVIPLKPHKQFFKLLDNGWKVKAGFKLRINKEDGTATILIPLEKKITINDSFKTVYALDFNLDNITYGSFEEINTINTNLGKLTEKYSNIMSNIQEKFSYEGIHKQDKPLKRKGFILLKKFGNRLKNIREDKLKKLANKIAKELRDKDAVLVIEDLSSYFNQNIAKKSFKKIKHKLHNISAKKFLSYLKNKCLEFGVKVVEVNPSYTSVLCPNCGSKLAQLYRLIDERALPSRVMYCFECGFYADRDVIAVFNLIKRAWGVFRCPQKSNEPIAKETVFSMKLWVEDNLLPYFRFNTIRY

SEQ ID NO: 30687 - protein, 493 aa, Methanocaldococcus sp.
MKVIGRIYIYDNRLKNIAPFTIQLAHFRNMLIILILKLKEHLSYYPTNEALLYSLLADRLNKRTLNNLEKLQKLNEISNIIKSDNFLSKLLNSMKKLKKELNNNYAIQSIIRQVCRDFKAYRKAYEEYLANSNKFSGKPKPPKAKKLKNIDKFTVELNKMSFKINNKILHVKLHKNKQIRIKLPEFIKEPSSVRITYYLGFAYVDIVYDKHIEELKPLGKYKAGIDLGVENFATVVSTNDNVPSIVVKSSYLKSFNQWWNKLSAKLRSQIDTIKNLLKENPDDKNILLELKILTKRIKKLHLHRKKWMENIVHQVSKAISVFLHQTEHDKVFIGRNILEAKNGSNLSKRVNQNFVQIPFRLFIDKLAYKLKWLGIKLVEVDESYTSKASCISDDIIEIQRRVGNNEKVSMSGDRICRGLYFDKIVNLIFHADVNGAFNILKVGLKKKRLFKKVDKIVKVKLCRPKAVRLFEFCRAVLGNLCPPNWAVEVGLSR

SEQ ID NO: 30688 - protein, 363 aa, Methanocaldococcus sp.
MKLSLKMKIKPLRTNKMFMLEKTLIDFKNAVNDWIDISWNDGKITDRKLHSYGYKELREKYPNLYSNSLQDAMNWAIQILRSSIKLNPNKKPIFNTLMVSYKSVDYKYENEGLIIPLCGKRVFIPLYIPKKYKKYLQNGTFGRLVIKKEGNDYYAYLSIKVEEKEPYKPTLWFGVDLGVYNLVVVADSKGREILRFDGEIVKEYKKKLEKYRARIQSRQKRNFNKYTKVGNKISNYSKYINHVISKEIVKKAKQYNAGIVLEKLKGLKKSKLNKSKPKNIRKALHIWSYADLIKKIKYKAKLEGVPVVEISPRNTSKTCSRCGYVNRRLKNERIFVCPKCGLEIDRDLNASINIAKKVASKQA

SEQ ID NO: 30689 - protein, 348 aa, Gammaproteobacteria sp.
MTVTEPAFRRYVGWRCRLYPSPAQDAALFRCRNGLRELANELLAASQRRYGEAGRRLSLAEMRAFARDWQRQPEHRGFPASATYRVAADLDRAFRTWFAKPGRRARSGFPQIKAIGREPGIYLSNQGVRFEGSRVWLPKFGSVRWRGGSLPQGRLAGPLGRKTLGLLSGRAWLDAGNRWMLSCLFECAPLTPVEPRTDRAAVRQNGSEISVSVDGGSVHVIRESTALRNARRRLARLERQLERCEYGSEGRKRALARMRNQARKVRNHQADLQHKTTTGVVHDAREIEVEGASSELLRQLEYKAEWHGRQLKVRRGPPKPGTGKPQRAPRPGSRSLKRESRTRRPKAL

SEQ ID NO: 30690 - protein, 395 aa, Bacillus sp.
VNNLKVDSIGGTEQILNNMNKTLILAKRVRLRPTKEQETQLWKSVGTARWAYNWALAKQKESYKNKGKFISDGLLRKELTRLKQTDEFSWLYEVSNNITKQAIKDLCHAYEKFFKGLADQPRFKSKRKSKPSFYNDNVKLKVKGKKVLIEKVGWVVTSELISDEKYYNPRISNDGKYWYISVGIEELKPTVEHTNVSLGIDIGIKKLAVCSDGTKKNNINKTDTVKSVEKRLRRLQRRVSRKYEMNKEGNRFVKTSNIIKIEKKMQHLHRRLKNIRLNHLHQSTSEIVKTKPYRIIMEILNIKGMMKNKHLSKAIAKQCLFKFKRQIQYKCEKYGIEFVEADIWYPSSKMCSSCGKLKKNLKLSDRLYKCECGHEIDRDLNAAINLSRYKLVTVT

SEQ ID NO: 30691 - protein, 401 aa, Bacillus sp.
MCLYRIHEVSDLKVDSIGGTEQTLNHMNKTLILAKRVRLRPTKEQETQLWKSVGTARWAYNWALAKQKESYKNKGKFISDGLLRKELTRLKQTDEFSWLYEVSNNITKQAIKDLCHAYEKFFKGLADQPRFKSKRKSKPSFYNENVKLKVKGKKVLIEKVGWVVVSECIPDKKYYNPRISNDGKYWYLSVGIEESKPIVELTNVSLGIDVGIKELAVCSDGTRKKNINKTSNVRRGEKRIRRLQRQISRKYEINKEGNRFVKTSNIIKIEKKIQHLYRRLTNIRLNHLHQSTSEIVKTKPYRIVMEAINIKGMMKNKHLSKAIAKQCLFKFKRQIQYKCEKYGIEFVEANQWYTSSKTCSSCGNKKNDLNLSDRLYKCECGHEIDRDINAAINLSRYKLVN

SEQ ID NO: 30692 - protein, 349 aa, unknown
  TnpB Polypeptide
MYRTLQIKLDRSNALIQTARIWNAACQDVIDYGFAAHDYNKTRLNRATYKDLREKYPTLPSALLQTARDQASDMLKRLRFKTKPFKKPLGAVRFDIRTMKVFLESGYCKLTTAFGRLRYDFQLPEYYKRYVGWKVTNAQLKITKNACYLNVQVEQPDPEPITGDRRLGVDLGINNIAVCSDNTFWESGHVKAVKGKCQYLRSKLQSKGTRSAKRKLQKLSGRERRFQKDVNHQIANWIVSKPYDIIALEDLTNIRNGNKNKKLGKWSFAELRSFVEYKAMAIGKNVITIDPRYTSQTCSRCGYQHKNNRIGRIFKCKSCGFQIDADLNASRNIATFSRSDRSRLQSTSQ

SEQ ID NO: 30693 - protein, 387 aa, Syntrophaceae sp.
VNVYSQKKELPDIKKQFPEYKMPSSQVLQNVIFGVDAAYRMFFTKRRDGDRDVRPPGFKSFRRFFTQEYSQRGNSFTVTEGNGGNILRLAYGSRPSDWIEIVLNTAIAGSPKTVVISKQGHKWYACFTRCVEEPEAVTAGEIIFFDPGCITTLSGITSAGKFVEYDINPLRAINYSTYKLIDRLLSERDTKEKGSYRWRRLNRRIKKLFSKINSRTRTYLHAIAKRILADHPGVREFRIGDWEKQDTLADTGYKFVNRRINRAVQNNNPVMKLIGFLSYKAILKGQAVNKFDERGSTRTCVMCGHEHVNGIPPGQRLFVCEVCSFQFPRDHHSCLNFVKKHYPALWQRLSGNLPDRSMRTTIHPFSFKPQVTRSVIRTQNTGCFSLQ

SEQ ID NO: 30694 - protein, 217 aa, unknown
  TnpB Polypeptide
MLIDTIENIGAGSDFGLKTYMTLSDGKSIQSPLFFNRYQKKIKKCNRKLSNARKGSNNRKRRSFELQQAYRRIKNLRSDFQWKLAHQLCKQYDFIFLETLNIEAMKHLWGKKVSDLSHSMFIDKLKYVASKYGVTVHQIDKWYPSSKVCKCGYIYKDLSLKERSWECPACGSKNERDLLASQNILRKGISELESMDKSNGRKTEVPYVIIQESHSLQ

SEQ ID NO: 30695 - protein, 516 aa, unknown
  TnpB Polypeptide
MTGELLDSVSVMAELVSEVRSLSAYATYVVRNDTKLGDGLALATATAPAEAGRQAGVVMPDFLVPDKKDEDGNPLTDKNGEPIKLKTGKSRKERLFRHRVVTEHHSWQERIDAANGESDKYVSQGWKRTVDASAPSYGEDTINLGAVDKQYAVIENDPVADGEIVLRMIVQGVWYRLIFSFDNKRFTGGKVTLPLVKVENNQPIFIFTVVTDNPVVQFSGDYTVGVDVGINDYATVVVRNSTSGRIVYETTLSQRVHSLWNSVRASERQVKQLNKKVDKLIYQRQAHMSAIDEAQLHREAASRKKRELAILAAQEIAYLSHQYGNAVVAVEDLSWIRNTMQNGRWNRGTFAQWLTHYVTQNGGWVVSVNSANTSQVCHLCGEKVAHPVHKVSICPKHGEMDRDVNAATNIAARAVPKVEKARKTRAKNRKLQPSVPLKTPIARCSLKYPGRDRTKHAPTPKRKNRVSKEVNLHLSPARVNLTSVLADCGTCGAVETSKAAINQDYVTHECRLCSLN

SEQ ID NO: 30696 - protein, 523 aa, unknown
  TnpB Polypeptide
VAHPSHILDLDGEVLDTELIMTELASEVRNLSAYATYVVRNDEVLGAELLRVTATSPTEAGRQAGVVMPDFLVPDKKDENGEPLKDKNGEPVKNKTGKSRKERLLRHRVVAEYRSWQERIAAAKGESSKHVSQGWKRTVDASAPSYGEDYINLGAVDKQYAVIENDPVVNGEIVLRMIIQGEWYRIIFNFDNARFTEGKVTLPLVKVEKGHPIFIFTIVTDNPIVQFSGDYTIGVDVGINDYATVVVRNSTTGRVVHETTLSQRVHSLWNSVRASERQVRALNKKADKLIYRRQAHMAAVDEAQLHREAASRKKRELAILTAQEIAYLSHQYDNAVVAVEDLSWIRNTMQNGRWNRGAFVQWLTHYVAQNGGWVVAMNAANTSQVCHLCASKVTHPVHQISVCPKHGVMDRDVNAAANIAARAVSKVEKARKTRAKNRKLQRGTALKTPVARDSLKYPGRDRTKNVPTPKRKKHKGVKTLFSPARVNPTSVLADWDAYGILETNQAAINQGNVTCECRLCNLN

SEQ ID NO: 30697 - protein, 409 aa, Haloarcula sp.
MEYSHRYHAYPTQEVAAELKHHIDVHRQAYNYTLYEYENVDAGDIGSAYKHHSRLPDWKDQFSIFSEVNSKALQRTVTRFYQNLDGLSEQKQNGRKVGKLNWKSPREFQSMTFSQSGFELKNTSGRRATLWLSKIGDIKIRYHRDIPDEADIKEVTIKKERTGDWFVSFGLETDDADFPEKPDVDSLDASNSVGIDLGIQNYIHTSDGKTVDWLDLEDEYERFQREQRKLSRKEKRSNNYEKQRREVAKVKRHIKRKVLDYQHKITTWLVKEYDAVFVEDLNVRGMLEQSHNARNKQDAAWRQFIALLEYKADLYGCHVVQVEARGTTKECASCGVETEKPIWAREHSCPSCGFECDRDANAAMNVLQRGFSELGLGWPESTPVETALPTDTTSVSAKRVIEAGSLGVV

SEQ ID NO: 30698 - protein, 343 aa, Tissierella sp.
VIKSVKIRLKPTEEQEILMNKSVGVVRFSYNWGLSQWKGMYREDLKPNGRKIKKIFNNTIKKDEEYNWLREVSSQAISEAFNDLQKAFDNFFDGNAKYPRFKTKRKSKQSFYVRYDSMNIKNHTVNIEKIGRVKFTTNYDIPILKTYINPRCYFDGKYWYLTFGYERNENQVELNNDLSIGIDLGITNLAVISSMDNPIKNINKSPKVKELEKKLKRLQKKCSRKYQMNKSGKQFIKTNNIIKLEREIKLIHRKLTNIRTNHIHQATISIVKQKPYRVVMEDLNIDGMMKNRHLSKSIAEQKLSEFTRQIEYKCEFNGIEFVKVDRFFPSSKMCSSCGNIKKD

SEQ ID NO: 30699 - protein, 383 aa, unknown
  TnpB Polypeptide
VRAHRTEINPTPEQKRKINSTIGVCRFVYNFYLAYNKDIYEKENRFVSGMEFSKWLNNEFLPNNPGFSWIKDVSSKAVKQAIMNGEKAFKKFFKDETKFPRFKKKRNNNAKAYFPKNNKTDWAIERHRVKIPTLGFVQLKEKGYIPANAEVVSGTVSYEAGRYYVSVLVKEEPKQDNKPYTEGIGIDLGIKEFAVVSNGTEKKNINKSKKVKKLEKKLKREQRRLSRKYENKKKGEATKSAKNIEKQSLKVQKLHQKLRNIRHDYVNKTVSELAKTKPAFITIEDLNIKGMMKNRHLSKAIAQQNFYYFKTKLESKCKQLGIELRVASRFYPSSKKCACCGNVKKDLKLSDRVYVCEECGFEIDRDLNAAINLRNAKEYAIAC

SEQ ID NO: 30700 - protein, 355 aa, unknown
  TnpB Polypeptide
MKTTVLIKLLPTSEQRKQLIHESQTFIETVNRTIIQMLQGDIRKTLSSKDIQCPLNSSVKSEIARCAMSVVKKYHKSNDSDYATLRKPYISWNNQNYTLNGNAISCPFWINGKSKKITFKAVITKEQKAVLASHKLGNLRITQKSNKWIAQIAIERTPLESKTTIKIMGVDLGLKVPAVSVDETGNTKFYGNGRENKYMKRKHRSKRQELGRKKKPEAIVKLNNKEQRWMKDKDHKISRQIVNHAIDKDISTIRIEQLANIRETTRTSRKNEKNLHTWSFYRLSQYIEYKAKLSGIKVEYVNPKYTSQHCPNCSKRNKANDRRYFCSCGFKSHRDIVGAMNIISAPVVSDKRKSA

SEQ ID NO: 30701 - protein, 448 aa, Halorubrum sp.
  misc_feature (125)..(125): Xaa can be any naturally occurring amino acid
VADDYVRRTAITRLEVTDEQRDLLEDTISEWKRGCQLATDMAWGKYNAKSDVQPLAYDDVREHTDLGSQHAILATHQAAQAITGCIERKAKDKKVSKPTFTAPTVKYDTRTMTVFDDDMVSLSTXSKPTFTAPTVKYDTRTMTVFDDDMVSLSTTESRVRCDLALPDADDGYQRQYLDSDHWSVTESTLTVRDGDYLLHIGFRRPKTDTERNTAEDGTVLGVDLGIENLAVTSTAYFFSGRELAHNLREFEKIRAGLQQTGTRSAHRTLERSSGRGLRYVRDVLHRASNAIVSEALRYECDVIAFEDLTNIRDRTRASWGHKWAFRTLYEQVEYKAEAVGISVKQVGSAYTSQRCAECGFTADENRRTRNDFRCVKCESEANADYNAAKNIGMRYVRRGQQSSRRTGDSQLALKSGTVTPSGGFTAHPDGFEAEFMDKPHPQRAKSVD

SEQ ID NO: 30702 - protein, 374 aa, unknown
  TnpB Polypeptide
MKTYRFKLYAHKRNRKIIKNIELSGKVYNHLIALHKKYYGLFKKYPSKYSVQKHITKLKRKPEYKHWADLNSQTLQNIAERIDFGYQKFFKKQNKRPPTFRKICKFKSFTLKQTGYSFKEDNVVVIQSVKYKYFKSREIEGNIKTVTIKRDGVGSIFLFVTTDVEEQFENISATRKTAGFDFGLKTFLTGSDETEFQSPLFYKKSLSRRRVLSKELSRKRRGSSNRKRARIALAKTDIKIVDKRRDWMFKLARELCAQYSLISLETLSLREMISRWGRKVLDIAYAEFLKILKYVAVRFRTVIVFIDKWFPSTKLCSECGAVNDSLSLRDRTWKCTGCGTFHNRDLNAAININREGASSLRKEGIRLHTEASLV

SEQ ID NO: 30703 - protein, 211 aa, unknown
  TnpB Polypeptide
MDVRRTVPVKLDVSDADAELLHETFTEFRDAANYVVAHARDDSGTIETSKQRLHERTYHEVRDQTRIQANLVQAARSRAADALKGVLARWSSGKYASLPTFTADFAEYDKRSATFHDDHVSLSTVDGRIEAEYVLPPDTDDTPFGEYVASGDYSVGGATLHHRDGAFYLHIRTTAEVDDPEPAEHPTVLGVDLGIENVAVTSIGAFWSGGC

SEQ ID NO: 30704 - protein, 763 aa, Streptomyces sp.
MTKIVDSQPDWLHKPLSVAADSLCVIAETSHGRTGPRTLRVPKEVGKSVSTIRLDVMPTSDAAPARRFRGKNKRERWKRGEDTELAVIRLPLDVHRLEDLHRAENLYSAMWSIKRVLQRDARDAVDAYWAGDVRRETDAKAWRQALGLSREGMERRGYRHMERSKHLGHHVTKALVMHQADSVWEGVVRHLFPDATGRKFGRPKTGTWWDYTRIPGRARSHTTARKWETFRLHGTLAGHLAVYRHRSLGVEGMTPEQAIMLPPGTSVLEQPRRLPVPARPAGRVPTGEVTAKGTAETRAATWWDHTGPLAVVFTGGADSQRGDLILPVRLPSGAGRWPRLVHFLNNPDTWHKVDLVRHRDTAAPGGWAYEAHLMVLTGGYASPGTRARRKAAAELGRVGGIDGNVSNLSVVSFPDTLDPADGEIQATRAELTDTERAALEKARRKERGRKRALDRSRRATNQSQYGPSKRQQARAERRQQAGLPARHVQVPGGARAANTAGVPKQAYRRDDLSAGYRLNRARLAEAAATEAAARDHRARRIAERIITDHGANLVVEDCDIRTWYRLWGKALQATTPGRLTAAVGRECEKAGGRMLRASTFTTKLSQTCLCGAEVKKTLADRVHRCTSCGLVADRDMVSGALAAHVRFSNPDDPSTAGLDTVQARMTQILFAEGLQEALSSQPQRGARPRRGRTHAAAQRPGIPRPRASARPNTTDRNRPTPNETRPARERHKGHVGTAAPVGNAPPRGDTPEQELVGRHPITG

SEQ ID NO: 30705 - protein, 379 aa, unknown
  TnpB Polypeptide
MIKAFKVRIYPTKEQEALMWKHINCCRYVWNYMLALQEESYTNGEKHLSRFDMIKLLTLLKKDGTHDWLYEVSSTSLQIICSDLSDAFSRVFNKTARQPRFKSKKKAKPSFGINSQNFYFKTESLLKVEKIGDVRYKTDFNFQIGRGFKFSNPRISYKNNKWMLPFGMECENQAPCLTDKKVGIDLGIKELAVVAIDDEQLVFHNINKSKKMRTLNRQLKHTQRAISRKYEANKVGKKFVKTRNIERLEDKLRKLRARISDIRENYIHQTTHKIVSMLPSQVTMEDLNVSGMMKNQHLSKAISEQCFYEFIRQMRYKCAWNGIEFVQANRFYPSSKTCSHCGSIKQDLKLSDRTFVCSDCGFTIDRDYNAAINLMRYEA

SEQ ID NO: 30706 - protein, 337 aa, Psychrobacter sp.
  misc_feature (322)..(322): Xaa can be any naturally occurring amino acid
MKINKAYKFRLEPNAEQEIILNNLVGSARFVWNQMLAISFEMFAKDEFINATNLVNKIVGLKNNPDFAFLKTHANAVSLQQKVRDLAAAWSRFFDPKVHARLKENKNKPRKPKFFKLADGTEIQHRPLMPQFKRKADGCDSIRLVQFDKYCRIEGNRVKLPNGIGLVKFRKSQDIIGTIKNVTISKKSGHWYISFGTERELAEKPVHPATSAIGLDMGISKLLTTSNGEVIKPKNSFKANQLKLAKLQRGLAKKVTFSENWKKQKHKIQKLHHHIANIRHDYLHKITTSISKNHAMIACEDLKVANMSTSASGTVENKGRHXRIKQSYLRSRLGHDD

SEQ ID NO: 30707 - protein, 358 aa, Bacillus sp.
MYQTVTVKIKLLPTKEQASILNAMGKEYISTINALVSEMVAEKKTTKKTTKDVPVNLPSAVKNQAIKDAKSVFQKVKKEKCKIIPVLKKTICVWNNQNYSFDITYIRLPLMIDGKTKKVSVRALLIDKHNRNFDLLKHKLGTLRITKKSNKWIAQISVTIPTAEKTGTKIMGVDLGLKVPAVAVTDDEKTRFFGNGRQNKYVRRMFKSKRKKLGESKKLNAIRNFDDKEQRYMKDQDHKISRAIVNFAKENKISVIRLEQLVNIRQTTRTSRKNEKNLHTWSFYRLSQFIEYKANLEGIKVEYVNPAYTSQTCPNCSKKNKAQDRKYKCKCGFEKHRDLVGAMNIRYAPVIDGNSQSA

SEQ ID NO: 30708 - protein, 192 aa, Bacillus sp.
MTKHNKAYKFRLYPTEEQAYLMRKTFGCVRFVYNKMLAERKEAYEKYKDDKEQLKKQKPPTPAKYKAEFEWLKEVDSLALANAQLNLQTAYKNFFSGQNDFPTFKSKKDRKSHTTNVVNGNIMLLNGHIKLPKLKMVRIKQHREIPHGHIIKSCTISMTPTGKCYVSILTEYEKEIVQKEVETVVGLDFATN

SEQ ID NO: 30709 - protein, 275 aa, unknown
  TnpB Polypeptide
VLFIAGDGAKWEPANGSRWAYASFQAVGRIKVSQHRPVVGRVKTLQLKREGRRWYLVVVTEIEVVALPTTGRAIGVDLGVARFLTTSDGEVVANPRFLDAAQERLVDLQRRKARARPGSGNRSRLRRSLTKEWRKLRNQRRDFHHKTARGLVDTCDTIALEDLRVAAMTAAATGSVDHPGRNVAAKAGLNRSILDAGWTQFTSILAAKAESAGRRVVLVHPAYSSMDCHACGTRCTRPRQDAVVCPVHGDLDADLNGARNIATRAGLGSGQASTA

SEQ ID NO: 30710 - protein, 408 aa, unknown
  TnpB Polypeptide
MKRSNIFSLAPTREQHHILQELAINCAKLWNEVNYLHRQQYSDYVKLDWNPQAYKKYVPLVGSATAQQIVRKNNEAWRAFLALKRMEKNGKLPFTIRRVMPPGYWKRDGRYMLRILFRCDSYHIREGHLDLPRRLSIPFKGEPKWAGKQGRLEAAWDTLSKKWRVFQSVKVKPIITPLGSKTCYIDLGVRNIATLWLPEWRQPVAYQSGRLLADWWYWTNRIARHQQRLLTVNEHKKSKQLSKLYRIRKKRFRHAVAAFARQFVKDIYSQGASTVVIGELTGIRNNNNHGRQGNAMVHNYWSHKYVADRLKWTAEEYGMKIRTVSEAYTSQTCPRCGSRHSLRVLRRFHCLDCGLEAHRDAVGVLNIAARYGEYAVRPMAWPMLLRWDGCGWNRNNGMPTQQRIRVEA

SEQ ID NO: 30711 - protein, 369 aa, unknown
  TnpB Polypeptide
MKINRAFKYRIYPNREQLSLINKTFGCNRYVFNHFLNQRIRLYNNEKKSTSYVNQAKELTILKKELPWLKEVDSVSLQSTLRNLDSAFKNFFAKRSRFPRFKSKKNNIKSYTSKNTNNSIRIENNKLRLPKLGLVKIKLHRQIPTNYKILSATVRLEPTGKYFVSILTEFEKEIIKVPSNGNIIGLDFSMNELFVSSENQRADYPRFFRQLESKLAKEQRSLSRKIKFSNNWYKQKTKVAKIHNKIKNSRLDFLHKLSTELVDKYNAIAIEDLNMKAMSQALNFGKSVSDNGWGIFTSLLKYKAEGEGKQLVKIDKFFPSSKTCSFCGSIKSNLKLSDRMYICDCGISIDRDLNAAINIKNAGAKLLAY

SEQ ID NO: 30712 - protein, 242 aa, unknown
  TnpB Polypeptide
  misc_feature (224)..(242): Xaa can be any naturally occurring amino acid
MQIIKRTYKYRLYPTKKQVIRMQSILDICRILYNSALLDRINTYRNTNKGLTYNKQSFILTNDKDKFPILREVYGQVLQDVLKRVDRSFRNYFCRVKQKQVKFGFPRFKTDDRFHSFTYPQGGFDRIISSKTKKVTLSKIGSIKIKLHRNFNGKIKTCTIKKEIDRWYICFTVDICKEIKRKVVNTIVGVDVGIKSFVVLSNGTQVRNPKYLRQMECKLIKRQXXXXXXXXXXXXXXXXXXX

SEQ ID NO: 30713 - protein, 418 aa, Okeania sp.
MVEKAYKFRFYPTPEQESLLRRTLGCVRLVYNKALAQRTQAWYEKQERVGYKQTSAMLTNWKKQEDLDFLTEVSSVPLQQGLRHLQSAFSNFFSGRAKYPNFKKKRNGGSAEFTKSAFKWKDGQVYLAKCVEPLPIRWSRQLPQNFVPTTITVKLDPSGRWSISLRVSDTRNLKIKPVLKQIGIDLGITSLLTTSDGEKIANPKNLQKLHKKLRLAQKSLSRKTKGSNNYQKARLKVARIHAKIKDSRLDYTHKLTTQLIKENQRIVVEDLAVKNMVKNHKLARAISDANWGELVRQLEYKAEWYGRELIKIDRYFPSSKRCSNCGHIVEKLPLSIREWDCPECAAHHDRDINASVNILRMGTRVGDRRKGTPTKKAAGLAVSVCGATVRPEGSKSRKAGAMKQKAPNSDVKESRAVS

SEQ ID NO: 30714 - protein, 194 aa, Helicobacter sp.
VARLHLACKNTREDYLHKISDEMTNQYDLIGVETLNVKRLMRTYHSKSLANASWGKFLTMLEYKAQRKGKTLLSIDKFFPSSQLCSYCGVNTGKKHEGITKFTCPHCQTTHHRDYNASVNIRNYALGMLDERHKIKIDKSRVGIIRTDYAHHINERIKACGAFSNGVISKYGNILDLALWSDEARKSSIALAVG

SEQ ID NO: 30715 - protein, 422 aa, unknown
  TnpB Polypeptide
MINTATFVTRTVLIKNTNNALYNYFDEFVCLYQFLFRKVYHNYKHNLNGQKESEYRSNLMEQFNITNRMAKAIMLDVKTSINSLKALFDYKLNRCKIKIAKLSAKITKLKNKLQTKKYGKFKTKINLQKHLFKCQVKLNKLKQFLACNKQSVTFGTKKLLKSNINKFLSKRDSQINYYGDKHEYRQNQQFQITYNTKFNRFDYKLRLDNKFIRDSKYIYGSFYIKDKPAKREIQNILKCKDRPLSYKIIRHSDKLYLHIMFRYNKKVTVSDSNGVLGIDFNKGFITMSDIDKNGKLLKLYKMPYIHKAKTEVCDNSLNNLINDIVKISLDTDKVIVIEDLKSLNNKKLVSDNKRYNSMINLLKFGKFKQKLINKTCKTGSNIKLVNPAYTSRIALNKYCYTMKLNVHSGASYVIARRYYGLD

SEQ ID NO: 30716 - protein, 387 aa, unknown
  TnpB Polypeptide
MILTEKTIYKPSDKEFLELDKLCFLSKNLFNSTLYYLRQNCFQNKTYLGYNQVNKIFTQSNQTDYRMLPAKVSKQIQMLVDNSFKSFFALTKKNVKCKLPKYLAKNGRQVVIYEKGAINHKNNIIKLSKTNIKVKTKIDYERIKQIRIIPKNKFRIDIEVLYEVECKFINKTCKYAAIDLGVNNLAALFIDKENPYLLNGRPLKSINQYYNKELARLKSLLPQKVYSSNKIIKLLNRRYNKIQDYLHKASRKIVNQLVLSKVTHLVIGYNKGIKQDTNMGKIKNQNFCYIPFLSFVNMIKYKCELEGIEVILQEESYTSQASSLDLDCMPVYPEYPKWKFSGQRIKRGIYKTKEKLILNADINGAINILRKYKTDYIPVFNWTIKKL

SEQ ID NO: 30717 - protein, 223 aa, unknown
  TnpB Polypeptide
MDHYGTVLARCFINHASEKDYIKHNLNRIKKYQAAGQKDVVRKLWNITKKHNRELAVKTASAIVNYAKQQNVDVIVFEHLDMKGRKRGSKRQLLHMWNKNTIQKIVTNKAHSSGIRISHICARNTSKLAYDGTGYVLRGKDAGLSTYELCKFQTGKIYNCDLSASYNIGARYFIREIEKIYTGKSICKKISIWSDIQAKVPECQRRTQNTLSTLRAIHQYLAI

SEQ ID NO: 30718 - protein, 394 aa, unknown
  TnpB Polypeptide
MVPVKLVAQVQLLPDAAGCAALAGTLVLCNRAADHASRLAFAAGVTGKQALQRLAYGDLKAMGLSAQPAIHVARKVAGAYATLKANIRAGNLGKPGSRRRVKAERSPVWFRPDAAQPFDDRCLSWQVDVRTASIWTVPGRLARIPFACSAARHATLAAYRRGEPDLVYRDGKWYLYATREIPEPETCEPDGFPGVDLGIANIAATSDGARYAGRHLNRVRHRNRALRRKLQAKGTKSAKRLLKKRARKEARFAAGTSHRIAKSIVTEAQRTSRGIYLEDLTGIRERARLRRPRRVTLHSWAFAQFGQFTACKAARAGVPLVHVDPAYTSQMCPECGHVDKKNRPDQATFRCTSCGFAEHADVNAARNIAARGAAGRAVSHAAGRGTPMAASHAA

SEQ ID NO: 30719 - protein, 400 aa, Nonomuraea sp.
VAVRRSFTFLLRPTSKQAAALTQCLEDHRQLYNAALEHRRTAYRAAKVTIRYGDQSAELKGIRADDSAGQGRWSFSSQQATLRRLDKAFKAFFARVKAGRTPGFPRFKGRGWFDTVEWPKDGDGCRWDSQPHHPTATFVRLQGVGHVRVHQHRRVLGTVKTISIKREGRRWFVVLSCDDVPAQPLPATGAVVGIDMGVARLVTTSNGDHIANQRHLAASAGRLAAAQRDLARRKRGSERRRKAVVRVAALHAKVRRQRLDGAHKAALALVRTYDVIVHEALKVTNMTRRAAPEPDGEGGWLPNGAAAKSGLNKSILDAGWGVFLTILSHKAESAGRKLIAVNPANTSRTCAECGHCAKENRTTQAEFRCVACGHTAHADINAAVNILRAGLALRNAAKAA

SEQ ID NO: 30720 - protein, 460 aa, Hydrogenivirga sp.
MAEGFVRNSQKSFKSLICYNTIEVFKMTIIALDKKRKIKESLKKTKEKRKNQIPKVYKLKISCSNLNKEQKHWLERVFLEAKWLYNYTVADIENRLNPQTEKIKQVEVKTPQGIETRELTCLSSQMKQGIMDRIKKNLTDLSRAKRKGIKVGRLKFKSDYRNIPLKQNGITFKVLKDKNRIKLQGLKKPLRVLGLHQLPENCDIAKAELIKRPDGYYIHLTCYIDKDRIKHEKINKPIGIDFGIKHQLTLSNGVKINYRIGETQRLKRLQKKLSRQQKGSKNYQKTKHKIQREHQKIYNRRKDIKNKILSLLKRYEYVLIQEEQIKNWHSGLFGKQVQNTGIGGIISMLKQNIETLIPVDRYKATTKMCSRCGSRKEDITLSDRTYKCESCGLVIDRDFNSAVNILKIGLSKVETTTVKNLPTDCGEVTPVEREATARIFKGNPYIRVSYTSVKQEARLL

SEQ ID NO: 30721 - protein, 366 aa, unknown
  TnpB Polypeptide
VLKAYKYRIYPNKAQAELIQKTFGCCRFVYNQTLAYRKNLYKTEKKSMSKFDCRNYMAQNLKPQYDWLKRVDKFALENAVFAMDNAYQRFFKLHSGYPKFRSKHNNRRSYTTCITGTNIKVLFGENKIQLPKLKLVRARLSCPFVGQIKQATVSQTPTGKYFVSVLVETEHELLPSTDKTIGIDLGIKDLLITSNGEKYDNKRIIKQYEDKLTREQRRLSRKVKGSNNYNKQRIKVARIHEKIHNTRIDYLHKITHKLISENQVIVSEDLAVSNMVQNHNLAKAISDCGWYELTRQLTYKAEWNNRKYIKIGRFVASSQTCHVCEYVNPETKDLSVREWTCPQCGAHHDRDVNAAINILNEGLKCL

SEQ ID NO: 30722 - protein, 437 aa, unknown
  TnpB Polypeptide
VVAGVLAAFRYRLYPRPQQERLLKSHLSALCRLYNELRDLRINAWREKHASLSDDELRQAALDMRKRNEGLQEIHSQVVQSVATRVYTAFKNYFEGRARFPKHKKERRYRSLTYPQSGFSAFGRVVERGNKTELKGRLYLSKVGHVRIFMHRPLEGRIKNLTVKYDAGEWYAVFICELPDRPKKPVESIPEDRIRGGDLGLINFLTLSDGRSADYPEYLRGSEERIKRLQRVLSRARINSRNFRKLALRLARLHRRVFNQRENYQNQVMAGLYRDSDVIVLEKLCVSNMLKNHCLAKSIQDAAFGKFIDKAMFKADFLGRWFVPVDPWGTTQLCHNCLEWVPKDLSERQHRCPNCGVDLPRDENSALLIKKLGLIWLGYAPGRGVNTPAEQGLLPSLRGWQAWAMKWEAPGFSGERTSHSVSLTSYRINKRWSLCAS

SEQ ID NO: 30723 - protein, 185 aa, unknown
  TnpB Polypeptide
LSKALKPKFYGREVRGIRRHYAWLRKRLQERKCFSTIKKVGRAERRKVNEVLHKVSRQIVNEAIANDSVIVLGSLKGIRQLGKGRRMNRIISNMPYFKLTKYIEYKALWEGIPVLKINERGTSRTCSRCGSQGRRPYQGLFICPSCGYQANADFNGALNILKRSMEYISTDGASLTVPEPGRVSA

SEQ ID NO: 30724 - protein, 416 aa, Cyanobacteria sp.
LVVAPLHHNFGMMVGVKQRYRYRLYRHPHQQVALAKAFGCARVVWNDALAKSRELYAAGEKSSYPVLAKLCITQAEQTPERSWLSGPSVVLQQSVRDLDQAFRNWWASLSGKRKGPKVRAPRFKKRRCAQSIRFMSHVFRTGERSLTLGKIGTVPIEWSRVLPSDPSSVTVIRDASGRYFASFVVEVEPKPLPANGKAVGIDLGLASLAVTSAGEKDRPAEVSALCAEASPASAAAPQAQAERFPPPCRCSAEGGSTSASIADKRLDFLHQLSTRIIRENQTVVLEDLNVSGMLKNKQLARSIADAGWRQFRTLLESKALQYGRQLVVINRWLPTSQVCSTCGHHDGKKELSIREWQCPSCGAVHDRDINAALNILTAGLAESQNGRGAAHKSTALVAAGWEAPTHPIAEASPCPA

SEQ ID NO: 30725 - protein, 395 aa, Methyloceanibacter sp.
MMIHRGFRFKLKPTAEQEILFRQFSGVCRLVYNLAFEQRQVWGRAHRIGYVQQAADLTRLRAEFDWVAAVSQTCQQQALRDLDKSFANFFAGRASYPTPRKKGVNDSFRFQGREVAVERLNRNWGRVRLPKIGWVRFRWTRAVEGRLLNVTVSPDALGWHVSFVCEIEHVAPANIASSVGIDRGVTHALALSNGTFADMPMERLRVLDRRARKHSRALARCKRGTSRRKKVRARLSATKAKAARIRKHFNHVQSSRIAKAFGTVVIEDLRAANMTRSAKGTVEQPGRNVRAKAGLNRAVLEQGWHQFATFLSYKMEANGGFLVSIPAAYTSQTCSCCGSISKHHRKSQAVFECSDCGHSANADTNAAINIRKAGTRPAVREPVAAPSIRESRRAA

SEQ ID NO: 30726 - protein, 411 aa, unknown
  TnpB Polypeptide
MKELDSVPKPSVDGCLIREGKYSSVRSIKGIQFGYSASNDLTSLFEDFRRMRNDAIRIALKEKPRSRFKLIETAYPRLKEYGLHTHYILSACEVAYSVYRNRNRRSDPNVKKVFLKLDNQSYILNHLLLRIPTTPRRFIYLTLQGSDYHLSFIDDKRLKRGSVTINDRSVVIAFSKEIAAVEPMGSVGIDVNERNVSTSETSGATKVFDTSEVAEIKERYRVIRAKIGGKTRQDIRISQKLYAKYGTRERSRTVQRLHRVSRAIVAEASAKRFGILMERLKGIRRLYQRGNGQGTPYRGRMNSWTFREIQRQIEYKARWEGVPVTYVNPRGTSRNCPDCGSPLSELEGRRLLCPSCKQIGDRDVIASRNIMACAVPQARPSKRSHEGERGDDGSNPRSRWTEVELSNQPTT

SEQ ID NO: 30727 - protein, 462 aa, unknown
  TnpB Polypeptide
MGQATRTIKLPLALDKRRQGGANTGKRAYLEATVVVLNAARAFYIAFFLAHRDKLTERVPYYSEQDHEMQERVISADKLLTWAEFVTVETKAHPDPLPAWNFSRAFPNFPSIYRRSVIKDAIGKVKSYLSNLAHWQQSGKRKGQPGPPGANNHPTLYEGTCSLDLDQLDQRQSFVRLKVYTGESWTWANYPVRSSRYFEQRRTDPTWELQSPQLVLGRTQASLHFSQTKQVKAKKIKESKRDPDLVTVAVDLNVKQLAVITVRQHDKIMETVFVHDRGLDQHRYQHLKRVSRKQWLSGKPVKGEHSSTELWHHIRRMNIDAAHKTAHAITRVCAKYPGCVLLFERLRTIKAKEASKSRRLNRKQANQLRGQINRLTREKAYAQATVTVEVNPHGTSQYCARCGAKGQRFSLRAGKRTVFRGGKLFRCPVCHYEVQADFNASVNIHHAFFGEYHWRPRPKRSG

SEQ ID NO: 30728 - protein, 268 aa, Nocardia sp.
LKVSGSDRHPFQAEWRAESALPVSDSSGWVGVDRGLAVFLVAATTQGAEVARVDDPSRALAVGVSQLQQLSKMLSRKKKGSGRRRRVALRLARYHRHIAAVRRDFLHRVTNKLVKTHDRLVIEDLNVAGVLRNRRSASAISDAAWGEFARLLTYKQQWRGGTVVVADRWYPSSKRCSSCGVINSALTLAERIFLCECGFGADRDTNAAVNLAVWATMHNDISRSPDLSTRGRVNKARRREGAGRHHDGVGGTGLDDAGTETHSAPAPT

SEQ ID NO: 30729 - protein, 490 aa, unknown
  TnpB Polypeptide
MLASGQLLGDEGRELISPAIPEASIQEVKCVGRRASVIRLLPSGSQGRKLRRLASTSARLFNEVNYERRQQFFRGERVDLKGTWDKYYERYKNVLGVNAQAVLQKNNEAWSSFFSLLKLRKEGKLPPHMRRVGPPRYWKDRETKERRLLLVVRQDRYVVDEQNHRLVLRDFDMEIDFAGRLRWHGKQGRLEIRHDEARNAWYAFIPVEVGVETTRNGNESKHIVRGERKSIRMAGPRGDGAAGVDLGINILASAVTSSGTWLLYRGSRAKEDFFYLTRKIAKIQSEADIARNAGDNEEFRRLNRRRRRLFRKLVRRVAHLYWNLANHLVRGLWELGVSKIYIGYPFNIAQERGNKLTSNLWTYRRLMDAIELKAQEYGIRVYEVVEYSTSNHCAIHGVKVARGPRGVVTCTLGHRLHSDLNGALNILRRGAGSIPAAVGRPLSFLVDHSGVAPAKGGVTDETPPRGSPGNPRPSGRGGGQGDVCRGPAGS

SEQ ID NO: 30730 - protein, 404 aa, unknown
  TnpB Polypeptide
MQRRYRYRCYPDLSRQAALARAFGCARVVFNDGLRLRQDAYAAGLPYIKDVNVQRAVITQAKRTPERAWLTEVSSVALVQSVNDLHRAYRNYFNDLARVKAARARGEKAKLRVCQPKFKAKHDDQAIRLTRNGFALRPNGRLFVAKVGEVQVRWSRPLPAGPSSVTITLDGTGRYHASFVVEVPAEPLSTVETAVGVDLGLACFAALSTGEQIDNPRWLRTRQAALRRAQRSLSRKRKGSANRAKARRKVTRLHVQVADARRDFHHKLSSRLICENQTVCLETLNVAGLGRSNLAKSIHDAGWGQFVRMLTEKAERHSRTLVKVDPWYPSSQLCSTCGLKDGPRALKVRTWTCAACGAAHDRDINAARNILAAGRAVTACGPGVRPPARAAVGDEAGTTRDAAA

SEQ ID NO: 30731 - protein, 457 aa, unknown
  TnpB Polypeptide
MPLIEKSDKMIHNRSVDITFTKEDQHVLDGQSKICNWLYNQLLDLCIKDYKDNNNDNKYLSGRNLRDQVPLYKSNNLFLKTVHSSPLKNTAIRLKESYKRFFSKNSGYPKFRPWKKKWFSLLYDEPNKGFKINGREIEISLGKNELNKHLHITGTLNESLKINGGEKISTFRLCKRQNTFYGVFTIEKEDIKIPRAKPKKWISIDPNHKNFFVGVDNDGVSVEFDKLKLIKYWDKVIDDLKSQRDACKRKTRRKGTPNGKFYYVPSERWVRINRALERAYNCRREQIKQACYTIAHLLAKEYEKVVIGDYVPSVDTAICDSMHRSMLNEEVIGTFRKTVEWVCYRSKRQYKAQDEKHTTSDCCICEDREHKDPSVRAFICKKCGRKLSRDINSCVNIARKAKLLSSSDYVGWNLYRPTYTVYWNPMLCRVRVTGTLSQKENVDELNQTDSSVWAKLI

SEQ ID NO: 30732 - protein, 442 aa, unknown
  TnpB Polypeptide
LIVVHRIALDPNQEQETSSRKAAGWARFAYNWALGQWQRQYADGGKPNENDLRELLGAIKAETFPWLMEVPKAVIQQAIEDLGAAFGHFFRRPEEYRHEPDPRRKGRLARKLGYPKFKKKGRCRDASRADNGPPTTGADAVRVDGIDVVLPKIGRIRMRERLRFAGQVKSAVASRTADRWFVSLAVAVPDEVLPRKSHAVVGVDLGIATPATVSDGRDPYEAPRPLRRLAKTRRRLGQAPARKRGPGPGAAPSRDFLKAQRRLARLEARIADIRIDATHEATTDLCRTCSEIVLEDLSVSGMLANHTLANSLADVGSSEFRRQVAYKAKRHACTVRLAPRFFPSSKMCSECGHVNDNLKLSDRTWTCPACGTVHDRDSNAAKDLASLAESTPATARIVGSQGAAILPLPSGNRAASSGPRRTPRTKLAAMKREPTRGRKSQG

SEQ ID NO: 30733 - protein, 490 aa, Bacillus sp.
MKHMFGIMLIREVKIVSLTYSRKIKVNFVKEAELILDGQSKICNWLYNQLLDACQKDYRENNHALKLLKNRNLRNYGVSLKEKHPFLNTVFSSALKEPSTRLVNAYKSFFEGRTDYPQFRSWKKKWFSLVFDEPNKGWEILNEGKTISISLGTIPGMKIEKGKRNPSVTGTLKERIELKKGELIKTFTLCKQQGNQFYAIFTIERCSDQELEFKKVMSDYRKAFNLAKKEGKEKPIKPKLPEKKVNIPMNFKWIALDPNHKNFFVGVDDEGNSIEFKKLTMMTYWDKKIDELKSLRDACEKNYRKRKTKHGNTYKVHSPRWNRFNHALDKAYHKRREQIKTALYTISHELYRRYDLVIIGDYTPTNGTAPFNHMKRRMLNQEKIGEFRHIAEWVAMKLEKYYLLANEHSTTKECCVCGHNEKKDPSIRSFVCIQCGTEFMRDTNSSVNIGRKMGFSLNIQKYKHKLKGFTHIGEARYGKPVLWIENKDNL

SEQ ID NO: 30734 - protein, 428 aa, Lentzea sp.
MFSTVAEVKLAVQVKLLPTAEQTAALRSTLYACNDAADAVSQMAFETGVFREYALRKPTYAAVKARGLGAQAAQHVIKKVADAYTALHASIRNGNLGPEAGKRRVKAKSKPIRFRSDAAQPFDDRCLSWHHDAGTVSIWTVAGRVKNLRFAGSPDQLRMLRAYRRGETDLAYRDGNWLLIATCEIEEKPEFDPADWVGVDRGIVNLATTSDVDNFQGCRLQRYRRWHARKRAELQARRTKSARRRLKRRSRREARHATHLNHRIAKQIVAVAERTGRGIALEDLGGIRDRVTVSRHQRATLTTWPFHQLEQHIRYKARRAGVPVLTVDARYTSQMCPRCRHTERANRPSRDQFCCRRCGLAGPADVVAAVNVRNRARSVWVHVNVPDPIAAEQPSVDAARTRAASRARGTRTTPGGSSPVPGLSEPSS

SEQ ID NO: 30735 - protein, 276 aa, unknown
  TnpB Polypeptide
LEQKKLLQKDYKEFVRKRDSEIYFLGRAGDNTCNNNFQVKYNFKINQFYFRIRKEIDLKNDKFVYGQFYFSNKDYTNLLKNLLRTKESALTYRIKIKDDRVFLQIIYNFEHNKNLCVTRNSYGVVGVDFNKGFVSVSETDKYGNLINTFNLDYQYSKGNQTTNDFQYIATRLKDYCLNTGKDLVVEKLNFNKKKDSLISKKGKKYNEMLSSLAYSKFDSIITSKCVKNRIFLHKVNPAWTSWIAKQKYCPKMKLNIHSGASYVIARRGMFLKDNIR

SEQ ID NO: 30736 - protein, 374 aa, unknown
  TnpB Polypeptide
MHKSYRYRIYPTKSQRSVLDQNLELCRQVYNDTLALRKNAYEKDGKSISLYETNSILVSWKAQRPELKQVYSQVLQNVQGRVDLAFKAFFRRVKSGEEPGYPRFKGYGRYDSITYKQLGFGIKDGKLHLAKIGDIKIKLHRPIEGTIKTCTIRRMPTGKWFACFSVEIEDTSLPPWKDGAVVGIDVGLASFATFSNGEKIANPRFFREEEKELARVQRKHSKAPKGTPERKKALKVVERVHERISNRRTDFAHQISHRLVDQFGFIAFEDLNIQNMLKNHCLAKSISDVAWGMLVKATESKAAYAGSTVVLVDPRNTSQMCSRCGLIVKKDLSERVHRCPECGLSMDRDLNAAINILRLGLQSVGIKTVEAQVL

SEQ ID NO: 30737 - protein, 542 aa, Streptomyces sp.
MSGLRKIAAPFVALSQSGVAIRTRLKQLTPADMDVLRQVGAHLGMLASRDLKARCRDGLEHDAGSWAVRKRELTPLSSARWAGTITKASHDQWALARRSVHAYIQSLESGVRTLRHRLSLPLGEKGSKHAPGGYRSRWEWHAKARRLHILEDRLARARADWDAGRVRVVRGGKRLARARHHLTAAGLTEAEWRERWEAARWFVQADGESGKRFGNETIRISPDGEVSIRLPAPLAHLANAAYGRYVLTGRIRFTHRGEEWADRVAANRAVAYRIHHDSVRGRWYVTASWQKPVACTMPLDVALAEGVIGVDMNADHLAAWRLDPHGNPVGDPRRFPYDLTGPATHRDAQVRHALTRLLRWATCCGVKAIAVEDLDFTAEKTREKHGRRKQFRQLISGMPTGRLRARLTSMADQTGITIIAVDPAYTSRWGAQHWQKPLTSTTRRTTRHDAASIAIGRRAQGYPVRRRTAPPRTHQSDGCGHRALQADRQALGCEGPRPHIPGPRTRSVPPDTERTRATRTPNTVRDVRSVQEWVQDSLLNTE

SEQ ID NO: 30738 - protein, 333 aa, unknown
  TnpB Polypeptide
MLADKIRYYQEEKKMLKNTPAGYKKEYPWLKEVDSLALANVQLNLEGAFRKFFREPGVGFPHYKSKKHSRKSYTTNMVNGNICLQDRFLKLPKMQPVKIKLHRMIPEGWKLKSVTVSREPSGKYFASLLFDCENQTAEKRQAEKFLGMDFAMHGMCVFSTGERAGYPMFYRNAEKKLAREQRKLSRCEKGSRNYQKQKKKVALYHEKIKNQRKDFQHKLSHSLAEDYDAVCVEDLNLKGIAGGLHFGKGIQDNGYGQFLSMLGYKLEERGKYLIKVDRYFASSKICSVCGHKKKELALSERIYLCECGNRMDRDVNAAVNILKEGKRIYKKCA

SEQ ID NO: 30739 - protein, 396 aa, unknown
  TnpB Polypeptide
MILRRVYRFKMEPNQEQTHKLYQLAGARRFVYNWALARRKEHFETTGETLRYAAQNLELTQLKKEEERLWLKEADSQALQESLRDVEHAFCNFFGKRARFPKFKSKKKGHFAFRIPQRVKVESGKIYCPKIGWMKIRQSQEIEGETKSATFKRAACGDWFVSLTVEFEREVQPVTKSERPVGVDFGLKDFVTLSNEEAVVAPQFFRRLVKKLAKAQRKLSRAQRGSARRQKAKLKVAKAHRKIASRRADFVHKVSSGLVKRFDHIGIEDLNVEALAKTKLRGHAKSWQNAACGEFVRQLEYKCQWNSVRLVKVNRFFPSSKLCGACGTVNKSLTLSERVWTCECGKVHHRDRNAAQNILRESLNLAAGHAERLNAHGEGVRPVLPATFAEVRIPGF

SEQ ID NO: 30740 - protein, 416 aa, Haloterrigena sp.
MAIQVTRSYVGSIQNQRQVCDALDLLGDAASKIWNVARWTADRIWDEIGEVPDEGTLKAYMKNQTCWKDLNAQSSQKVIEELSDAFQSWFDLRQNDETANPPGYRKHGDERPRSTVTFKADGFKHDPENNRVRLSKGSNLKENWSDFILCEYQTRPDVNLSEVARVQNVRAVWNGDEWELHFVCKVDLETNDSAGGGVAGIDLGITNIATVAFPNEYVLYPGNSLKQDKHYFTRAEYDTEGENGPSEKSMWARRKLADRETHFYHVLTDTIITECVERGVGTLAVSWPEDVRESDWGKTGNKKLHSWAFDRIYQYLAYKGEIRDVEVLKENEWDTSKTCSRCGDATKSNRVERGLYVCESCELVANADCNGAENMRQKITPSPHGEDRSNGCVAQPSVHLFDRESGTFQTREQVVS

SEQ ID NO: 30741 - protein, 407 aa, Haloterrigena sp.
MDWTRNIVRQTYNHALCEFNKIPNDAGTLRQRVWSIRDTLPTMKDWWPDLKQVYSTVLQKAVERIRDNIENLGKLKAKGYNVGSLNWKKPREYRSFTYRQSGFELDKKSGPNGRGLLILTKLKGKTREIPIRLHRDLPDHEQIKEVTLKKEPTGAWFVSFCIKTDTPETSAVEDIHPDDTVGLDLGVLNFIHDSDGRSIERLDLSADRERLEREQRSLSRKEYESHNWEKQRRRVAEVHARMSNKKQDFKHKLAHFYTTEYDAVFVEDLSVKEMLESPENARNKAEVGWRDFITILKHHGEKNGCHVKEVEPRGTTKECASCGVSTWKPIWKREHSCPACGFELDRDWNASVNVLSRGLNTLGVVHSESTPAETATAVDSVSVSASRVVETGSPALKEPPKAASRSG

SEQ ID NO: 30742 - protein, 394 aa, Dictyobacter sp.
MSTQKRAYKFRCYPTDEQKQMLARTFGCVRFTYNWALRLKTDAFYKEHTRLYYKDLSSMLTELKKQDDYRWLNEVSSVPVQQALRHLDKAFINFFEGRGKYPTFKKKRKKQSATYTSSAFTFRHGVLTLAKMQEPLAIVWSRPLPAGAIPSSITVSQDAAGRYFVSLLVQEDIAHLIPCETTIGADLGLKSFVALSDGEMVGNPRFFQQDEKKLAKAQRRLAKKQKGSKNREKARRTVARIHARIADRRADFLHKLSTRLIRENQTICVESLELKNMVKNRSLSKSISDVGWSQFVSLLEYKADWYDRNLVTIDKWYPSSKRCFDCGYIFESLTLDVRQWTCPECGVHHDRDMNAAKNIRSVGLTVLNACGEAVRPGAVKTNAGKSQRSRKPKK

SEQ ID NO: 30743 - protein, 448 aa, Dictyobacter sp.
MIERIIFQIFHLETLFKYATLVSMNTVKIYQLNHLSSTQYQRLRTAQQEAALVWNACVAFHLQARMQHLRWPGRTALQKATKGRFALHSQSVQMVTHAFLANVETTQQLRKMHPEMQMRYPYKEKRFYPVSWPAQAVSTQGKRVVLPMGRGRDSLVLPVELPEHSRSVKLVWNQGYELHVSIEASQAEHAPGEGHATVDLGEIHLASVTTTTNEALIVTGRGIRSLKRQRSKALRTIGKKQARCLKHSRRWNKLQRAKTKQARRAERRIRDQRHQATRKVITFCVEQQVGTLFIGNPHGVRKRHAGRHHNQRMSLWEYGRDIDYLNHKATQAHIECFTGSERGTSSQCPECGHKHKPRNRQWTCKACGFSGHRDLVGSINMHTLAFGERVSFPRSYTYLRPAKSRKSSSRADTPPRCLSQLGSQPHVADVVSLEAGYRPNDAKKPVSL

SEQ ID NO: 30744 - protein, 378 aa, Dictyobacter sp.
MRTKDSRTVLRGLGRSNAPRLPGALSEWNRRYDVGEKPTALKLKKHFNAIRREQFPWTWEVTKNASDQPILDLGKAFTAFFTGKARRPKFKSKKRSKPSFYLSNDQFELRDHRLWVPKLGWVNMAENLRFEGKVLGARITRTADWWFVSIQVELPDKIPEKKAAAVGIDVGLNRLATLSTGEQVENQAFLKTALGKLRQANKRLHRRKPGSKNREKARRQVARLHYQIVCLRQDVLQKLSTRLVNCYGIIGVEHLHLKGLLKNRRLARAFSDAALGTLVHLLESKASQQGGQVIKVDRFFPSSKTCHCCGWTWEQMALKDRVFVCQNPSCPYVHFPQDRDHNAGQNVLREALRLIGLIDQAVSGTGSDEDENLAVDAG

SEQ ID NO: 30745 - protein, 432 aa, Dictyobacter sp.
MQLVEKHVIGRSDPRYATLDAACFASKNLYNTALYEIRQAFLLEGKYLNYQEMDRRMQSHEAYKALPAKVAQQVLLLLERNWKSFFEALKAYKADPSKFRCRPQLPRYKHKTTGRNVLIYTIQAISRSKRTLGRRIIAPSGLGIQIKTRQDPEAIAQVRVVPKHGFAVVEIIYNQEPAGSAVDPSLIAGIDAGVDNVIALTSNKPGFVPVVVNGRGLKSTNQFYNKTMADLQQALGHPGVTRRMQRLTIWRNRRIEHDLHTISRFVVDLLVAEGIGTLVIGRNAGWKQEINLGARNNQHFVQLPHARLIHMLTYKAELKGIRVLPTEEAYTSKASFLDRDPLPTYQAGQEKRPVFSGKRIARGLYRAKDGQCINADCNGSYNIIRKAAPNAFEAEGVADGECRIHLPVVHPVRMSFPHKSAHVKILAPVRIR

SEQ ID NO: 30746 - protein, 385 aa, Dictyobacter sp.
MLIYEYKLDGTKAQYAAIEDAIRITQFIRNTCIRQWMDGRGIGRNDLQASCSPLAQEFPFASKLNSMARQAAADRAWSAISRFYDNCKQKKSGKKGYPRFQHDNRSVEYKTSGWKLNADGRHITFTDGCGIGCLRLVGTRAIETFPVKQIKRVRLIRRADGYFCQFAVQIDRVVEHEMTGAITGIDVGLKAYYTDANGTTVENPRHYRKAEKRLKRLQRRLSKTTKGGKNRLKARKTLAKAHLKVQRQREDFARKEANALVTSHDLIAFEDLKIANLVRNHHLAKSINDASWGRFLAWVQYYGALHTIPVIKVAPHFTSQNCSGCGTLVKKSLSVRTHVCPKCGLLIDRDENAARNILAKALAKREQREQDRTVGHTGTDAPLSA

SEQ ID NO: 30747 - protein, 430 aa, Dictyobacter sp.
LTERHIIDQSDPRYGALDAACFASKNLYNAALYEMRQAFIFEGISLTYQQMDRRMQSHEAYKALPAKVAQQVLLLLERNWTSFFAALKAYKADPSTFRRRPQLPTYKHKTTGRHVLIYTMQAVSRSKRTLGRHLIVPSGLGIQVKTRQDPKTIAQVRVVPKHGFVVVEIVYEQEPAESAVDPSLIAGIDAGVDNVIALTSNKPGFVPVVVNGRGLKSTNQFYNKTMADLQQALGRPGVTRRMQRLTIWRNRRIEHDLHTISRFVVDLLVAEGIGTLVIGRNAGWKQESNLGARNNQHFVQLPHARLIHMLRYKAEHKGIRVLLTEEAYTSKASFLDRDLLPTYQAGQEKLLAFSGKRIARGLYRAKDGRRINADCNGSYNIIRKAAPDAFEVEGVADGKCKVHLPVVHPVRMSFPHKAAHVKILTSVRIR

SEQ ID NO: 30748 - protein, 431 aa, Dictyobacter sp.
MRTYKYRLYPTRKQQETLQWTLDRARELYNAALQERRDTWAIIKHHPNFYDEEWRKQAIKDHGRSCYRQINELPDVKEVRDEYNDIYSQVLQETLKRVDKAYKAFFRRVQNGEKAGYPRYQGRDRYHSFCYPQSGFSLEGNRLVLSKIGHLKIKVHRPVQGTIKTCTIKREGDCWYVCFACEIEATLEKHTPYTDEAVGIDLGLCHFAALSTGDIIENPRFFRQAEKKITGMQQELARKKRGSKRRKKTVKRLSKAYRKVRNQRQDFLHQWSRCLVNTYETIVFEDLAPSKMSKAPKPKQEKETGVYLPNGASKKAGLNTSILDAGWSTFMNLCEYKAACAGVVQVKKVDPYKTSQVCSGCLHEGPHKDLSERVHTCENCGLVLDRDINAAMNILAVWNGLNLRPTPKTTKKKTQARTEPSEDAPLRSPRL

SEQ ID NO: 30749 - protein, 118 aa, Dictyobacter sp.
MVKNRSLSKAISDVEWSQFVSLLEYKADWYGRNLVKIDKWYPSSKRCFDCGYIFDSLTLEVRHWTCPECGVHHDRDRNAAKNIRSVGLTVLNACGESVRPGAVKTNSGKTQRSRKPKK

SEQ ID NO: 30750 - protein, 396 aa, unknown
  TnpB Polypeptide
MQLVERHIIKDNRFEAICLKSGLLYNYVLYNVRQGIFSGNYLKEYEFSTKLCKEDQIDFRGLPCSVSQQVVGQVFKTINLWIKQKKDFEKSPSKYNNRRPHLPRYKKGKKQNIVIFTTSACRLKKDGYIYFVKNIIQPIKTKIGDNKLCQVRIIPQATCYVVEVIYEKKEQDLNLNKDNVLSIDLGLNNLCSCISNVGLSPFIVNGRVIKSVNQWYNKRKAELMSYIGDREISNKIKRVTFFRNCWIEDKLHKISRFIVGFCSSNNIGKIIIGYNKEWKQEINIGKRNNQHFVSIPHSKLIDKISYKAKLFGIEVITHEESYTSKIDHLAFEPLKKQEVYLGKRKKRGLFQSSVNKLLNADINGAIGIGRKVFGDSFVKTIIDSGFAFNPIRVNIL

SEQ ID NO: 30751 - protein, 554 aa, unknown
  TnpB Polypeptide
MKEDTVSKKEETETPKFKIEGVFSVRVTDAKAKKALIHSIKYDASHARNMVLILRAQLYEQQKTCERAKELYSIFTRDNLLREAVYGRKGGKFAHLVLDLINHYKNNALFLQLAKFSQRQLDSKTFYGVLKSISSSFQQFHTNLKAYLANPGAYAAKFGNPGAPRPPKAKGLKTLSETSLALDGEKWSLKEKIVDKKTKEKRYFIRIKCAHKNPVLVPVNWKKFPLPAGKSLRALNINVSNDAVYLNFSYGQIQSGVEPKTNNILPLKKKWAAGDVGMINVLSLFVDDENTRSLLLCGNAYKNYNKQFNRHKAALDKKIAAQATRFKTVKRGDDTVKVAIKHSPLGESLKRTRTHLIECRNRYFSSEFDKLSRRVTNYLLNAKVTDFVLSKNLSFLKTSEEKSSLRSSTRQSFYHLPFGRLLNLIAQKCKLVGITIHFIDEAYTSKMSCFSADVRKAKALRLEKGRSLLTNDCKGSRVKRGLYRDHGTGLLYHADLNGSVNHIKIANNDCDPSYLINHKEKICTPLRIKSDYSFCRLNAVMSESKQYHCSEITA

SEQ ID NO: 30752 - protein, 317 aa, Vulcanisaeta sp.
ISIRFAKDTWSYEQFVKSIAPVRLSLSLFSSRREVWLRPHKRFWLFWWKVLTGEARLTSTLIIKRKTNKWYAVFVFEIKPRQETPQAIVSFDVNENTIAVAKVDLPSTVDKVADWNRQYLTPELYTIRTDFGRLARRYEAIRNTIIERLKPHFALPNGKYIDITNSREYKKFVRRLREDNRKLGRVRQIANELTKVPTLIITEELGKAPQQSMINEIKRSETRHRVSQIPFKTIEKLIEDKALERGSRMFKVSSHRNSKVRPEHFMMMRKTDDWHILQCPLGHYVNRDYASILNMLWKATPEGWIKGVWWNMRKKMD

SEQ ID NO: 30753 - protein, 476 aa, Escherichia sp.
VKRLQAFKFQLRPGGQQEREMRRFAGACRFVFNRALARQNENHEVGNKYIPYGKMASWLVEWKNATETQWLKDAPSQPLQQSLKDLERAYKNFFQNRAAFPRFKKRGQNDVFRYPQGVKLDQENSRIFLPKLGWMRYRNSRQVTGVVKNVTVSQSCGKWYISIQTESEVSTPVHPSASMVGLDAGVAKLATLSDGTVFEPVNSFQKNQKTLARLQRQLSRKVKFSNNWQKQKRKIQRLHSCIANIRRDYLHKVTTAVSKNHAMIVIEDLKVSNMSKSAAGTVSQPGRNVRAKSGLNRSILDQGWYEMRRQLEYKQLWRGGQVLAVPPAYTSQRCAYCGHTAKENRLSQSKFRCQVCGYTANADVNGARNILAAGHAVLAWWRDGAVRPPVEAGTHRNDSGDSLNVAGIHVLQGVEDVNIGFCQRLNSTPRNKRLRQLIPRTQNQSRPASIHLPLPEMPPPPRLAHAHYAAPDTNCR

SEQ ID NO: 30754 - protein, 433 aa, Streptomyces sp.
MSRFRMYPTREQEEQLLTHCAHARYVWNLAVEQHAHWRRWRKSAPGFAEQCRQLTEARRENEWLGSGNADVQQQALKDFARAKNARFTSGFGEPTWRRKHVHEGFRVIGTDRVPEYQADGSPKLNAKTGRQVMGRSVVVQRLNGRWAQVRVPGCGWVRFRLSAKGKGAKLPGAKTFRVTFRNGQWHIAFAVVPDPVEGPGTGEVIGIDRGVAVTAALSDGRKLNCPQLTTRERAQIRKHQRRAARAPKGSKAKTAEYAKAASLKAREADRRKDWCEKTSTMLARCYDLVRFEKLNIKTMTRSAKGTVERPGQNVAQKSGLNRAILAQGWGLLRQRTGHKAPGRVEDVPAPYTSLRCSACGWIDKNSRKSQAEFVCSSCGFTCNADTNASINIAAGQGGIPRPRRTAGAGGTTPPNQRSNVREPQPEWAGIPLF

SEQ ID NO: 30755 - protein, 396 aa, Thermoplasmatales sp.
LIFVGSFREDLFRIRIYEHVYAYKAVKQDFIASDNLIVLMHKFTGMVNLVIGIMIEKNLTSRNSVSREVYQKLKEYNMPSYYYPEAINKAVALVKTYRKRLKKKQKATIPHVYRPMLATYYGFRISNGNLMIPIAARTYESIPLNAYTRKVISAVKVHSFALSAYTLSLTIGREVDSVECTTTAGIDRNLRNATVGNEFHHDIHDLSEVVEIKQRYRSKKSHFHRSDKRIQKKIASKYGKRERNRTGQIIHETSKKIVMNALQRREMIVLENVKGLINITKKGDGRGNNYRFLLHNAFPYGMLASQIVYKGSWEGLPVIELTGKETRYTSKECSACGSLTRIEHDRMLKCDSCGLEIDRDINACINIAGRGRTRLKRSSKGLPAEAVKQSKDVEHL

SEQ ID NO: 30756 - protein, 385 aa, Thermoplasmatales sp.
MLFRTIKLKLPNDSSLLETGKQFRVACQMVLDYGFSDHTYNKNKLNRGTYKDVREAIPTLPSALVQDARDAASDALKATELKKKIHRKSLTVRYDQRTFRFYPDAHTISFSTVAGRLVFPVAQSPLIEKYRGEYTNAQLSIDVRHGKMFVMVQVKLPDQEVIQKENREIKVAGIDRGIKNIAVLSNNRFFNSKHLKSVKGRYRYNRKRLQHAGTRSAHKKLRELGGREIRFVHDTNHVISKQIVNLPYNVFALEKLETAKMKRKKKGQRFNNKLGSWSPSQLGQFIRYKALDTGKVVVDVDPRYTSQKCSRCGYIDKKNRNGSIFHCLNCNLELNADLNAARNIGVLGKSGYFRLLSTSQSPRFNESPLTGRGETSGKLRSFSEE

SEQ ID NO: 30757 - protein, 454 aa, Escherichia sp.
  misc_feature (89)..(140): Xaa can be any naturally occurring amino acid
VKRLQAFKFQLRPGDQQECEMRRFAGACRFVFNRALALQNENHEAGNKYIPYGKMASWLVEWKNATETQWLKDSPSQPLQQSLKDLERXXXXXXXXXXXXXXXXXXXXXXXXXXXXXXXXXXXXXXXXXXXXXXXXXXXXAYKNFFRKRAAFPRFKKRGQNDAFRYPQGVKLDQENSRIFLPKLGWMRYRNSRQVTGVVKNVTVSQSCGKWYISIQTESEVSTPVHPSASMVGLDAGVAKLATLSDGTVFEPVNSFQKNQKTLARLQRQLSRRVKFSNNWQKQKRKIQRLHSRIANIRRDYLHKVTTTVSKNHAMIVIEDLKVSNMSKSAAGTVSQPGRNVRAKSGLNRSILDQGWYEMRRQLEYKQLWRGGQVLAVPPAYTSQRCACCGHTAKENRLSQSKFRCQVCGYTANADVNGARNILAAGHAVLACGEMVQSGRSLKQEPTEMIQATA

SEQ ID NO: 30758 - protein, 406 aa, Brasilonema sp.
VLYKAIQVRLYPDKKQQIQLAQTFGCARWWWNYALNKSIEAYKDTGKGLGRSALNALLPTLKKAEETEWLKDCYSQVLQATTLNLTTAYKNFFEKRAGFPRFKSKHGKQSIQYPQYVKVVNGNVKLPGNIGEVKAKIHRPIEGTIKTVTVSKTPAGKYFASILTEVEGETPTTTQGKIYGIDLGLKHFAVVTDGEKVSKYDNPKHLAKHEKNLKRKQQKLARKQKGSNSRHKYRKVVAKVYERVSNSRQDFLHKLSYKLVSDSQAVIVENLYVKGMVRNHKLAKAISDVGWGTFINFLSYKLERKGAKLVEIDRWFPSSKLCSNCFYQVSEMLLEVREWTCLHCGTHHDRDGNAAINIRSEGIRMLKADGSAVSAVGGEVRPRLGRKSKLRHSPASTEAPSAYAAG

SEQ ID NO: 30759 - protein, 449 aa, unknown
  TnpB Polypeptide
LWERGKKMRTVSSYGVEIRKQNIPVRQTMEIYRQAVGYLTEIYAQVWEELRKIPETKKRFNTAEHMVHMTKKNTARFDFDLRFPKMPSYLRRSAIQHALGSVSSYETRLEQWTKTGKLTGKPRLSCENHAMPVFYRDVMYREGGEGKDEAYLKLYDGHDWKWFRVCLKHTDMEYLRRNWKGKKASAPTLEKRQRRYFLRFFYTEEVTLTKTAVEEQIICSVDLGINTDAVCTIMRSDGTVLGRKFINFPSEKDRMYRVLGRIRRFQREHGSRQVQGRWAYAKRLNTELGKKIAREIVFYASENRADVIVFEYLEMKGKLSGKKKQKLQMWRKRDIQKRCGQQAHRKGIRISRICAWNTSRLAFDGSGKIDRDIQDHRLCTFQNGKRYNCDLSASYNIGARYFIREILKPLPATERSLLEAKVPAVKRRTSCVYADLRDLISEMELRKAA

SEQ ID NO: 30760 - protein, 369 aa, unknown
  TnpB Polypeptide
MLKAYKYRIYPNKQQIEQIQKTFGCCRFVYNQTLAYRKEIYETKKESMNKTSCNNYCNQVLKKEYEWLKEVDKFALTNAIYNMDSAYQKFFKEHAGYPKFKSKRNSKKSYKTNLTDKNIEVSFEKNKIKLPKLKWVKAKAHREFTGKINSATISQVPSGKYYVSILIEEEHTPLNTTDSVIGIDLGIKDLLITSDGEKFKNIQTTKNYADNLAKEQRKLSHKVKGSNNWNKQRIKVAKIHEKIHNARIDNLHKISHKLISENQVIVSENLSVSNMVKNHNLAKSISDCSWYELTRQLTYKAEWNNRQYIKVDRFFASSQICNCCGYKNKQTKNLLVREWICPKCGTVHDRDINAAINILNEGLRLLNAA

SEQ ID NO: 30761 - protein, 364 aa, Vibrio sp.
MKEIAIKQRFYPTDEQAELLARTFGCVRTVYNRILHWRTDAYRNDKIKVNYSAASSRLTELKKDPELSWLNDVSCVPLQQSLRHQQAAFKNFFEGRAKYPVEKKKRHKQSAEFTKSAFKFRDGQLFIAKSKQPLNIRWSRELPSEPTTITISKDTAGRYFVSMLCRFEPKPMPVTAKTVGIDLGLNNLFITDSGEKVDNPRHFKHYQNKLAYLQRQLAKKKKGSNNRAKVRQKVARLHAKIADSRLDNLHKLSRKLINENQVVCVESLQVKNMLRNPKLAKHIADASWGEFVRQLKYKAEWAGRTIVEIDRFFPSSKRCSCCGFVHESMPLNIRNWTCPECNTHHDRDINAAKNIKTAGLAGLA

SEQ ID NO: 30762 - protein, 544 aa, unknown
  TnpB Polypeptide
LPSSALSAKTKVPQYMRSYLFKVDARCNSAKLQKLDDLNREWQRLLPVVGEHLWTKFLQGQRPDKSLSSTAGVDSVFGSTPLVTSVKQCMAVAIEGQLKTWRANLMKRLTRLVMRSQHYRDAPELRHELLWLNRMQLWLVPLAEQQAVLAAAGGKTQVKALTGRPSRLLARYVRAYLHKFKSPCFSHLPLQVNQMSSVWAPATHSRLEGVSFWLRLSTLAKGQRIELPLRDNAYARQFKGEQALTFSLRKTGDNWFVKVCKKFVKAPSREGVVMGLDTGMVNLLATSHGAIFGQSFNLKLKRWDDRLQALTKGLQAAGQHKLSDCRRYRDFVQRMRGWLTSEVKGAVNRALALGKPGTVIVEALNFSAQPGIMSKKMNRLVRRMGTGIFKQALEQKAESQGFKLVEVNPAYTSQECGSCFFISRKNRQGNKFKCVCCGKQAHADAQASRNLVERFNQGRVCEFVRHTELGRQGLEIWAKRMLARVERATPGTLRHQGVIRDVRAGLKHLADKSLSLASIKELQYLLSGLSIAVGSKPLNQLSTR

SEQ ID NO: 30763 - protein, 385 aa, unknown
  TnpB Polypeptide
MYLVKLFSDILPNKKRGGEKMQITVKIKLQPKKEQSKLLKAVMSEYIRLVNQIVSDFVSANAHLKYSSKNVVANLPSAVKNQAIRDAKSVFTKYKKAVKASAKLKPEEQKEIKVPTLKKPVVIWNNQNYSLKGNVLSFPVIMGSKSQRLEIEAILTNYQQERLIGKLGSLRITQKSGKYIAQIAVEATEQPNKADKIMGVDLGLKVPAVAATESGKTKFFGNGIQNKFIKRKHRSVRRKLGKLKKLAAIRKRHDKEQRWMKDQDHKISRQVVNFAKGNNVAIIRLEQLSGIRQTARTSRKNEKNLHTWSFYRLAQYIEYKSLLAGIKVEYVNPKYTSQKCPVCGELNKANDRKYKCGCGYKTHRDRLGAINIISATMIDGNSLSA

SEQ ID NO: 30764 - protein, 381 aa, unknown
  TnpB Polypeptide
MIKAHKIRLNSSPEQELYFRKAAGTARFVYNWGLAEWQHHKAEYPGQEHGVMAIKKGFNALKGQQYPWVYEVAKDVAEGAFTDLSAALKNHFDSRNGKRAGTKVGFPRFKSKKDRRQSFHLNNDKFKVSDHSLYVPKLGWVNMAEALRFEGKIMGAVVSKEAGRWYVSISVEMARPVSFIFLRDSAGMDLGLKRLVVLSDGTQYENQELLRSELTHLKRLSHHLSRRQMGGQRWWKAKDQLARFHARIANRRADILHKLTTEIASTYAVLGMEDLNVAGMLRNHRLALSLADASFGEIRRQLQYKSDWFGGRVVRIDRFYPSSQLCSVCGVKNPGLRLEDREWTCQNCGLHHDRDINAARNIHAEALRLLDQTPVVATSGS

SEQ ID NO: 30765 - protein, 396 aa, Thermomonospora sp.
VAVRRSYKFLLRPTSKQAAALTACLEDHRQLYNAALEHRRTAYRKAGVTIRYGDQSAELKHIRADDPDGQGRWSFSSQQATLRRLDKAFAAFFARVKAGRTPGFPRFKGRGWFDTVTWPKDGDGCRWDSQPEHPTATFVRLQGIGHVRVHQHRPVKGRVKTISVKREGRRWYVILACDDVPAKPLPAAGAVAGIDLGVASFVTTSDGAHVANPRHLTATADRLAAAQRDLARKKRGSARRRKAAARVAALHAKVRRQRCDHAHKTANALVAAYDVIVHEDLRITHMTRSARGTIDNPGRNVAAKSGLNRSILDAGWGVFLRVLAHKAESAGRELIAVEPRNTSRTCSRCGHCAAENRLTQAAFQCTACGHSAHADVNAAVNILRAGLALREAAEAA

SEQ ID NO: 30766 - protein, 268 aa, Clostridiaceae sp.
LYIPIPDEYKKFEGNPKIIEIIPLGGMRYRVNMIVELPKKGYKPDNGVYMAVDLGIKNLITCHITTGKSFIISGGQLLSINRCFDKKTGYYQSMAYAQQSAMGNKYPKETKRIKQLYIKRRRQVEHLLHAAAKKVIDFAMEENVSRIIIGDIEKIREGKDIGRVNNQKFHKWPFKRIKQMLIYKAEDKGIKTEMQEESYTSQCSPYSATISEEFAQKGNRKHRGLYEAEGKAYNADCVGAYNILRKYLCGIGRPSPAIVGLDIPMMYR

SEQ ID NO: 30767 - protein, 319 aa, Clostridioides sp.
VIAVKKAYKFRMYPNKKQQELINKTFGCCRFVYNKYLAKRIDVYKNDKETFTYKQCSSDLTNLKKELKWLKEPDKFSLQNALKDLDNAYKKFFKEKAGFPKFKSKKINRFSYKTNFTNGNIMYCGQHIKLPKLGIKEFCISSCGEFIENPKYLKKSLNKLAKLQRELSRKTIGSLNRNKARLKVARLQEHIANQRNDFLQKLSTKLIKENDIICIEDLQVKNMIRNRKLSRSISDVSWSEFIRQLEYKANWYGRQIVKVGKFFASSQICNKCGYKNEEMKDLNIREWIYPSCNETHDRDINASINILKEGLRLITIQNK

SEQ ID NO: 30768 - protein, 416 aa, Massilia sp.
LDLRGGGRPRLRHELPRAGIEKTARRHSRRWRRPHRAHAQGPSAALRRRAGVRPTRGEAGRSCHHQPGQAKQLRGGAGPRCVRDRHCVLRPAVRKPKPQEPQADRRGVQGRTGGTVLAAHRIRLAPNNAQATHLARAAGTARFAYNWALAEWQKQSLARQNNPALPAPSQLSLRRQLNAVKRDQFPWMLEVTKNAPQMAIIQLGQAFENFFSKRACYPRFRRKGRDDRFTLSNDQFAVEGQRIRIPKLGWVRMREALRFTGRIVSATIARRAGNWYASLTVDTLEDQPLPTAENQGAVGVDLGISTLATLSTGEKWPGPKALRALLARLRRLSRALSRKVKGASNRACKLASLWDFPNCAASWNTRPTGAVARWWSRTAGTRAASCARAVGACWKRSPWERGDGAVQAVARSTTAT

SEQ ID NO: 30769 - protein, 436 aa, unknown
  TnpB Polypeptide
MITVAHRIQLMPNNKQKTYFRKAIGCCRLAYNWGLAEWKRRYKEGERGLSGRKLRNDFNAIRGEQFPFTYEVTKYATAHAFDDLQTAYTNFFEHRADYPKPHRKKDGEGSFYVGADQAKLSDTHKGLKHLKKVVHNVGGKRQYVNIPNLGYVKMSERLRFNGKILGVKITQDGERFFASFQVQITEEEYRRTHPETSREKHGAVGIDLGLKEAMMLSDGIAVSNPRTLRKHQRKITRLSRQLSKRQHAKTKQERLQGVKRSNNYKKLSRSLGKEQRHVASIRRDFTQKLTTILTTTYEAIAIEDLNVKGMQRSKLAKSVSDMAFGELRRQIEYKAAMNGVRVEVADRFFASSKTCHVCGHKHDDLTLRDRTYVCPHCGTVIDRDLNAALNLLSLITSKVGTDYPELTPADLTALHSRFTLNGIATSKVETGRQRKL

SEQ ID NO: 30770 - protein, 258 aa, unknown
  TnpB Polypeptide
MRKDASERVPFNLNPAKKEGNCVCAVDIGINTLATVSIVYPDGTVTARKFIHPSVDIDRRDKRLTRIRKKARLTKNLHKGFCSTWYRKARNYNQNIAQQSSKQIVDFAQQHGASVIVFEQLKGWRPKGGRKKSTLKQRFHGWLPRALVNLTQEKFVEVGGKVEFVYPRGTSSFAFDGSGKVKRSKKNYSLATFFSGKQYNCDLSASYNIGARYWAPKLKLIRRNDGQLDDGKSSSSKRRTPVTLSVLWKDKEAPTTSR

SEQ ID NO: 30771 - protein, 453 aa, unknown
  TnpB Polypeptide
MKHKSMIDDLKSTTTHIYTRRYGCSLTAQQLEIHNRGLETQDKLHNFTLHYLEKTYGRKHLYRNIPKGEARHYLVNLIKDKFRTEQYERLNCEKKRWNADVLELSSQSANAFIENLIVQFTKHQKAIRKSQHWPKKRKDQYRKEKNREWFRHHAIGYRKQSRTITVQGNNSVEVISDHHIKIPDFGIVRVRENIKNLKGRKISTIRIKKNKNDTYEFQIVFQDQHERQEIDINNDKEYAGYDWGMLNNEIWHGTDGYVIVLDPEVVEKANAYEQRIKEYNNLLQTPMSAVNRETLLNQRRRAFAKRTNLLNEEYKRHARLLLDSNSMIVIEDLNSNSMRDESDKKTKQSKGLNKKLATVKPATMRDFIIQRANKTGKTVVLVNPKFTSQIEFGVIHEPKKIPLDVREWISEFTGRLIKRDYNAAWNILFWGLYPMFHYLALKGESVKTLSRTN

SEQ ID NO: 30772 - protein, 283 aa, unknown
  TnpB Polypeptide
LCLQNDKTVHSEIKIPFPERLRGKIIKEVRILPCFGAKFFKIQYVYEAEQEIKQLNNTKFMSIDFGLENLTTCVTTDGASFIIDGRKLKSINRLYNKEKARLQSIADKQGKKYTKRISRITEKRNNRVTDYMKKTARIIIDYCLEQQIGTIVVGYNLDFKRNINIGKRNNQNFVQIPLGKLREYLKNLCERYGIRYIEHEESYTSKASFFDGDEIPKYNADNPKEYKFSGKRIKRGLYRTKSGKLINADVNGAYNILRKSNLVDLSDLQARGCLDHPQRIRIA

SEQ ID NO: 30773 - protein, 415 aa, unknown
  TnpB Polypeptide
MTLTSQTIIKHSSEYYKMFDEMCFMAKNLYNAALYKVRQAYFEYEATMSYESLDKVLKREGSADYAAMPMASSAQGTLKLVMANWGAFWEALDAYGEEPGRFTGRPKMPGYLPKTDGRSVVYLTNQNAKIRNGVMRFPKSFGGFTLPVALGGGEVQQVRIIPKNRHYVVEVVYRRPDVPMLADNRRYIGVDLGVDNFAAVVSNDGSQPVLINGKGLKSLNKHWNKRVSHLREVETAMNGVWVATSIGRAKVSKQTKQQSNLTNKRNNQVKDFCHKASKKIIDMAINRGCNTIVVGKNDGWKQESKMGKIANQTFVQVPYAVFIGMLEYKCKKHGLRFEVTNESYTSKTSWLDAEAPQHHESYAGKRLKRGLFQSSSGELINADVNGALQIIRKVFPKAKADGVWAYGQPARVNII

SEQ ID NO: 30774 - protein, 404 aa, unknown
  TnpB Polypeptide
MLVFEFKAYGKSSQFAAIDDAIRTAQFIRNKAIRFWMDNKGARQNDLQKLCAVLAKEFPFANELNSQARQASAERAWSSISRFYENCKKAIPGKKGYPQFQKDCRSVEYKTTGWKLALDRKSIKFTDKKGIGKLKLKGTRDLHFYQISQIKRVRLVKRADGVYVQLCIDVDRKENTEPSGNTIGLDVGLKEYYTDSNGLMVENPKFLRQGEKVLKRSGRRISRKVKGSKNRCKARQLLGKRHLKISRQRKDHAVKLARCVVQSNDLIVYEDLRIKNMVKNHCLAKSINDASWYQFRVWIEYFAKVFERVTVAVNPAYTSQECSSYGAIVKKTLSTRTHVCQCGCVMDRDFNAARNILSRGLGTVGQTETSRLNLRNACGEMISTDTGEILYQQIASMNQESQWL

SEQ ID NO: 30775 - protein, 417 aa, unknown
  TnpB Polypeptide
VGEFVLSIKFDMKINQSFRYELNPNNHQKGLLMRCCGVARFTWNWGLARQEELYRTQIGKDKFVSAITQHRELNLLKNSEFSWMYEVSKWIPQESLRDLERAYVNFWCGKNNDDIVGLPKFKKKGQRDRFRIAGVKIQDNGIHLPKIGKVRTKESTAKLVGRILSATISREADDRWYCSLCVEVNRKEIKPSTDEIVGIDLGITDFAVIFNGEEYSHKQSPRPLRIKLKKLKRLDRQQSRKQLGSNNRKKANLRLARLHRKIRNIRKDYVNKLTTQLTKTKSVIIIEDLRVKKMMKNNNRHLSRSISDVGWGEFRRQMEYKTVWYRSRLIKTPKSYPSSKMCSVCGYINDELKRSDGVWICLECGTNHQRDENSSTNMRNYGLRILSTESCSGSYACGETVRPIGASLAEAGIERVQ

SEQ ID NO: 30776 - protein, 528 aa, unknown
  TnpB Polypeptide
VQRHGRIQRRSRPSRSEQSRRSLQKRGRTLEARKGRSKPRFTSPHVVYDHRTATFHDDYVSLATTDRRIEADYILPDDDSDTPHSKYLFSDEYEITGAELHYRDGEWVLHIHCKKEVESDTSEKATPENGTVLGVDLGVNNLAVTSTGMFWTGNEFDHWRREYEKRRGDLQQCGTRWAHGNIQFAGGKEDGRFKSLLHRISNELVGEARENWCSVIAFEELTNIRERTGASWGHKWAFNRLSEYVEYKAEEHGIRVEQVDPENTSRRCSHCGFTHPDNRTGEEFECQKREYENHADYNAAKNIGLRYLRRNQTGDRGGAPLGVRLNSGTLNVNGGYSPASTESERESTLNPTRLRVGSSNTTLAGRNAYRTTLFSHGEHPPAVGGERGTTLMTELNDSRNRDRTGYDPMTDTYHHQYDWDSPERLSSAIIAAVATVADTEPTELEPLYDCVDPDALDALFRPLSEDRPRSHGRLSFSLDEYEVTVQDHGEIIVDVSDINTSGGGGGRAAIKTRRGRPVFDHSQQFILA

SEQ ID NO: 30777 - protein, 414 aa, Streptomyces sp.
MIVKLIVQVRLLPTPVQAKVLEATLQACNEAATWCSRVAFDKDVKRNFALREHAYGEIKARWNLGAQAAQHVIKKVCDAYATLKANLKAGNLGRPGSRRYRRATEKPIAFRTEGAQPYDDRMLSWRIPERRVSIWTVAGRVKDVALTASPEQLTMLALYRKGESDLVCRDGMWFLLATCEVPEAPPNTDPVDFLGIDLGIVNIATTSDGEIMAGRDLNRARLRERTLRTKLRKKNTPSAKRRLKKRRRKEARRAKDINHKIAKHVVAEAERTSRGIALEDLTGMRERVRLRKPQRATHSSWAFAQLGQFIAYKARRAGVPVVYVDPAYTSRTCAECGHVDRANRVSQAWFACRACGFVDHADRNSSRNIRARARELWRCGAQSTVPAPPPRQRDRAGRKRSITPSDARCASPSL

SEQ ID NO: 30778 - protein, 432 aa, unknown
  TnpB Polypeptide
MKSMNKLTYNRGLLVRAYLSDRQKICVKKNGGVARFVYNRLVAVDREKHKLVKTLPYSPTDRARMSYLKDAYATTAALRNAVPFLNDPLVDGYAIANAKKDYSRAWQQFKKVKGTSIPTFHKKDGTYSYGTNCHYDKKLNNDPTVIGLYEGSVRFIDKSHVILPILGKVRIKGSDKEIKSVLNRKSFTRIGTVRITLDSCGNAYLSFSLASDIPFHIAYPQTGKAVGIDVNLTNFLYDSDGMEVLSPKYLHKAEKKLKKAQRKLSRKYESAKKDGRDYRTCKNYQEQRLKVAEIHKHVANQRLNFIRNVADMEVKNHDYLFAEDLKVRNLIKNHKLAQAISDSGWRKFLTALEWGSSKRGKLCLLVNPKSTTQTCSACGYVSHGDTRIMLGQEEWDCPKCGTHHIRDYNAAVNIKNTGLLILKEAGVPITLS

SEQ ID NO: 30779 - protein, 243 aa, Nostoc sp.
LSRRSKATKKKGSRARRKLAKREAREHQRIARARKDHAFKTAHALVRTGKKVFVHEDLNLKALSKRNKAKQDEDGSYLPNGQSAKSGLNKSWNDAAFGNFFKVLEYIAGKAGARTIAAKPAYTSQLLAYRDEFIFTDCNIREYWDEKELLIVDRDINASINIKRVGLGLFPTIKRPRGNLVVTESTTNSTSKEVLETLKMCQKPTSTRQGDVGSSLNISIKPRSSDTLLSYLIGISGLETQAQ

SEQ ID NO: 30780 - protein, 393 aa, Nostoc sp.
MYSLKLELKLNNKEKTRLSGCAGFARFVYNYGLSMLVQSWEFEGIKASDSKRLSAIEKVFTNYVKASPDYAWMQQYPSAIYSSAFRNLGKAFDRWRKGESDFPRFKSKKRGDSFTVLKKAGIYPTKGEPMLPFSNRQVLYPGKQITVPGLGSFRLKRAIPFLCSSQTFTISRTAEKWFVAFMLDADVIPPIIHPMESVGVDLGIKCFATLSDGTTITAPPQLKIAKIKLSKQQWHNRNKQFGNRKKAIRASNKAKQYFGEIAKTHAHLANIRQDFLQKTTTDISRNYYRIRIEDLNISQMMANHKLSNAIANLGLYEFRRMLTYKQPFFGTRVELVDRWFPSSKTCCECGHIQSMPLSERVFVCEAGCGNIRDRDENASINLRDAPFDKIRLA

SEQ ID NO: 30781 - protein, 402 aa, Nostoc sp.
MRLAYQYRLRPTKQQIATFENWLELCRRQYNYRLAERFNWWEQNRCNVDRCSIISCGIAPLKDKPSYYSQKRDLTNTKALFSDYKEIPSHTLQDVIARVEKTFDRWLKGDGKGFKSGRPRFKGKGRYHSLAFPDPIKPEHLTGKFIQLPKIGKVKMILHRPIPDGFKIKTATITCKADNWYISLSLEDVTVPSTKVDVIPALDNTLGIDMGLKSFLVTSDKQEVEIPRHYRKSEKKLKRLQRQLSRRKKGSKRRQKSIKRVAKSHLKVANQRKDFHYKTALCLLKQSQVIAHENLNIKGLAKSMLAKSVNDAGWGQFLQILNIKAASAGCLIVAVNPNGTSQECSDCGATVPKTLADRWHSCQCGASYDRDHNAARNIKHRAVGHPVLSKAREMSNPLGGVT

SEQ ID NO: 30782 - protein, 392 aa, Nostoc sp.
MLVLEAKLKGKESQYSLLDEAIKTALFIRNKALRHWIDNKNVGKNDLQKLCAVLAKEFDFADKLNSMARQASADRAWCAIKRFYDNCKTKKPGKKGYPRFKKRGHSVEYKTSGWAISADKKYITFTDGFKAGRFKLVGTRDLSFYSTKQIKRIRVVKRADGYYCQFCVDVERKEQHQHNSKQLGIDVGLEFFYTDSDGKTVENPRLLRKSEKSLKRKQRKASKCKKGSSNRRKAVRKLAKKHLKVSRQRKDFAVKTARTLVQSSDLVVYEDLQVRNMVKNHRLAKSISDASWSLFTDWVDYYAKVFDTWAIAVAPHYTSQDCFVCGTRVKKSLSTRTHRCNCCGTVMHRDLNAAKQILAKGIKNTVGHTEINASGQTNLYLGGETPLDKLTG

SEQ ID NO: 30783 - protein, 516 aa, Nostoc sp.
MSLIQNLGGDKTVAKSKTPSFVTTISLVVDSKQESELLARFQASRQLYNACLNEAVTRMELVKNSDIYQAARKLPREQKKQRSNMFSEARKLYRYSDYELQAYATLVSNKSKWIADKIDSNTQQTIATRAFRASEKVLFGLAKKVRFKTSNRFRSVEGKTNKQGLRWKDNQVVWGKLRLNSIIDKFNPVIQHGLNSPVKYIRLLWKEINGKRRWFIQIINEGIPHQKPQNYVLEGTIGLDLNISNIAFVSDNQAGLLPFADKVPNFQKEITRLQQKMQRSQRANNPDNYEPDFLAKKGRKIVTKKGKVKKGNRRWNKSKSYKKVAQKKRELERRKTSYAKSQNRKVVNEVLRHGSIIKTEKVSVKGWQKRYGKAISAKSPGFVQSELKRKAESAGGQFITFSTQKTALSQTHLDGSRIKKSLSQRVHRDVTGVVMHRDIFSAFLSRYVNEDQLSLQDAQYEYPRLESILKSAWQQYRINCEQVSASESRLSHLPSEQFDLQGKSDNQIAVKREKLS

SEQ ID NO: 30784 - protein, 405 aa, Nostoc sp.
VLTAIKVRLYPSDEQQVALSKSFGCARWYWNYALNTCIQHYENTGKALPIKNYKGLLPQLKVEYPWLKSDCYSAVLQCVAINLNKAYANFFEGRAKFPRFKSKNHRQSIQYPQNVTIVENCLNIPKIGEVKAVFHRVIEGKIKTVTISKTPTDKYYASILVENDGENIQTSGDKTIGIDLGIKDFAIIHDGEQVTKYSNPKLLLRHERNLARKQKKLARKVKGSKSRNKFRKLVAKVHERVSNSRQDFLHKLSRKLVNESQIIVVENLNVKGMVRNRKLSKSISDVGWGMFVNFIDYKLKAKDGQLVEIGRFFPSSKTCSCCGHIVDELPLDIREWHCPACKNHHDRDTNASKNIRAEGIRILSMGGGNPVLAESRRRKTNKPQGGKAVVNETGSPHLLRQQKCG

SEQ ID NO: 30785 - protein, 367 aa, Nostoc sp.
LHSQAAQQILRSVAESFKSFKELDKNYSKSELHFRPKLPKYRKGSGYALVTYPKLALKLVGNNIKIPLGNTVKRWFKLDSFLIPMPSNLRFVDIKELRILPRNQCFYAEFVYEQESAQELGLNPEYALAIDPGINNWLSCVSNIETSFIIDGRKVKSLNQWYNKRVSTIKEGKPQGYWDDQLAHITEKRNRQMRDAVNKAAKLVVNHCIEHQIGTVIFGWNQGQRQEARLGKTTQSFVQIPTAKLKERVKQLCEYYNINFVETEESYTSKASFLDSDFLPIFGAKPEGWTPSGRRVKRGMYRTSKGILINADLNGAANIMRKVETQLGLSLVKVCRQVLTLATRFRIWETKTKKRRGTASASLVATV

SEQ ID NO: 30786 - protein, 542 aa, Streptomyces sp.
MGGLREVAAPFVVPSPTGVVVRTRLKGLTPEDEEVLRLMGAHLGSLASRDLKVRCADGPGHSAETWAVRKRELTPLSSSRWAGSITKATHDQWALARRGQAAHVQSLEAGIRTIKHRLSLPLGEKGTKRAPGGYRSQGEWFHKSRRLHVLQDRLTAVRTDREAGVVRVVRGGRRLLTTRHHLEEARLTETQWRERWEAGRWFLQADGESGKRYGNETIRIAPDGEVSIKLPAPLAAHANSGHGRYVLAAPVFFPHRGTEWADRVEANRAVAYRIHHDTARGRWYLTAAWTFPVTRTIPLAAALAEGVIGVDTNADHLAAWRLDRHGNPVGQPRRFLYDLGGRADHRDAQVRHALSRLLNWAKTCGVKAIAVEDLDFTAEKTREKHGRKKRFKQLVSGMPTRKLRARLTSMADRTGIAIIAVDPAYTSMWGAQHWQKPLTTKTRRTTRHDAASIAIGRRAQGFPIRRRTAPPRDEQSDRRGHRTVQARPETLGREGPRLRVPGPRTRCVPPDAARTRATRTPNTVRDARSDQAWVQDPLLLTE

SEQ ID NO: 30787 - protein, 395 aa, unknown
  TnpB Polypeptide
MKTILDSLCDYRRYCWNQGLELWNTMYEARLISLPVELRAKIKASLTDKTIKFSKEEQVLRALFPAPSHYVVLNELVAQKADWQYEFSARVLQQAIKDLVAAWNLFFNNQKTANKPKFQSRKKPKQGFKTDRARIINGRLVLDQPHAYKGEWSSIRFKGAHIPDGKLKLCAVTRTKGKYIATITMDVEPVVLPKMDKKTAVDANVDHFDTTEGQTSLKPEVLDPLYERVRTYQRQLARKRNVNKNYRNSKGYQATRAKLQATYERIRNIQNGLLHKFTTDLYRQNDTVVIEDLDVKGMQMKKKAKNLHRSLFGRFRRFMEYKAEKFGKTLIIADRFYPSTQRCSACGHVKTGDEKITLSGNTKYGTKHHEYVCYHCGYEDDRDHNAVLNLLALAK

SEQ ID NO: 30788 - protein, 403 aa, unknown
  TnpB Polypeptide
MASGDEGALALSIGVRVSPEPEAMELLRKYNVALDYAINKILRLNLKKIGEIHNALYRELKEWFGLPSRVAVDCYRDALANANAWRNNPRRGRRPRVRKLSMLLHPGSGYRVKEGYVEIIGGIKLKIIGWDRRYDGYENGEARLVYRDGKMILWISKKIPKPKPYQPRDVIAIDINERKIVYGDDRINKERDTEIGEAHRWKKLAENLQKRYSSPRYPAWKRRRGILNRIRSYHRKARDILEDWARKTSLEIVRFAKKLGYTVAREDLTGLINSLRKIKNKDHRTKLIIMGYARLGKWIDWQAMKHGVPLAIVNPNGTSSECPKCGSKDLEENGYRRLKCPRCGFEVDRDVVGKLNIRKRALKKLGINPPGGVLAPLTAPQMTDVAPNRWGEPMNRPKGTPAL

SEQ ID NO: 30789 - protein, 368 aa, unknown
  TnpB Polypeptide
MNDLQPKRKMAKRKPKDPDKVTTTLRYRVKDAAELSRLDKLARAVNFVWNYCNDTSFNAVRNHSKWLSAIDLKNLTSGSAKDLGINSVTVQSICEEYVIRRIQFKKRKLRWRTSRGSKRSLGWIPFKANSIQVTGDRISYLGHSYRIWLSRPIDGRVLSGSFSQDAQGHWYVNIACEVAKLNHGHHVEEVGIDLGLKTSAVLSDGNVIENKAEFRKLEEKLGKAQRANKKKQAKKIHAKIKNKRRDFLHKETTKVAKKYNTIFVGDVSGKFVQSGNGKSSTDASIGVIRDLLKYKAIRHSGYCFEVNENSSTVTCSTCHKKTGPSGLSGLGVREWICSECHVHNDRDVNAAKNILRVGRDSLRAAKAA

SEQ ID NO: 30790 - protein, 422 aa, unknown
  TnpB Polypeptide
MRRVNTFEVVPQTENDKECLFRLLDASASLWNELTYERRQNYFGDGNVWDTSEYRGRYNGVVGSATVQQVTRKNSEAWRSFFSLKEKGENANPPSYWGNKENGRELRTYIRNNQYTIQWGKRSRLEIPVGQELKNEYGLGYHERLRLKVRGKPKWKGDQGRLELEYDDINNTFRAFQPVDVPDSRLDSPLASEKAALSVGANDLIACSTTTGKQYIYSGRKLFRRFHKTTHEIIRLQSKLEKGQYSSKRIRRLYRKRTSRRDHAQNALVRDLVERLYYDGVATVYIDNWTQIVKTHWSVNMDEKTHSFWPFKAFIHRLACVCEEYGIGVEVQSEAWVSQRQCLDCIEEKTDRHKDTTVSQCEFKESTALKTSKTFLQDNYNNKIGLMAQPVRFEWDNHKWSEKHHLSLNDGCTNPKVTSMGQ

SEQ ID NO: 30791 - protein, 509 aa, unknown
  TnpB Polypeptide
VKYYDTVTRYRFTSDGGVDVEQVERDLAQMVTWVAQAEREALASQEFHDLALKALKGDRPTGSLNSWGRKRLSRYDFSFQKHNMNEMLASNVVGTLELYAMSVGLFHVMSTHLSTTKPDQILSHYKGTYPDAPCPTSGMVRAHLIRYHKKGERKAPLPGVSAKLNLAVCDTYFAPKTFRDDSDPLNVVVLVKTPTYGITKISLRLPDSIERFGTGKVCRPTIRLNNKGQVVFDVAIEHEVDTRQTKRIMGVDLGKVEPFVATIINPENKYRSAPYHANYKRRLGSLVKAEKKRRDLASHLYERAEICSIRNRIEHADVLRTEAKRVSAKATRIKHEISQCVASQVVEIADQNNAHLSLENLSWLDAKGGRWPHAEIQHRIENTAKRYGLKVTKVSAKDTSKTCSRCGGKVSNNPKTRIGTCIVCGFSLDRDVSASREIGLRAVSNARNRERMRCLLRQRALERSSAVTRQSKPVTALGGIQGYTGTSERKSEATLMMVREPLDSRGSPT

SEQ ID NO: 30792 - protein, 379 aa, Aigarchaeota sp.
MQKVQLTYKFRLYPKKGQDERLLETLELCRQTYNYFLAQWNGKQRIPSRLELQAQLPKLKAERPELSKVYSKVLQMVLHQLYSNLKALSRLKRNGKHVGRLRFKGKGWYKSFVYNQSGFKLIKTGKRLDLLHLSKIGDIPIRVHREVEGEIKQIIIKRHNSGKWFACLCVEREIAVKKAEHKRAVGIDVGIKHFLTDSDGRQIENPRFYQKTLDRIKILQHWLSRKKKGSRNREKMKVKLAKVYERLVNQRNDFLHKLSRFYVNNYDVICVEKLNIRNMVRNHNLAQRILDASWGKFIRLLHEKAERAACVVVDVPPRGTSEGLGYEDPYRDWISACRIKMRGWGSPDPPAEVEPLRELIQVPASFIFEAGSPLAFSRG

SEQ ID NO: 30793 - protein, 402 aa, Aigarchaeota sp.
MKVGVGEEEMEAVKAVAFKHNVNVKPLLQTFNDMVKECIRYALDHNVSSPMKVERALYDEFKRRYGLATHYCISASRVACGVIRSWKRLVKKGRADPSDPPTLDALSMRLQKELMRFKGDRIVITTRPYHHVEVPLIVGSYQKRFIDAWRNGELSLGEVTLLEDRAVIAFKKTIEEKTPKGYASIDVNLMSIDFLKVKGGLAEYRKVDLKKLYGIRVHYFEKRRKIQSFSKYNPITSKRLMQKYSRRERRRVNDMLHKVTTSIVKELSQEGLAPIFENLKGLSYNATRNRYAKQKNRKVASLPYRKVQNFIEYKMAWLGYRTHYVSARNTSKTCPRCGRLSKADGQAFRCVHCGYEADRHFVACVNMLRMWGHGFAPKALDEMIEREGLGRDKSNKRLCIST

SEQ ID NO: 30794 - protein, 392 aa, Pleurocapsa sp.
MLKVVKIRLYPNSQQQEALSQSFGNCRWLWNYCLNLMNQTYKETGKGLSGYQVKKQIPQLKKEYEWLKSTYSQCLQQVCLNLGVAFNNFFERRAGYPSFKSKHGKQSIQYPQNVKRIKDCLRLPMIGEVKAVFHREINGKIKTVTISKNKSNQYYASILFDDGVDKPSTNTEGKAIGIDLGLNHFAITSDGSKFDNPRWLAKHERNLKLKQQQLSRKQKGSNNKNKSRLKVARIHNKIANCRADYQHKLSRRIVNENQVIVVENLAVKNMVKNHKLAKAISQVGWGQFCTMLKYKAEQDGKVYQEVDRFFASSKTCHVCLNRVDSLALEIRFWDCDNCKTHHDRDINAAINIRNEGLRILNLTSGTGDKAYCQTVRRSNRGRKKSTTMLVNG

SEQ ID NO: 30795 - protein, 289 aa, unknown
  TnpB Polypeptide
MYKTQKNHIRCDKQTYRLLRVLCHLSKNLYNYALYHIRQHYFNTQQYLRYESVYHIVKENKNYRLLPSQVAQQTVQAVDEAFESFFGLLEAKRKWKTEQRVSLPKYLPKDGMFLLMFPKDQFKIEGNRLRLSLGRGFYKEFGVRYLYFDLPATVLGKKIKEVRILPRFHGRWFEIEYVYEEVTQSYKLDRNKYLSIDLGLDNFASVVDTIGTAFIIEGRYIKSVNRWYNKERARLQSIYSKQGIKYGSKLAKISLKRQHVVDNFLDQAVSLTLLLQEVSIFYKMEMNCG

SEQ ID NO: 30796 - protein, 460 aa, unknown
  TnpB Polypeptide
VASKGSGELSKMRSGSRSTSAIPYLLEVKLGNRRTNVVRLLPNGFQERRLLRLADASAKLFNEVNYERRQQFFKAQRIDFKGTWNECYEKYKSILGVNAQAVMQKNNEAWSSFFSLLRLKKQGRLPPHITHVSPPSYWKDRENKKKRRRKVLVVRQDRYEVDEERCKIILKDFKMEVGFEGKLRWYGKQGRLEMVYDETTNKWYANIPVEVGVEITKTGKQSKHIIKGERRAIQTATPKGSKVASIDLGINVLASVVVDDGTWLLYKGVRAKEDYFYFEKRIAEVQSLADQAKKLGEYDAYEELARERRRLSKKLRRRFLHLYRTLASELVERLHGLGVSTVYLGYPYNIGQDKGNKLSVNVWSYRGLMDAVELKAQEYGIKVYEVVEYGTSKYCAYHGVEVKRQPRGVSTCPAGHKLHSDLNGALNIAKKATGGVVQAVGRPLSFVVDHNRVAPACKGV

SEQ ID NO: 30797 - protein, 396 aa, unknown
  TnpB Polypeptide
MRTRKLRLQYTQQLESLNAATASVWRECLVLKDMWDYAHGYRTGGGLDVPCELWMDKQLSKSQPLHSQSIQEVRRKFFKNRKGFREKRKNGDKKAKPPHRDKKFQTTSWKKSAIHFKDNILILSNGRHGEPLKVRLPKTFDLVYAMAHIAIVELVYDKGRYTLHFVYNVGKPLKSKAKGVVGVDIGEIHPMVSYDGVDTMIFNGRYIRSLYRLRNKVIAAFGKKIDRCKRHSRRWWSLVKRKWKRIRQIENQIRDGLHKHTTNFVKMCEDNNIGTIVIGDLTGIRDNIDYGKRVNQKLHQWAFGKVTQLISYKAKALGMKVEVIDESYTSQTCPKCGNRKKPTTREYKCKCGFEYHRDGVGAINIRQKYLGCLGVPVVAAMAPPVGIRLEGRCCSA

SEQ ID NO: 30798 - protein, 423 aa, Blautia sp.
  misc_feature (194)..(194): Xaa can be any naturally occurring amino acid
MYREGAEGKDEAYLKLYDGHDWKWFCVRLEHTDMEYLRKYWSGKKASAPTLEKRHQKYFLRFSYKEEVTLTKTPVKEQIICSVDLGINTDAVCTIMRADGTVLGRKFIDHPSEKDRMYRTLGRIRRSQREYGSAQTQGIWAYTKRLNTELGKKIAGAIVRYAEENHADVIVFEYLEMQGKISGKKKQKLHLWRXVDLGINTDAVCTIMRADGTVLGRRFIDHPSEKDRMYRTLGRIRRFQREHGSAQTQGRWAYTKRLNTELGKKTAGAIIRYAEENHADVIVFEYLEMQGKISGKKKQKLHLWRKRDIQRRCEHQAHRKEMRISRICAWNTSRLAYDGSGAVTRDRENHSLCTFQTGKRYNCDLSASYNIGARYFIRELLKPLPATERSLLEAKVPPVKRRTSCVYADLRKLHSEMELLKAA

SEQ ID NO: 30799 - protein, 288 aa, Blautia sp.
  misc_feature (239)..(239): Xaa can be any naturally occurring amino acid
MQIISSYGVELRKQNIPICQTLEIYRFAVSYLIGIYVQVWKELAEIPDAKRRFNAAEHLVHTTKKNHACFDFDIRFPKMPSYLRRSAIQHALGTVSSYKTRLDLWEKIDGKSGKPKLVYENHAMPVFYRDVMYREGAEGKDEAYLKLYDGHDWKWSCVRLDHTDMEYLRKCWSGKKASAPTLEKRHQKYFLRFSYKEEVTLTKTPVKEQIICSVDLGINTDAVCTIMRADGTVLGRRFXPLIKHGWIYGKRQTERAGNQSLYMKTTPCRSSTVMSCTVRERKGKTKHT

SEQ ID NO: 30800 - protein, 444 aa, unknown
  TnpB Polypeptide
MKITSSYKILLRGITTLLQPTVKIYRDALAFLVGVCDAEWDDIVAVEGNQQRQLFVERLVHNTKNRQAKYPAFDKSFYKMPSYLRRAAISEALGAVSSYRSNHANWVAGGKVGGEPKLQCDRNAMPTFFRGNMHLESDDPNAAHLKLFVNGDWVWVKVSLRVSDVRYLKRYWSHVKASAPTLEKRYGKYYLRFAFEESVALSDTPVADKRICAVDLGLNSDAVCNIMCSDGAILARKFINFPSEKDHLYTLLNRIKRFQREHGSHDVGSLWAYAKRCNHELAIKIAQAITDFAVLYSADVIVFEYLDFKGKKKKRKSKRQKLHMWKKNGIQELVTHKAHRCGIRISRICAWGTSKLAFDGSGEVERDKNNYALATFKNGKRYNCDLSASYNIGARYFIRELLKSLPATAESQIGAKVPTAARRTNCTYATLLQLNAALPELLAA

SEQ ID NO: 30801 - protein, 382 aa, unknown
  TnpB Polypeptide
MIRTYKYRLSPTKKQRFVLDGLFFQMQTVYNDALNQRRHEWRQSRRSITYYDQWARMRDERRRLPEEMGLLNATSIQQMLRRVDKAYRAFYKGQCGAPRFKGRNRFKSVEYRYGDGCKLTGSRLYIQHVGDVRVKLHRPIPDDAVIKQVIVKRSTGRWYVCFQLELPDPELTVHTGPAVGIDVGLHSLLALSDGRLVDNPHWLRASLAKLRVAQRRMARRKKFSSGWRKAARRVAKLQERVANQRSDFWHKTTGELAKTYSMIALEDLNLSFMTRNGNLSLSAHDAALGMFRQMLSYKVENTGSQLIAVNPRNTSQVCSGCGVIVAKSLNVRVHHCPDCGVVLDRDINAALNILALGLSVRASTYPVGDCVALEAPPLQRGE

SEQ ID NO: 30802 - protein, 410 aa, Nocardiopsis sp.
MARKTVKRAFKYRFYPNDVQAAELSRTFGCVRLVYNRALAERSAAWQQRQERVGYSQTSAMLTEWKRTEELSFLTEVSCVPLQQTLRHLHTAFRNFFDQRARYPRFKSKKKSRASAEYTASAFRYRDGRLTLAKMAEPLDIVWSRTLPEGAIPSTVAVSRDAAGRWFVSLLCEDIVEIAPTTDHAVGLDAGITPLVTLSTGEKVANPRHERRDRAKLARAQRALARKARGSANRDKARRKVARVHARITDRRKDFLHKLTTRLVRENQVVVIEGLAVRNLGKNRALARAISDAAWRELRTMLEYKARWYGRALVVVDRFFPSSKACSTPGCGYVHASLPLHIREWTCPQCGTTHDRDVNAANNLKAAGLAASACGAGVRPQRESSRTGRPATKQEGHGATHDEALTSNHQ

SEQ ID NO: 30803 - protein, 384 aa, unknown
  TnpB Polypeptide
MIRSYKVRIYPTKKQEILMNKHINCCRFIWNYMLALNLEKEKAGEYPLNRFAMQKEITLLKKQSQYSWLKEVSVFSLQTICGDLNDAYERFFNKVSRKPKFKKKAKAKRTFPARCDRTYFKSDRLIVIPVIGKVRYKTDFNFQYGFNALKVKNPRVSNVGNKWILSFGLEVDSQDYNLNDFSVGIDLGIKDLAVVSYNDNKSKVYHNINKSKKVKYYKSKLKHIQRNLSRKYEKRKSENFYNKEMSKNEIRELKRLQYFYRKLTNIRDNYIHQVTAEIVNMLPKRIVIEDLKVSNMLKDKRLSEEIQEQCFYKFREYLTYKCEEKGIELVVADRFYPSSKTCSCCGNIKKDLRLGDRTYICDKCGFIIDRDLNAAINLMNYIPQ

SEQ ID NO: 30804 - protein, 280 aa, unknown
  TnpB Polypeptide
MIFPPQNGKCGVVLNYEIEEPKLFPDNGKYLAIDLGIHNLATCFDSANSKTFIVGREYLAINHYFHKEIAKAQSALAKKSISQDYILNGRGVSLDQGNTVTVSTESRYLAKQPQYTSKRLKNLYKKRNNSIQDYLHKLTKFITNYCVENEINTVIIGDLTGIKNRITNRDKKYNQKLHELPYEKIRILLKYKLACKGINFVLQNECYTSQCAPNTPSVERKYANKSNRVQRGLYVSEGNIYNADAVGAYNILRKYCDEHGIKKTFSIKGLTSVKVFKIKR

SEQ ID NO: 30805 - protein, 363 aa, unknown
  TnpB Polypeptide
MKVNRAYRYELKPNTIQKVLLAQHAGCARFAYNWGLARRIALYQEEKKTVSAINQHKELNQLKKTDFPWMYEVSKCAPQEALRDLDKAFKNFFQGLKQGHKVGFPRFKKKGVHDSFRLTGTLKANGKSVQLPRLGKIRTKEATSINGRILSATVSREADRWYVSFTCEVEISEPEPIEGDAVGIDVGLTHFAILSDKTKIEAPKPLGKYLKRLKRLSKKHSRKKKGSNNRKKSAMALARLHRHIRNIRQDFLHKLSTDLAKTKSEIVIEDLNVKGMIQNHKLARHISDVGWSEFRRMLEYKTRWYGSKLTLAPRFFASSKTCSECGYPMREMPLSVRKWECPQCGTEHDRDINAAKNLLKFAV

SEQ ID NO: 30806 - protein, 394 aa, unknown
  TnpB Polypeptide
VKRSYKFRLRPTAGQHRRLEGCLRSHRQLYNSALAERKGAWEAQHGSVSYYEQSGRLKFSRAEHPEMATWSFSSQQATLRRLNRAFAAFFGRVKAGEEPGYPRFKAAHRFDSVEWPKDGDGCRWEPDLGRVYLQGIGDVKLTLHRRAEGLVKTVSAKREGRRWYLVLSCDDVPAKPLGPTGRAVGVDVGIASFATTSDGEHVPNPRWARQAAEGLERAQHVLGRKKRGSANRRAARQTLAGRHRKVARQRRDFHHKLAKDLVSGYDVVAVEDLQVKNMARRPKPVPDPDNPGAYLPNGAAAKSGLNRSICDAGWGAFVSVLRAKAEEAGRTVIGVDPRRTSVRCEACGYASRENRANQAVFSCKHCGHTCHADEHAARNILRAGLALLAADEAA

SEQ ID NO: 30807 - protein, 422 aa, Nodosilinea sp.
LLATVDEYRAYCKALSYVVMGHWPELIAAKSFCAAVEKLIHRTSQNPDLKYPYFEKRFYKFPSYLRRAAVEFVKGQVSSYLTRYRDWQAGIRKRRDAKPPAFNVDAGCYPALYKGQLVKFDDGFLVASIKVWNGSDWVWTEVPIASKRQRHLTGSIKSPYLVISEQHCHLAVPFKIIPPTWKSEVVCAVDVGINTLATASIVCPDGTVLARTFIHPASDIDRRDKQANIIRQKARKTKTLHRGFAKTPYRKARGINANIAQQISRQLVNFALEYGASTIVFEDLKGWRPKGGRKRSTLKQKFHGWLHRRLVTLTEQKFQEDGGRVVYVYARGTSSWAFDGSGKVRQSKAQYELATFANGKQYSCDLSASYNIAARYLASKLKLTHRKDGQVAKGKSSCATPRMPVTLSLLWDWEAAYGREAS

SEQ ID NO: 30808 - protein, 406 aa, Mesorhizobium sp.
MSNTRHRSQIFLLRPTKEQAEYFARAAGIARLAYNWALEEWKRQAMEWWTSGKQAPFPTAFGLQRQFNAIKRDRWPWITDVAAIVPERAIFAVGQAYESFKAEQAKYPRFKAKGVSRDSFLGAGKSRECTIVANRVRLPKLGWVRLSREARWPDARIMNAAVSRRDGRWYASISFELPATETLTRPNLAAGVDLGIKQPIKVFCGGVATDLGGDLLQRLNVERRKLRRANKTMHRRVKGSGRRRRAQAKVARVHKRMADIRLNFQHKATSVIAGMASRIGVEMLNVKGMLRNRSLARHIADVGFYEIKRQIGYKAEALIEADRFYPSSKTCSCCGSVKEKLALSDRSFDCEGCGFTCDRDENAARNLERMAADRAVPARGDGSSVRRRKLTLRSLSMKRETESDGP

SEQ ID NO: 30809 - protein, 397 aa, Thioalkalivibrio sp.
MHKWRAMRKATKIRTYPTTEQAAFLNRQFGAVRFCYNTGLRIMSHRYQRHGQSLSAKHDIKKLLPVAKKSRKYGWLKEADSMALQQSCINLDQAFQRFFDPKQKAGYPRFKSKRGKQSSYHCVGIQAGENWIRVPKLGPIKAKVHRKVEGKLKSITLTRTVTGKHYASLLFETEQVAPEPLKDVDAAGVVGLDMGLSHLAIDSTGHKTSNPRFLTQAAANLRRKQKALSRCQKGSANRAKARLLVVKAHERLANARNDFQHKLSRQIVDDNQAVIVETLKVRNMMKNTRLAKHIGDASWYALAAKLDYKAMEKGKRLVRIDPWFASSKTCHVCHHKMDAMPLNVRSWECPACQTHHDRDINAALNIKHQGMIHLKAEGLSVSAHGGSRKSGMSPVAA

SEQ ID NO: 30810 - protein, 374 aa, unknown
  TnpB Polypeptide
MKLIAQLQLKPTEEQAKALKNTLQVANAACDFLSALAWDNQTFGQFALHKIGYSGAREQFNLSSQVIVRCVSKVADSYKLDKKVRRTFKPLGAISYDDRILTYQLDKGQVNIWTTAGRIRIPFVCGEHQRQLLETRQGESDLCVVKGKWFLLATCNVEEPPTDSKGGVIGIDLGICEIAVTSEGKSYSGEKVKALRKKLREHRRRLQKCGTKSAKRRLKKASKRQERFVRNSNHCISKEIVRDAQKSRKALSIEDLTGIKERTGSFNREMRWQMGNWSFFQLRAFLTYKAKKEGVSLVIVDARNTSRTCHKCGHCEKANRKSQKHFKCLACGYEENADFNASQNIAQRGDTLRAAVNRPIVSNPLGLGTSPLAC

SEQ ID NO: 30811 - protein, 350 aa, unknown
  TnpB Polypeptide
MIQAQVKLRLNVIQSSLLDGWLFMLTGVWNWAIRKIENDSKGGIYYTPKGFQNLLSDHGKKMGIPSHTVQGMLVMAYTAWKRCFKKIGGKPKLKGMRNKLNSIPFPDPIRSPEKNHVKLPGIGTVRFHKQDIPVGKIKCGRIVKRASGWYLCLFIDAERKAIERKTDGAIGIDPGFMDLLTTSDGEKIQHPKELHQSAKRLAQAQRGINRKLVARLHERIQNQRKDRNHKLSLRLVQENIVICFSKDNIKGIAKKFGKSVASSGHAQLRSMLEYKSRAGGTQYVQVASKNSTRICSTCGSLTGPTGLAGLSVRDWECSACGTHLDRDVNAAINTLNIGAGTAHEVRCHAA

SEQ ID NO: 30812 - protein, 192 aa, unknown
  TnpB Polypeptide
MQSVGQTAFETTIENREQRFVHDRLHQVSRRVVEWSEQFDDPVFVFEDLKDIRDDIDYGTRMNRRLHSLPFAQLQTFVSYKAAWNGIPVVKIDPEYTSQECLSCGHTDRANRQKKRFKCVACAFQDHADRKAAVSISAKGLQKLNRNVPALNNLPVVRVRRQRNGACEPPDHDPVSSVRGYQADGDSGSVSS

SEQ ID NO: 30813 - protein, 361 aa, unknown
  TnpB Polypeptide
MKQTMLLKLAPSPEQHTALLETMHAFNAACNDIAQTAFDEKLANKFELQKIVYGDIRKRFNLSSQMAIRAISKVVDNYKRDRSIKPSFRSEGAITYDERLMAFKGLNEVSLLTLQGRVIVPFRIGGYQQSRMDSIKGQADLLYRQGTFYLAVTLDVPAPTPDEPEGGTLGVDLGIVNLATDSEGETFSGEAVEKNRQRMHSLRQRLQKRGTKSAKRHLKKLSGKEARFKRNTNHVISKRIVQKAKTHRQAIAIEELRHIRKRTDSTVRRSQRNRHSSWSFNQLRFFLSYKAALAGVPLHTVDPRNTSRTCAVCQHCEKANRRSQAEFVCKACGYAALADFNAAVNISRAQVMVPIVSALAG

SEQ ID NO: 30814 - protein, 400 aa, Sphaerochaeta sp.
MKWYKALKVRVYPDAKQTEQINKTLGCSRAIYNMMLHERITVFEENKDDRQKVYDYKFKQVSAYRKEYEWLKEADSQALACSKANLINAFSNFYKSLKGERKDQKVGFPKYKKKKTQNCYTSSYINNNMAIDFENRKVKLPKLGWITFRDKRSSAEGRIKSVSVSRSTTGKYFASFLFEHEAPVVPVKVVTDPERVVGLDMALADFYVDNEGNTPVFTRNTRKYEMQLAKAQRRFSKKKGSRNWYEAKRNVALVHEKIANSRVDFNRKLATQLTSEYDAICIETLSLRGMSRALHLGKSVQDLGYATFVSRLKQKAAETGTHVIQVDTWYPSSKLCSASGYKNRALSLKERSWTCPNCGAELSRDENAGKNLRNVGLKMLGLGKPFKLVEKITSLRSFGS

SEQ ID NO: 30815 - protein, 443 aa, unknown
  TnpB Polypeptide
MVKNLTSVSGDKDQVNMHQENTMLPRRISVSLFIDQSIIWPVKRLQAFKFQLRPGGQQECEMRRFAGACRFVFNRALALQNENHEAGNKYIPYGKMASWLVEWKNATETQWLKDSPSQPLQQSLKGLERAYKNFFQKRAAFPRFKKRGQNDAFRYPQGVKLDQENSRIFLPKLGWMRYRNSRQVTGVVKNVTVSQSCGKWYISIQTESEVSTPVHPSASMVGLDAGVAKLATLSDGTVFEPVNSFQKNQKTLARLQRQLSRKVKFSNNWQKQKRKIQRLHSRIANIRRDYLHKVTTTVSKNHAMIVIEDLKVSNMSKSAAGTVSQPGRNVRAKSGLNRSILDQGWYEMRRQLEYKQLWRGGQVLAVPPAYTSQRCACCGHTAKENRLSQSKFRCQVCGYTANADVNGARNILAAGHAVLACGEMVQSGRSLKQEPTEMIQATA

SEQ ID NO: 30816 - protein, 392 aa, unknown
  TnpB Polypeptide
MIETIKVQLRPNNKQLTRLFQYAGCSRFAYNWAIAREQENYKQGNKFLQDGVLRKEFTQLKKQEHYKWLNNISNNVTKQAIKDACNSYKRFFEGQNKHPKFKNKKNSKQSFYQDNVKIQFTDTHVKVEGFTMSHRKNKQKINWIKLCEKGRIPTNCKYMNPRFTFDGLHWYVSVGVETKDNVSISVNEGIGIDLGLKDLAICSDGHTYKNINKTNKVKKIEKRKRRLQRSISRKYNMNKEGESYKKTSNIIKREKELLKLIKRLTNIRQNHLHQITSKIVKRKPSFICIEDLNVSGMMKNKHLSKSVQQQGFYEFRRQIEYKSVWNNISVIIADRFFPSSKLCSCCGEIKKDLKLSDRIYRCDCGNIIDRDYQASLNLKQYGENVLRQTSVE

SEQ ID NO: 30817 - protein, 408 aa, unknown
  TnpB Polypeptide
MSNTMILCERHIIKKSHPFYDECDNLTFLAKNLYNSTLYFQRDSFFNQDFKNYYDVNRVFTHSNQKDYRALPSKVSKQVQMLVDKSFKSYFALVKKKANGDYSNGVRIPKYLGKTGGRCVVPYPKDALSLKNEGFVKFSKTNIIIKTKLSRKDIKAARIVPKGNHFVIEILYKAMMKPLKSDKPKRMAFVDPGLNNLMAVTSNCFNPLIFNGKPLKAINQLSNKNIAELKGKLSARGLRNSSLLQSAYSKRSRRLTDLLHKITTELVNQLDSHNIDTVIVGHNVGQKQDINLGKVTNQSFVQIPFTQLMYLLKYKCELRGMRFVETEESYTSKCSFLDEESICKHSVYQGNRTKRGLFQTSSRKLINADVNGSLNIGRKYLTKVNMYTKQLHADLIKFMVNPKVVTIK

SEQ ID NO: 30818 - protein, 578 aa, Shigella sp.
  misc_feature (262)..(262): Xaa can be any naturally occurring amino acid
MRRFAGACRFVFNRALARQNENHEAGNKYIPYGKMASWLVEWKNATETQWLKDSPSQPLQQSLKDLERAYKNFFRKRAAFPRFKKRGQNDVFRYPQGVKLDQENSRIFLPKLGWMRYRNSRQVTGVVKNVTVSQSCGKWYISIQTESEVSTPVHPSASMVGLDAGVAKLATLSDGTVFEPVNSFQKNQKTLARLQRQLSRKVKFSNNWQKQKRKIQRLHSCIANIRRDYLHKVTTTVSKNHAMIVIEDLKVSNMSKSAAGTXERAYKNFFRKRAAFPRFKKRGQNDVFRYPQGVKLDQENSRIFLPKLGWMRYRNSRQVTGVVKNVTVSQSCGTWYISIQTESEVSTPAHPSASMVGLDAGVAKLATLSDGTVFEPVNSFQKNQKKLARLQRQLSRKVKFSNNWQKQKRKIQRLHSCIANIRRDYLHKVTTAVSKNHAMIVIEDLKVSNMSKSAAGTVSQPGRNVRAKSGLNRSILDQGWYEMHRQLEYKQLWRGGQVLAVPPAYTSQRCAYCGHTAKENRLSQSKFRCQVCGYTANADVNGARNILAAGHAVLACGEMVQSGRPLKQEPTEMIQATA

SEQ ID NO: 30819 - protein, 247 aa, Escherichia sp.
MASWLVEWKNATETQWLKDSPSQPLQQSLKDLERAYKNFFQNRAAFPRFKKRGQNDAFRYPQGVKLDQENSRIFLPKLGWMRYRNSRQVTGVVKNVTVSQSCGKWYISIQTESEVSTPVHPSASMVGLDAGVAKLATLSDGTVFEPVNSFQKNQKKLARLQRQLSRKVKFSNNWQKQERKIQRLHSRIANIRRDYLHKVTTTVSKNHAMIVIEDLKVSNMSKSAAGTVSQPGRNVRAKSGLNRTILD

SEQ ID NO: 30820 - protein, 379 aa, unknown
  TnpB Polypeptide
MKQLKAYKFRIYPSEEQKIFFSKTFGCVRLVYNLMLNDRIKAYEESKGNPDKKLKYPTPAKYKKEYDFLKEVDSLALANAQMNLDKAYKNFFRDKSIGFPKFKSKKNPIQSYTTNNQNGTINIFENWLKLPKLKELVKIKVHRKIEGIIKSTTISRNGSGKYFISLLCETDIQELTKTNSSVGIDLGIKNMAILSTGEKIENLKFSKQLEDKLKREQRKLSKKFLVAKKSKKKLSEAKNYQKQRIKVAKIHEKIMNMRTDFLNKLSTYVIKNHDIICIEDLNTKGLLHNHKLAKSIADVSWASFVNKLEYKAKWYGKEIIKVDRLYPSSQICSVCGNRDGKKTLDIREWICPVCHTHHDRDINASKNILAEGLRIRETA

SEQ ID NO: 30821 - protein, 298 aa, Eubacterium sp.
  misc_feature (206)..(289): Xaa can be any naturally occurring amino acid
VANRAYKFRIYPNDEQKILFAKTFGCVRMVYNHWLDRKIRQYEENKTNVTYIICAKEMAAMKKMEEYGFLKEADSIALQQSLRHLDTAFQNFFKQPKTGFPRFKSKKRNKNSYSTVCINGNITISNGYLKLPKIGQVRLKQHRIIPDEYRLKSVTVSQTPSGKYYASILFEYEDQVQEKKLQKFLGLDFSMHELYRDSNGKEPAYXXXXXXXXXXXXXXXXXXXXXXXXXXXXXXXXXXXXXXXXXXXXXXXXXXXXXXXXXXXXXXXXXXXXXXXXXXXXXXXXXXXXFQITAGECS

SEQ ID NO: 30822 - protein, 425 aa, Escherichia sp.
  misc_feature (312)..(315): Xaa can be any naturally occurring amino acid
VKRLQAFKFQLRPGGQQECEMRRFAGACRFVFNRALARQNENHEAGNKYIPYGKMASWLVEWKNATETQWLKDSPSQPLQQSLKDLERAYKNFFRKRAAFPRFKKRGQNDAFRYPQGVKLDQENSRIFLPKLGWMRYRNSRQVTGVVKNVTVSQSCGKWYISIQTESEVSTPVHPSASMVGLDAGVAKLATLSDGTVFEPVNSFQKNQKTLARLQRQLSRKVKFSNNWQKQKRKIQRLHSCIANIRRDYLHKVTTAVSKNHAMIVIEDLKVSNMSKSAAGTVSQPGRNVRAKSGLNRSILDQSWYEMRRQLXXXXSGLNRSILDQGWYEMHRQLEYKQLWRGGQVLAVPPAYTSQRCAYCGHTAKENRLSQSKFRCQVCGYTANADVNGARNILAAGHAVLACGEMVQSGRPLKQEPTEMIQATA

SEQ ID NO: 30823 - protein, 332 aa, unknown
  TnpB Polypeptide
MGYYEAVKVRLDPTPKQERLMKSHAGAARFAYNAGLAHVKEALDNSEPADWSHYSLLNWWNKSKDTLAVNRDTGEVWWSQNSKEAYNTALHGLARGFSNWSKSRKGQRKGRRVGFPKFKSKNTTMRFAYSTGFTAPTAGDPYGLKLPRIGRVHCMENVYRLLAGARLIRITVSRRAGRWYASLTVEREQSPSPVCTPKGGAVGVDLGVKNLATLSDGTVIPNPRALGTRLKALRKAQQALSRKVKGSARREKAKVRVAKLHARVADVRADAIHKITSMIARNYDTVCIGDLNVAGMVKNHRLARSLSDAALGEFRRQLEYKTARSGGRAACG

SEQ ID NO: 30824 - protein, 479 aa, unknown
  TnpB Polypeptide
MLGSMARHTTFKFCLDPTAEQAVALSRHAGAARFAFNQCLRIVKTRLSARRTDPAVLVPWTGFDLINTFNGWKKTEDAGRVFTVDTAGRVEPVVTGLGWRTQVCQQVFEEAAVDLGKGLRAWSDSRSGKRQGKRVGFPGFKKKATSVPSFRLRNKHPKGRPAAIRVGDGGRPRSLTLPGVGQIAVHDDTRRLRRMLATDRAKILFATVTQRAGRWWVSLNVEAADLHPAHQHPHPDTADTGGWVGVDRGLSAFAVAAAAEGTELARITDAPKALAAGIPRQRRLAKSLSRKKKGSQNRRDAAARLGRHHHRVANVRRHFAHQVSNQLVKNHDRLVIENLHVAGMLANHRLARAISDAGWAEFARQLHYKQLWRGGEVIEADRWYPSSQLCSVCGDRRTDLSLAERTFTCANDHRLDRDLNAAINLARWGQHNHHRTPDPQAGGRATNARRQDGSDQHSSRVGETSLNDAGTDVHTAPAA

SEQ ID NO: 30825 - protein, 446 aa, Actinoplanes sp.
MLAWCLDVAKLWPVRSDTVLPGSGCGLLTRSGSGASASCGELGSVGARSVLRRYSDAWFSAAARRKGGAVNVRYPRRRRALMPVRWYHGTFKLTGRALRLPVAQGHPPLLVRLDRAVPYPPDAVRSVTLLFADGRLCVDVTAELSVASYPSGRAPDVARVAGVDLGIIHPFAVASTDGDSLLVSGRAIRAEHRLHLADTKARHRAVAARAPSRGQRGSRRWRRTRRRVRLVEGRHRRRVRQALHEAAKAVIDWAVERRIGTLTVGDPRGVLDRSSGRVHNLRLRQWQIGRTLRILQDKAALAGIQVHLVDERGTSSTCPACAKRISKPTGRNLSCRHCQFVGHRDLAAAFTIATRTPGGVNTTPPRMGGMVTHRRAGSHLPGVGRARRDPRRRPPRAAAGASGRRRPVPPLVGSRSSTRVGEDPEQHRDQPVYIPGCRTISQLLPV

SEQ ID NO: 30826 - protein, 290 aa, unknown
  TnpB Polypeptide
VLVRSIYESCRQLGVDFRSVELSDWLMFQQSELEYPAKSITLKPGYEFHITTVDYYKNTYRDVIKPIMSKSYRLLLEKVLEERQRYTGRVVIKSYGIRKDSLWIRGEVQITIPTDFYYKHMTRCREPRGSLICGVDVNIDRLNLAIIDEKGNLRDCKTFWFSETTARGFSRRSARSIISAKTREMLGYVHHHGVKTLLLENPEVLGKLKLLWVRSNGRRHENYNYRVSVFRSSVIEMIALKAPLYGIEVKYVDPKGTTNSREHDDAMRKYRLDRHVASAYLIALRGLKHQ

SEQ ID NO: 30827 - protein, 378 aa, unknown
  TnpB Polypeptide
MKITRTVKLKLKCSPTELLPTIKLYTESFNKVCSVGWEDQDFNGVSLHHKTYKHIREYLPSQLAVTSRMKATEALKSIKKKKKTSCPQSKLSSIRYDARSYNAMLDKGAVSLLTVSGRKVFKTSVPECFIKYLSWRRTTADLFLKNNKLFLHIVFEKDIADPVLTGETVGIDRGINKIAVTSANKFYSGKSSKRIISGYRKLRDKLQSKGTPSAKRHLKRLSQKENSYRADVNHCVSKSIVAETNPGAVLVLEDLKSIRQNCRFRKKQRAQVHNWSYFQLQQFLTYKATEKGIAVEYVDSRYTSQKCSVCGYTSRSNRASQANFKCKKCGLTLNADLNASRNIRQNYLTATCGTDRAAVNQPIVASDDTQILRGLSGA

SEQ ID NO: 30828 - protein, 259 aa, Okeania sp.
VSKQIIKCLVATWRGYFQAIIEWSKHPCKFLGKPKIPKYKDKTKGRNVVIYSKESVYKAPLKKGICHLSMSDIKIPVVVDTVIEVRIVPATSCYIIEVVYEKTNQPQIRSRYVAGIDLGIDSIVALATNKLGVKPLLINGKPLKSVNQLYNKRKAKYQSVLKGQKKTSRKIEALTYNRNRFVENYLHNTSKLVVEYLTTNNIGTVVIGKNDNWKQGAKIGKKNNQNFTQIPHSKLIQQITYKCELAGIKVMETARLLHQ

SEQ ID NO: 30829 - protein, 402 aa, Phormidium sp.
MFQVVKVRLYPDIQQQQSLAQAFGSCRWLWNYCLNLMNQTYQETGKGLSGYEVKKIIPQLKKEHQWLSQTYSQCLQQACLNLGVAFNNFFERRAKYPRFKSKHGKQSIQYPQNVKVADNYLTLPKIGNISAVIHRPIEGKVKTVTVSKNCANQYFASILFEDGKDQPPINTEGKAIGIDLGLTHFAVTSDGSKFDNPRILNKYEQNLKTKQQQLSRKQKGSNNRIRARKKVARVHRKITNCREDFLHKLSRRIVNENQVVIVENLNVKGMMQNHKLAKSIHQVGWGTFCTMLKYKAEAEGKVYLEVDRFFPSSKTCHVCLNQVGNLPLDVRFWTCKKCQTKHDRDINASINLRNEGLRILTSGTGDKACCPDVRRSKGGRKKSTTALSVGQEAHTYPTGKCG

SEQ ID NO: 30830 - protein, 467 aa, Mycolicibacterium sp.
MSAPATPVIDAAPTVLRAYRFALDPTPAQEQRLRSHCGAARFAYNHMLALVKANLDQRTAERTYDIPETELTPALNWSFYSLRNQWNQIKGDVAPWWSENSKEAYANGIANLAAALSNWSTSRAGQRRGRAVRFPRFKTKRARPSCRFTTGGLGLVERDRRHIRLPKIGVIRTHESTRKLARRVETGAARIRSATVSFERSRWHVAFSVELATAHRRRHSSGQAGAVVGVDLGITHLAVLSTPVPGVSDEHGMVANPNHLENAQKQLRRLQRQASRRRGRDKRTGTTPSARWLHTQAEIYRLHARIANARADGLHKLTTALTEHFETIVIEDLNVAGMLTNHRIARRIGGAGWGELRRQLTYKTNDHGGTLVVANRFYPSSKTCSNCSTVKAKLSLSQRIYHCESCSVSIDRDRNAAANLAALAASVTATSSPSCGATQNAPDGNPHKTSTAGSRYRHGKSNEDNAA

SEQ ID NO: 30831 - protein, 416 aa, Mycolicibacterium sp.
MLTGRRFRVEFTDEQAEFAERIGAACRAVWNTGLEQRREYRRRGAWMNYQPQARELAEAKVEHSWLKDVPGHCLQQTLMDLDRACREHGTFRVRWRSARRWAPSFRFPEGSKMAVEKLNRRHSRVKLPKLGWVKFRQTRNMSGETIRSATLSREGRHWFVSFRVDDGVSTPNEHALPGTAVGVDRGVAVAVSTSDGELADREFVTAGERLRAAVLARRLSRAKGAANRSKIRAELARLRARERHRRADFCAQTAHRLAHTNAIVVMESLKTNQMTRRAKPVEDPDNPGQFLPNGGSAKSGLNRAVLSKGWYRFEQALTSVARYTGTQVIKVPAAFTSQRCSACGHVDPKSRESQAVFRCTSCSRPAEHADVNAAKNILAAGLAVTACREATTPAGVGVTSTQEPAGNREELLLQPI

SEQ ID NO: 30832 - protein, 529 aa, Vibrio sp.
MAVTTAFLLPNNGGYAMRELAQANKSLVLTRKSVSCSKGILTQNLSVTLPVLSTLNEKDCKPFWNQQCSDIQSTLWLPQKTDSQDLVSSLSNGLLNYQVDESRSWMTRITPLNHSTPQNLSVLLPRSAIATTESDLLKGAKVIASKKIRFYPENESAYFDALALYRRSYNLAVERFRNDDYKDENGKFINMRPAIKAQVEQEQKESGRAYNSLVSDNGTLAAATTFKSVCSKNKKLKGAKSGFSEISFKSRKGSKHSFSIDRLPKGLNPCVKALGKIHLTESVPSEAIGKSCIITCDKGRWFIQVQQHIELQTEIQGEVKCVGVDQGVRTFATCFSKDDALVVGDNFSKEKLFPLMKRVDKLIGQKQKVLNTQKGVKFTDMPQWARDRIIYFDREINRLKCKKDDLILDLHNRLAHELVSNYDVIFLPSFETRRMVTRKDKKIRTIRRNTCRQMLDLNHYGFKLRLKWYAKKYGKQVVDCNESHTSKTRSWDGIIDKKLGSSKIIKGDGFTVDRDINGARNILLKHLTR

SEQ ID NO: 30833 - protein, 378 aa, unknown
  TnpB Polypeptide
MLLSSSVYNQTNFIIRQQFFKKEKVSSFFTLQQQIQNNDDYQTLGRSYALPRIQIYAETNSARFKLIKSRTQKRVGLPKYLKNRKTNTTIPSFLVFDGCQYSVKGKLVVIPLSRQMRKKYKIKHFRIKYNGILKWKGNQQRGQIHFKDNKFYMYQPVELKDTKRIKSKTKAGLDLGIKRLFGIYINNGNDKVIGSKRFYKQWKYYTKLISNKQAKLAEINRRTSKNLQRLFRVRKKWQNNLYNNLTAKLFRVLKTNNVSTLVVGDIKNIRKNNRKGRKLNQMVHNYWSFDLLLKKIENKSEEFGVELLKETEEYTSRTCPICYDDSKENCKDRIFICSFCGYVDHREIVGARNIFTKSMCGSSESTHWSETFPLEVVT

SEQ ID NO: 30834 - protein, 374 aa, unknown
  TnpB Polypeptide
MRKIYLYRARINKQTEANCNQWLDLCKRLYNQSLEQRIKAYKEEKRSISVYEQMSQLPELKKTFHEFKIVGSQCLQDVLQRLDKAYKSFFQRVKQGNGKAGFPRFKSQNRYDSFTLKQAGWKLEGRYLYIRNVGKFKLFLSRPIEGKIKTVTIRRSSTDKWFVAFSCDNVPVKEVQASNQEIGIDVGIKHFLVDSQGNSVENPKYFRQSEKLLRRRQRSLCRKKKGSNRRSKARLLVAKAHEKVSNQRKDFLHKVANAYIKGFQTIYIEDLNIKEMVKNRHLSKSISDSSWGMFFNLLSYKAEGAGRIVIKVPPHSTSQICSGCGEKVPKSLSVRIHHCPFCNLVLDRDLNASLNIFRVGQALQASTSAIVGVA

SEQ ID NO: 30835 - protein, 380 aa, Symploca sp.
MYAIKVELKLNNKERTKIAQHAGFSRFVYNHGLSLMQQLDHKEYKGGSGKKINEIKKIFTGFTKKQPGLEWTNKLSSRVYQNSFASLKNAFTRWHKGLGKCPQFKRKKDKRSFTVDSSNGKVLLEAGKKIKIPTLGAFRLKESLPCRYVTQTFAISETAGRWFVSFSVDAERLPPLMHEVAKPVGVDLGVKCFATCSDGSKYVAPQPYKKAKNKLGKQQWRNRNKVLGSRKQGIKASNNAKKHYAKLAKTHAHVANIRQNFLHKTTTEMSRKYAVIHIEDLNVAGMIANHKLSAAISDLGFYEFRRQLGYKQKHYGNKVFLVERWYPSSKTCNNCGNIQSMPLSERTYECGECGQTADRDLNAALNLATVPTSKLKPLEP

SEQ ID NO: 30836 - protein, 396 aa, Symploca sp.
MRISYQYRLKPNKEQRESIDNTLDMLRCQYNYQLAQRFDWYEQNRCSIDRCPLICYLPELKDRPNKTNQEKSLVQLKKDRPWYKKIHSQVLQAVSDKVDKAFERWLKSDCNGKKSGRPRFKGLGQYKTFTYKQFQQHHFVGNKITLSKIGDLKVVVHRSIPDGFVIKTVSVTKKADGYYVTLSLDDQTVPTIKPDFNANNIVGIDVGLIDFYVASDNTRIAAPKHLRKAEKKLKSAQRKVSRRKKGSNRRKKAIKKLGITHKKVADTRKDFHFKTAKKLLSKYDVIAVEKLKVKGLARTRLAKSIHDAGWSQFINILSFKAVNAGLKVIAVNPNGTSQECSSCGHKVKKLLSQRTHNCPVCHTSLCRDMNAAINIRNRGTHDLSKKAQSMSSKTSR

SEQ ID NO: 30837 - protein, 418 aa, Symploca sp.
VFNLTYEFKLKPTATQVVLFEEWLERCRKVYNYALAERKDWFKSRSCQINACSLKSEYIIPADAKRPNYASQCRGLTAARALIPQLKAVQVHVLQQTIKRLEKAFVSMWENSHGFPRFKKHGTMRSFVFPQLGVNSLEKGSIKLPKIGKVKFRQSRDIPEGGELKQARVVRRASGWYVMLTVQWKVDIPQVLPYGEPLGIDVGILSFVATSTGKLFPNPRPFKSLERKLKLLQQRVSRKRRGSRNQKKAQYKVSKLYERIGNIRKNYHWELAHNLCDQAGMIFAEDLNLKGLTKGMLSKHCLDAGWGQFLQILSQCCLKRGVFFQKVDARKTSQICPNCLTETGKKTLAERVHSCSNCGYTTDRDVAAAQVVAIRGLAAVGRAPRRVNYRLTKLNSVVKMLSEGKFIGIPEMKESPLL

SEQ ID NO: 30838 - protein, 376 aa, Meiothermus sp.
MRKAFKYRLYPTQPQARDLERTLSLCRQLYNAALQERREAYRRAGKSVGFYEQKRWLPEIRAELPEYKGIHSQVLQNVVERVDKAFQGFFRRVKEGEKPGYPRFKGQERYDSFTFPQAGTTGVKLQEDGKRVLIHGIGSVKMKLHRPLEGRLKTATLKREGDDWYIVFVCETEPKPLPENRAAIGIDLGTNPHFLIASDGEMVQAPRYFQKAQAKLATAQRNLSRKKRGSHRRKQARRRVAKLHRKIANQRKDFHHKTARKLVNAYGTIVHEDLNILGLARSRTAKGVLDAGWAQFLQILAYKAEEAGRRVVGVDPRHTSQDCPVCGYREKKPLWVRVFRCSGCGSYFHRDVASAINVLTKARTEPSGMGTAWAVP

SEQ ID NO: 30839 - protein, 243 aa, Salmonella sp.
MPPGGTLFRAFAGLKDLFVTDTGFRSGNPRHTAKYAARLAPLQRRLSKKAKGSKNRARARLKVARLHAKIADCRQDALHKATRELINDNQVVCVESLKVKNLIRNPSLSKATADAGWGELVRQLRYKGEWAGRSVVAIDQFFPSSKRCRCCGITMKKMPLDVRKWQCPECGADHDRDINAARNIKAAGLAVLACGEPVNPESLNATRVRLRETRILALQGGVRQSEPPHSLTEPPDKNRFRIV

SEQ ID NO: 30840 - protein, 370 aa, Alkalihalobacillus sp.
MTKQNKAYKFRLYPTDEQKLMIHKTFGCVRFVYNKMLAERKETYELLKDDKDALKKVKHPTPAKYKKEYEWLKEVDSLALANAQLNLDKAYQAFFKRNAKFPKFKSKRHKQSYTTNVVNGNIQLLDGHIKLPKLKMVKIKQHRTIPSEQKIKSCTLSMTASGKYYLSILAEYEKEIETKAIKKVVGLDFAMDGLFVDSEGEKANYPKFYRQMLEKLAKEQRKLSRKKKGSSNWNKQRIRVAKIQEKVAYQRKNFLHHKSKELATNYDAVAIEDLDMKGMSQALKFGKSVADNGWGMFTSFLLYKLKEQGKQLVKIDKWFPSTKTCSYCGLVREVTLSERTYQCSCSLKLDRDYNSAINIKKEGIRLLAIA

SEQ ID NO: 30841 - protein, 542 aa, unknown
  TnpB Polypeptide
VADDLHGCAAAASGEVGRRPQRTAPQLLAEARVVLLADHPAGYPFQAVHQRRDGHLRRVVHPQVDVIVLAVELHQFRLEVGANAGEDGAEVIEDLVGEHFAAIFGHEDQVHMHQEDAMSSVPNIVVVAHRPNYIIHMQRLQAFKYELMPDGGQQRQMRRFAGSCRFVFNKALALQKTRHAQGEKKLGYAGLCKLLTEWRNSAETPWLKDAPTHPLQQMLKDLERAYANFFAKRADFPRFKKKGQQDSFRYPDPKQIKLDQANFRLFLPKLGWLRLRHSRDVLGTVKNVTLSQSCGKWFVSIQTERELEQPLPHGGAVGIDMGVARFATLSDGTFYAPLNSFKRHEAALRRASQAMSRKTKFSNNWKKAQARVQRIHSRIGNARRDYLHKTTTTISQNHAMVCIEDLQVRNMSRSAAGSSEQPGKQVRAKSGLNKTILDQGWAEFRRQLDYKLAWNGGHLIAVPPRNTSRTCPCCGHVSADNRPTQARFRCVECGFEENADVVGAINVLRAGHARCACEVSGEVRPPAAGTRRSDSGAAQCRA

SEQ ID NO: 30842 - protein, 418 aa, unknown
  TnpB Polypeptide
MEVRRTVPVALDVDSDDATLLEDTVDTFLWSAQYVVDHAFQGEYVTTSKTTLENETYDNVREKTDGFNGGLVQAARNKAADACKSVVERWKNGKKASKPRFTSPHVVYDHRTATFHDEYVSLATTDGRIEGDYVLPDEDSDTPHAEYFFSDEYETTGAELHYTNGNWMLHIHCKRDVESDTSEQEPTENGTVLGVDLGVNNLAVASTGTFWTGDEFDHWRHEYQNRRGNLQEHGTRWAHENVQSVGRKEEGRFKMTLHRISNELVAEARAHGCSVIAFEDLTDIRERTGASWGYKWAFRRLYEYVEYKATEYGINVEKVDPENTSRRCSTCGFAHPDNRDSESFECLKCGYENHADYNAAKNIGLRYLRRNQTGAGGGAPLGVRLNSGAVNVNGAYEPPADESARTGVHAESHPFTGG

SEQ ID NO: 30843 - protein, 410 aa, unknown
  TnpB Polypeptide
MLYMNSVLEKQENKLFQPLPLRNNIIPKYIILDTASIINLFCPEKDKNGNKTKKGELLSNVKDNQTEIWCNFLDMKNKIFKNKHYQFHNQIQTDGISCCLLFIRKDLKDKKWGSRVPVLQEQDFHTIEDLSKEQLDTLKERNIVGCDPGKHSLVYMMDKKGNKLQYTASQRKIESYGKRNQIILLQEKKKHKIIEKETRLSIQNSKSVNYDKFKMYLVEKDKLNKETTDFYKKEVWRKMKFRQYSYGKKSIDTFLNKIQETFGENILIGYGNWSRSSQMKYTMPTMNKGLRKLIHKKYDTITINEFYTSQKCCECRKVLKHYKDKNGGEIYRLFTCSNCVSCENKNIVFRTRDKNSAINILNLTECWIHNQTRPLEFQFQASSFTCGNKKTGLSKTIGVKKQPRKSKHAC

SEQ ID NO: 30844 - protein, 319 aa, Vulcanisaeta sp.
LNRWYAVFIFEIKPRVEEPKSIAAFDINENTVTVNRIDLPSTVSKVVNWNRQYMIPELYAIKTNFGKLARRYERIRNAIIEMLKQSFTLPNGNYVNVTNTREFRKRVKHLREGVRKVGRVRHVASELTKNPSIIVTEELGEKPQEEMINGVGKGELRHRIKQTPFKSIEEAVGDKALERGSKLVRVSSYRNSRVCPIHFTRLEKTDDWHVLKCPLGHYVDRDYASVMNMLWKTTPEAWTKAFWWDLKRLSKNMNWRKHENKSNPIIPYTTVQYLHAMLKTFTASEQSPAMPARAKPMNPAREANEDLARKPPKKGGGQP

SEQ ID NO: 30845 - protein, 402 aa, unknown
  TnpB Polypeptide
VIVLEYKVKGKQHQYDAIDEAIRTTQFIRNKAIRYWMDAPSNSKIDRFALNKYSTLLREEFSFVAELNSMAVQAAAERGWFSISRFYDNCKSKKSGKKGFPRFQKDCRSIEYKTSGWKLHKTKRRITFTDKKGIGELKLLGKWDIQSYNLKDIKRVRLIRRADGYYAQFCIGIDVVYIQPKTGEEIGLDVGIESFYTDSNGHHEPNPKFLRKAEKSIKHSQRRIYKKVKGSNCRKKARKLYAKKHLKVSRQRNEHAKKIARNVCRSKDLVAYEDLRVSNMVKNHCLAKSISDASWYLFRQWIEYFAVKFDKIAIAVPPHYTSQKCSSCGVIVKKSLSTRTHKCNCGSYLHRDANAALNILNLAKQARVGQTQSNATGVETTTLLGASLVEQVLTMNVESQCL

SEQ ID NO: 30846 - protein, 606 aa, unknown
  TnpB Polypeptide
MMVPENLLHPVPENLRPPERETTHDGIGRNGARSRPSSFERRPCGSRVRQQRLSCARRSARREGRHPLGAQSSRAARAQRGALQATKRHRALVRSPQGLSTCRDSLRKDRHLLSRSYRRLGMARRDHRMDGMTAKRHTTFHFTLEPTASQVEGLRRHVGAARFAFNQCLRAVVTKLAEKAVKTTVGEDARVPWSGFDLINFFNQWKLTADAGVDEDGKPGLAWRTDVCQQVFEEAAVDLGRAFAAFSDGRKGTRRGRPPRFPRFKKKATARASFRMRNKKAEIRVGSDRTRCIRLPKLGELAVRECTRDLRRMLRKGRAKILFATVSHRSDGRWHITLNVEAAELHPARRHGDASTSTPVGIDRGLRTFAVVADAEGNEVARIESPRPLRRGLRALKRKSKALSRAKLDSRNRHRARACVAKAHARIAYVRRDFAHRESSRLIKTHGRLVIEDLCTIGLMRTSLARAIADSGWSLFASMLTYKARWYGATLTVADRFFPSTRKCSACGHVGAKLDLSERTFHCSGCGHEADRDTNAAVNLARYVIVSEPGPSPHVAAKHAETKNAYGERCSDARLLVVRETTLYEVGKASAWRPRRAVSTSTVNTL

SEQ ID NO: 30847 - protein, 342 aa, Acidimicrobiaceae sp.
  misc_feature (307)..(308): Xaa can be any naturally occurring amino acid
LKRLDRAFASFYRRAKSGATPGFPRFKSACRFDSLQWEDTNGWKVKNQARRLYLLGIGEIKTNYHRPLQGIPKALTVKREGAKWWVSVCCVDVPAQPLSPTGAAVGLDLGVVNIVATSDGELIVGEHFGSRARAQLTLAQQQLSTKQRGSNRRRRQVEVVARLHRRVAHQRRNAAHQLSRRLVNDYGLIVLEDLTITNMVRAPKAKPDPEVPGAFLPNGAAAKAALNHSIHDAGWGTLLSLLSYKAESAGRIVVTVDPCHTSQTCGECGHVEAGNRVHQAVFFCLACGHRAHADVNAARNILRAGRXXLYLRDHGRWQVDPRAAALLAATRRSKRRGLVDLR

SEQ ID NO: 30848 - protein, 467 aa, unknown
  TnpB Polypeptide
MPWNSKNKKDKIIIALKFKLLITSKKLKDQLDDLMREFGAVYNQYLEHWSKSGRYSKTFLEKCQVKGNILVNTRQCCRDVTNESIKSYLAKRKTDPRASPPSPVKGLMTARLNYKEGYKILANNRVRISVRKGVRLVLEFVGSKRHMTLVELGLAEALKFGSANLKKTGKKYYLFVNVDLGKKPIFDDSNGFTFIGIDNNTTNIALSAVNMSGIVLGSLIIDFSPLAHQRFKFFKIRKRLQKVDKKSMIKKIGRKQQKITNHALHLASKLAVGWISKFEYPVVIFEDLTNIRDNINWGKKKNLKYHSWGFRKLQDFITYKALIRGYFNYFVSPHYTSQNCVLCQTKKESHKRKRLFKCSNCGHVDHRDRNASLNIALKGLIDLYSGSHKMNNGLKTVIGYVNLLSKFKKVPSVKNFPMIRKVRLLAADNVDLSTSAMLNGAIYTAQSGAKSPDNSRTLTQCLTSRGL

SEQ ID NO: 30849 - protein, 369 aa, Lactobacillus sp.
MQMALNDLCNYRRYCWNNALATWNDLYEAYCLSADDNPRPSQWLVRNELVANKADWQYGLSARTLQLAVADLGNAWQNFFDQAQPDWGRPKFKSKRAPRQGFKTDRAKLVAGKLRLDKPHNAKDWYDIRFNRQVDLSGNLKFVSIYRENGIYWACLNFEVTIELKIKTNQVTAVDVNVGHLNYTLGVLKTLPLKLSRLYNRIKFYQRQLARKRQVNGKQATKTKAYLAMKNKLQRDYRQVADCQHDLMHKFTTMLVTQFDTIVIEDLSVKKMQMTHVASKGLHRSMFGYFRQLLTYKCQWYGKKLVLADRLYPSTQRCSICGYIKQGKDKVGLQGNQQHGTRHNEYDCYHCGAKLERDENAVANLLALI

SEQ ID NO: 30850 - protein, 379 aa, unknown
  TnpB Polypeptide
MKQMVATAKIQISVDTDSKILLDETISAYSAACNYVSDYVFRTHDLKQFSLNKALYSILREKFSLKSQMAQSVLKTVIARYKTILENQKKWIKPCFKRPQYDLVWNRDYSLARNCFSVNTLKGRIKLPYFAKGMSKYFDHTIYKFGTAKLVNKCGKYFLHIAVTYDIEEVRLPEICNIVGIDRGINFVVATYNSKHKSDFVNGRIIKQKRANYLKLRKELQMRQTPSARRRLKAVGSRENRWMQDVNHCVSKALVKANPKHTLFVLEDLSGIRNTTERVRTKDRYVSVSWSFYDLEQKLIYKAKQNQSIVIKVNPRYTSQCCPVCGHIEKANRNKKTHLFSCKNCGYKSNDDRIGAMNLYHMGVNYLRDSQVPDTVTVE

SEQ ID NO: 30851 - protein, 372 aa, Clostridioides sp.
VIAVKKAYKFRIYPNKKQQELINKTFGCCRFVYNKYLAKRIDVYKNDKETFTYKQCSSDLTNLKKELNWLKEPDKFSLQNALKDLDNAYKKFFKEKAGFPKFKSKKINRFSYKTNFTNGNIMYCGQHIKLPKLGMVKVRDKQVPKGRILNATISKEPSGRYYVSLCCTDVDIEAFENTNNHIGLDLGIKEFCISSCGEFIENPKYLKKSLNKLAKLQRELSRKTIGSLNRNKARLKVARLQEHIANQRKDFLQKLSTKLIKENDIICIEDLQVKNMIKNHKLSRSISDVSWSEFIRQLEYKANWHGRQIVKVGKFFASSQICNKCGYKNEEVKDLNIREWICPSCNETHDRDINASINILKEGLRLITIQNK

SEQ ID NO: 30852 - protein, 389 aa, Bacillus sp.
  misc_feature (96)..(143): Xaa can be any naturally occurring amino acid
MEVNQMIINKAFKFRIYPNQAQAILINKTIGCSRFVFNHFLSLWDHAYKETGKGLTYGTCSAKLPAMKKEFVWLKEVDSIAIQSSIRNLADAYTRXXXXXXXXXXXXXXXXXXXXXXXXXXXXXXXXXXXXXXXXXXXXXXXXKLPKLGLVRFAKSREITGRIVNATVRRNPSGRYFVSLLVETEVQELPKTSSYIGVDVGLKDFAILSDGTTYKNPKFFRSLEDKLAKAQRVLSRRMKGSSRWNKQRVKVARIHEYISNARKDYLDKISTEIIKSHDVIGIEYLQVSNMLKNRKLAKAISEVSWSQFRTMLEYKAKWYGKQVIVVSKTFASSQLCSCCGYQNKDVKNLNLRKWDCSSCRTHHDRDINASINIKNEAIRLLTARTAGLA

SEQ ID NO: 30853 - protein, 480 aa, Streptomyces sp.
VGGAQADLTGEPSSRRAGSITKATHDQWALSRRAQLAHIHSLEAGIRTLTHRLSLGVGERGTKRAPGGYRSRQEWFAKRRRLGVLEDRLAAERADRQAGRVRVTRGSARLLHTRHHLAAAQLTEDEWRRRWAAGRRFLQADGEGGKPFGNETIRVTPGGEVSLKLPAPPAHLANARHGRYVLTGTVAFHHRGEEWADRVTGNRAVAYRIHEDTQRQRWYFTATWTTPPLKTVPLAQVRAGGLIGVDTNADHLAAWRLDTHGNPMGEPRRFFFGLSGSAAHRDAQIRHALTRLVHWARRCGVAIAIEDLDFAADKTREKHGGRKRFRNLISGMPVSRVRARLVSMAAELGITIVAVDPGYTSKWGAQHWQQPLTHNSRKTTRHDAAAVAIARRALGHPIRRRTAPPPHDRRDRAGHRTVQARPGTPGREETRPSIPGQRTRSACPDASAKAGDQCAQHRSGHTAEPGPGNRTPSRSVTRNG

SEQ ID NO: 30854 - protein, 244 aa, unknown
  TnpB Polypeptide
MLSKIGEVKMAEPLRYQGKICSYTVKKSGGNWYVHIPVETGKDERVRCINPESVVGIDVGLLNPAVASDGTKLELPKETLDKLDAKLRRQQKALSRSQRNSRNHAKLLIKKQRTQNKINNIRKDAVHKFTTAIAKSHGKVVIEDLDIQGMKDKAPSRAIRRAHNSSLMGAIRWQLSYKVQHLIKVNRFFPSSKTCSNCGHIKGDLTVGERTYHCDHCGAVIDRDLNAAINLMKAGLVKPEASVE

SEQ ID NO: 30855 - protein, 404 aa, Gammaproteobacteria sp.
MKIKKAYKFKLKPSNAQQVQLNEIAGGCRFLWNKVLRLNLDRLQNKYPLIWYHEADFWSKLWKSSDEYRFLKIIPAHCLQQKLKDLDKAFRDAFDKKQLLKRLPKFKKKKSGDSFRFPEPKHITINNRRIKLPKIGWVGFYKSQEIIGNTKNVTISKKNNEWFVSIQVECENKITAPAASIVGIDLGVAQFATLSDGTIIKPIHAFRKQEKQLTKAQKNLSRKTKFSLNWRNQRNKIQQIHSKITHIRHDFLHKTSSALSKSHAVIVMEDLKITNMSKSASGTIEIPGKNVKAKSGLNKSLLDQSFGEFKRQLEYKLNWNGGILIEINPQYTSQKCHMCGHVAKENRKSQSEFSCIACHHSDNADTNAAKNILAAGHAVLACGEIGLPNSMKQEPLRNCEKVAA

SEQ ID NO: 30856 - protein, 364 aa, Sulfolobus sp.
MMRSKLIASKEALDNFQFVTINGKVVFEDKDRIVRIARAYSQVVKSAIRPLFDGKSIDELTKEFYNILPNYVYLETALKQAKTITDGLLDREDEKGEIIHARIRKFWFASRGNKSDKGNRNVKFHVLEDHVEVKVKDPWNKEWIFGKAYFGKEYLPLLHELEELAERKEEGYGAVISFKHYPMIHLQVPLWLYLKHFSLPKPNGYGLVAGFDLNSDRLNVVVINKDGKVITTKTWWYSEVVSHGFPKEKARALRLNALSEALNFLSRIGVDYVVFEDLFLVRKKKFTRSKSGNRKVSRFAKKQMLIHGVIKALRLGFNVVLVNPKGTTNSEDHERVMREKGFDRHIASAYLIALKGLGMLNDNK

SEQ ID NO: 30857 - protein, 401 aa, Sulfolobus sp.
MDSPLIFKYEFFEILLMARRVKAIRATVSMKIALSEPLLVLVNNYVKALRFSLFWLKENVPNPDENGVLGKVHKELYTRLREEYNLPSKVAEDCYRDALSVYKSWYNNPRRGRFPRVYKPTVWLTPKASYNVDLDNMTVRIASVGELQILGYPRNLKEYLSWRMREARLVVRGDKAFLKVVFEKPLEKVEPRGSIAVDINMSEIVVGKDDIHYVWIPTRLHEVHHWKSLAENLQRKYPRRWRENKRILYRIRSFHQRARRIMEDFARKVGRWVVEIARDFGANVVKLENLENLIKNVDRLPREFRDKLYLMQYRRIQYWIVWQAKKHGILVQYVNPSYSSVLCPRCGRRMEERGYRWFRCSCGYENDRDVVAVVNLNGRGSLALSSAHHMRDVIPNRWWER

SEQ ID NO: 30858 - protein, 657 aa, Streptomyces sp.
LVRSAVEEKTGEVVSAALLAQRVGWCADLVAGMVGSILTEHWNAADVARLASGVDMTGRPLPSNAWMALRRLGWNAAPPEGIKVNDRVVRMAQEQAGRTLRSAHWCADVVAGIVTTWPNNPDRRNPQEWDAVRGAIEGGRDLPGSVIKGRTRQILAFLTAEDRLPADVFELEGVPRVARMLLLAACDGQQATITRDETNPRSVLLRLQLPARTSYRDWSWVAVPLAIPATVPAEGALHLPTLRMGGGRVYADLAFTHGVPKTARAGHMVALGVDWGLNTLLSAGAVRRGGEGRIRALGAGAQFRAAGVLAKQHRLRRLSEKLHTKTAQYERLKDGRERLQRTPDAVLEARNAVLAEELRRVNARRSHLNDALAVSAARWAVDQAIASGATVIYVEDLRSMEAKGMGRSLNARLSQQARGAIVHHMRHLAAEAGIAVVTVPAANTSKHCPNCLTPLRHCTAPDRAGVSGWKWAVCPHPECGWQGDRDHGAWQRIAARGLARQSTTRTGIKTRDMAIPAVVDRLEATAVITTEPKTSPEDRSKTGPTRGKTPRPAPRRRRAPSPARPPHSRAGQRPEGNAPTGRTRLPRAADRNQADNDTISTGTRRRHTPRGAALGAGFHPGRSVCRGGRPSIRSTRGPPVRCGDGGWSSGARTSRCR

SEQ ID NO: 30859 - protein, 437 aa, unknown
  TnpB Polypeptide
MKTNENEKEKKIRKEKGRTASDPLLKTLKFRIFPTPEEIKLLQVGFDQYRWYYNATLNIAYKHYGFEKILNRKKYSDIELRDLVRKYKYVEKDTEHFKFIDFEYDEKRNEVPIPPWCNEILSARIPRGASSKFVSSLNSAITNFKEGNTKKPKMSFMSKKKDTEYMYFEDRSFPLWIKKIKSTYWIRTKDHKRKTISLSDLPPLRSAEIIYDKIKNQYFLHTPVQADWFHDEDRRIESQERLLESTDRIIALDPGVRKFLVGYDPQGKSVFFGEGASLILTGLLLELDKETDNTKQKRLWNTVKHYVEELHWKTASYLVNNYDIILLPEFRVQGMIQSKEMRYKKMTKRLLSMFSYYKFRMKLNFKCAQYKKKLIIVDESFTSRTCTGCQQLGERNGEEEHRCLSCGLVIDRDVAGSRNILIKNLIIQVYAGPVPIV

SEQ ID NO: 30860 - protein, 368 aa, unknown
  TnpB Polypeptide
VRKINRAVKIRIYPNAEQRVQIEKTIGCSRFIYNCMLADKMEHYKKEKKMLRNTPASYKKEYPWLKEVDSLALANVQMHLESAFHKFFREPSAGFPRFKSKKSSRKSYTTNVVNGNIFLEGKYLKLPKMTAVRMKLHRPISEKWKLKSVTVSREPSGKYFASLLFCCESQTVEKSPAEKFLGIDFAMRGMCVFSTGERAGYPMFYRKAEKKLVREQRKLSHCEKGSRNYQKQKKRVALCHEKIKNQRKDFQHKLSRGLAERYDAVCVENLNLKGMSGGLHLGKGVQDNGYGQFLSMLGYKLEERGKNLIKVDRYFASSKICSVCGHKKKELALSDREYVCECGNRMDRDVNAAVNIREEGKRLYKECA

SEQ ID NO: 30861 - protein, 466 aa, unknown
  TnpB Polypeptide
MWRKKVASAVWTAWNDFFFSKGKVVHYKKLENVTSISGNNNATGIALRPANLTTSIIKSTKDKKKKAIEQKYIDMYKRPGAKEDEEVVIPEDAKKQMQIEIKAAVAKVKTTIGKGSLRIVYGKHEFPVVLRNPNTPTGRYQQEALKCGVKYCRITRKWVRNKWKYYAQLVLEGYPPVKCDSNGVVRHPVNQGRVGLDIGTQTLAISSNDICDLRVLALSARAQAKSLVNEIARTQRAMDRSRRATNPKYYNPDGTIKRLKRKHGQKQKRDWKYSKHYYHLRTKLRNLNRRLADIRKMEHNALANELLQHGNEFIVEDMDYKALQKRSKKTKINAKTGRAHTKKRFGKSLSRCAPAKFITILTNKAVRNGGNVIKVDTFETKASQFDHTDESYTKKKLSERMAHLSSGEVVQRDLYSAFLLEHIDTEALKYDIEALKAAFPAFLMMHENTKKRLQEAESYLPASVGF

SEQ ID NO: 30862 - protein, 284 aa, Pyrinomonas sp.
VPIRYDARTYALRAAKGYVSLASVAGRLKVPFALDPHTQGILGQAVGFDSADMIHRKGRFWLHIVVTIPDVEFQPSGDVVGVDMGLSRPAVCSHNRFFGKRRWKEIERRYFRLRRSLQRKGTRSAKRHLRKLAGKVNRFRRDCDHVLSRRIVDSVQPGTVIVVENLVDIRTRTKQRGRESRRRLHSWSFARLRSFLAYKAAAKGCKVVGVDPRHTSQMCSRCGHVHRRNRRSQSRFLCRACGFELNADLNAARNIARKYLASGGMPAAGGPLSTGLACQPAQAG

SEQ ID NO: 30863 - protein, 382 aa, Pyrinomonas sp.
MSMQRTIRVGLKPTPEQADALRETLRQHTECFNAVCAYGWQHQERNGVRLHHATYRALRERFPALPSQLVVAARERAREALRSAFGRARRGKKASQPRSRLCPIRYDARTYALRAAKGYVSLASVAGRLKVPFALDPHTQGILDQAVGFDSADMIHRKGRFWLHIVVTISDVEFQPSGDVVGVDMGLSRPAVCSHNRFFGKRRWKEIERRYFRLRRSLQRKGTRSAKRHLRKLAGKVNRFRRDCDHVLSRRIVDSVQPGTVIVVENLVDIRSRTKQRGRESRRRLHSWSFARLRSFLAYKAAAKGCKVVGVDPRHTSQMCSRCGHVHRRNRRSQSRFLCRACGFELNADLNAARNIARKYLASGATCAAGGPLSTGLACQPA

SEQ ID NO: 30864 - protein, 417 aa, Richelia sp.
VFKAVKVRIYPTKSQQVHLAQAFGCVRWVWNQSLATMTATYQATGKGVTVMTMKKSIPLWKAEYEWLSECYSQCLQQSVLNLGVAFGNFFDGRAMYPTFKTRHGKQSIQYPQNVKVLSNCQIKFPGKLGVVAAKVHRGINGKVKTVTLSKNPDGRYFASMLVDDETVTSAYNSDGKTIGLDLGLIDFCVTSDGSKYQHPRATKKHEKNLARKQKKLARKKDQTSNKRRKAKLAVAKVHSKIKRFREDFLHKLSRAAVATTGGTPATRCLKIVDNNQVIVVENLAVRNMVKNHNLAKAIADAGWGMFCTMLKYKAEMVGKVYKEIGRFFASTHLCSNTLKPLPKMDLSVREFECPHCGQKHDRDINAATNIKNEGLRLLTLGTSVIAPEGYVRPKQYGRKSTTVEAVVVEGRSPHSTR

SEQ ID NO: 30865 - protein, 382 aa, Oscillochloris sp.
MARKAFLYRLYPSRSQARLRDTTLETCRFFYNDCLAERKTAYQERGETIGKYEQLRQVKERKATNPWAKNVHSHVLQTVVQDLDKAFDAFFRRVKAGEKPGYPRFKGRNRWHSIGFKEYGNGFRVDGRRLKLSGIGRVAVRWHRPTEGQIKTLRISKKAGKWFASFSCVVDEPTPLPATGKDVGIDVGLASLITTSTGERVAHPRFYRKAQRRLRVAPRRVARRTKGGKNRRKAIVMLQRQHERIGNQRKDYLNKLALTLVEQHDRIALEDLAITRMVHGNLAKSILDAGWGYLVQRLTYKAASAGRVVVLVNPRDTSKTCSGGERMFEGLTLKDRWVDCPRCGLSLDRDHNAAINILNRGGQLRWSSSSPIGGLGQEAAPL

SEQ ID NO: 30866 - protein, 402 aa, Escherichia sp.
VKRLQAFKFQLRPGGQQEREMRRFAGACRFVFNRALALQNENHEAGNKYIPYGKMASWLVEWKNATETQWLKDSPSQPLQQSLKDLERAYKNFFQKRAAFPRFKKRGQNDAFRYPQGVKLDQENSRIFLPKLGWMRYRNSRQVTGVVKNVTVSQSCGKWYISIQTESEVSTPVHPSASMVGLDAGVAKLATLSDGTVFEPVNSFQKNQKTLARLQRQLSRKVKFSNNWQKQKRKIQRLHSCIANIRRDYLHKVTTTVSKNHAMIVIEDLKVSNMSKSAAGTVSQPGRNVRAKSGLNRSILDQGWYEMRRQLEHKQLWSGGQVLAVPPAYTSQRCACCGHTAKENRLSQSKFRCQVCGYTANADVNGARNILAAGHAVLACGEMVQSGRPLKQEPTEMIQATA

SEQ ID NO: 30867 - protein, 406 aa, unknown
  TnpB Polypeptide
MIARKAVLFRLYPTPEQEAQMAQTAGACRFIYNLALEQRRDWWRQYKAATGQSITYAGQCRDLTALRAEVDWLKAAPVHTLQQALKDLDRAYQNFFAGRSAYPTPRKRGVHDSFRFPDPTALRVERTGRSSGRVKLPKLGWVRLRGWCALPGDIRNITLSRRAGQWFAAVQCEREVVEPASSVLPAVGIDMGVAVFAALSDGTSIAPANHGKKALRALRKAQRALARKKRGSANRRKAARRVARIQKRVANARKDFLHKHSTTIAKNHGTVVVEALLVRNMSASAKGTVEEPSRNVRQKAGLNRAILDQGWGTFRVMLAYKLADRGGRLIEVPAAYTSQTCPVCGGIDAANRQNQASFVCVRCGHTANADTNAAINILRRADSALKPVEGHRVKRPGEAGTRRRAA

SEQ ID NO: 30868 - protein, 399 aa, Phormidesmis sp.
MKRAVKVRIYPTDEQQEALSKAFGCARWFWNNSLAETNRLYKETGKGLSQVGMNSRLPALKKEFEWLAEPYSQVLQSVSLNLSRAFINFFEGRTEFPNFKSKHGKQSIQYPQNVEITDESLRLPKLGVIKAKIHRVFEGKLKTVTVSLTTSGKYFASLLFDDEVPEVEVLGTGKAVGIDLGLTHFAITSDGSKFDNPRVLKKHSKNLKRKQQRLARKQKGSSNRKKARRIVARVHEKIANVRKDFLHKLSRKMVNENQVICVENLAVKNLVKNHNLAKAINDASWSEFTRMLSYKAGQDGKIYQEVDRFFPSSKTCSVCLNRMGSLPLDIRSWQCENCATKHDRDVNAAINIRDEGLRILALGTSATANGGKVSPRVGRRKSSVSKALPIEIGSLHQTA

SEQ ID NO: 30869 - protein, 274 aa, unknown
  TnpB Polypeptide
MSKLYEEQDHLRLRKPFLYSLGSRDENGNRNIKFVSTDRVLIKIPHEDGRHEWIECKALFAKKHIPVIEELLRGRYSYSAGVAIKLRKGEDWRSVWRKRLIIYISIPVELYIKHVKPKNVDVAGTVNSNWLLAGFDFNVDRVCMAIIDPAGRLRDARTEFFSNAANTLKEVSENARKVAVVKLVKYAVAHGVRYIAVEGLRRPSRVEGRVGKWAHRQYLQHLKVLAKRFGLEVIEVNPAYSTIDAIGIALTLGLDKHTASAYIIALRGLAHKSM

SEQ ID NO: 30870 - protein, 395 aa, unknown
  TnpB Polypeptide
MRLVERHIIKDNRFEEICHKSGLLYNYVLYNVRQGIFSKNYLKEYEFSTKINRENQFDFRNLPSSVSQQVISQVFSTIKGWMRGVKEFEKNPSKFHSKPKLPKYKSGKKQNMIVFTTKVCRIKNNYIHFAKILNINPIKTNVKKEELKQARIVPQATCYVVEVIYERKEDNLNLNKNNFLSIDLGLNNLCTCTNNVNQKFFIVNGKVVKSFNQWFNKTKAKQMSFVGDRVTSKRLKRLICYRNLWINDKLHKISRFIIDFCKKNNIGTIVIGLNKNWKQNINLGKKNNQKFVDIPFSNLVDKISYKAKLVGIDVKITEESYTSKVDHLAFEALGKHDIYLGKRKKRGLFQSSVNQLINADINGSIGITRKVFGDSAVRQIIGSGLAFNPIRVNIL

SEQ ID NO: 30871 - protein, 393 aa, Allosalinactinospora sp.
MLSGRRYRLKLTEEQAALCSEFGAVCRAVWNTALDQRRQAVARWQRGFDTPFCGYHLQAAQLAEAKREEDWLRAAPSHVLQQSLLDLDRACQERGTFTVGWRAKHRWNPSFRFPVGNLITVEKINRRWGRAKLPKLGWVVLRRTRPLGGTVRSATVSYKAGHWWISFLVEDGLLTPEHHLGDPVGVDRGVVVAATTSTGEFHNRKFATVGEKARHRRLQQKLSRQKKGSANRRKTLKSMGRISSRAVDRRGDFCSQTARHLADKHSVVVLEDLRTADMTSSARGSVAEPGARVPQKAGLNRAILDKGWHRLELALTNAARTTGTQIVKVNPANTSQTSLSASIWTRHRVRAKRGSGAPGAPTQITRTSTRPRTSFAPQGMRCRPVETSPLGGL

SEQ ID NO: 30872 - protein, 364 aa, unknown
  TnpB Polypeptide
MNKSFKVRIYPNKEQQVLLEKTFGASRFVYNHFLKLKQYLYQEFKIKITYNHTSKMLTELKRQKSWLKVPDKWALQNALKDLDSAYKMFYKGSGYPKFKKKDDKNSYRTSSNIRVDNYFIKIPKVGLLRYKDRYKLEDKNILKIYNVTISKTSCGKYYASISADVYIPCFERTNQNVGIDLGLKDFAILNIGERVKNPKILKSLEDKYRKLAKSLSRKVRGSANYQKARIRLARFHRYVVNVRKDFLHKLSTSLVKIYDIICIENINIRGFMRSKLAKSFQDVAHSEFIRMLEYKAKWYGKTISKIDRFYPSSQICSNCGYKNKDVKNLSIRDWTCPECGTYHDRDINSAINILNEGLMLLESV

SEQ ID NO: 30873 - protein, 358 aa, unknown
  TnpB Polypeptide
VSELKATVLVRLYPTPEQAATLQAHCQEYISTINVLVQALDSDMLPEDASTKDFTAALPSAVKNQALRDARSVLKRSVDLEVIPLLRKPICQWNNQNWHSDGDTLLIPVYQDGQVGQIAIRWSNVEPVGKPGVLRIKRKRGKWMADLAYTLPELEPTPAQGIMGVDLGVKVPAVVHVIGKGNRFFGNGREQRAKRRQFYARRTKRQQAKKVRAVRKSQSKEHRWMRDVNHKLSCQIVSHAQRQGVGIIRLERLAGIRRRTARTSRGAKARKNLIATWTFHQLASFIAYKAERAGIAVEWVDPAHTSQICPACFHRNKATDRCYVCAECGWTGHRDTVGAINNSRRTGRRGHSAGAAVA

SEQ ID NO: 30874 - protein, 438 aa, unknown
  TnpB Polypeptide
MRVVQAYRYALDPSPAKAQALRSHVGARRFAFNWGLALVKARLAAHARGEPVTIPWTMRALRKEWNQVKATAAPWWRENSKEAYAAGFEGLGKALKNFADSKRGTRRGRRVGFPTFKKRGRSRQSVRFTTGAVGVVDRTHIQLPRIGVLRTHEPTTALLEKLKAGTARILSATAALDGDRWQVSFTCEVERESGRPVRPQTVVGADAGLRGTVLSTGEVILNPQPLKHALKPLARLNRQLARRTPGSQGWQATQAKLRRAHAHVRHIRADAMHKMTTRLAKAHATVVAEHLGITGMLRSKRMARAVADAAMAELRRQLRYKCPWYGSRFIAAPRQFPSSKTCSRCGAVKATLPLWERVFRCAACGLEMDRDLNAAKNLAALAAEVQVVAGSGPETQNACGADVKPTVSGQTAMKQAAGPSIVGGAPSSRKGRQLETVT

SEQ ID NO: 30875 - protein, 367 aa, Streptomyces sp.
LNTRHHLAEAGLSEEAWRQRWEAERWFLAADGESGKRYGNETIRVTPEGRVSIKLPAPLAHLANSKHGRYTLTSRVAFAHRGAEWADRVGANRAVAYRIHYDTGRGRWYLTASWQKPVVRTVPLEAARAGGVIGVDTNADHFAAYRLDLHGNPVGNPRRFPYDLSGSAGHRDAQVRHALTRLLHWATRSGVTAIAIEDLDFGAEKTREKHGRRKRFRQLISGLPTGRLKARLVSMAAEHGLAIIAVDPAYTSMWGGQHWQKPLTTPHRRMSRHDAAGIAIGRRALGHPIRRRTTPPRAHQSDAHGHRTVQADRRVLGREEPRPRIPGPRTRSVPPDTARTRATRTPKTVRDVRSEQEWIQDSLLLAE

SEQ ID NO: 30876 - protein, 367 aa, unknown
  TnpB Polypeptide
VEKAYKYRIYPNKKQKEIIAKTFGCCRFVYNTYLAKRIKTYEKDKITFTYNMCSKDLTNLKKELKWLKEVDSTALQSSLKNLDIAYRKFFKEHTGYPKFKTKKTHRYSYETKYSHGNIQYYNKHIKLPKLGMVKIKNNLIPQGRILNATISQEPNGHYYCSLCCTDIEFEQLPKTNQNIGIDLGLVDFAIISDGTKIENPRFFEKSEKKLSKLQRELSRKTIGSNRWNKARIRVANLQKHISNQRNDFLQKLTTEIVRTYDVIAIEDLDVKSMKETDSTIRNKRVGDVSWFEFRRILTYKTQWYGKELSVIDRYYPSSQICHCCGHRDGKKSEDIRFWICPKCNSELDRDVNAAINILNEGLRIINV

SEQ ID NO: 30877 - protein, 368 aa, unknown
  TnpB Polypeptide
MRPNHDQGQALMRVLIASRKLYNAGLEELVTHYQTTGKSLHLYEQDKRHGKAAHPDIPAVVVDTTLKRLHRSFANFFRGRAEGRRVGFPRFKGAQRWDTIQFRDAQHSLRGSYFHAPKLAGGKIRVNVHRPLAGTFKYARVVLRPSGWYLQCVTEAAPTPLPPLDNAIGLDLGITYLVADSDGRMVANPKSFQAGAETLAKAQRRMAKARRGSRRRRKIGQVVARHHERIANRRKDTLHKVARRYVDGYQKIAIEDLRPANMVRNHALARSISDASWGILRSLLTSKAEEAGRELIAVPPHYTSQRCSGCGAHVQKSLSVRTHVCPGCGYVADRDANAALNILDAAFGRSAWTRPSLSLREGPDGNIG

SEQ ID NO: 30878 - protein, 402 aa, unknown
  TnpB Polypeptide
MKTTLVRRSFQYCLYPNKGQTKALDWTLARCRELYNACLEERRDAYRMAGVSISYYDQKRQLPAIKEIRPEYKDIGSQVLQDVVQRADRAFQAFFRRVKVGVDPKKVGYPRFKGTYRYHSFTLTQAGWKLPARDSGRLYITGIGHLKIKWSRPIEGDIKTVTIKRDADQWYVTFSCLVEQAEVETPDRPAVGIDMGLEYYATLSNGEHIENPRYYRKAQARIAACDRRMRTKKKHSKKTKTGGKNRAKAAITLRKAHRHVANQRRDMQFKAVKALVATYGAIAVEALSIDNMVKRPKPRPNDDGTYAPNGATATSGLNKSITDAAWGQFISILQFKAASAGVVVIEVNPRDTSQVCSGCGARCPKTLDVRWHTCDACKLSIQRDHNAARNILMRAGLVRSVA

SEQ ID NO: 30879 - protein, 355 aa, unknown
  TnpB Polypeptide
VKPYDLNKYYAILAKEYDFAGKLNSQARQAAAERAGAAILRFYKNCRAKTPGTKGYPQFQKDGRSVEYKQTGWKLDAARTRLTLTDGFKAGTFKLKGTRDLLGYALAQVKRVRVVKKADGYYSQFCIDAERRVSVEASGKAVGIDLGLTHFYTDSEGATVENPRHLRRSEQALKRLHRRVSSKVKGSKNRVKARGKLARKHLKVRRQRRDFAVKTARALIMSNDVIAYEDLRVRNMVKNRHLAKSISDAGWRTFVSWLDYLAHVYGKVVVAVPPHYTSQECSECGERVKKALSERTHVCPRCTAVLDRDHNAARNILALGVRQLKKTTAGHAESHAWGQSALYPLGATQLDKAAG

SEQ ID NO: 30880 - protein, 405 aa, unknown
  TnpB Polypeptide
MIRSSKVSLKFSNPGKLEALQGFVSEYRKLTQFFVDLLWPLRDGKLPGLLPKEMTSQAQTWLSKRAIQAAGKQASGIVRGAVQKQKQRMFVYKKLLKEGRFKQARRLQWVINQQKISKPSLKMVNPELDSRFVKVDLHPAAKEFEGWLTLSSIGKKIKLELPFKGTSHLTKMLERGQLRPGARLSPRWVSLALEIPDPPKREAGSVLGIDVGVRKVISASNGIQSQDDPHGWNLERIQQRLSRRKKGSKGLGRAQSHRNNYVNWSVNQLNLEGVREVRVEDLKHMRRGKRTGRYLSHWTYSAILGKLGRACEESGVRISRVSPTYTSQRCSGCGWVRKGNRRGDQFRCKSCGFEQDADLNASRNIALGLPAISRRQRLGHANRVGFYWQVPGQESIVPGARGALS

SEQ ID NO: 30881 - protein, 506 aa, unknown
  TnpB Polypeptide
VPQAPQESPDRGRCQRLENPHPGEVLGQRMGGFEPSHSARSCSSVHQGFPDNFCRPRCQPMQGHNLQEAQGEVPRTKKTAVVVDRRLFCLDGRKRVARHDSKVHRGPEGTVKTYEFRLYPNKRQRKRLISYLDAGRFVYNWALADRRDMWRIAKCSTNFYDQSKYLVELRKEHPFLSEVHVHALQTTLKRADLAFQSFFKRCRAGQKPGYPRFKGKDWFSSFSFKENGNGFELDGKRLRLSRIGRVRIRLHRDIDGEIATCTIKRRADGWFALFSVETEPAKPSELYNPVGVDVGLNSFVVLSTGEKIKNPKLLKKARDELKTCQRQLSKKKNGSTRRARHKNRLALRHLRVWRCRKDFHFNVAARLVREFNPIFIEGLDIKGLIVKATEDKKARKKSRAKSENILDAGWGMFVSRLRSKAESAGSAIKAREARGTSQECSGCGEVVKKELWERMHSCPHCGLVKDRDWNAALNILNRGLQLERTVPAARGQVSELPPGTREATPL

SEQ ID NO: 30882 - protein, 411 aa, unknown
  TnpB Polypeptide
VSETVTKTLQATLATPTTGKEQRLQRLLDTYRTALHDAFDNRADTMSAVNDVVTPYDLPYQAKDALKSYVPKLRDTYNAEELDDEHPLRLVNRAATFDYSDEREHGFVWQAPQPGRGTDFWIPLRINPEQESLWFDLLSEDAKAGELRLQRHRTSWELHVTVEYAVEEPTDSDDETYIGFDVGESALITGCALKRDVPRKPMLVSGSRARHLRKEMFTTLRRLQSRDAAEWRVDERFDHYQNALTDIVEKTSRQAVDYAQQFENPVIVLEDLSYIRERLDYGTFINRRLHAWAFARLQGRIEDKATEAGIRVEYVNAAYTSQTCHACGRLGRRSQQAEFVCPHDDCHVSKFQADINAAANIASRVNPWGESVRWEPGRDDSPQDGSACDSATVHREMSETPSQMTLSAYSD

SEQ ID NO: 30883 - protein, 281 aa, unknown
  TnpB Polypeptide
MKGEGYDSFCYPGTGFAINEASVRLSKIGVVKAIIHRKVEGTVKTCTVKRQGKKWFACLAVETQAAPLPENSRAIGIDVGIEKFAALSDGTYIQNPRFFRKDEKALAKAQRKTERYKKRSQERTKAKKVVSRIHERIKNRRHNFVHQESRKIVSEFGIIVVEDLNVKNMSKSPAPKQDVETGDFLPNGARAKAGLNKSILEAAWSMFRSALAYKAESASRKYLEINPAYTSQDCHSCGYRAKKKLSDRWHLCPKCGASLDRDRNAAINILALGVQRLGANP

SEQ ID NO: 30884 - protein, 189 aa, unknown
  TnpB Polypeptide
LSNGEFVGNPRFFRKDEKALAKAGRRQAKTKKRSHERKKANKVLARIHERIRNRRHDFVHQTARRLVNRYGVIAVEKLNVKGMVKNHCLAKSISDASWSMFRSVLTSKAESAGFRSVLTSKAESAGREVIAVNPAYTSQDCSGCGYRPDGLEGRTKKKLSDRWHFCPKCSASLDRDTNAAINILALATS

SEQ ID NO: 30885 - protein, 419 aa, unknown
  TnpB Polypeptide
VQLVEQHVINKSDPRYSVIDEAAFKSKNLYNAALYEMRQAFIHQGIYLSYEEMDKHMQRHEAYEALPAKVSQHVLGQLADAWKAFREAKAAYEEDPSTFTGRPKLPKYKHKSEGRNLLIYTIQAISRKGLKRGIVQPSMLPITIKTQHKVIHQVRIVPRKGFYVVEIVYEQEPVKTAVDPAYYAGIDIGMNNLVALASNKSGFMPVVVNGRPVKSVNQFYNKRKAELQKKLGTTGTTKRMERITTKRNRRIDHYMHTASRWIIDLLVAEGIGTLVIGKNDGWKQEVNLGKRNNQQFVQIPHARFISTLTYKALLAGIRVQVTEESYTSRASFLDRDPLPVRSPGDDAKQAFSGKRVKRGLYRAADGRLINADLNGAGNIIRKVAPDAFGSEGVEDGKGNPLVVHPVRITLTNPKKASGQ

SEQ ID NO: 30886 - protein, 367 aa, unknown
  TnpB Polypeptide
MAKVFRYRLKPTKAQIAKLNDQLELCRWVYNETLAMRKSAFEQEGKSVSYFESKRMLPIWKESKPELKSVHSQVLQDVVLRVNLAFKAFFRRVQSGEEDPGYPRFKGKNRYDSISYPQSGFSVDGNTLWLSKIGEIKFWLHRPIEGFVKRLTIQRSATKKWYVSFLIEESINHPLAPSQKVVGIDMGILNFAVLSDGEFIENPRFLLADEERLKKAQSKRDMLPKGSPQRRKASKAVSHLYEKVTNRREDFAQQLSRQWINRYGLIIFEYLNITKMVHNHTLAKSIMDASWNKLIQYTSYKAEDAGRKVVLVNPANTSQMCSCCGQIVKKDLSIRVHNCPYCGLSIDRDLNAAKNILRLGLQSVASA

SEQ ID NO: 30887 - protein, 465 aa, Streptomyces sp.
MRNHPRIRSLIDLTCCSGDRIVGEGAMGKTAAKPTAVKGEEAERIKREALGIGERRKHHARKTTRLKSHAKTSDAHHRLYRFRFYPTEEQAEQLERTFGACRWVYNEGLALRSEAWERHRVKVGFAETCRALTGWKRAEETGWLQDVSSTVLQQSLRHLDQAYGRFFKGEQRYPKRKKKGRSRDAATYVRTGFRWIEDPERPGTGLITLAKQTQPLDIRWSRALPAEVVPVRLSVTRDRAGRYFVSTLVEERIAPLSPVFVPGSGEPKAVGVDVGLASLVTLDDGTKLDHPRLLKRYARKLARLQRELHRKVKGSQNREKAKLKIARLHTLIRDVRRDLLDQLTTRLVRENQVLVVEELSVAALMRARRGKGKQRKAKLNRAIMDAGWGELVRQLRYKCEWYGRTLVVVDRFFPSTRRCSGCHSMGPKLDVSVRQWTCAECGALHDRDVNAAANLRDEGLRLLAA

SEQ ID NO: 30888 - protein, 394 aa, Calothrix sp.
MRISYQYKIKPTKNQRETIDNTLEMLRYQYNYLLVKRLNWYEQNRCYIDRCPLVCYLPELKEKPNYYNQKASLRQLKKDRTWYKNIHSQVLQEVPKKVEITFDRWLKGDCNGKKSGRPRFKASCRYRTFTYPQFKQHHFVGDRITLSKIRDVKVIVHRPIPVGFTIKTVSVTKKADGYYVTLSLDDQSVPMVKPDFDSNNIVGVDVGLIDFYVASDNTRISAPKYLRKSERQLRKAQKRVSRRKKDSNRRQKAIKKLGIKYKKVADTRKDFHFKTANQLLKKYDVIAVEKLNIKGLAKTRLAKSIHDAGWGQFLSILSNKAENAGLLVIPVKPHGTSQECSNCGHKVKKSLSQRVHNCPVCHTSICRDLNAAINIRKRGTHALSKKAQSMSGVA

SEQ ID NO: 30889 - protein, 204 aa, unknown
  TnpB Polypeptide
MQLPNSGISATMNGIIIKSWDWKNILTGIIRKKHIKEIYGINSFRHRQRRRPQNAVKDYLHKVTRWIAEYCRKEDIRCVVVGDIRNIRKEKDMGHKTNQKLHSLPYNRLYIMLEYKLKRYGIQLIKQEESYTSQCSPLSPEVSKRYAEASNRKERGMYVTDGVRYNADAVGAFNILRKYLSVSGKQKELSLTGLKKPDIIKVAA

SEQ ID NO: 30890 - protein, 383 aa, Clostridia sp.
MKRTVRLKLRPAPDQAEALCETLTMVRDCFDTVAAYGWEQGIKNGVTLHKATYYQLREKHPCLPAQLVCAARVKATEAIASAFALRAKGRKVHCPRTKTGSIRYDARSHKMLPGEASLATTVGRIKVAWTANPHAEAILAKAVEFDSSDLLYRDGTWWLHCVLTLPDEPFSPTGTAVGVDLGINRPAVTSGNVFLGEARWKEIEKRYFRLKRDLQAKGTASAMRHLRRIRHRQQRFRRDCDHVLSKRIMDMAGKGSLIVLENLKGIRSTTKQRGKRQRRRHHGWSYEQLKSFLEYKAEAAGCRVETVDPRKTSQRCSKCGYTARSNRKNQSLFVCGDCGFSLNADLNAARNIAWKYLAQDGMPALGGPSVNRPIVTHVEAKAS

SEQ ID NO: 30891 - protein, 614 aa, Planktothrix sp.
LTKSFLLCSKIFRLGGANRVLHKAVQIRLYPTALQEAHLAQTFGCSRWWWNYALNKSIQVYQDTGKGMGQVALNALLPKLKKAEDTIWLANCYSQVLQATTLNLTTAYKNFFEQRAGFPKFKSKHGKQSIQYPQNVKIVDGNVKLPGNIGIVKAKIHRPIAGKIKTVTVSKTPSGKYLASILTEIEGENPTISEGKIYGIDLGIKHFAVVTDGENVSKYDNPKHFAKHEKNLKRKQKKLARKQKGSKSRNKYRKIVAKLYERVSNSRQDFLHKLSHKLVSDSQAVIVENLHVKGMVRNHKLAKAISDCGWGTFSNLLAYKLERKGGKLVEIDRWFPSSKLCSNCFYKVNEMPLDVREWTCPNCGSDHDRDGNAAMNIRTEGIRMLKTDGSAVWRCRRRGKTKRGMQVRLEAFACEYRSRHCTWYSKSVSAVHTPYPMSYNLFPLPDPKVPTWRRCAALGVDFCLIGLFCAAVGAKGVTLFLLFMIGWLTCRVVVVSKNQGQSLGRWAFDIRVVDSQRNRTPRLLELVKREAFMGIGTFLLLLSLGSLTEGNAGILLLMLPILLDCGAMLFDTSRHPQTVHDRIGQTIVIGSRRGYSLDLKIRYLIDKVKREMRQ

SEQ ID NO: 30892 - protein, 320 aa, unknown
  TnpB Polypeptide
MLSINILLELFGSFADLHSKSPRRPAPFRGAGGIGYTPRILLLHTECIYPLKAIFSGMLQTLMVKLDPSPEQHKMLCETMERFNEACNQIAETVFAMHSANKVEIHKTVYYPVREHFGLSSQLTIRAISKVCEAYKRDKSIKPEFRLDGAIVYDQRILSWKGLEKVSLITLHGRQVIPIRFGEYQKARMDRIRGQVDLILVKGVFYLCVVVEIPEASPYDPVDVLGVDLGIKNLAVDSDGEVHSGEQISRTRDKLDSLKARLQSKGTKSAKRHLKKLSGRAARFSKDVNHCISKGIVAKAKDTQPIVSEHSIHQGQASPL

SEQ ID NO: 30893 - protein, 436 aa, unknown
  TnpB Polypeptide
MHLVEQHIIDRKDPRFAAIDAAAFASKNLYNAANYEYRQAFIHQGVYLTYNEVQKRMQSHEAYKALPAKVSQQILMVLDRNWKSFREGLAAYKEDPSKFTGRPQLPKYKDKTKGRNLLVYTLQALRGGQSKHGIQGLIQPSGLPITISTKQRHIDQVRIVPRNGFYVIEVVYEHEQPKSAVDPAFYAGIDIGMDNLAALTSNQPGYVPVLVNGRPVKSINQYYNKRRAELQSKLGHPGTTKRMERMTNKRNRRIDHYLHTASRWIVDDLVAHGIGTLVIGKNDGWKQEANMGKRTNQNFVPIPHARFISMLIYKAELVGIHVILTEESYTSKASFLDRDEMPVYDPKQSEKPTFSGKRIKRGLYRAADGTLINADCNGSGNIIRKVAPDAFQQAEGVEDGKGHKPVVHPVRLSFPSRSQKASNGGSTQSIKRANTL

SEQ ID NO: 30894 - protein, 398 aa, Streptomyces sp.
VTAKCVKRAFKYRFYPTDAQAAELSRTFGCVRKVYNLALAARTEAWTRQERVNYNQTSALLTAWKKIEELAYLNKVSSVPLQQCLRHLQAAFTNFFAKRAKYPRFKSKKKSRKSAEYTTSGFRYRNGRLTLAKMAEPLDIVWSRPLPEGAQPSTVTVSQDAAGRWFVSLLCEDPRVQPLPATDTAVGIDVGLTHLLTLSTGEKITNPRHERRDRARLAKAQRELSRKVRGSANRAKARRRVARIHARIADRRRDVLHKLTTRLVRENQTLVIEDLAVRTMVKNRSLARAIGDAAWSQFRSLLEYKAAWYGREVVAMDRFFPSSRLCSACGALRERMPLSVRTWTCGSCGTTHDRDVNAAQNLLAVGLTVSACGAGVRPQRRTPGGQSAVKQETPRREP

SEQ ID NO: 30895 - protein, 372 aa, unknown
  TnpB Polypeptide
MLKAYKYRLYPNKQQIEQIQKTFGCCRFVYNQCLSLKINKYKNENISMSKIDLNNYCNRELKKKYEWLREVDKWSLTNSIYNMDSAYQKFFNEHTGYPKFKSKRDNKKSYNTNCNYTGKPTIEVSFEKNKIKLPKLKWVKAKIHREFIGKIKSATISQNPSGKYFVSVLVETEHIPMESTGCMIGIDLGIKDLLITSDGEKFDNIRTTKKYEDKLTKEQRKLSHKEKGSKNWNKQRIKVARIHEKIHNTRIDNLQKISHKLISENQVIVSEDLAVSNMVKNHNLAKAISDCGWYELTRQLGYKAEWNNRQYIKVDRFYASSQTCNCCGYVNSDTKDLSVRQWICPKCGAIHDRDVNAAKNILNEGLRILQAA

SEQ ID NO: 30896 - protein, 398 aa, unknown
  TnpB Polypeptide
MKVNRVEQQIIRKNNSIYNIVDQYCFYSKNVYNQANYIIRQEFINNNNKLSAYDVQKLMQPMDCYKECGSQSAQKTIQLVDKMWKSYFKAIKDWKKNQSKYLGMPRFPKYLPKDGRQVFMIKNIQCSLNNGQFRIAFKPFGGYTVNTHAVGKLMQCRFVPKADYYVMEIVYEIEVPDVVEKRIRICSIDLGTENLVAMVNNVGLQPVVIKGGTIKSVNQFYNKRKAEMQSQLKKETGRDWSKNLQKLTEKRYEKIKYLMHCASKKVVDYCVDNEIDTLIIGLNKKWKQENKNKQNFTYIPFDMLVKQIQSKCEEYGIEVVMTEEAYTSGTSFLDKESPVKENYNKERRVHRGLFIANNGKTINADVNGAYQIMKKVIPEAFSKGIEGAGSHPIRLEIA

SEQ ID NO: 30897 - protein, 444 aa, unknown
  TnpB Polypeptide
MKQVFKLYYDFNKTQLRIIEELSYHTTKLYNIVNYDMRPLNYKSYKVNEKNYKSNFHSQYLVSHNYQHCLKLLEQNWKSYFAARDEYENNPEKFTGKPKPPGFKHTEKNKNEVIFTENLIRGARAGEVLKNGNLRLSLSKKMQNKYGVKSLNFNMMNVKIPSTIGLNKDFSNIQQVRFTFDKKLKKWYFIFIYKIEEKIPFPYLDTMAIDLGLNNLATIVFNRSKETYIIDGKVLKCKQSYYNKRISIMQSKEMKRLKDSKKFKDTKRIKRIRKKFNNFCKNYIHVTSKMIINLALKNNCSKIIIGDFKGIKNGNKAKLFVKIPHARLIELIKYKAKLAGISVIMVNESYTSGCSCLDGEIVGKDAYNKKRRISRGMFRSNQGILINADVNGAYNILYKFTKTSAKSISEYVVYSQLKANNMHNGIMTSPRMVCTPLRLIPIKY

SEQ ID NO: 30898 - protein, 383 aa, unknown
  TnpB Polypeptide
MPRSFMRTLRLRVRRESYGWLDAAAVDVNEVFNYCNETSLKAATRTDTKRKWLSGFDLCNLTAGASPYFDKIGADTIQSVCNLYARKRQAARRLKLRWRVSRGARRSLGWIPFKAASLKRKGVCLRFAGKCFRVFEAERLEGVKWQSGCFAQDSVGDWYLCLPVKVEAEESVAPYEFIGIDLGLKDIAVTSEAERLEAGRWTSRFAQKLAQAQRRGHKRQAKRVHRKAARCRADALHKFSRSMVNKYQNIIVGDVSSSKLAKTRMAKSVLDSGWGMLKGFLEYKSQQAARGFEVVSERNTSVTCSTCGSPTGPRGVNGLIVRSWVCGDCGESHDRDVNAARNILIGSRLRTSVSGNEPSSWLIRPSRVYRVREAGIESAWAAA

SEQ ID NO: 30899 - protein, 383 aa, unknown; identical to SEQ ID NO: 30898
  TnpB Polypeptide

SEQ ID NO: 30900 - protein, 408 aa, Clostridiales sp.
MSDLTKIMKLRINVSPEQETLLCQMTEQYRQACNFVSQHIFDNQFNLAYQSLNKELYNDLRSQFGLKSQLAQSSIKTAIARYKTVKEQLFQNPFKYKNENGNWKYITKTLEWLWKPVFFSRPQADLVRNRDYSFVDDGQTLSINTLGKRTKCTFEGKHFAEYLDGSWSLGTAKLVELKGLWYLHIPVTKAVEDFHKENVRHVVGIDRGLRFLTVSYDEQGKTEFVSGKKIAAKRHKFQEVRRQLQSKGTKSAKRRLKAISGRENRWMSDVNHQISKTLVEKYGKDTLFVLEDLTGVNFEESNLSRTAKQNYDLRSWSFYQLEQFLTYKTHENRSEVLKISAKYTSQHCPKCGTIHKENRNHHKHLYSCQCGYKSNDDRIGAMNIQLLGTMWISGDNHPRYERITNTSE

SEQ ID NO: 30901 - protein, 547 aa, Desulfotomaculum sp.
MEKTYFSNRVYKNTLTTKQVFSITNALIDFNRAKHKAYRMLLAEHNCRVTHDPSVHLQIKELFGFNDYWANSAVQEARAQITSQKELQKMYIAGKEEQIDVKKDRVKELNKRINRLERLLSAVKKGRFKTWRGSNIVKHESGVISVDFKKESLVFFNTYDFEHRYLRPEIKSLKNRVKLIEYSVTCLEGELEKLKSGFLKGCVFGTKDLFRKQFTVEKYKNDHELWLEEWWKARYSSLRISGRLDAKYGNFVFKYDVRTRTLTFDLPDGTAVKVPVVFKYGQEEVDAALVFQSERRKPIAWAIEDHGEYYVFKVTVDVPKNPYINYYKGDGVIGLDMNYDHAALAETDRHGNLVDWLTVPYNLDGLTKGQAVKVLERVAIDIVEVAKLKEKPIIIEDLDTTDSKFRLKYGNKKRNRKITLFAYRTLTNAIIARADREGVAVFKVKPAYTSVVGKLKYMAQRGIPIHVAAALVIARRGMGFKEKVPPVLSAALPEKIRRRHHWAHWAYLQKQVKGIKTHHLYRLGKELEGGAPFKEALERLKSLPRAG

SEQ ID NO: 30902 - protein, 292 aa, unknown
  TnpB Polypeptide
MRKTYKYRIYPTKKQTRMLNETLDECRWLYNHLLEMRKTSYEQQGKSLSLYQQQDTFSLLKEQRPSLKRVHSQVLQNVAVRIDLALKAFFRRAKAGEKPGYPRFRGKDRYDSFTFPQSGFSITNDNRVCLSKVGSLKMVYHRPVKGILKTCTITRSSTGKWSVCFSVECQPERLAPCAETVGIDVGLKTFATLSTGEEIENSRFFRAEEKALVKVQRKHSKLPKGTPERRKHRKVVARVHERVKFKRDNFTHQRSRQIVNCFGVICVEDLNVNRMVHNQVVAHVRRIARSRL

SEQ ID NO: 30903 - protein, 382 aa, unknown
  TnpB Polypeptide
MSLPVRVTVTAKAEAVTPKGDEVLLVEFLKTYRDSVQLVVDEIWGLSEAPSRTELHNMFYSKLMKLGFRAHHVSEIYRRAKEVVKSTRKNKGSKPILRKLTARIHTLDYRLNLNTKTIKIAVLHDKWIELKLKWYSYLNKYLDGSWKPGEILLSYRHGRFYVYITFHRDVVPREPQAIMGVDLNFNNITYTIIDLNSNLVFIGVIPFKGLKKALHLRKLAEDLQWRHPKNWRFLKWARRTRARWLSGARNILVGSAHRVSRRLVEVAREYNAVIVFEDLEKIRENNNSDRKLSWEKPMWCYRRIQEYTEYKALLEGIKTIYVNPARTSKKAPNGKRIKFINYRFVRLGETITTRDVVASWNIALRGLEKLKRMRGLAGYVEP

SEQ ID NO: 30904 - protein, 372 aa, Escherichia sp.
  misc_feature (75)..(130): Xaa can be any naturally occurring amino acid
VKRLQAFKFQLRPGGQQECEMRRFAGACRFVFNRALARQNENHEAGNKYIPYGKMASWLVEWKNATETQWLKDSXXXXXXXXXXXXXXXXXXXXXXXXXXXXXXXXXXXXXXXXXXXXXXXXXXXXXXXXISIQTESEVSTPVHPSASMIGLDAGVAKLATLSDGTVFGPVNSFQKNQKTLARLQRQLSRKVKFSNNWQKQKRKIQRLHSRIANIRRDYLHKVTTTVSKNHAMIVIEDLKVSNMSKSAAGTVSQPGRNVRAKSGLNRSILDQGWYEMRRQLEYKQLWSGGQVLAVPPAYTSQRCACCGHTAKENRLSQSQFRCQVCGYTANADVNGARNILAAGHAVLACGEMVQSGRSLKQEPTEMIQATA

SEQ ID NO: 30905 - protein, 202 aa, Chromatiaceae sp.
RARLPKGTRLPILKNRRKSSAMLARLHARIANVRADFTHKLTTRLCRENQGVVIEDLNVKGMLANERLARAISDLGFGMFCLQMEYKGKCYGVWLVLADRWDPSSRLCSVCGWENEMLALKDREWTCPQCGTRHDRDINAALNLKRLATATALPVASPSGNGGATAERVSAVVGKVTPVRDKCAPHSGQEEHSAPVCALYLT

SEQ ID NO: 30906 - protein, 311 aa, Chromatiaceae sp.
MSGCSLQQSLKDLDQAYANFFAKRADAPRFKKKGQSDSFRYSDSEKIKLDQANSRIFLPKLGWLRYRNSREVLGVVKNVTVSQSGGKWFVSIQTEREVERPIPQGGAVGIDMGIVRFATLSDGTVYAPLNSFKRHETRLRKAQQALSRKVKFSNNWKKAKARVQRIHSRIRNARRDFLHKTSTAISKNHAMVCIEDLQVGNMTKSAAGTIAQPGRNVRGKAGLNKSILDQGWFEFRRQLDYKLAWRGGWLIAVPPQNTSRTCPCCGHVSADNRQTQDRFECVECGFEENADVVGAINVLRAGHGRRFCRDV

SEQ ID NO: 30907 - protein, 218 aa, Chromatiaceae sp.
RTQLRRLSCKVEAAKVGAGFAPRARLPKGTRLPILKNRRKSSAMLARLHNVRADFTHKLTTRLCRENQGVVIEDLNVKGMLANERLARAISDLGFGMFCLQMEYKGKCYGVWLVLADRWDPSSRLCSVCGWENEMLALKDREWTCPQCGTRHDRDINAALNLKRLATATALPVASPSGNGGATAERVSAVVGKVTPVRDECAPHSGQEEHSAPVCALS

SEQ ID NO: 30908 - protein, 455 aa, Chromatiaceae sp.
MQRLQAFKFELKPNGDQARDLRRFAGSCRFVYNRALALQQERYATGEKKLGYADLCKALTAWKADPPTAWLGEAPAQALRQSLKDLDQAYANFFAKRAGFPRFKKKGQSDSFRYSDSEKIKLDQANSRIFLPKLGWLRYRNSREVLGVVKNVTVSQSGGKWFVSIQTEREVERPIPQGGAVGIDMGIVRFATLSDGTVYAPLNSFKRHETRLRKAQQALSRKVKFSNNWKKAKARVQRIHSRIRNARRDFLHKTSTAISKNHAMVCIEDLQVGNMTKSAAGTIEQPGRNVRGKSGLNKSILDQGWFEFRRQLDYKLAWRGGWLIAVPPQNTSRTCPCCGHVSADNRQTQDRFECVECGFEENADVVGAINVLRAGHARFACEVSDAIGPQQQEPTEAVQERFNTTPERRWNPRPSGRGGCQLSLACAVDRLSVNQTRRLRACTKSFRVSGPTFPP

SEQ ID NO: 30909 - protein, 413 aa, unknown
  TnpB Polypeptide
MKKTYEYRAYPTTKQARILGVWLEILRNLYNQALAWRKDTYKATGETVKKLTQEKALTPLRQESETVAQVHIDVLQDAIDRLDKAYQAFFRRAKKGEEPGFPRFKGAGRYRSMTFKHLAKKLIRNIRKRTARVVVPKIGYIKIHYHRPLPEGKIKTLTLRRKARGWYVCIVVEIPDPVEIPVKTTIGIDVGLESFLTNSDGETVDTPHYFRESENRLGKAQRMLSRREKGSKRYQKQREHVAKIYEHIANQRKDFHYKTARALFSQCEEVAVENLKIKNMVRNKHLSKSISDAAWGNFRLILQSKAANVGKKLIQVDPKYTSQRCSGCDLIVKKSLSVRVHDCPDCGLVLNRDHNAAINIKKAAVALRGGVSVVNDPEIPSNGTEARNSISPVGRTSPVLQGGITDRYGGLNQ

SEQ ID NO: 30910 - protein, 569 aa, unknown
  TnpB Polypeptide
LHTTASPACSAAPSRRSQQWAASAQQCVRASPTSLAAPSTQASRPCNADRTRRRRKRRPKPLQPARARRRSRQHKPKPRCKKSSDTPTSPTRSDATPSQIHPSRPRSRLKALPPTSTPRSRQALRNSWAARAQRERVSVVLEAVKVALDPSPAQERLMLSHAGAARFAFNAGLAHVKAGIEAGEKLDWSYYALVRWWNANKDALAVDADGAPWWRENSKEAANTGLDALAKGLSNWAKSRKGARKGRKVGFPKFKSKDRATPRFAYTTGAFGLIEGDPKALRLPKIGRVHCMEDVAERVGDARVLRMTVSKRAGRWYAALTVERDDKPVTKPPTGGAVGIDLGVKTLATLSDGTVIANPRALAASERRLKKAQKALSRKVKGSRRRAKARAKVARIHARVANQRGDAIHKTTTWLAGTYSEISVEDLNAAGMAKNHRLAKAVSDASFGEFRRQLEYKTAKTGARLHVIDRWYPSSKTCSKCGAVKAKLSLSERVFHCDGCGLVMDRDLNAAVNIKVAGSAPETINARGGDISRADTTSGNADPSETRTKQPPTSGMRLGAGLGNETMRF

SEQ ID NO: 30911 - protein, 363 aa, Exiguobacterium sp.
MLKGYKYRLHPTAAQAEFLVRTIGCARFIYNKLLEDRITLHEEAKANGGPKRKPPTPASYKPLFPFLAEADSLALANAKLHLDTAFAKFFAGTAGFPVFKSKRKARASYTTNNQHGTIRIEGNRVRLPKVGFIRFTQHRIFDGAIRSATVSMTKTGKFFVSLLVEQDDEPWVPAEHKIGIDLGLGHFAVMTNDALVTEKIANPRNLRKAEARLKRTQRALSRKKPGSRNREKARLVLAKKHEQVKNRRHDFLHKLSRRIVDENQVVVVETLKPREMMQDRRLAKSIGDAGWGEFVRQLAYKCRFHGRTLVQADPWFASTQVCSACGENGGKKDLHVREWTCAACGAHHDRDVNASLNLLGLAD

SEQ ID NO: 30912 - protein, 425 aa, unknown
  TnpB Polypeptide
MSISNNEKGNKIMLLCKKIKIDVSDQDADTLEFMQRKCRSLYNWQVMRLRDGEKWNLYEAKKSLQESKAYDPELVQVYGKLLQEVYFRLDKAMKAFFHRVKAGETPGFPRVRPRHCFFTLCYPACYLKIEKNMLILPTGGKGRKKQYQNIEARLTEEAPEQFQEVAISRDARGDYYASFGTERDEEKHVEGQVVAFDLGMKTLATGVNEQGRVYHIGGLKGAQWYNKQLDKIRSKRDKCKKKSRRYVRLSKVYKRVSQKKRNKQKDSLHKASHLIAHKTVERTIVVGDLSQRQMVMKQHQERNKKLNRAVYNDWGMYLFVQMLTYKCQLYGKQFHLEDEHNTSKMCSGCGHLQKMPLWKRTYWCVECGLVMDRDDNSAVNILTRFLARRGPYTSVATCDVLQEDSNSVDVTEASCPMIVQQLSMF

SEQ ID NO: 30913 - protein, 534 aa, unknown
  TnpB Polypeptide
MPRKKKPKVGKEDTIFLGVHARLVFPDHRDEAAVLDLMRRFSSATRFAYRRLLEGKTREELKRESGPLCALFGLNTRYADGAIERAQAALDSARELGQDPRKVVFGGRKTFEQLKRKHLSGKALLALKRAWKERRRGLLCSRGDAAKKGNANLRPEPQGDALWLRVNLGNGAHVRARVKTSHPHLKALLERIHASLPYNVTLQLKEGKLYAHFSWSEALPPPVHTRADGVLGVDVNADPYHLALAMVSPDGNLVRYLTLSLEEVDSAPNKGAKELLLWKVAHRVVALAEEHGVAVATERLKYLRKSRRGDGSGRAFRHKQHRLAYRSLLEKIHSLARKRGVEVLEVNPQDTSTIGTLKYAPQLYLSKDVAAALVIGRRVLGFEEKLPKGYEALLKDDAFLAHVQGFYGSRLQELQKLREAEKNPHLRRRLSREMRKARRALSLLLSFPGPQRGRKASLQGSSGSREEVTEGRNPSGAHPWRVLKTGTFLPLLGREVPRDLSPLKPVLLGSWERWKRGRDPHPGGGSACSNVRFG

SEQ ID NO: 30914 - protein, 160 aa, Bacillus sp.
LIKSVTISQTPTGKYFVSVLAEENEQLFSKIDTKVGIDVSLKDFAILSNRTKYGNPKWLRKAEKRLAFLQRSLSRKKKGSSNQNKARLQIARLHEKIANQRNDFLHKVSSEITNKNQVIVIEDLKVKNMQKNHKLAKAISEVSWTKFREYLNYKAVWEGR

SEQ ID NO: 30915 - protein, 368 aa, unknown
  TnpB Polypeptide
MKQYSKATQHIIDMGYGVPLSGKLKLHHATYYPIRELTELPAQLVIISRDNAYEILKSIRARGDTGKRISKPQVKKYFTVRYDARSFTFKPEMVSLSTIKGRLKIPIQIPRYFLRYLDWRSRTADLIYQKGKLFLHVVVSKSITPADYSKHSMGVDVGINNLAVTSDGRFFKGVKGKFARFHRLRRKLQAKGTDSARRKLKRVSGRQKRFMADLNHRISKQIVEPLNGGGCIVMEDLNEIRDRVTIKGKSKVLNRLTNGWTFRQLQNFIEYKAVRKSIWVVYVNPHYTSKTCFRCGETQSIRPKKRGFFKCLHCGFSLNSDLNASRNLRERLKPLVNRRGLYVNQPIVTNDEGEAPSGELNRSLVTSQ

SEQ ID NO: 30916 - protein, 500 aa, unknown
  TnpB Polypeptide
MGGELQENATILDCLASEIRDVSAYATYVVRNDAALGDELSRITAAQPATAGRRAGVTMPDLLVSGKSGRSRKEMLVQHRVVTEFRSYQERVKAANGESSKYVSQGWRRTVDASVPSYGVDYVNLGAVDDHYARIENSPFDDGEIILRMVIQGAWYRLIFDFDNERFRDGKVSLPLIKVENGRPVFIFAVVTDNPIVQFSGDYTIGVDVGINNYATVVVRDVKTGRIAHETTLSQRVHSLWNSVRASERQVRQLREKAEHLLCDRQGRMAALDEAQLHREAASRKKRELAILAAQEIAHLSHLYGNAVVTVEDLSWIANTMQNGRWNRGELVKWLTHYVSQNGGWVVAVNPSNTSQQCHKCGAQVTHPTHELSVCVEHGVMDRDVNAAANIAARSVPRVEKARKTRAKNRKLQPQASLRTPVARRSLKYPGRDRTKSAPTPKMKKNRPRVVGEVTLPISPARVIVSARVLADCGAQGAVGTCQAAITQGNMTDECRLLYP

SEQ ID NO: 30917 - protein, 402 aa, Escherichia sp.
VKRLQAFKFQLRPGGQQEREMRRFAGACRFVFNRALALQNENHEAGNKYIPYGKMASWLVEWKNATETQWLKDAPSQPLQQSLKDLERAYKNFFQKRAAFPRFKKRGQNDAFRYPQGVKLDQENSRIFLPKLGWMRYRNSRQVAGVVKNVTVSQSCGKWYISVQTESEVSTPVHPSASMVGLDAGVAKLATLSDGTVFEPVNSFQKNQKKLARLQRQLSRKVKFSNNWQKQKRKIQRLHSCIANIRRDYLHKVTTTVSKNHAMIVIEDLKVSNMSKSAAGTVSQPGRNVRAKSGLNRSILDQGWYEMRRQLEYKQLWRGGQVLAVPPAYTSQRCACCGHTAKENRLSQSKFRCQACGYTANADVNGARNILAAGHAVLACGEMVQSGRSLKQEPTEMIQATA

SEQ ID NO: 30918 - protein, 493 aa, Bifidobacterium sp.
MTRSSHARPVQEVSAVKAFRTELHPTTAQQAALTRAFGSARWAYNEFLAFNYARYQHHRDGYGAYGYCNAYAFSVRFSLAKLLCKRAEGKPVKPTMAQTQLLDELLVGSGSPAMDIARMVPDVARLLLDTLTQAAQLPHYEPWVVAAHSKSIKQAFMHADKAYGKFFENRKNPAYLKRLAKRGKEPPEHPRFKKRGKTKDSIYLVERVEVERHRIKLPGLGWVRLKEHGYIPVGKHTISSMTVSRVAGRCYVSCIPKQSQHPTRNTANMNPSEGIGIDLGIKNLAIASDGRVVENINHAKEIRRLNKKLKRQQRALSRKLKAITHRTYYTEGPKKGQVKHVTYTRPLRECKNIIKNQRDIERTWQRIVSIRHDHMDKTIHELVSQEPRFITIEHLNIVNMMANRHLARALSAQELGRFVTRLAAACEEHGIELRQVSPWYPSSQLCSQCGYRNHAVRNLNIRAWDCPRCGTHHDRDMNAARNLARAEHYTIIA

SEQ ID NO: 30919 - protein, 296 aa, unknown
  TnpB Polypeptide
MTAYKKSPEKFIRFPKPPKYKKEMAQVIFYNETIRRKPLKQGIIQPTNDCFQIKSDKPFKQVIITPKSFGFVIEVRYEIPDEPTKPRAKGTCSIDLGVNNLAAITSDQHDPILINGRIVKSFNQWFNKNPNKFNSMKRYWRLENYFHHVSKMIVENCKANNVGTIIIGKNDGWKNEMNMGKKNNQTFQYIPFCRLIQKIQYKAEMVGIKVIFTEESYTSKASFIDGDPLDGSKISGKRINRGLYKSKEGKLINADVNGSLNICKKVIPKIEEDRWGRSVAATPVAVNPLSWFTAQT

SEQ ID NO: 30920 - protein, 324 aa, unknown
  TnpB Polypeptide
MIKAHKIRLNPTPEQAHYFTKAAGTARFCFNWALAEWKRQYEAGGKPNAKALKKQFHAIRKQQFPWSYDVSKSVVEGAFMDVASAFKNFFEGLQTGKKRGYPKFKTKRKAKPAFYLANDRFEVGDHWVDISKLGRVNIAEKLRFSGKMLSARISKTASWWFISITVELPDKPVEAHPLPSVGIDVGLNRLATLSTGRQFENQKPLRTLLRHHRQANKRLARRVKGSKNWYKAKEKLARLHYRVACAREDLLHKLTTEIATTYGFVGVESLHVKGLMQNRKLALSFSDAALGRLLTLLTSKVTSVGGTVVKVDRFFRAPRCTITA

SEQ ID NO: 30921 - protein, 296 aa, unknown
  TnpB Polypeptide
  misc_feature (115)..(141): Xaa can be any naturally occurring amino acid
LTVSLSGGKWFVSIQTEREVAQPVPQSTTAVGIDMGIARFATLSDGTFFEPLNSFRRHEKTLRKAQQALSRKVKFSNNWRKAKARVQRIHARIANVRRDYLHKCSTAISKSHAMXXXXXXXXXXXXXXXXXXXXXXXXXXXLDYKLAWSGGLLITVPPQNTSRTCPCCGHVSADNRRTQTRFRCMECGFEEHADVVGAINILSRGMQIRGIKGGARPDGLWIEPSPSFRAGRTSRAVPSSAPKFRCGSRLCGPTSATRRARPDRRADGPLRRWGRRRRSRATVSGREGSRSFVTRS

SEQ ID NO: 30922 - protein, 452 aa, unknown
  TnpB Polypeptide
MQQIITAKLKLNTTPVQLHALRQTQLAYRDGLNAVSHYAFEHGKTSSHITLHKGMYAQLRARYHLPSQLACSVERQVAATYKGLWTKLKKNAEHRRKKITKKRFKGLDKPPTYSSPTVQYTYERDYTFGRNQQVSIGTLNGRISIPYQGYQKHLALIGHGASIGDARLWYDTPRKTFYLLVSLEIDVPEPTCEHLSEVVGVDVGIRYLAVTSTSTGKATFHPGKRVRHHANHYARLRKRLQHKGTRGAKRRLRRIEQRERRLKQQANHQISKQIIAQYPHALIGLEQLTDIRERTKRRKRTRKKNGKGTEQVSAKARKANRVYSQWSFAELHALIRYKATLAGSLAIKVDADYTSKACPMCGHTVDENRPRKGLLFVCQNPDCRYTLHADLVGARNVTLRTLVLRQDWSTTGCLSTTPDASDHEAKAARLRRYAEVRWSPDVTSLRSQTGGR

SEQ ID NO: 30923 - protein, 433 aa, unknown
  TnpB Polypeptide
VSREARPRHELGHVSASLQRFFGYVCDPEVMRTAYRCRAYPDRQQQAVLNRTFGCIRVVWNRTLAARRARWQHQRMGTSYAETDAALTAMKRDPDLAFLSEVSSVPLQQALRHQHQAFSAFFAQRARYPRFKSRRGRQCAHYTRSAFSLRGGELRLAKTAAPLPFVWSWPEVDVTALGPTMVIVSREPDGRWYVTFALDTGASEPLTQTGRGVGIDLGVTDFAVTSDGGKITNPRYLERKARSLARYQRRLARCQKGSANRARAAAKVARAHRKVRCARRDFLHRASTRLVRGNDLIVIEDLAVTNMVKNRRLARAISDCGWDEFRRQLAYKCERAGRRLIVIDRWYPSSKTCSPCGHLLAELSLSTRHWTCPSCGARHDRDINAAKNILAAGLAAAACGAGIRHQETSPVRPAVKQEPQPVTAGIPVLQGGE

SEQ ID NO: 30924 - protein, 590 aa, Shigella sp.
VKRLQAFKFQLRPGGQQEREMRRFAGACRFVFNRALARQNENHEAGNKYIPYGKMASWLVEWKNATETQWLKDAPSQPLQQSLKDLERAYKNFFQNRAAFPRFKKRGQNDVFRYPQGVKLDQENSRIFLPKLGWMRYRNSRQVTGVVKNVTVSQSCGKWYISIQTESEVSTPVHPSASMVGLDAGVAKLATLSDGTVFEPVNSFQKNQKKLARLQRQLSRKVKFSNNWQKQKRKIQRLHSCIANIRRDYLHKVTTTVSKNHAMIVIEDLKVSNMSKSAAGTVSQPGRNVRAKSGLNRSILDQGWYEMRRQLEYKQLWRGGQVLAVPPAYTSQRCACCGHTAKENRLSQSKFRCQVCGYTVNADVNGARNILAAGHAVLACGEMVQSGRPLKQEPTEMIQATAQRQLSRKVKFSNNWQKQKRKIQRLHSCIANIRRDYLHKVTTAVSKNHAMIVIEDLKVSNMSKSAAGTVSQPGRNVRAKSGLNRSILDQGWYEMHRQLEYKQLWRGGQVLAVPPAYTSQRCAYCGHTAKENRLSQSKFRCQVCGYTANADVNGARNILAAGHAVLACGEMVQSGRPLKQEPTEMIQATA

SEQ ID NO: 30925 - protein, 427 aa, Streptomyces sp.
MVTERACEKRQFGHRARLALTPAQAQLMDTQAHAARTLWNLLHDCWTMLPRDKRSLAAADAAIRQGRKEIDWLAVLPAQAAQAVLKTYFQAWKNCWEGRAGRPDFKARFRTVMSVDIPQGRDLCITRVHRRWGMANIPKIGRVRFRWTKDLPVGKRADTANRITGARLVKDALGWHIAFRVQTLEPAPEPRHGPEVGIDVGVTVPLALSDGTTYGHTAWLTGKEQTKLGRLERRAAHRKSFRTRGERTSHRLRATYDQIAGLCARAKRRHLDWQHKTTTVIAAKYGVVVVEDLNITNMVKSAKGTVEVPGKNVAQKSGLNRAIIGEAWGRTVELLTYKTARRGGTLHKVPAPGTSQRCSMCGDTTPGSRESQAVFACKNPDCGWVGNADHNGARNILHVYRTGLALVPAAGRAVVRRARRVKPATAR

SEQ ID NO: 30926 - protein, 393 aa, unknown
  TnpB Polypeptide
MQPTNNKYLMPKQILKAHKIRLYPTDEQQVFFAKSFGCARFIWNKMLGDKIDHYKTTKTTLNNTPAQYKKEFEWLKEVDSLALANVQQNLRAAYSKFFKQGAGFPKFKKKGIKDSYTTNNQKGSVAVTKNTVKLPKIGHIKVKIHQSVNGLIKSATISRTPSGKYYVSLLIETIVNELPKTHSNIGIDLGLTDFIVLSDGSKVANPKFLSKLQAKLAREQKILAKRRAAAKADQRKLSESRNYQKQRIKVAKVYEQITNSRKDFLHKLSFNLIKNHDVIAIEDLNIKGMVKNRKLAKAISDSSWSAFTTMLTYKADWYGKALVKIDRWYPSSKTCSNCDHLLNKAELPLSVRTWDCPSCLQKNDRDINASINILNQGLLLAKQSKTVGATGLA

SEQ ID NO: 30927 - protein, 442 aa, unknown
  TnpB Polypeptide
MKQVKRAYKYRLNPTSEQEMILLRSIGATRFIWNWELNLRTKAWKERKEKISSVDLMNLLPKLKLEEETAWLSEISSVVLQQCLRDQDRAFSNFFTSIKGTRKGKKINYPRFKSRVTSKKSLRYVGDAFRFKNRELYLAKIEGSLNIVWSRSLPDGIQPSSLTISFDASGHWFVSILVEDNIEQLEPTGVKPRTVGIDLGLKDFAVFSDGTVIEHPKFLKKSEARLKQYQRMLSKTQKGSKNRTKARIKFAKQGAKVKNRRNDFNHKLSTDIINRYDVIVIEDLATSNMARNHRLAKSVYDSALRDFRAKLTYKAEWYGRELVVVSRWLPSSRTCFECKWYNSELKLSERSWTCLGCGTLLDRDLNAAKNIMAEGLSVLDKRNLVKNVCFDELGSPSESGEVRPKVEVTASTSSNVSQDTLPTRYSSMNQKPSIVKELYEVT

SEQ ID NO: 30928 - protein, 256 aa, Clostridium sp.
  misc_feature (246)..(253): Xaa can be any naturally occurring amino acid
MGKIKEFGYIPKNSVVKSGTVSQKADRYYVSILVEETYIKISNPNNEGLGIDLGIKEFAICSNGNKFKNINKTSTVKKIEKKLKREQRKLSRKYESLKIRNKNIKEGRATRQNIQKQVVKVQRLHQRLANIRTDYINKTVFSIVKQKPSYITIEDLAVSNMMKNKHLSKAIASQKFFEFKTKLMSKCKQNNIELRIVDRFYPSSKTCSNCGGIKKDLKLSDRIYKCDCGFNIDRDLNASINLKNAXXXXXXXXKRI

SEQ ID NO: 30929 - protein, 377 aa, Oscillatoriales sp.
MLASNEGVDDEMNKSLFASIVTRHNLLNHYLTLYSISWYFYYKQMRKGRNAMKVTYQYQFYPDTSQKSTLNHWLRICRYWYNRQLGDRFDWWEMNRTAINACPLIASISTPREKPNYYTQKQQLPILKKDLIKVFHSGELLDFKQVDSTILQDVSKRVDKAFERLIVGDSKGGRSGKPRFKTEADYRTMTFSTANNDWIKLVRKNWLYIRLPKLGVIKVRMHRPIPDGFTVKQISVTRKTDGWFTQIMLEDTSVPHFIPDKVTPNWDNSIGLDAVLHEDVYLATSSGTKLPSLKPLRKNQAKLYQISRKRNKRKRGSKSRRFLAKKEARQHQKIARSRQDFHYKTAHRLVKSGAKFFFHEDLNLKGLTKRNKVKLSG

SEQ ID NO: 30930 - protein, 418 aa, unknown
  TnpB Polypeptide
MEVRRTVPVTLDVDSDDAALLEDTVDTFLWSAQYVVDHAFQGEYVTTSKTTLDDETYDEVREATDGFNGGLVQAARNKAAEACKSVVARWKNGKKASKPCMTSPHVVYDHRTATFHDEYVSLATTDGRIEADYVLPDEDSDTPHAEYLFSDEYETTGAELHRKHGEWQLHLHCKTEMESDMPEQATIENRTVLGVDLGVNNLAVASTGTFWTGDEFDHWRREYENRRGDLQEHGTRWAHQNIQAVGRKEEGRFKMTLHRIANELVTEARDQECSVIAFEDLTDIRVRTGASWGHKWAFNRLYEYVEYKAEEYGIDVEQVDPENTSRRCSHCGFTHPDNRESESFECLKCGYKNHADYNAAKNIGLRYLRRNQTGDGGGAPLGVRLNSGTMNVNGVYEPPASTEARTGVHAESHDFSRG

SEQ ID NO: 30931 - protein, 239 aa, unknown
  TnpB Polypeptide
MLQTEIRRVVSEEDMHVVFVCFHCHDFVVMSISDICNVVGIDRGINFVVATYDSKHKSGFVRGRSIKQKRAHYSALRKELQMRHTPSSRRRLKRIGQRENRWMQDVNHCVSKALVVNNPAHTLFVLEDLSGIRHATERVKTKHRYVSVSWALYDLEQKLIYKAKQNQSSVIKVDPRYTSQCCPVCGHTEQANRNKKIHLFTCKNCGYKSNDDRIGAMNLYRMGINYLYDSQVPDTVAAE

SEQ ID NO: 30932 - protein, 379 aa, unknown
  TnpB Polypeptide
MLIQKSYQYELIPNGEQVRKLKQFCGCCRFVFNKGLEEVKKYYESTCHFLNYAQLTALLPKWKQDADWLKDCHSQVLQQSMKNLSRALMNFSAGRANFPRFKAKGRKDSFRFPQGFKSDQNNSRIYLPKIGWMRYRNSRTIIGTIKNVTVTAKCGKWYASIQTEYEQEKPVHSDGDIGIDMGIVRFATLSDGRYFEPINAFHSLKGILAKLQKRLKRKIKGSNNWKKLVARISKLHHRIANIRKNFLHQISNTISKNHATVYVEDLQVKNMSKSAKGTIENPGKNIRQKAGLNRAILDQAWYEFRRQLEYKLRWRGGQLIPVSPQYTSQCCPACGHTATENRTTQALFACVQCGYAENADVVGAMNVLQRGRALLSAAG

SEQ ID NO: 30933 - protein, 346 aa, Methanosaeta sp.
MILTYKIKHGRDFSDELRKAKKIAEYAIQTHNRSSKDVKHIGLKSIIANQILKKYSSNKRIKKVSSAKLAIPHQGIKIDQNTKTIYAPCLKLYLKYDFPNNFEKVNQIELGEEYAYVSVSIPEPEMDKPSGWIGVDRNTTGHIAVVSDPESGKVLKLGKAALHTHTKYKNTRKSLQKKGKYGKVKEIRNRENRIVRDINHKVSRKIVNVAKELGKGIKLEDLTGIRKSKNQAESFRYAKNSWSFYQLQQMIEYKAKLLGVEVAYVEPAYTSKTCSRCGKIGDRNGKSFKCPACGHVDHADSNAGFNIAKRPCIDRSVKERDLAEGTTDSPKIALARTPLTIEPQVL

SEQ ID NO: 30934 - protein, 387 aa, Escherichia sp.
VKRLQAFKFQLRPGGQQEREMRRFAGACRFVFNRALARQNENHEAGNKYIPYGKMASWLVEWKNATETQWLKDSPSQPLQQSLKDLERAYKNFFRKRAAFPRFKKRGQNDAFRYPQGVKLDQENSRIFLPKLGWMRYRNSRQVTGVVKNVTVSQSCGKWYISIQTESEVSTPVHPSASMVGLDAGVAKLATLSDGTVFEPVNSFQKNQKTLARLQRQLSRKVKFSNNWQKQKRKIQRLHSCIANIRRDYLHKVTTTVSKNHAMIVIEDLKVSNMSKSAAGTVSQPGRNVRAKSGLNRSILDQGWYEMRRQLAYKQLWRGGQVLAVPPAYTSQRCACCGHTAKENRLSQSKFRCQVCGYTANADVNGARNILAAGHAVLACGGCQQTG

SEQ ID NO: 30935 - protein, 158 aa, unknown
  TnpB Polypeptide
MRHTPSSRRRLKAIGQRENRWMQDINHQVSKALVENNPKHTLFVLEDLSGVRNATERVRTKDRYVSVSWSFYDLEQKLIYKAKQNQSTVIKVNPRYTSQCCPVCGHIEKANRNKKLHLFACKNCGYKSNDDRIGAMNLYRMGINYLEDSQVPNTVMAE

SEQ ID NO: 30936 - protein, 495 aa, Xylanimicrobium sp.
VSALTGSVLVVARHATFQLVADPTVEQARALARHEGAARFAFNQGLRLHLDARNESKNAANGTDGDAVSVKVPWTGFDLINAFNAWKKTEEAGRRFVVDSTGAAVLEVTGLAWRAEVSAQVFEEAVVDLGKALGAWTASRRGKRAGRAVGHPRFKKKNHERGSFRMRNKTSKTKAGQRATIRLGENGPRSVTLPSIGAIKVHDDTRRLRRMLDKGRARILFATVSRRGGRWRISLNVEAADLHPAAQHQPRDDADHSGWAGVDRGLHTPAVVALADGTQTLRIDEAPKALRTAQPVTRRLQKSVSRKVKGSVNRRAAIRRLARHHERVRARRHHFLHQVSNLLVKTQDRLVIEDLNITGMLANHRLAAAISDAAWGELARQITYKMAWRGGQVLTADRWFPSSKTCSACGDVNQTLTLADRVFTCANEDCGRTLDRDLNAAINLAAWGEQHHSQVLDPEARGQVINAHRREGSGRRARADETSPDDVGTLTATAA

SEQ ID NO: 30937 - protein, 385 aa, unknown
  TnpB Polypeptide
MTITRGYRAKLYPSCSQKQVLLRHIDACRFVYNYFLDKKKTTYLETGKNITYLTMSKELTKLRHETEWMRSVQFQPLQQSLRCLDVAYNRFFRKQARFPNFHKKNGKQSMRKVMGWSINGNHVNIMDGVSVRFRGAFPAKREGTLTVTRDTAGNWWASTIATEKRKTPRLKGSIGVDMGLNHLAVTSDGEKHENERSLGGSLARIRSASKNLSRKLKGGANRRKAKILLARLHLKVANKRKNRLHHVSKAIVGKNHAIIALENLAVKNMMANRRLSRSIADVGWGELVRQFGYKQEWNGGKMVKIDRFFPSSKMCSSCYFVMPSLPLSAREWTCPRCEAVHDRDVNAAKNILKQAGEQLGAETNALARASARTKRLSMKHGYAQG

SEQ ID NO: 30938 - protein, 443 aa, Okeania sp.
LKARYKYRIYPNHIQIAKLNQLFGCCRFVWNQSLAHCNQLCVNGEKKPSYVDLTKQFITQAKKELLWLKEVASTPLQQSLKDLDQAYKNFFDSCTGKRKGIKVKSPKFKSRKSKQTARFVGANYKINQDKIYLPKVGKIKIVWSRPLASNPTSVTIIKDSAGRYFASFVVEISPDSLPKTDNSIGIDLGISTFATLSNGEKILAPKPLKQNLKKLTKFQRKFAKTQPGSNLYEKRRLKIAKLHGKIKDISYGMLRKRTDFLHKLSTDLIRKYDTIVLEDLNVSGMIKNRKLAKAISDLGWRQFRTLIEAKCEKYGREFKVIDRWEPTSQKCSCCGFKGRKKELNVREWTCLNCNTFHDRDINAAVNILNTSIVKTVTQPITKVEKAAELENPLQLSLFGEVAGGQSETLNKTRRKRQSSRKKGADFSESSTRLEFFKQLSLFD

SEQ ID NO: 30939 - protein, 415 aa, Leptotrichia sp.
MYLTLKQQVKHLSKEEFKILKYLCHIAKNLKNQAIYNVRQYYFQNKKYLSYNENYKMLKNSENYKKLNSNMAQQILKEVDGSFKSFFGLLKLAKNGQYDNKKIKLPNYLAKDGFTTLVIGFVILKDDILIVPYSNSFKKTHQEVKIKLPPVLKDKKIKEIRIIPKQHSRYFEIQYIYKVEEVQRELNKNNVLGIDLGIDNLCTCVTNAGASFIIDGRKLKSINQYYNKTNAKLQSIKDKQKIKRTTLRQKKITRKRNNRINNYLSKAARIIINHCLNNDIGKLVLGCNEDFQRNSNIGSINNQNFVNIPYGKLRDKLIYLCKLYGIEFKLQEESYTSKASFFDGDEIPIYDKENQKEYIFSGKRIKRGLYQTSAGKLINADCNGALNILRKSKVVDLNVLYNRGELNTPKRIRVV

SEQ ID NO: 30940 - protein, 453 aa, Leptotrichia sp.
LKKLKNRKEVKELKIKRTGRFKVKPSHPDYEMIKLHTIEAKEIYNYANYIIRQLFFKKSGKENFSLDFINEYPELAEDFNIYISEKLQFTSTFYRIICKFSRIKKYSINSKMVQNIVDILKRDWKSYWKLLKLKLESKYTKNINIPRYKKKYSAVEYNPQVISKNKLKNRYIGTSKMNKGFKIPKFYKGYNFKSSRVIWKNGFLYMETVYEKEVPEKRKIKKVAAVDLGGKILMSIAYNFNRRGISISANMLRSLNHYYNKMIGIMTSLLPKGIRISKAIQNLWRKRDEQVRNLLGYYANKLIKEFKLIGIDKFIIGKNKEQKQEIDLHSKLENRNFCMIPFNKLVEILKYKCEENGIECMEQEESYTSKASFLNNDFMPVYGEKNKDYEFSGWRNGRTYKIKGKNQKIHADYNGALNIMRKAGHELIEKVCFFYTDWIFPAGKFKVRNLNYI

SEQ ID NO: 30941 - protein, 177 aa, unknown
  TnpB Polypeptide
MTQRAYKYRFYPTDEQAHQLACTFGCCRVVYNWALKRRTVAWFEHGQRVSYNDWSHALTELKKQEGTQWLAEVSSVPLQQSLRHVEKAMVNFFEKRAKYPKYQKKHNKQSATYVNTAFVWNGSTLTLAKQKEALTIVWSRPLPDGCKPSSVTITKDKAGRYAHQHLRGRGDTHASFN

SEQ ID NO: 30942 - protein, 389 aa, unknown
  TnpB Polypeptide
MLRATKVRLYPTEEQAEFLNAQFGAVRLAYNKALHIKSHYYRVYGVSLSPKKDLKPLLAVAKKSRKYHWMKQFDSIALQQAVINLHTAFDNFFNPKLKAKYPQFKSKHGKQASYHCVGVSVLDEAIKLPKMQPIKAVIHREITGTIKSITVSRSACGQYYASILADDGLALPEPIKTIDSVVGIDLGLTHFAIRSDGIKIANPRFVARAQANLRRKQRQLSRKQKGSRNRAKARLLVAKCHEKTANARADFQHQLSRTLIDENQAVIVETLKSANMMKNRHLAKAIGDAGWHGFVVKLGYKAKAEGKHLVKIDQWVASSKTCHHCKHKLDNLPLNIRSWCCPKCQTIHDRDTNAAINIENEGILKLKAAGHVVTACGGLRKSPIVGVAA

SEQ ID NO: 30943 - protein, 168 aa, unknown
  TnpB Polypeptide
MGIRKLATTIEGGKPQFYGKQVRAIRGRGYHLRRSVGKPSIIKKWKHREQRSVRHEVHTITRRIVEHAKRMNAIIAIGDLKGIRNQNKGRSFNRRLGSQPFYLFKQLLTYKANWEGIRVLTVPEAYTSQTCSRCGVRGQRVAGRFSCPNCGLTKSACITILWSLILQS

SEQ ID NO: 30944 - protein, 407 aa, Mollicutes sp.
MNLVEKELIYPTDERFNLIKELTHLSKNLYNASLYDVRQYYFETKKYRSWKSQRPIFTKNHNEDYYALQSHVAGEVLMQVGRQFLSFFNNKTTTNKRIPRYKDKNGFNIVTFPKLAISKDVEFDENRNIYTYTLCRKSYNLKVESTKPHIKMVKFSYDENNDVIKCFKIYEVEEPKIKKDNSRYFSIDPGLNNIVAVFNNIGIRPFLYNGRPIKSINQYYNKNLAKLQSELPNNIKSSKAIKSLSLKRSNKIDYEMHKISNHIIQLAVDNNISKIIVGNNSGWKDGINIGKRNNQNFVNIPHSRLFKQLEYKGLLSGIEVIITEESYTSKASFFDKDEVPIYDLNEKQEYTFSGKRIKRGLYKDSKGNIYNADLNGAGNIMRKVSDKAYKNIGKTRELIQRPILVTL

SEQ ID NO: 30945 - protein, 395 aa, unknown
  TnpB Polypeptide
MKAYKTYKTEIQPNKRQIELIHQTFGNTRYVYNQFITLNLDRIEKKQDVISGYDYSKMLNNDPDRPEWLKKSPSKAIKQAIMNGDKAIWDFLKGDKGEPNFKKKTKDNSFYLIGTIKVERHRIFLPKLKWVRLKEFGYIPNTIKSVTVSMKNGRYYISCLSHKTKDERVPTSEQGIGIDFGLKDQFITKNEIIPSVNHSNKVKKLEKKLQQKQRALSRKYEGNMIDKVYYKTGKKKGQLKSFKWKRPLCECKNIAKQRLVVNKLYERLTRIRTDYNQKALQSILKQKPRFVVIEDLNVKGLMKNKHLSKSISKAQWYMSRLFLTHQCEKLGIELRLVSRFYPSSKLCSNCGYKNKDLKLKDRSWTCPECKVVHNRDVNASINLEQCQTYTVLTTV

SEQ ID NO: 30946 - protein, 382 aa, unknown
  TnpB Polypeptide
LDSFPASESLSIREVRHIGLKSTISSQIIRKYSRNQDLKSVKNVKLIIPSRAVNVDRDESILVIPCLKLLLNYHFSNNFKRISQIEIDSTYAYVAVVFPDDEPGSSGHYIGVDRNTKGHIAVVADPESGKIWKLGKMCYHTHKKYESIKKRLYSIDKHKQLKAVETRERNIVKDLNHKISRKIVDIALYNGCGIKLENLRGLRKLNSKIGGAGKAEKNKSENTKREQKRARNKSKEICKDSEENVKKARKHLLSCEYSLNSWSFRQLQQFIEYKARLRGVEVAYIDPHATSKKCSRCGLIGNRHSKQFECPHCGHVDHADVNAAFNIALTPKGNGQFTAERDAGKGSTDTPQKVLDRTIFNKRTASEETFPQFAWEVCQFLT

SEQ ID NO: 30947 - protein, 382 aa, unknown; identical to SEQ ID NO: 30946
  TnpB Polypeptide

SEQ ID NO: 30948 - protein, 475 aa, Corynebacterium sp.
VSQKVVIERVTVKGATPYLGDATDGSPIFSRNGNDVMDWLCSAWRTRYNQLRSQRSRYDQDRNLVPLGKAVDTRTVKQVRQDCSWLTAVPTLVLESPSKIERTHWFAAAQRRKTLRSKGNHPGSMPRFRSRKRDDDVFTCWFNDGRNALFDQVNRNHGIVTITGQNPPGKRLEKSPRFRIRLHVRVSEPIRDYTSVQVNWSRRTLVFTNSPEPVDRTPTGKLVGVDRGVVHQTATSDGGVSDLPRKRLRDIDREVRRRQKAQARSLKASGHTSQKEYRRAGVSNRFAAHDQEISRLKNTARRIVSDAQHKISHSLVRDFDVVVLEDLNLKAMLSSPSAKPDLLNPGRFLPNGKAAKRGLNRVLSTAALSRLGEMVTYKAESCGVTVVTVDPRNTSRHCPRCGHTGKGNRESQAVFSCTSCGLTANADSVAAVNIATRGVAMLQGGAHPGVEVSKPELEFTESSVRLTCEARTSSR

SEQ ID NO: 30949 - protein, 571 aa, Paraliobacillus sp.
VLVLTIKAYFSNRVYKNVNTKASVEDTQHTLFVFNQAKQYRVQREVREKRGSKEKGKSSIHQQVKAKFGLTDYYVNSAVQEGKALLSAQQELKKMYISNKEEQMKSVKKKIKSTKSRLTVLNKIKNSFIKEKPNFNKTSPEQQKGNFFVVKFKTKTDLYYNAYDFEHLYIDNQIKHITSRLGRLAFKLDRFEKQTESLENGVKSVCFGSKKLAKARTTTEKYQNNPALWKRDWYLARYGKMTISGRKDAKSGNFVFHYNPDTNQLTFKAINGNVVTFDNVVFPYGQENVENAIHTQLGLKNKKHFGKPIGWSIEDHGEYFVFKCLVDVPPNPYVNYSKLGGIIGVDSNVDHLAISNVNSIGQLIDSFVLKFDIEGKTSGQVSKLIEAEIITLVDYAAKHKKPIAIEKLNTTKSKVKNTYGNKKANRRMSQFAYNKIVMAIKSRADKVGVEIYEVNPAYTSQIGKMKYMKRFGISIHESASYTIARRAMGFKEKLPPALHSLVPEQKQGLHHWAQWRSFSSCLSFVRVHVFYKIELSGQSRLSSWSSLFSQRATSDFERIGLSRLESRKSKA

SEQ ID NO: 30950 - protein, 443 aa, unknown
  TnpB Polypeptide
MTNWKFTIVTQLHECNNRALIEYIEASRRDYGRALREAFYTIKHVGIVKSKYNTYLQHKYGISKRNAHAIISDAQGRFNALKELKEYERKQLERKIRHLEDTVIPKLVEKRNQNSTKLQEGVSVSLVKQRNLRLRVVAKKSRLNRLKQKLVTLEYQLKSGRLKLCFGTKRLLKQDYKGFIEQRDSQMSFVGAREETACNQVLQLAYNRMSNQFLIRLRKDFGGYKSAKGEARYVYGKVYFNYHKGQIVSILRSKASPLSYRIVKKRGRHYIYCTFEFQVENCAVVTRSDYGTVGLDFNKGFVTLSETNQYGHLVQTQFLPYRFKSGNKTKTELQGVANNVVRLALKTGKDVCIENLDFRRTRAKTESKIGKEYNGMLHSLAYREFSEAMESVSYRNGVGLTKVNPAWTSWLAERIYCKPMKLNIHTGASYVIARRGQGYKDAV

SEQ ID NO: 30951 - protein, 638 aa, Streptomyces sp.
MVLPLAVTDPADISRLDGLYSAMWSLKRAVQRDARAKVDAYWAAYHERNEQGAKAVRQRLGLSREALERSAYEHLEDSGHLKHHVSKALAMHIADEVWNGVSRHLFPDTTGHRFGRPKVGIWHDFTRIPGRARSHTTENKWETFRLVGTLHGHVMAYTDGGRHELMQPRQMPTPTAPEGRVPTGKITAAGKPGTRRANWWDYKGPLAVVFAGGPEGKRGDLVLPVRVPQAPGQRERVRHFLANPLAWHKVDLVRRRKASAPGGWVHEAHLTVLGPGYSSPAVRAMRDRAAQLDRIGGVDGNVSNLSIASFPASLGGGKPESTEITLTDAERLLVEKQAKKKRGRARALERSRRASNAAQYGMSKKQANRATRRAAKGLEPKAVTVPGGARDTRSDGVPKQAFRRDRLSATYREQRARQAEHAASIAEYRRHRARQAAREIIATHGPVLVAEDCDIRTWYRLWGKRLSQTTPGMLISALKAECEAAGGRLVRASTWSTALSQHCLCGERVHKRLRDREHKCIACGLVGKRDRVSAALAAFVRFTDVDDPKTAFLDTTASRNAQITYAEALEEALRESTTSCPKPPRRSGRVAAPRQRGTSAPRTAGQRNRATPDETRPVRDHAGKPGPRTACSPQLTLW

SEQ ID NO: 30952 - protein, 504 aa, unknown
  TnpB Polypeptide
VVSRTYSRVPYAAFDKNGGPLNLNEVLNGIRKDAELVAHYALKEMTEQNLALSTYFDRLKPSGAGYMMGLHLPTQVKKQFKSGSSRLERMFREQVVSNLRSWAARVEVMTQTSTRHVSDGWKRTASDSKPASLQPRLALSAADKQYREMTVTPERIELKVIVQGQWTTLHFPTPPQLLEKGCEPGVPDIWVDKNDRVVFGFHGKTDPGRPKFSERYVVGVDVGVTNPAAYVVWDTEKKQVVERSLLGQRARSLNNKIKRGAKQVSVLRRKGRDEEAVSHREHLSNRRCELSILVAQELTDVSWRYGNAIVSFEDLSHIKNTMKHGRWFRDEVFRRTRDMVEADGGRVMKVNAAYTSKRCHVCQSDLDMSDYSYPRCTTCSITHHRDVNAAANIAQRANHTKACQTRKRHATKTKRIRRSKCHVKPLRHPGTKNKPTPKAPQNRPKTKNQSHPPLPKREVSKGMCPADTRVSAVDHNAWFQTTSGTTNPKESQITNMADMVYPKE

SEQ ID NO: 30953 - protein, 505 aa, unknown
  TnpB Polypeptide
MPSKSVVSRTYPRTPYAAFDKNGEPLDLNKVLEGIRQDAELVTHYALREMTEQNLALVTYFEGVKPAEAGRRMGLFLPTEVKKRFRSGSSRLERMFREQVVTNLRSWATRSGVISGNYTGYVSVGWRRTVNGSKPKALQPRLALSATDDHYRNMSVTLKRISLEMVVQGRWVTLHFPVPPQLLEQGCEPGVPDIWVDRNSRVMFGFHGQTNPGRPKFSSRYVIGVDVGVTNPAAYVVWDVEKRTIVEQSLLSQRSRSLSNKIKRGARQVATLRRKGKDEEVAPHRVHLSNRRRELSILVAQEITDAAWRYGNAIVSFEDLSHISNTMKFGRWFRGEVYRRTQDMVEADGGRVLKVNAAFTSKRCHVCQAGLDMSDYSQPRCTTCGITHHRDLNAAANIAQRANHAKACQTRKRHATKTKRVRRSKCRVKPLRHPGTKNRPTPKAPQNRPKTLAYSSLPSGEVNKGMCPAESRVSAVDHRGDSGFQTISGTTVPKENLKDWAYLKE

SEQ ID NO: 30954 - protein, 325 aa, unknown
  TnpB Polypeptide
VLRDLDRAFVNFFEGRASYPSHKRRSGPSPGIRWPQGVEVNGRCVWLPKLGWVKARLSRKVEGVIKNTTVRFDGLQWHVAIQVEQEAIAPAKKKAPSIGIDGGVAVSIATSDGQLIHLPVATEFEERRLGMLARRLSRTEGGSRRNARARCRLLVLRRRISDRVNDFRHKLTTRMAKNHGLVVVEDLALRSLSRSGRGSDESPGRNVAAKARLNRSLLEQGHAETVRQLGYKLSWLGAELVKVPAAFTSQTCPQCGHVCTANRAARDRFQCVACGYLGHADIVAAKNILAAGLAVSARRGSREPLKREPARLRRLSRRQAGIPAL

SEQ ID NO: 30955 - protein, 325 aa, unknown; identical to SEQ ID NO: 30954
  TnpB Polypeptide

SEQ ID NO: 30956 - protein, 244 aa, unknown
  TnpB Polypeptide
VTLTKTPVKEQIICSVDLGINTDAVCTIMRADGTVLGRKFINHPSEKDRMYRTLGRIRRFQREHGSAQSRGRWAYTKRLNIELGRKIAGAIVKNAEENHADVIVFEYLEMQGKISGKKKQKLHLWRKRDIQKRCEHQAHRKGMRVSRVSAWNTSSLAYDGSGSVSRDPKNHSLCVFQTGKRYNCDLSASYNIGARYFIRELLKPLPVTERSLLEAKVPSVKRRTSCVYADLKELHLQMEILKAA

SEQ ID NO: 30957 - protein, 501 aa, Calothrix sp.
MSTITYVKGLPTPSIEMNSLGFTSFEMFLTDFSLHFKQATIKAIDIILSSKNFEKVKSKVNTQLQKEFNLSKRQVNGVITLALSKVDSADECRKNHIKQLEGKLKSALIWIKNSEKKLKDSQKFYANKNWLQSKTGCKFPFCCDLKSGRSNWHSLKFQIHHKKRYVYQLDQKIAHLKTARLQVKVSSNEVFIVGSSDESFGNQVCQYDGSKLLFRVPYCLEAKYGKYVETEIGSFDRNINRLPTQGAKTWHFYRKNNRWVVAVQFTPKPIETVSRPIQYGAIGIDINPDSIGWAYVDYSGNLKEFGTIPLQSGLGKNFNSQQLVNASIELATLATKYACPVICEKLDFCKKKESLRENGKKYARMLSNFAYSKLYQFLESILSNRGITLYKKNPAYTSIIGLVKYSKMYGLGSDVAAALVIARRGMDLSERLPASVSAYLEVNSRKHVWSGWSKLNKITKNAAIIKSRHDYFSVPNWGMVVKDIVEQVSVKTERRAASKST

SEQ ID NO: 30958 - protein, 516 aa, Calothrix sp.
VYTIYSKFNQGGECNLLTNYVYKLQPNVSQSNEMGRTIDMLRSHYNWCLGDRIAQYNQQFIQGDYCDIRTKAEACPITCFVSKNGASGFPWKDDKEIESISQYIQGEYCLIPVDIKNPRRSAGSIQITELPILKVARPWYADIDSTVLQQNVKRLDTAYENFFNGKGFPKFKKRSNFTSFTYQMGVKVSGNKIYLPKLGWMRFHNSRPIPPGFVIKAATIRKRQDGWYISIRIEDKTIPDYVSKPLSEVNKVIGCDLGITKLVHLSDGHQIENPRVATNKKTRRMLKVRQRRVSRKNKNSNNQKRASKRVGRLHKKIADKRDSYQWKIASEIVSRNVDAIGVEDLNIAGMLRRCKVKVDENTGRFLPNGQSIKKHLNRAISDASWNELVLKIEYLAAKQGKILVKINPKNSSIECRNCGHVDKSSRDGETFICTQCGYYEHADIGAAKTIRDRVIQLIEYQKVHGDCVEPADKTAKRPKKRKEKSARSSLKSKRVEPGNPKSKGENPETGIQEDIA

SEQ ID NO: 30959 - protein, 575 aa, Calothrix sp.
VGVSKLQTAYKFKLRPKQGQIDLLEDWQHKVGYIQNRSLGDRIATYNNTFAMGDYCDLYTQREVSALNLYCDINLYLTHDIPNIVSPLYCSVSKSASLGNIWKEDKPNLRRSKDSNKPFNARRSGFEMHSNWVTEFKQLYPEFQTVNADVIQQALRHVDGAFNKFFSGKAGFPNFKQHKDISFEFKPGTVRIIKKYIIFPTLGGMRFFKSREIPKSWEIRTVTISKEVDGWYVSVLLRDETVPTISVKRLEECESIQGVDVGIKKLASLSDGTLITNPQFLKRSERRLKIRQRRVSRKKKGSHNRKKSATRLARLHQKIRRQREDYQWKQAKIIASKSDIIAFEDLNIKGMKSRCKPKKDVNEVCPQGEATGKYVKNGQAAKSALNKAISDASWSSLRQKTEHQASKLGNLVVLVHPKNTSITCPECGHISKTNRDKEKFICEQCGYSEDADINGAINIANKAMLNLGLDTLRMDSPKVTPKNEKELSSPLGDEPGNPANSTVKQLRLLSIKSVPVEEKPTVSRPKRKPRKPKIGTQLDLFEVRQFDGTETDTADWTHLFNRFDGDDERSVRKTS

SEQ ID NO: 30960 - protein, 408 aa, Calothrix sp.
VTVGDDASGIQQKVTTELRAKSPYFGEIYSAVLQTNLNKLDDAYTNFFKHERGYPSYVTRLDSFEYKPGQAKIGLTNKNYATIYLPGIGNVNFHNSRSYEFGSVTDIRSVTVSREATYWFISVIVEIPDIIQDQIPLDKVKSVVGIDVGVNKLVAFSDGSFAINTKPATNKKTARRLAMRQRSIARKVKGSKNRKKAVIKLARTKHKIAANRNGRNWKVANDIVKMSDAVVREDLKIKNMVKRAKPKHDGKGGYKKNGASAKSGLNKVILDCGWGDIYNKIAWLALKAGKHVIVVNPKHTSQECPACGHIDKANREGEKFLCTNCGHTDHADTKASRTIAKKAGLVFPKNEKTLRADCAKVTSVERTTVGVVPRNHAFGTSGEQMCLFDIAEYHSSDKRITKKYGRTS

SEQ ID NO: 30961 - protein, 454 aa, Calothrix sp.
MAKKEKKQMGVQQILLSPDTETLSILKYLCEQSGKLYNNGVYFARQTFFKTGKLLTGKFDLDFEPSVAKTLVAQSLPSTPMQQTLRSVTEAFKSFKELRVLYFQGQLHFKPQVPDYLTGSKLFKVAYPNSGGQRPVLINNQLRFSLGLTVKRWFGVPEFFLPMPTNIDYSKVKEFTILPKNGAFYLEMSYEVAPQKHELDINQALSIDLGTADNLAACVDTLGNSLLIDARAMKAMNQLWNKKVATRKEGKPQAYWDSWLDRVTRKRNHQMRDGINKAARLIIDHCLKYGIGTLVIGWNEGFKLNANIGHLSNQKFAQMPLGKLKDRLKQLCDLHGIRFVLTEESYTSKSSYLDGDSLPVYGEKPEGWKASGKRVKRGLYQSADTSIVNADLNGSANILRKVASNLGIDLSRLGRRVLTTVARVRLWHVPRKEPRTQATLSAESQTIRGLRVSK

SEQ ID NO: 30962 - protein, 555 aa, Calothrix sp.
MPSRKQTYVKQLYINTDSGLFLADYAAISQGASIFSLKGLLENQKQSKLKTSLQNEFAINRRQASSIVAFIEGEIKSATESRARHIKTLESKIKTLKSSVDALEKKVKKHVEYLKAVAKYNATNKLGKKAKISAKHKPQFDDACSVAFGQKIGTHYQGAKNKLHHQKRKLYKMICQLKHLKSLPLHVNLGNKENIYFVGSKDESNGNQVCQIILGLEKHSLDILKIRVPPALEHRYGKYIEIPINLNGYGDTEIRSAWASGQAITYRIIQRKYGVWEAHITVDVYRPITSETVMLGCIGVDLNLNSVAWCKVNADGNPKRFGDIEFNLHSLSHHQTEAVLAEVITQLTTLALAFKCPIVIEELDFEIKKAQLNSGISHQRYNRMISSFAYNRFYELLSSRCFKLGIKLITVKPEYSSLIGLTKFMSNYGMNSGTAAALVLARRAMNYSEGVPARTAYFDQESKKHVWSHWNRLSKRVKGAARHSFFQPRPTASSSLRNGTTSNGVLEFGNSVANGYIDSGGLNNPNEQTFASPHGRLECHPETDGGNRTTNRDCA

SEQ ID NO: 30963 - protein, 417 aa, Richelia sp.
MLLSIKVELIPNNKQVTQFRKACGVARHAYNWANALIKGVLVERETDKTVKLPSAIDLHKKLVSEVKSVNPWYYETNKNVPQQALKELRTAWDRCFKKVAKQPRFKKKGCKDSFYLESGSKAKPKINNDGKKVKLPSIGWVRLAEPLPVTATHNCVISRTAEKWFIAIKYEVEKPIVKADRSTVGVDIGIKELAVCSNGKVFKNPKAYRTGSKRMKRLQRSVSKKAIGSNNRKKAVSQLAKLHARIANIRKDAIHKLTTYLAKNHSIIKIEDLHVKAFLKNHKLAGAIADCGMYEFKRQLEYKTEKFSSQLVLVDRMFPSSQICSNCGNHRHKMPLKERVYVCPECGHVEDRDLNASKNIERWFEGIFVPVRSEVTSQTVSSTEIACGVDKPDSSHAVATLKQEVNTKTNHCPDKSR

SEQ ID NO: 30964 - protein, 381 aa, unknown
  TnpB Polypeptide
MYRAIKVRLYPNKEQEQTINQLLGCYRFVYNYMLNLKQNEYKDNNNNLSLCDLAKYFHGTLLKNKDYQWLKEQNTKVMQQAIRQMLTAYDRFFKLHTGFPKFKSKKDKQSALFPITTISKKNTFKTKHISLVKQLKNIKFSCSNLYFKRLQVYKDKIRSATISKTKSGKYFLSILIDISQDEFVKFKKTGKSVGIDLGVKDFVISSDGKKFENKYFLKKQENKIKKLQRQLSRKVKGSNNRNKQRIKIAMAFEHLVNQRENYIHEVVNELLMKYDTIFMEDLNVSGMLKNHKLAKAIQEVGFFRFKDILQNKALMNNKKVILIDRYYASSKTCHNCGYIYKDLTLNDRVWKCPECNMTHNRDINAAKNILNEGQRNYNSSL

SEQ ID NO: 30965 - protein, 378 aa, unknown
  TnpB Polypeptide
MLRAIKVRLYPNKEQEQIINKLLGCYRFVYNYMLALRKQEYDINKINLSLNKLSKYFHGTLIKNEKYNWLKEQNTKVLKQSIRQLCNAYDNFFKYHKGYPKFKSKKDKQSALFPIDAISKCNTFKTKHISLVTSLKNIKFHCSDLYFKRLQTYKNNIRSATISKTKSGNYFLSILIDIEEYEIVKFKKTGKSIGIDLGVKDFVISSDGKKFENKHFLKNHENKIKKLQRQLSRKVKGSNNRNKAKIKLAKAFEHLVNQRENYIHEVVNELLMKYDTIFMEDLNVSGMLKNHCLSKAIQEVGFFKFKTILQSKALTNDKKVILINRYYPSSKTCSFCNYKNNDLNLSDRFWQCPQCGKSHDRDINAAKNILNEGQRTIK

SEQ ID NO: 30966 - protein, 405 aa, Hydrococcus sp.
MLVQKAFKVTLIPSRNQFVLINKTIGCARFVYNRFLARCKELYDSEQKTLNFFGCSRELTQLKKEIEWLKEVDKFALQNALKNLETAYKNFFADLKKPSSKRRFGFPQFKRKHSFKQSYKTNFTNGNIQVRENYLKLPKLSWVRYHKSQEIKGTIVNVTVTRTKIGKYIASILYETEIEKHSDVDKNIGLDLGIKSYLVTSESEEVENPKYYRQTLRRFRKANKKLSRATKSSNNRAKAKTKLARIYERVTNKRDDFLHKLSTRLIRENSIICIEDLRVVNMVKNRKLALSISDASWSKFVAMLEYKALWHDRIVQKVSPWFPSSQTCSCCGFINPEVKDLEIREWDCPKCNTHHLRDCTAAVNILREGIRLLTVAVGAPDTQNACGETVRPGDIQAGLAEAGIA

SEQ ID NO: 30967 - protein, 452 aa, unknown
  TnpB Polypeptide
MTQVHCYETELKPKHNSDIIEYFEQYRRKFNEAVRFTWQYYNNQDPLIAQKSKLNTLIQNKFNISTRGANSIISYVFGEHRALLELKKTELRSFQSEISELKKDIAELSIKVNNLSRKAASNQLNDKQLKKYRNAKIKLVAMKKRLDRRNNALPKIEKQIETKKLSLCFGSKALFAHQRLERDHLSWYIKFIEARDNSIYYIGRREETACNSQCQLIYDRKHNSFKIQLRKEYACQANDRDKYVYGECYFRYGNKEIQETLSLKNSPISYRIFKRDDRYFLQATITADKAGVQQESKVIGVDFNKGFVALSEVKEDGNLINTDKIYYRFRKGDSSKNDLRVLADTLAKRCVNNNASLAIEDLNFAKKKTKAMKHKKDKKYNEMLHSLAYSNFSEFIERACFKNNIHLSLVNPAYTSIIGKEKYSENKKLNVHTAASYVIGRRALNFVDNRPV

SEQ ID NO: 30968 - protein, 453 aa, unknown
  TnpB Polypeptide
MRRHLSGFKTKLDPNKAQARYFARACGVARFSYNWALEQWQKQYQAHKKDPSVPLPNEAALRRQINSIKKTEFPWMLEVTKCAVQYGIKNLGRAFQNFFNNPKHFGYPRFKKKYVDDSFTLSNDDFKIEGSRIRIPRIGWVRMHEALRFENAKPIFATVSRVADDWYISLQVELPNLEHLRPAVNRGKVGADLGVKKMVKLSDGQAFEAPKPLRKYLQKLKRLQRKMLRAKKGGSNRAKLGKAIARLHRRIANIREDALHKATSYIAANYSTVVLEDLNVKGMLKNHKLARCIVDVGFGEFRRQLAYKMEQRGGELIVANRWYPSSKLCRFRHNKNEELTLSDRKWVCPHCGRQIADRDLNAALNLYHYEESWGSESTSVRKDSSESSPDLAPPVVACRQGELVGGSSSPGTTASTDEEAALLQSHPEVTALQRLGKKTQLLSASELQLSSNS

SEQ ID NO: 30969 - protein, 340 aa, unknown
  TnpB Polypeptide
LTQEEINSINGGKFIEDCELRRKFTELKQQPEYSWLYKMNNNITKQAIKDACNAYKKFFKNKVGKPKFKSRRKTKPSFYNDCLKLKFKKDKVLIQKIGWIRISEPERVTAFVFSNPRIKHDGKYWYISIGVEIEAQTVDLTDESLGVSVGINNLAVCSNNYIAKNINRDKKVKKQKKKLRRLQRRVLRKYRKYKKGVKIKKTSNIIKLEKKITLLYRKIANIRINHIHQTTAAIVKTKPSRVVTENLNIKKLMKNRHLSKSIKEQGLYNFKTILKYKCKFYGIEFVEVDPSYQSLIKCVVCGNTKKDLKLSEKPDKCRVCGNTIDKNYQIALNLSNYRIS

SEQ ID NO: 30970 - protein, 304 aa, unknown
  TnpB Polypeptide
LQVRFRYRCYPTPGQRIALAQAFGRARVVWNKDCAGRYVASFVVDVDCSRLQPDTKAVGPDPGLASIAVDSDGEKIAPPKFLRSGLKRIKRLQRSLGRRVKGSSNRQKARLHPAKAYAKVADKRLDVLHKLDTRLIGENRTVVSEDLNVAGMLKNRRLARPVADSGWRMPRTLLESRTEMYGREIKVISRGEPAFRTCSTCGHKDGKKELSVRVWTCPACGAEHDHDINAARTILAASPAARINACGDEDKTCLQASGVEAEIRLQSRRTVMSSSLTKGIPVLEGGEEGRSFLPNALMNHGPQR

SEQ ID NO: 30971 - protein, 392 aa, Streptomyces sp.
MVLSVKIVTQVKLVPDAAQMSALWSTLRTVNDLANWVSGVSFARGVPREYELRKYTYAHLKDRGLGAQAAQHVIKKVCDAYAALHANLRAGNLGKKGSRRRIRIESKPIAFRAQAAQPYDDRCLSWQYDARTVSIWTTAGRLKGVRFVCSADAFKMLQRYRKGESDLVERDGAFYLIAVCEVPGAAHYEPDGFTGVDLGIVNIATTSGGYRAAGRQLNRYRKRQLALRAKLQHKRTKSAMRRLKERSRRERRHVRNTNHITAKAIVTEAERTGRGLSLEDLRGIRTRVRLRKPQRVAFHSWAFAQLAHFIAYKARRAGVPLVFVDPAHSSNECARCGRVDRRNRTSQARFACRSCGVVAHADRNASHVLARRGQAVWNAGRESRVPAVRPIG

SEQ ID NO: 30972 - protein, 374 aa, unknown
  TnpB Polypeptide
VILTYRYRLLPLKSQHRALERLCAAQRELYNAALEERIDCYRKTGKTLTYIDQCKGLTKCRHELPDLGELPANLQRWTLKRLDDAFRGFFRRVKARNGKAGFPRFRGKGRWQAFGFAEFSGIRFDGKRLRFVGMPSGLKVHLHQELPKHADFRSCVFRQDGSGWFVSLQIAVPTPEKRAIATVVGVDLGLKVFAHCSDDVPVPNPRIARRAEKELRRRQHALSRCQRGSHRRHKVRAHVVRLHRKITNTRNSWLHKESAGLVKRADVIVVEDLKVANMIRHPTFARSIADASWSRFVSMLDYKVEKTGGHLIRVDPRNTTLECSRCHELVPKSLAMRTHKCPSCSLIIDRDYNASLNIRCAGIGAGALNVIGLR

SEQ ID NO: 30973 - protein, 394 aa, Nonomuraea sp.
VRRSYKYLLRATSKQATALAQCLEDHRQLYNAALEHRHTAYAKAGASIRYGEQSADLKHIRGDDPGGQGRWSFSSQQATLRRLDKAFRAFFDRVKAGRIPGFPRFKGRGWFDTVEWPKDGDGCRWDSQPEHPAATYVRLRGVGHVRVHQHRPVKGRVKTIAVKREGNRWYVVLSCDDVPAEPLPATGAAAGIDMGVASLVTTSDGEHLANPRHLAATAERLETTQRALSRKKRGSKRRRKVVARVAALHGKVRRQRLDYAHNAALALVRDYDLIVHEDLPITNMTRSASGTIEAPGRNVAAKAGLNRSILDAGWGVFLTILAHKAESAGRELIAVNPAGTSRTCARCGHCAKENRVTQAEFACTACGHAAHADVNAAVNILRAGLALRRASEAA

SEQ ID NO: 30974 - protein, 371 aa, Methanohalophilus sp.
MDRTIKLKLDMSEEDKTSLKNTVVCFNNVFNIVAEYGFANHTHSKVSIHHATYKDIREQYPQLPSALVQGARDVACEALKAVKKMRLPVSKPFSAIRYNKRVIRIIFEHGFASIASADGRVKVHFTLPEYYKQYINWEIRSSTLRYDTANDVFYLHVTLRKESPEPTGNTVMGVDRGIVNVAVCSNNVFFNSKEVKNTRAKYAHLRQELQSKGTKSAKRLLKKIRRKERRFVTDVNHCIAKEIVNMPYDVIALEDLTSIRVQNRKGKNFNRKLSNWSFYQLEQFIRYKAEALGKRVISVDPRYSSQKCSKCGHTYRGNRDGSSYRCRNCGFQIHADLNAARNIAHAGITCLSRLSVNQPNVGMSTVQDTAQ

SEQ ID NO: 30975 - protein, 337 aa, unknown
  TnpB Polypeptide
MSSNKFRVWLNNEYLPQHPEYSWIKEAYSKAVTQAVNNGQTAFTRFFNHESAFPNFKKKGRSDVKMYFVKNNPKDCRCERHRINIPSLGWVRIKEKGYIPTTKDGYVIKSGSVSIKADRFYVSVLVEIPDNKITDDPNEGIGIDLGLKEFAIVSNGKTYKNINRSARLKKLEKQLIRKQRSLSRKYENLKKGESTQRANLQKQKRKVQKLHHKIDNIRTDYINKTIAEIVKTKPSYITIEDLNVKGMMKNRHLSKAVASQKFYEFRTKLQAKCREKGIELRVVDRWYSSSKTCHCCGAVKKDLKLSDRIFKCSCGYVEDRDFNAALNLRDVTTYEIA

SEQ ID NO: 30976 - protein, 418 aa, Fremyella sp.
MLVFEAKLEGTNEQYQSLDEAIRTARFVRNACLRYWMDNRDIGRYELSAYCAVLAADENFPWASKLNSMARQASAERAWSAIARFFDNCKKSKPGLKGYPRFKKEQTHGSVEYKTSGWKLSDDRRYITFNDGFQAGTFKLWGTRDLHFYQLKQFKRVRIVRRADGYYAQFCIDQERIEKREPTGKTLGLDVGLNHFLTDSQGNTVDNPRHLRKSEKSLKRLQRRFSKTKKGSKNRAKFTNKLARKHLKVSRQRKDFAVKTARCVVQSSDLVAYEDLKVRNMVRNRHLAKSISDAAWTQFSQWVEYFGKVFGVVTVAVPPHGTSQNCSNCGEIVKKSLSARTHICPHCGTLLDRDHNAARNILEIGLRHFSQVGGAAHESGSRTVGHTGTLNASGDIDLCVSEETPSSKSSPRKRKSKK

SEQ ID NO: 30977 - protein, 238 aa, unknown
  TnpB Polypeptide
MSLPEGVIGAVLGVDLNVDGSLAVTSTGQFIGNADYLNHKRDEYERRRGRLQQTGTRSAHLTIKSIGDRFGRWSEDYLHRVSKAIVQEARRHDCSEIAFENLENIRKRISNASKFQQWAFRTIQGFTEYKAEEYGILVDTVQPAYTSQRCSHSECGFTHEDNRDGDEFECLKCGKELHADYNAARNIGWRLVQHWLKSGAGRANCQVALESGVLNANGEYSPAESIGQSGSPLTSPPL

SEQ ID NO: 30978 - protein, 376 aa, unknown
  TnpB Polypeptide
VNPLVKMFEYKICRSHRNRKLDLQIDSAAKIWNLCIRIHRTYYHLFGKFLSKNELQKMLVRLKKKGYFPFLKDIGSQAVQDITDRMDRAYKAWFKNLKKGKKKGRPRKKKIFQYKSFTLKQCGWSVDEETKTITINKKKYKYHKSRDLEGEIKTVTVKRDACGDFWIYFAVEVEETEVKVRSGEIVGFDYSFEKDSFLVGHESRFDVLAPSFFRVNLKTFQKLSRALSRKEFGSNNRVRARLALARQYRRSCWERKDYHYKLAYELCHRYSVICLETLNQNGYKNRHGKKVADRGFGQFLLILQHIAKKVGTRIVFVDKWFPSSQLCHCCGFQNKALKGKFWIRKWTCPSCGSFHSDRDRNAAINIYNEGLRLLAS

SEQ ID NO: 30979 - protein, 648 aa, unknown
  TnpB Polypeptide
MTDISKNIYNNTLFIYKVYNIYQNDIHKDVYNFIITNNLHIKYIKTDNIEKNKYEKYNKKAKKTKKTDDIILITDYFYSMFDKYYKFYVNNKKNIDSNNQIIYKYIISDIKNNDIIISNNNYNEIINKYINEVIELKDIIFNNDNKNITIDNIVKSIVKSLYIKNYFYIKKQIENKYKVDDKYKDVIEVINNNQYIYDNNENLTYRNKIIKELNINFSSIENLINRLSYKYIETNKEKLPSDVIINIIAKAYGNIKSYYALLKSGKQSKTNISKFLDKEAKFNLFYYYRSFKKLDDGIRLNVGEYVNKNYNLINKDNNYKSILMNNKIKYYNENNLVNITESKIKKDNKKDIFYTKINDKYINNDNIYSYNYIYLSLPKKIEYENIKLIEIVPINNKIKVCITYEKIFENPIIDYDMDNYNSLSIEDKLKKTISIDTGIKNLFTIYDPIGKQHIIKGGTLLSINHFYNKKIDYLNSINKKLYNKSKYKRLDSLLEERERKIKGHFNQIINKIVNTYKDKEVFIIGYNQNWKDKTNMGKKNNRNFYQIAYKQLIEKLEEKLKCINKKMILVKESYTSKCDALALESIGYHETYLGNRKKRGLFESSTQKLINADLNGAINIMRKYVNLNYINQTNICNPTVIKIYDTKL

SEQ ID NO: 30980 - protein, 275 aa, unknown
  TnpB Polypeptide
MDPPRDLRWSRAFLGTPSTVTSARDTAGRSCASFLGEDDSKPLPLVTALVGRAVGRQDRSVLSTGEQVANPTQLRRRARTVAPAQRALARTQTGAQNRDTARVPGARAHAKCRARVPTPSAGRACPRQDGRATSGRAAPTDDARDPLIREHQVIGGESLAVKPRVRHRARAKAISEAGWGEVVRQLHSKAAWDARTVMAIDQGYPSSQRCHAGGPLRDSCDRATRQGTCRACGVRHDREIHAAQTRLAAGLAVNACGAAVTPASARPAEAGIPRL

SEQ ID NO: 30981 - protein, 389 aa, unknown
  TnpB Polypeptide
MLRTYKYLLRPNPEQDQSLDFLLWQSRTIYNAALEQRVKTYQVTGKGIGYTAQWAHFRDVRHENPDTSGKINASSLQHLLRRLDKSFTAFFRRLKAGEKAGFPRFKSRRRFKSIEYTYGDGCKLRQDTQGRHSFYVQNVGELRMCYHRPIPVGAEIKHAVVKRVGERWYVCLMLELPDSERRLAQIGKQIGLDVGLKSLAALSTGELIDNPRWWRESLAKLRRRERHASRQAKGSQRQKATYRQIARLHQHVANQRADYLHKLSHRLVAENDLIAIEDLTLRFMNRNRHLSLASHDAGFGLFRQMLEYKAESAGIPVIPVDPSNTTQACSGCGCIVPKGWSVRVHECPHCGLILDRDINAARNILISALHNPLGRSGQPATWAVAPCVG

SEQ ID NO: 30982 - protein, 467 aa, Actinophytocola sp.
VAVLVARFEVPGGQTVQAFTFALDCTPAEAACVRRQFGGRRYARNWAVRTLKQDLTRYHESGEATQMPSLAGLRKRWNQVKDTECADQVTGQVWWPEISKEAFADGIRAAVDGYWNWQASRAGKRAGRRVGFPRFAKKGRDRDRVTFTTGAIRVEPDRRHVTLPRIGTVRTHENTRRLERLVADGRARILAATVSRRGTRLVVAFRVLIQRPQQPRVQRPDSRVGVDVGVRVLATVADNDGVVIERVANPRPLEAALKELRHLCRERSRRTRDSRRYAETNQKITRLQRRIANIRAHRIHTLTTRLAKTHGEIVVEGLDAAGMLRQKGLTGARARRRGLSDSALGEARRQLAYKTDWYGSHLVTADRWYPSSKTCHHCQHVQDIGWSEHWTCHGCGAGHQRDDNAAINLARYEDTSTAGDTAVGPVGAAVKRGADPKTEPGSAGGRETRKGRSHTAAEQPRDGVLAR

SEQ ID NO: 30983 - protein, 376 aa, Thiocystis sp.
MKLTLQIKLLPNAEQHDALLKTMHVFNDACNFIAEVAFREQCTSKFSLQKMVYADVRALFGLSAQLTVRAIGKVIEAYKRDNSIQCFFRPTGATIYDQRVLSFKGLEAVSILTMAGRLTIPMQMGEYQRVQFNRGHGQADLVLVDGTFYLLLVVETPEAPPTPPTGFLGVDLGIVQIASDSDGQSFSGAAVEATRRRYHSARKALQACGSRSAKRHLKRINRTEARFRKDTNHVISKTLVLKAKGTGRGIGLEDLKHIRARTTVRRADRAKHSGWSFFQLQSFVEYKAKLHGVVVQYIDPRNTSRTCCACGHIAKANRKTQSSFLCVSCGHTANADDNAAMNIATKAAVKQPIVACDDRNGCREHSYKLRPSGRGR

SEQ ID NO: 30984 - protein, 392 aa, unknown
  TnpB Polypeptide
MIKSMKVRLLPNNKQLTKLFQYAGCGRFAYNWAIAREQENQKLGNKFLSDNELRKEFTQLRKQDGYKWLNKISNNVTKQAIKDACNSYKRFFKGQSKHPKFKSKKHSKPSFYQDSVKIKFTNTHVKIEGFAGSGKRNKQKLNWIKLCEKGRIPTNCKYMNPRFTFDGLHWWLSVSIETDDNPDIPTKEGIGIDLGLKDLAVCSDGNTYKNVNKTQKVKKVEKRKRRLQRSISRKYNMNKEGVRCEKTSNIIKREKELLKLTKRLTNVRHNHLHQTTSEIIKRKPSFICIEDLNVSGMMKNKHLSKAIQQQGFYEFRRQIEYKAKWNNIPVILADRFFPSSKLCSCCGEIKKDLRLSDRIYKCDCGNIIDRDYQASLNLKQYGENVLKQKSVK

SEQ ID NO: 30985 - protein, 416 aa, Fusobacterium sp.
MYLTIKQQVKQLSKKDYRNLKYLSHIAKNLTNEAIYNIRQYYFNEKKYLNYQKNYSLLKNSPNYKLLNSNMAQQVLKEVDGSFKSFFSLIKLAEKGKYNFKDIKLPNYLDKKGFTTLIIGFVRLNENKLTIPYSNLFSKEHKKIEINIPPILVDKKIKEIRIIPKLNARFFEIQYTYEVKEIQRELNKNNALAIDLGINNLTTCVTNNGKSFIIDGRKLKSINQYYNKINAKLQSIKDKQGIMRKTTLRQKKLARKRNNRVNDYMNKTARKIINYCLNNDIGNIVLGYNNDFQRNSNVGSINNQNFVNIPYSKLRDKLEYLSKLYGIEFKLQEESYTSIASFFDRDEILIYNKDNSQEYIFSGKRIKRGLYKTKKGYLLNADCNGALNILRKSKVVSLEALYHRGELNTPKRIRVV

SEQ ID NO: 30986 - protein, 367 aa, Fusobacterium sp.
LEKAYKFRFYPTKTQIKKLNSVFGCVRYVYNHFLSLKQELYKIEKKSLSYSECSKELTVLKKEKEWLKDVDKFSLQNSLKDLDRAYKNFFSGSGYPKFKSKKDNRKSYRTNYTNNNIEFLDKWIKVPKLGKLKIRDKIKPQGRIISATITQVPSGKYYISLCCTDIEIKKLESINRNVGIDLGIKDFAITSDEAIIENPKYLQKSLNKLAILQRKLSRKSKGSSNRNKARIKVARLFEKISNQREDFLQKLSTMLIKEYNIICMEDLQVKNMVRNHKLARSIVDVSWSEFNRILSYKAKWYGRTIVRVDKFFASSQICNCCGYKNEEVKDLSIREWTCPICNTLHNRDINAAKNILKEGLRILGISA

SEQ ID NO: 30987 - protein, 416 aa, unknown
  TnpB Polypeptide
MYLVQKNHIRGLTKKEYMILNLLCRLSKNLYNVTNYTIKEYYRVNGKFLRYESAYHLVKNNENYRNMPSQVAQQTMRVVDRSFRSFFSTLKQKRAGNYDKPCNQPSFLPIDGYFICIFQRGNFRVSNGYLRLTLGQWIKTNFSIRNIYLVVPPRVLDHTIKEIRILPRFKGKFFEIEYVYLQEPIESVLDNDKFMGIDQGLDNFATCTTTNGTSFIIEGKGLKSYNRWWNKRKAKLRSSYDKNGVKFGKKMYFLNQSRFCKINDFLNQSVNYIIRQCLAEKIGNVVIGELKNIKQFGNLGHKTNQHFQSIPYHKFKQKLKSKCDLYGITYHEVDESYTSQTCCVCGRVRKANRIHRGLYRCDMCKKVINADTNGSINIANKVAPESAMIGSSGIVNVPRRISLVQWGSVTDKNINR

SEQ ID NO: 30988 - protein, 386 aa, unknown
  TnpB Polypeptide
LLKTYCPLLTSSAAELTDLENIQKKSRKIRIYPDLKQKKLLRKWFGVSRYVYNKTIEYLKQPDTRANWKEIKTDIIHSLPEWSEEVPYQIKSIAIKDACVAVRNAKVKYKETGIFNDIKFKSRKKRKDSLYIPKSAVKGQKVYPTVLGELKTFKEKIPFTEFDARLKFEYGRYYLCVVIKANKKVSDNQRNDFIALDPGVRTFQTFYSQEIAGKIGNDDMKRIYRLCDNLDKNISKMSKVNSKERRILRRKNDKLRFKIHNLVEEVHHKTALFLVKNYKYILLPSFETSQMVTKLYSKVARSMLTWSHFKFKQFLKCKAREYDAVVIEINESYTSKTCGKCGYILNDLGGKKVFKCPVCGLEIDRDYNGVRNVYLRTLVDTPAIVN

SEQ ID NO: 30989 - protein, 378 aa, Coprothermobacter sp.
MSKGTSSPKAVRNYRFRIYPNREQEQKLLTWLETCRWIYNTALAQRKEAWEKEKRSVSRIEQQVWLKQAKKTDERIREVHSQAAQEVLFRVDRAFAAFFRRGKNGETPGYPRFKGRGRYKSLTYTQFGKGKGASFQDGKLKLSKIGLVKIKLHREIPGIIKTVIIKRDAAGKWWAVFAVEIELSRQQTHTGPAVGLDVGLEKFAALSDGSIIENPRHLRKTEERLKRAQRELSRKEKGSRNRERVRRKLAKLHAKVGNQRMDFLHKQSRKLVNTYSLIAVEELNIKGMVKNHHLAKSISDAGWGEFISMLEYKAGEAGTKLVKVNPSGTSQKCSRCGMTVPKELSERVHCCPYCGLTLDRDVNAARNILKRALALEAA

SEQ ID NO: 30990 - protein, 417 aa, Streptomyces sp.
VIVKLVVQVRLLPTPVQAAALEATLRACNEAATWVSEVAFECGEFKNFALRKGTYKQVKSRWSLGAQAAQHVIKKTCDAYATLRANLKSGCLGRPGSARYRHATGKPVVFRPCGAQPFDDRMLSWQIAERAVSLWTTGGRMKNVAFTAAPEQLATLVLHRKGESDLICRDGKWFLNATCDVPETPLNTDPVDFLGIDLGIVNIATTSDGQIMAGRDLNRIRTRERGLRAKLQKKNTPSAKRRLKKRRRKEARRARDINHKIAKHVVAEAERTGRGIALEDLTGIRERVRLRKPQRATHSSWAFAQLGQFIAYKARRAGVPVVYVDPAYTSRTCAECGHIDRANRVSQAWFACRTCGFVDHADRNGSRNIRARAWTLWRSGAQPTAPAPRPRAGAERKRDITASDATLCEPGTSAPGS

SEQ ID NO: 30991 - protein, 416 aa, Streptomyces sp.
MIQVCSVAVMQLRYSFRLYPDSSQQRALAKAFGCARVVFNDAVRAREDARKTGQPFPKIGELSARLITQAKRTAARCWLGEVSAVVLQQSLRDAETAYRNFFASLKGTRKGARLGAPHFRSRKDKRQSIRFTANARWSVTEAGRLSLPKIGAVKVKWSRTLPATPTSVTVIKDAAGRYFASFVVDTDPAADRARMPATDRTTGIDLGLTHFAVLSDGTKIDSPRFLRRAEKKLKKAQRELSRKQKGSKNRDKARLNVARAHTKVADARREFHHQLSTRLISENQGIAVEDLSVAGLARTRLAKSVHDAGWSSFIGMLTYKAKRYGRTLVTIGRFEPTSQTCSTCGTVDGPKPLDVREWTCAACGAVHDRDHNAAINVKQAAGLAVSACGAPVRPGAIPAQREETGSHGFPTGNCAA

SEQ ID NO: 30992 - protein, 461 aa, Microcystis sp.
  misc_feature (34)..(198): Xaa can be any naturally occurring amino acid
MMKLVQKHLIKFNHKNYSVIDKLGFLSKNLYNCXXXXXXXXXXXXXXXXXXXXXXXXXXXXXXXXXXXXXXXXXXXXXXXXXXXXXXXXXXXXXXXXXXXXXXXXXXXXXXXXXXXXXXXXXXXXXXXXXXXXXXXXXXXXXXXXXXXXXXXXXXXXXXXXXXXXXXXXXXXXXXXXXXXXXXXXXXXXXXXXXXXXXKVLEVRIIPKLGAYCLEIVYEQPSSSSQEGERYAFIDLGLNNLAAVTSNIPEFQPTLVCGKALKSCNQKYNKTLAKLKSELPSLQKTSKRIQGLTLKRNCQVDYYLHTASKYIIDKLLAHQINLLVIGHNQGWKQNINIGDRNNQSFVNIPHSRLIEQLTYKANLVGIEVKTTNESYTSKCSFLDLESIQKQKSYLGKRIKRGLFRSSSGYFYGADINGSLNIGRKVVGEAAFSGNPIERFVVNPVRVKAYKANSRCNICVQN

SEQ ID NO: 30993 - protein, 444 aa, unknown
  TnpB Polypeptide
MYLTTKILQTKQKHEVDLSILRNLCYHSARMYNVGLYSVRQHYFNTQSYLSYYANYNECKDNENYHILLSDCAQQILRLVDRDMQSFFKLLALKKSGRYSEQVRLPRYKDSEGLAICTIQGRSCRIQKNGTVAIGLTKEFREKYGIDDRRILLTIPKNLRNVTEFKEIRIIPMYNGQQFSIEFIYEAGKQLRQAEGDGYMSIDLGVDNLAACTIFSNGETRQFLIDGRRLKNINHYYNKKVAMLKGEYAKNEHVKSANTPKMLRLMNGRSHRIDDYFGKSVKLIVDKCLEFGVTTLVVGYNKEQKQEINIGKVNNQNTVMIPLHKFRQKLKYKCELHGIAYCPQEESYTSKASSLDDDPIPTYGISEEKHTFSGRRVKRGLYRSSDGSVLNADINGSVNILKKYFKERKSNWLCQDDVRALVNAPCQRINPLQGSVLCSTSPRL

SEQ ID NO: 30994 - protein, 386 aa, unknown
  TnpB Polypeptide
VLFTHNGLFIVIIYNNKMLTYKYKLYTSKRNKRIETLMREACFVWNHCLALQKKYYEIYGKYIGGNRMKTHFAKRYKMKNLHSQSVQEVIERLDYAYQRFFAHKSKRPPKFKKFSDMSSVVFKQGGFKLKGNKFTINKLKTTFKFSLSRPLRGETKRLSVKRSPLGDYYICVITDAEAKRYGKTHNGASVGIDFGLKTYLTLSDGQVVENPQFLKHNLTSLRKASRKFSNAKRGSNNRRRKRMDLDRCHEKVVNSRTDWQWKLAHAICRSYDNIFIEDLVLTGMSKMWGRKMNDLAHGRFVEIIGMVASKYGCNLHKIDRFYPSSKTCECGFVNESLSLKDREWVCPHCGRTNDRDLNAARNILRRGIDELASANADGVDTISVHV

SEQ ID NO: 30995 - protein, 387 aa, unknown
  TnpB Polypeptide
MTELVLTTVCKLNPTLEQISEIEDTLKAFADACNWINRNVPENLRNSVVIHHMVYKDVRAKFGLSANLAVRAINRVAGNRKTALKDRSTVKNFEPTSIDYDARIFAFREKDESVSLTLLRSRQRVKLVPGDYQKDSLKGSKPTSATLCKKRSEYYINIQVKSEAPEEIRTDTVLGVDLGITDIAVTSEGQKFGGKTIKQIKTHYASMRTALQQKAVKGTRSSRRRCRELQQRLSGKESRYQKQINHEISKAIVTRAKEIPAKIALEDLSGIRERVNQKTGKDQRRRVNGWAFYQLRVFLSYKALQAGIPLVLVNPAYTSKTCHICGTIGSRNGKHFKCSSCGWSGDADFNGARNIAMLGCFVGAPRGSEELPSIKAVLSGLLKAHPL

SEQ ID NO: 30996 - protein, 395 aa, unknown
  TnpB Polypeptide
MTISYKYPIFPDKATQQKLAEALDACRWLHNRLLQELNEAREKGIKLKTYDTQNMIPSLKLENPKLNLVYSKVLQMVNYTLWSNIKGLSASKKNGRKVGHVRFKGYGWYKTMNYNQSGFKLDQDHGRLHLSKIGDIRIKMHRKIQGCIKAILIKREGRQWFAIVQADQDPEPLPETGNSIGLDVGLKSFVVDTGGNSVENPRFAEKSADKLAKAQKRLARAEQGSNNRRKIKEQIETIHKRINNQRDDFLHKLSRLYVNNYDNICIEDLDVKGLKEKGHNKGKHRSIHDASWAKFAFMLSYKAESAGRRLIKVDPRNTTQRCSNCGSIVPKDESVRVHECPYCGFSCDRDYNASINILIAGMEQPVAPIESKPLHRISVMQVLAMKWEALPFRVG

SEQ ID NO: 30997 - protein, 207 aa, Bacillales sp.
MDRPDRRHGSYDRKNRNEVLGVDLGLKVPAVASTGCDKVRFFGNGRENKYMKRKFRAKRKGLGQQKKLKAIKKLDNKEQRWMRDKDHKVSREIVDFAKENHISVIRLERLANIRQTARTSRKNAKNLHTWSFHRLATFIEYKAKLEGIKVEYVNPAHTSQTCPSCGSRNKAKDRTYSCPCGFKKHRDIVGAMNIRYAPVVDGDSQPA

SEQ ID NO: 30998 - protein, 464 aa, unknown
  TnpB Polypeptide
MLSSGQLSEDEEREPTLTLAIPEEGIHEVKYKNRRTGVVRLLPNGFQERKLRKLANASVGLFNEINYERRQQFFHGEKVGFEETWHKYYEKYKGVLGVNAQAVMQKNNEAWNSFFSLLKSKKEGKLPPFMKRVSPPRYWKDRQTKKRKLLLVIRGDRYVVDEQNHELVLKDFNVEIDFVGRLKWYGKQGRLEVHYDETRSAWYASIPVEVGVEETKTGRKSEHIMRGERKSIQIESPKGNKAASIDLGINVLASVVMNDGTWLLYKGLRTKEDYFYLGRRIAQVQSLADGTKNSGEYEAYEELNREKKRLFKKLTRRLLHLYRSFASHLLKQLHELGVSTIYLGYPFNIAQEKGNKFTVNIWSYRELIGIIELKAQEYGMKAYEVVEYNTSKYCAYHDVEVKRHPRGVVSCPKGHKLHSDLNGALNILKKATGIVVSAVKKPLSFIVDHNLVAPVMGCNPLDLG

SEQ ID NO: 30999 - protein, 524 aa, Streptomyces sp.
VSRPSSLLHRRLPEPRQRQGPRHRHREAQGREPGQAVAGAVAQPDHTDGRGADRLADDHAGRGRGHRTASEGRGQQQEGGTAAQQEGVRRRVGEQCRRGERVDQTHRHLHHAEAEARAQAEQQRPAAFGQAAAHRAQQQHGQCRPEHRPPQRRGAVLTALRARGQAQHGQAGADDPHRGPLHRAQPHPQQPGRGHRRHREARGEGRADHVDRKRTQGRDLEQEPEAVQRQPRQIPPLPHRPQQQRRLPAPARLGRGAGGDRLEHRRRTETHRRAQRAHHAKGHEATLGERWIAGPPARTFSPISRPAAGTAGRRGTQGTRAARTPAPQRTTGRDGHGGRTSATSLGHGRTRRHGTARRRARRLLLRSGQALCRPRQLPGVRAGEANPAVVTRSVAGSFRRSRIRPRTRLAKSIHDAGWSQFVTMLAYKAARYGRTLVKVGRFEPTSQVCSACGHRDGPKPLQVREWTCTACGTVHDRDHNAAINIRQAAGLAVTACGAQVRPEPVPAQRGEAGSHGIRTGTRAA

SEQ ID NO: 31000 - protein, 442 aa, Selenomonadales sp.
MLKSFKVMLVPNNRQRTRLFQFAGAARFAYNWALRKEIDAYEADEKFISSYDMTKKFTVLKNSGEYPWLKSISSQATFQAVRDCADAYIKFFKKQSLRPRFKSKRRGDFSFYQATDKIKITTTHVKLEAIATSKRKNRQRLNWFRLAEHGRIPVGVKYFNPRITFDGLNWWLSVAVEFADPKPAENCGEALGIDLGIKNLATCSDGTIYPNINRTSTVRRLKKKLRRLQRAISRKYEMNKNTRTLAGNLSLQSVMSNESSLDEIGRTEAGIRQAVVATLSPEQRQRSFSRKYEMNKKKGESYKKTRNIIKSEQKLLRIHHRLANIRQNYRHQITSRIIGRKPNPIMLEDLNVRGMMSNRHLAKAVQEQGFYEFRRQIEYKAAWAGLRVVIADRFYPSSKNCIACGHVKKNLHLSERIYHCEHCGNEIDRDLQAAINLKRYAS

SEQ ID NO: 31001 - protein, 366 aa, unknown
  TnpB Polypeptide
LLKTYKYKVYPTRKQIIALDDMISKHRWLYNEALGQRKTAYEECQESVSYFQQSAWLTKDRQEQDRFATLNFSSCQRTLRRLDKAFQAFFRRIKSGDIAGYPRFKGYNRFDSVEYTYSDGCKFRDNGKLYIQNIGEIKIKLHCSVKGIIKTMTIKREAGRYYVCFSVEEIATPLPKTDKIIGIDLGISNFVTTSDSQFFAPPKHFRKSEKKLRRLQRSVTRKVKGSKTRRKSIRNLQRCHQHIANQRRDIAHKIAKELVDKYAMIAVENLNTQGLIKNHHLAKSIMDVSWNLFILILISKAEYAGRKVIKVNPQYTSQLCSQCGNIVKKDLSIRIHDCPYCGLKIDRDVNASINILKRGRDTAFVA

SEQ ID NO: 31002 - protein, 421 aa, unknown
  TnpB Polypeptide
MYLTVKQQVKHLSHKDFQNLKTLAHTAKDLTNEAIYNIRQHYFQCGEYLNYQQNYRLLKNSPNYRILNSNMAQQILKEVDGAFKSFFGLLKLAKEGKYNRNEIRLPHYLPKDGYTTLVIGFVRLNGNQLILPYSRQFKQQHEPVVITIPPNLLDKKIKEIRIIPKADARFFEIQYTYEVCEEQRNLNKNHALAIDFGVNNLASCVTSAGKSFLIDGRRLKSINQWFNKENARLQSIKDRQQFGRGRTNRQKVLARKRNNKVNDYLSKTARYIINYCLKHDIGTLVVGYQEAFQRNSRIGKRNNQNFVNIPFGQLCRKLEYLSRLYGIVFVKQEESYTSKASFFDQDIIPVYQREQAGKETLCIHSFSGRRIRRGLYETTTGQKLNADINGALNILQKSSVVSLTALYSRGEVDTPVRIRVA

SEQ ID NO: 31003 - protein, 170 aa, unknown
  TnpB Polypeptide
MPHYFRQSADKLAKAQRKLRHKTIGSKNYNKQQKRTAKIHRHIANQRKDFLQKKSTEIANQYSFVCVEDLNMKAMANRGFGNGKATLDNGYGMFLTMLDYKLRDRGGQLIKVGRFFPSSQLCSHCGFKNPLVKNLSIRHWDCPNCGKIHIDRDVNAAKNIKKEGLRSLTA

SEQ ID NO: 31004 - protein, 431 aa, unknown
  TnpB Polypeptide
MHKGYKIELKPNNKQLTLFEMSSGTARFAYNWMLCKIKEKYEQWKALGNPDIPKPKIGSAIDWHKEFVLLKKEEGFGWIYNVSKCCGQEALRDLEIAFKKFLKGLGGYPNAKKKGMDDHFRLDGSVFIDKTHVQLPNIGKVRLKEKDVFNTKTKLSQITVSRQSNRWFASFFIDDGLAMPSKPEIDSITENDVMGIDLGCKDLAITSDGEVFANPKAYRKSMKKLKREQRRMSRRYESSKKINKRDKNNKLVMSNGYKKSKLKVAKAHKQISDLRKNTIHKFTSSVVKAKPSTIVIETLRPKNMSKNHRLAKSIMDSAFGEVVRQLTYKCEWNGIHLVKANEYYASSQYCSRCGSRNPLVKDLKIREWACPACQAKHQRDVNAALNLRFYGLWTINNTLSSRGIHACGDERSQFLRERCSSVKQEANVEAA

SEQ ID NO: 31005 - protein, 406 aa, Okeania sp.
MMLVYEMKLEGEDAQYEKLDEAIRTGRFVRNSIVRAWMDGEVKSRNDAYKYCKILADNPEFPWAKKLNSMARQAHAERAWAAMERFYKNCQAKIPGKKGYPKFKKYQVRASVEYKTSGWKLSEDRHYLTLTDGFNVGTFKLWGSRDLHYYQIKQIKRVRIIRRHDGYYAQFVIDHTREEKKELTGKQIGLDVGLNHFYTDSEGNKVDNPRFFRKNERQIKKLQKCLSRTKKGSKNRIKARNRLGKAHLKVSRRRNDWACKEAQHVIQSNDLVAIENLKVRNMVKNHHLAKSINDVAWYKFREWLEYFGRIYGVRVIAVEPKNTSQNCSNCGQKVIKTLSSRTHKCPHCGYEADRDENAAINILQSALKQLPTTLGRREDNVSGETGLCLNGETQTSKPTRRKRNSK

SEQ ID NO: 31006 - protein, 334 aa, Okeania sp.
MQSIKTKLKVNNYQKTMLAKHAGVARHAYNWGLATCIAEYESTKKRPSAITLHKRLVAEVKSINPWYYEVSKCAPQQALRDLEKAFKNFLTIPKRGFPKFKKKGRKDSFYLEGSIKVLKGNYIKLPRIGIVKTYEILPSVPIKNVTISKRADNWYISFKYDYQPTTTAKKRDIIGVDVGVNTLATCSDGTKFANIKAYRQAKKRLARYQHRVSKKEPGFLRNATQTKNRLKAIKRLAKAHKKADATPRRRKSQGNAHQAVADIRADTLHKLTTWASFKPQHHSDRSMTMSVECSKITTHPSSSPPGRGWGWVQTAVFMSSSVSSYTSASGMEAS

SEQ ID NO: 31007 - protein, 390 aa, Okeania sp.
MLKVVKVRLYPNSQQQEALSQSFGNCRWLWNYCLNLMNQTYKETGKGLSGYEIKKLIPQLKKEYEWLSLAYSSCLQQVCLNLGLAFNNFFERRTKYPRFKSKHGKQSIQYPQNVRVLSDYLIIPKIGDIKAVIHRPIEGKIKTVTISKNCCVQYFASILFEDGKEKPLSSTEGKAVGVDVGLTHFCTTSSGLKYDNPRFLTKHEKNLKRKQQQLSRKEKGSNNRNKARKKVARVHRKITNCREDFLHKLSRRIVDENQVIVTENLNVKGMIKNHCLAKAIGQVGWGMFMSMLKYKAEENGKTYVEVDRFFPSSKTCHVCLNQVGSLPLELRRWTCQSCNTTHDRDINAAISLRDEGLRIISCGTRDRAYRQTVRRSSRGRKKSTTTLVSG

SEQ ID NO: 31008 - protein, 365 aa, Clostridiales sp.
VEKAYKFRIYPNKKQEELIQKTFGCCRFVYNYYLAKRIESYKQDKTDFNYYACSADLTKLKMNLKWLKEVDSQALGKSLKDLDNAYKNFFKHEAGFPKFKSKKRNKKTYRTSFIRNNIRISNNNIQLPKLGLVKCKISRQIEGRILNATVSQNPSGKYYVSICCANVEIPKLEKTGAVVGIDLGIKEFGITSDGEHIENPKYLRKSEMKLAKLQRKLSRKSIGSNNSSKARIKVARQYEKITNQRKDFLHKLSTQLIREYDVICIEDLKVENMVKNHNLAKSINDVSWGEFVRQLQYKAEWYGKTIQKINTFYASSQTCNVCGYKNSEVKDLAIREWECPECHAKHDRDENASMNILNEGLRLLA

SEQ ID NO: 31009 - protein, 435 aa, unknown
  TnpB Polypeptide
MPNKNKIPTEIILTYKVKHNYDLKNLPNNFLKTLNEAIDIIWNNINWKEKTIKHRYKVGKKYKYYKTTRLIPEIPKYNDFKRELRNHLLKGWEFASHYIDGAIKTAYSTINSWKSNYLNGNREINKPTFKRPFVRVKNTLIRHDKENGNIRITIKPRKEYLVLNIKDAWFYEKIKNFNVGEVILKDNEALITFKRQLDLSDKEVIIGIDSNLKSLDLYHSEKGWIRVDLSELHRIKGIYDVIIDRLKSIYKKSPKRIGKLLKKYYNRRKNRVNDFINKLTSQLSKLFPNAILVFEDLNKFNMYGKNSKFNRDLDRSNWRRIAGKLEYKSVVVYVNPHYTSKTCPVCGSRMKSQEGEVVKCNNCGEFNRQFVGCFNVFKRGIKLVEKLLGGAGVPVTGVKVDDLLSDEPRGELRLMPPNPDVSYIVDLNGRALLQV

SEQ ID NO: 31010 - protein, 373 aa, unknown
  TnpB Polypeptide
VLKAYQYRLYPKKSQVTVLNQTMEQCRMVYNRVLAVRKDAWDQEQKHVGYYETKKLLPEWKVEYPSLKNVHSQVLQDVVTRVDKAYKAFFRRVKSGEKPGHPRFKQFGRYDSITYTQSGFEMDGQRLTLSKIGSVPVITHRTFEGEIKTCTIRRSRTGKWFASITVETDTIPALPNQKPSVGIDLGITKFITFSTGESIPSPRFFKTDKQALARAQRRLSKQVKGTVERRQSVMTVSKIHERIANRRKDFAHKISRQLVDTYGLIAFEDLDIKEMVQDPDYSKGISDVAWNTLVKMTQNKAEEAGCCVVLIPSYYTSQTCSLCGHVEEDNRKSQAKFICLKCGHAENADVNAAKNILGLGLQSVASTLSTVLA

SEQ ID NO: 31011 - protein, 468 aa, unknown
  TnpB Polypeptide
MPVRQAYRFALDPSPAQERALRSHAGAARFAWNWGLARCKERYEAEGRWYSAVDLHKGWNEAKKADPALAWWGQNSKCAYQEAYRDLDRALRDFIASKNGQRKGRRLGFPKVKKRGKCKDSFRFGAGVMRCSGTTVTLPRLGTIRAHESTRKLARRLENGTARILSATVSRTAQRWFVSFTVEVERATPAAHPRPGSVIGIDLGVKALLTGVDDAGSIITAAGPKALRASLRRLRRASRAHSRKARGSANRRKSAGRLARIHARVANVRADALHKATSDLAARHETVVAEDLNVAGMTRNRRLARAVADQGFGQARRMLGYKTTWNGGRLILAGRFYPSSKTCSACGAVKAKLPLHVRVFTCEFCGSVIDRDVNAARNLLSLAASGAESLNACGGTVRPGLAGHVPLNQEPGTALAGQTGTASGQLLAAGHSSAMITDPQRLGLYYYGDDHGAAAVVVADPLADDAAG

SEQ ID NO: 31012 - protein, 445 aa, Lactobacillus sp.
MKRMSSLEYHFGVKVRFYPSNNQKKMIKQNYDAQRFVYNQYVGAGRLIYHVKKANRIKQLSSGLPFVMQGMSEYENQQALRMIDTQDLISKPKNIRDKYDFLRVEDIDSLAIANAIQNYHKAWRNYHKIGYGIPTFHKKRSNWSYQTNCQYIKQDEAYLDNGTVRFIDAKHVKLPKLGIVRIAGLRKLIKKRLLDRIPTRIGTASIKKTADDQFYLSLQLGSDIAFVKDYAKTQKQIGIDLNLDNFLTDSNGAMVANPRFYCRAKKKLAHAQRILSRRERRAKKEGRSLCESKNYQKQRLAVAKLHDRIRRQRQDFLQVLSTALIKNHDLVVAEELRSKNLLKNHALAQSISDAGWRSFLTMLEYKADLHGKKFVTIDPKFTTQRCHNCGNIMGQNGYKKLTLKDRKWTCPVCGSYHIRDWNASVNILEKSKGIWKNPKIKKQSK

SEQ ID NO: 31013 - protein, 265 aa, Mycobacterium sp.
  misc_feature (40)..(40): Xaa can be any naturally occurring amino acid
VGGPDLHREFGVLYDHPPPGSGRALPHGGVGDTGPAVLGXVVGVDLNDGHLAVRRLDAHGNPVGGAHRIDIDLRGSSARRDAQVRHAITRLIRYTQRHHINAIAVEDLDFADARATGRETMGRGGRGKRFRRTVAGIPTAVFRSRLAAQSHTAGIELFAVNPAYSSIWGDAHWRTPYKNVTRHQAAATVIGRRAQGLKARRRKGVTRQRPEDRGVRATNQAAPQNQQANTDSRHRPGTRGAKSRAPHRIRTRLPDRATATPGNGQ

SEQ ID NO: 31014 - protein, 427 aa, Cyanobacteria sp.
MLKVVKVRLYPTPQQQQLLEQSFGNCRWLWNYGLNLMNQRYKQTGKGLSGYDIKKLIPQLKKEHQWLTLTYSQCLQQVCLNLGVALNNFFEKRAQYPRFKSKNGKQSIQYPQNVKVAEKHLTIPKIGEVLAIIHRTIEGKIKTVTLSKNCSNQYFASILFDDGKPQPSSSIEGKAIGIDLGLTHFAVTSDGDKFDNPRILSQHERNLKIKQQQLSRKKKGSNNRHKARKKVARLHRKITNCREDFLHKLSRRIVNENQVIVVENLNVKGMMRNHCLAKSIHQVGWGMFCTMLKYKAEREGKVYQEVERFFPSSKTCHLCRQQVGSLPLDVRSWTCEHCQTHHDRDINAAINLRDQGLRILTRQLPQVEPLPCGGFPHCGKWRGKPAHGAGSSGTGDKACCPDVSRSNRGRKKSDITLSVGQEAYTDP

SEQ ID NO: 31015 - protein, 394 aa, Malonomonas sp.
VIKLKAYKFRLKLTPTQEWQCRNFAGQVRFVWNKGLSLQKERLSRNEKTLGYVKLCSELTRWRNSEETEFLAEGPNHTQQQKLKDLNLALKDAFDKSQPNKRFPVTKKKGKCRDSFRFPDPEQFEVDFGHRQIKLPKLGWIRLQKTSKRQKKRLKIEGTPKQITVTRKGEFWFASIQVEIETEDVVHASTTAVGGDLGVAKFLALSDGTIYDSINSFKKLQKRLAREQQKFARMVKFSKNWKKQQKKIARIHEKIANCRHDHIHKISDEISKNHAVVVLEDLRIINMSKSAKGDQENPGKNVKAKSGLNRSILDQGWGMFRELVEYKQKWRGGQLVLIPPMFTSQECSACHHVSKNNRKTQSLFICEACGHTKDADLNAAENIYAAGHAVYASS

SEQ ID NO: 31016 - protein, 447 aa, Aigarchaeota sp.
MKRTNTFIVEGAPALWELADKCARLYNEVNYERRQAYIRYKRFEWYPKHLYEKYAPLVGSATAQQIINKNNEAWRSFLALKRLEARGKLPPHITRVSMPRYWKKNGKRELRIIVRNDCYRVDGKHLYLPNGLRVRYKGSLKWHGKQGRLEIIYDDVDEVWRGFMVVEVEEPPIKGGNKPLYIDLGVVNLATVWFEGLKQPIAFSGRAVLADWWYWTKRIAKEQSRLARVNKAKTSRRLRKLYRIRQRRFNHAVNAMIKTIVEDAVALGISKIVVGNLKGIRDNNHNSKANAMINNFWSFNYIIQRIREKAEEHGIEVAEVSEHKTSSICPRCGSGKVIKRGRLFKCVDCGVEANRDSVGVLNIGLARGAKLPAGAVNGAMARPLLLRWDGMGWEPKRAMSNKPMRTLEARISRLQPWRVSIRLPSLALVQCYNPPKAPRSLGDGLTL

SEQ ID NO: 31017 - protein, 349 aa, Aigarchaeota sp.
MYVLNAILDELWRSILWKKKGKRLIPYIRKDRTFRKELRDKYLVGWNYSKHYVDSAIKQAYSTLNSWRKRYLKGKAGKRKPILKRKFVRIKETLYSYHNGIIKISVKPFKESISIDLKEAWFWDRIAELELGELILKHDMLIITVRKEAKLEVKNPVAWDINLLTMDGFDGKNDCTISLKKIYTIHRTYELKRQTIQKLPDKTKKKLMKKYSSREKNKMKDVLHKIAKKLSNRTNVFEDLKSFKEKVARTKSRRMNRQNSKHDYITLQKIVEYKLAWNGYVTIYVNPKGTSKTCSKCGYYNKDLKGAGTFKCLRCGLTIDRQKNASRNIWNAFLRMWGNGFTPKGAQAQ

SEQ ID NO: 31018 - protein, 387 aa, unknown
  TnpB Polypeptide
MSIRTIALTLAPTDTQRAAFVRLRRACVDACNHISTVAWDTGTFNRVRLQQATYAEVRATYGLMAQHTCQAVAVVAQAYRTDKDTKRVFKPTMAITLDTPRLYRLDGNHVAITTLDGRLAVKLNTGGIQRAWLKEATALKEADLVCDRKGRWRLMVSAVYPDPPPRDTEGVLGVDLGRTDIAVTSDGDAFSGQQVTAVRDCYARTCRMIQQNVSKGTRSSRRRGRATLARLSGREHRFQANVNHTISRHIVAAAVESSRAIACEDLTGMRERTNKQPRTKTERRRSNNWAFYQLRLFLSYKCQGAGVPFVLINPAYTSQMCHCCLHIGERSGKRFACVNPDCLCCGDADYNGARNIALVGMSVTHPRGPLLCCSYQPGRRASESPRL

SEQ ID NO: 31019 - protein, 371 aa, unknown
  TnpB Polypeptide
MKKKYKRTRSGWMRRTSRIYIRGANKSKIEELIKFLNLYQNIINYLLVRFWSSHDRDENFPTNGLIKSIQQRFGITARLAQCAAKQAKEIVRSQNEKNERTMPRFVSHIANLDSRFVTIEVFIGHFEMCLKFASGVPKIVIPFNWTKHTNKFRDDGWELAKSIRLGYNKKGLFIDLIFEKESPAMREEGETIGIDSGFNTMLVTSDEQFIGDGLKETIKRGGKRRKTWHHFVKTEVNRHLKDLNLDNIKLISLENLKNVKKGKRGKFSRNTNRLLSFWLYARVNERLTQLCEEQGIRIDRKNPWKTSQRCSVCGNIDRRNRKGEKFLCLECGHATNADYNASKNLKALGLAGVYSLRSLPTINVENGEFSI

SEQ ID NO: 31020 - protein, 312 aa, Dolichospermum sp.
LNPSKFLGEPKLPKYKHKQKGRNVLNFNNQAFSQKALKQGLISPSGLAISIKTKLTQIKEVRIIPKNNVYIIEAVYEQEETTPEVNNRIAAIDIGLNNLAAVSSNCLDFQPLIVCGKAIKSCNQFYNKVKASLQSQLSKNQKSSRKIEALTLKRNHKVDYYLHTASRFIINQLVSQNITHLIIGKNENWKQNINLGSKTNQNFTNIPHARFIQQLEYKAKLVGIKVQITTESYTSKCSFLDFEPIKKHEQYLGKRVKRGLFKSQFGKHYSADLNGSLNILRKVVGDSIFDRNSVERLVVSPVRFRPYQARNI

SEQ ID NO: 31021 - protein, 340 aa, unknown
  TnpB Polypeptide
VVILLDEQRITAWQRRRVSVSRHEQESELKDIRAEFSEYAPIHSHILQDVLARLDKTYQAFFRRAQRGEKAGFPRFKGRGRFHSFTYKEYGNGATLDNGFLVLSKIGRIAVRWSRPIEGTPKTVTISKEADGYYVAISCANVPVHPLPATGQETGIDMGLESFATLANGQPIFNPGYYRKAEAYLRRCQRRVARRKRGSNRRAKAVKLLARAHQHVANQRRDFHHREATKLVMAYDSIAYENLRTANMVMNHHLAKSISDAGWSQFLSTLTFKAVGAGKRVEVVSPAYTSQACSGCGVIVQKGLSVRWHSCPDCGTSLYRDHNAALNILRMAQEQRSRPG

SEQ ID NO: 31022 - protein, 496 aa, unknown
  TnpB Polypeptide
MLLSYKYKLRPNQKQSIKLGQWLDLLRSSYNWCLRDRIDGWYQQFIMGEYCDLQTQAVATALTCAVVKGTQLANPWKDGNGQAQKEGEKDQSPKRTPSLMQDANLQDLKAARPWYQGIDLGVLQSMTARVNESFNKFFKGAGFPKFKRRHDFKSFSYKPGRVKFKGNKIYLPKIGWMRFYNSRSIPVGFQIKTVTIRQKADGWYVSVRLEDKSVPDFPVRADSEVKTIIGCDMGLGKLVYLSDGSVIDNPRFSTNKKTRHLMKVRQRRVNRKQKGSKNRSKAQQLVNKLHNKIAQRRESHQWDAANRIVKKADAAVEDLNISGMMKRCKPVKSEKGRFLSNGQSAKRGLNRSIADASWYALTQKLEYLAAKSGKRLYRVNPKHTSQTCSQCGHIDQASRNGEKFICTNCGHIDDANLQAARNVKQKAITLYGLNIVKVFKKKVRGDSPKPVQTTLFDVELYERLSDNTLPTKGKGCVGKNPENKQLSLWDIKGEIS

SEQ ID NO: 31023 - protein, 370 aa, unknown
  TnpB Polypeptide
MRKAHKTFSVPTMRRSSRIFINDLNTGKRDELVGFLRLCHDTTQYFVDLFWQRKDFSATLADLPTVHRGRDRFGITTRLAQALAKQAKETVRSAHANKHRKPSLRRHTATLCSHFVTISEFDGAFDYAIKLIGSGAPRMVIPTKSTAHLNKMLGDGWKIGKSIRLGRRSDDLYVDLLLEKPRPPKNKTGKILGMDSNYKAGLVFSDGQQVADEPYALIQQFGRRRKHTRTYIKSVVGHALKSLDLAGVQELCIEDLKHVKRGTRGKFPRRFNRRLSHWLYAYTADLIERKCEEEGVRLRRKGPWKTSQFCRVCRKWDRRNRRGDKFKCVHCGHSEHADLNAAKNLELLGLAGVYGLRSLPSPLPVYAGSG

SEQ ID NO: 31024 - protein, 517 aa, unknown
  TnpB Polypeptide
MSSFPGLRLTLSTRTGTEMIPPVKLSLRPAMFLSCGGTGHASLHRSGGHPGDMTGSLRSPCQTTHRNGQRLPAVPVASSLVSPWNLHQCEPFGLPTVSEGFGRRVVPTSVVPLSMRHQHALRRCKGSFISGPYGHNLTLFFNSPSKIDRPISSAYTLSMIASTKLSLKFASVSKVAKIVAVLDRYRATVNAYIQHIWSYGGSLNKATADVVPLGHLTFRMRGHALQQALGIVAATRRSAAQTGNLATCPAFSGAMVLSKQLAAITEATETSEFDLWMRFSTLSRRHCINVPLKATRHLRKLLIMPGAKLKGGCAIGCRAGVYFVTLWVELPDLALKEQGTVLGIDVGLNKLIATSDGKIYGADMSKYVRRVCRCKNGSKGKFRARRARDQYIDETLNQLPWDKLQLVAVEKLTNLKKGKKPNRGKSFRRALAPWTYAYVLRRIEWKARLNRVRRVEVNPAYTSQICPSCTHRARSNRVNEKFVCVRCGYAADADFVGSVNILARAVGESMVPRSCTT

SEQ ID NO: 31025 - protein, 387 aa, Lachnospiraceae sp.
MRRLLKSFKTEINPTPEQKVKINKTIGTCRYVYNFYLSYNKELHENGEKFMSGKSFSVWLNNEYLPNHPEYQWIKEVSSKSVKKSIEDGCAAFTKFFKRQSGFPKYKKKEKSDVKMYFVKNNPKDCACERHRISIPTLGWVRLKEKGYIPTTKDGWKIKSGTISIKAGRYYVSVLVEVPDNKINNNSNKGIGIDLGLKDFAIVSNGKTYKNVNKSERLKKLERQLRREQRSLSRKYENLKKGEVTQRVNIQKQKLKVQKLHHKIDNIRTDYINKTIAEIVKTKPSYITIEDLNVSGMMKNRHLSKAVASQKFYEFRTKLKSKCDDNGIELRVVDRWYPSSKLCHRCGCIKKDLKLSDRIYRCGCGYIEDRDFNAALNLRDAMTYEIA

SEQ ID NO: 31026 - protein, 455 aa, Lactobacillus sp.
MLKLPSTTEYVRVRRYRLVATPELAKKHQANLAVENQLHNYALKCLEKAYGYKHLSRKFPGTRTGKTYVIKDEILPSFLKENYGLKRWNSHKVGLHSQAAYQFLLTLLTNFGEYRKVLRKAAKMTDQEKEDYRNNKHHNNPHHRSWYRKGSLNYLRNGASHQTVSLPDNGQIAVLSAHHIKIQDYGSLQVVENIINLKHQKIVTSKIKHKRDNSYELQLVLKDRLPRRKPTDVCGVDWNMKDRKIFHTSDNKKLYLDKFVSVKADKYERIIDGLKSRRDKAIWLGQHSRRIQRLNNLIRFYNIHRANILTNHYWHLTKQLFSDYDLLVVEKLGAKEMRQKSQNLDTKGNHTKNRRLAKIKPYELQQCLKQVADKSGKTLVLVDSYKTSQVEYGTDYQEKHSLDGPREWTSKYTGKKIDRDLNASRNILEWGFNPEKHIKLKDYPALKPSSLVTIN

SEQ ID NO: 31027 - protein, 387 aa, Mycobacterium sp.
MSRHTTFCYCLDPAVEQNEVLSRHAGASRFAFNQCLQIVKTALTDRTTDPGVEVPWTGFDLINAFNAWKKTADAGRVFTVDVDGVADIVVTGLSWRREVCQQVFEEAAVDLGRGLKAWSDSRLGKHKSKRVGFPRFKKKTTAIPSFRLRNKHPKGARAAIRVGDNNKVRSVTLPGIGAIAVHDDTRRLRRMLAKNRAKILFATITCHGGRWWIALNVEAADLHPDHQHPTRPGDGGGSVGVDRGLLLFLVAATADGTELARISHAPKALATGMSKQRRLAKSLSHKKKGSRNRKDAAARLGRHHHRVANVRRHFLHQVSSELVKTHDRLVIENLYWCTVLEPDGFDGSRPGELLGDSENTCREWPSVDLSTAARGKSPDRCDLIEAC

SEQ ID NO: 31028 - protein, 311 aa, Mycobacterium sp.
MGRPRMKSKKDHRQSFRLTRSGFNLRPNGRVFLTKVGEVSVRWSRALPSTPSSVTVIREPDGHYYLSFVVEVAPTPLPAVGQEAGVDMGITRLATVATSNGGRTEVPNQKHLARKLRKLARLERVKTRREKGSSNRDKVRREIAVVHNKVARTRRDYQHKQALALVRENQVIHVECLNVAGLVRNHRLARAISDAGWRQFTQIITEKADQFGRSVHKVSRWLASSKTCSDCQYQLEELPLHVRRWTCPACDAVHDRDHNAARVILAAGRAERLTASHASGQVRRREPGGAPVRPPTRRQGVDEAGSIPPAA

SEQ ID NO: 31029 - protein, 449 aa, unknown
  TnpB Polypeptide
VPRVRLPRPPILVLALSEVEGIVGFMLRAYEFRLRPTRGQRRDLVALRRMARDLQNAAICERRDAWQTTDYAHVVVVGRDGQRRSHYKHVGRGERVSFKMQSAQLPQMRAEDPDGLGRWSATTQQQILRRVNKSYDAFFRRIREGDPKPGYPRFKPLSRVGSVDMRHGDGAKWDSTPKDRLRLYVQGVGHIKVHAHRSVPEDAEIKQLSVTFEDDRFYVRVVVETALARDIPRPSKEAVGIDMGTNPAFLTTSDNWTAPAPKFWRNAEKETKELQRKLTASKRGSNNRKRRAKKLRAAQAKIARQRRDYHHKIALTLVREYDTIVREDLQAANMSRTPKPKQDPETPGAFLPNGAAAKSGLNKSILDAGWASFFHILEAKAEEAGRLVLKVPPHHTSQMCEKCPNIDPASRSGRIFTCTRCGHSADADEQAARNILRLGMESLQEPAAA

SEQ ID NO: 31030 - protein, 411 aa, Acrocarpospora sp.
LSVEVTRLIDVSRYRLKPTPAQETALLEHCGHARFVWNLAVEQHRYWRPGRKSAPGFAEQCRQLTQARAEFMWLRGGSVIVQQQALKDFAQAMAGFFGGTHRHPGFRKRGRSEGFRIVAVKADQIRRLSRNVGEVRVPKVGWVRFRWSRAVPEGVKSYRVTRDAAGRWHVAFAAIPQPVPAPGTGESVGIDRGVAVSAALSTGEMLNVPPLRERERARLRRLLRELARARRGSGRRSKVKAAIARLKARESDRRKDWIEKTSTDLARRFDVIAVEDLRISKMTRSARGTIEAPGRNVRGKAGLNRGILASGWGGLVRRLEHKAPGRVVKVNPAYPSLRCSACGIVDREARESQAVFRCRSCGYVGNADVNAAGNIRQSIAHAAGHAVFAREGPRVTGPAHREPQRDLLLVR

SEQ ID NO: 31031 - protein, 409 aa, Halobacteroidaceae sp.
MRYNYRYRLNPTGELHERLAWTVDTCRQVYNHFLHRLNRVDGTSAYSEQKLLPNLKREWGDLKDVHSKVLQKAVQRLYDNLSTLKGRKDNGYRVGELKWKGPQEYRSITYSQTGFELNNTSGRTVLSLSKIGDIPMVYHRDVPNGATIKEVVVKQEPTGEWFAVLSIETENDAPPKPEHHERCVGIDVGILKYTHDSDGTAVERPDLSEERERLEREQHKLSRKDHGSANYRKQQRVVARRHADLKRKRRDFLHKLSAYYAREYDLVAVEDLDAKGLMELPSNSHNRAGAAWGTFLRMLEYKCERDGTHFVAVDPRGTTKECSACGVSTEKPLWVREHSCPSCGFKADRDLNAAYNILSRGLDHVGVVHSDSMPAETALPVGTDSVPAKRVLETGSPVLSEAVRPSRAG

SEQ ID NO: 31032 - protein, 477 aa, Beggiatoa sp.
VRALKIKIRGLKKPQFERLKDLTHYAKNLYNQTLWTLHEAFEATGRYFSYPHMDKAMRQVTNLEGEVNYKLLKAKVAQQTLRRLDKNFSSFFSCHQDFQKNPGKYKGKPRPPKYKIDPHDNLIFNYQAFRIQGLFIIEKGTEIILPNGKAFPVGESIRYEQVVVLEKGLEIQVPKQLFRSDIKQVEIIPKHNSFHAVFVYEENPADFKQVNLRSQVMSIDLGMNNLATCVTNGVVEPFIIDGRRLKSVNAYYNKRKASMQSKVSMRGKKWSHQLQSLTDWRNAAVNDYMHKATYYVVKTCVKHGISFVIVGDVVKSLNQINLGKRTNQNFVNLSLGQFVNKLGYKLGSHGIELVVTDESYTSKASFLDGDKMPKRYNPNATQKRTFSGQRVKRGLYKSSDGTLVNADANGAYNILRKTDSDFSFSKLVEKVGTKINEWLHPTKRIRFWLKKKEEAEPKSNPKLRRGDKGLILPSPQC

SEQ ID NO: 31033 - protein, 309 aa, Dolichospermum sp.
MKSSIRLEVKAMLVFEFKTYGKSVQFSAVDDAIRTAQFVRNSCIRLWMDVKDTGKNDLQKYCAVLAANFPFANELNSMARQASAERAWSSISRFYDNCKKNIPGLKGYPQFQKDCRSVEYKTSGWKLSEDRKSITFTDKKGIGRLKIKGTRDLHFYQINQIKRVRLVKRADGYYCQFCIDVNRQEDITPSGNTVGLDVGLKEYYTDSNGVMIENPKFLRIGEKILKRSQRRVSRKVKGSKNRGKARQILGKRHLKISRKRKDHAVKLARCVVQSNDLISYEDLRIKNMVKNHCLAKSINDASWYHLSSM

SEQ ID NO: 31034 - protein, 553 aa, Nocardia sp.
LLGPDFGRPAAEPSVGGLQIVGDGRERSGHGHQPKGASADPDGWPAAAGQPTGGRSDQGGCSHRCCRWPVRHSPVMSRHTTFRYCLDPTIEQQRALARHAGAARFAFNRSLEFVKTALTHRKTDPAHPVPWTGFSLINAFNLWKKTEAAGRVIVVDAAGVAEIEVTGLAWRTEVCQQVFEEAAVDCGRALAAFSDSRTGKRKGTRVGFPRFKKKNATAASFRLRNKTSRSGRVAIRIGDNEIPRSVTLPGIGILRLREDTRRLRRLLGKGRAKILYITVGFRAGRWHITVTIEAADLHPACHHRPRAAGDDGGWVGVDRGLSAYLVTATSGGVERVRINNQPKPLAGGLRRQRWLAKSLSRKGKGSRNRTDAAARLARHHHHIANIRRHFLHQVTNRLVKTHDRLVIEDLNVAGMLHNRRLARAIGDAGWADFARLLRYKQSWRSGTVVTADRWYPSSKRCSACGRVTTDLTLSDRTFACECGFRADRDRNAAVNLAVWPTIAHRDCSRSPDPQAGGRVTNARRREGADRHPAGAGETGPDDARTDVHATTVA

SEQ ID NO: 31035 - protein, 394 aa, unknown
  TnpB Polypeptide
MHKVKRRFRFYPSEAQKIELAKLFGCARFVYNAGLEWRQKEFEAGRKPSYNKSSAWLTLFKREHEFLNEVSCVPLQQSLRHLQDAYVNFFKKRSKFPNFKSRDNRQSCEFTKQGFVYRDSQLSLAKIGKLNIKWSLDLESPPTTVTVVKEPSGKYFVSLTVQEAERQFPATNSSVGIDLGIETFATLSTGEKFKQPAKIRKLRKKLAALQRSYSRKAKGSKRREKARIKAARLHQHIADVRKDFLHKLSTKLVRENQTVVLEDLNIGGMLKNRCLARCIGEQGWRTFRDMLAYKCEWYGRKLELCSRWLPSSKTCSACGEKKALTLKDRVWTCTCGATHDRDINAAQNILAAGLAASARGGSARPERVYLLKARPVKRELACITAGERNQMMRL

SEQ ID NO: 31036 - protein, 404 aa, unknown
  TnpB Polypeptide
MIRSSKTSLKFSNQAKLSTLSDFVSEYSKVTKEFVDILWPKREEPIPSLLPRDVTSKVQTWLSKRAVQASGKQASGIVRGTIQKHKQRLHVLKELIKEGKLKHARRLQKIIDERKISKPNLKVVNPELDSRFVKLDLEPTTNGFDGWLTLSSVGNKIKLELPFKKTKHVNKMLQRGKLKAGVRLSSKGVTLMFDVEEPTPRTDGKTIGIDIGVRKVISCSNGFQSKEDVHGWNLSKIQQRLSRRKKGSKGFRRAQEHRSNHVNWSINKLNLDGISQVRLEDIKHLRRGRSSSRYLSHFTYAAIFGKLKRACEDSGVQTSKVSPTYTSQRCSGCGWVRKGNRKGDRFGCDACGMTMDSDLNASLNISLKLQPIRKKQRLERVNRKGFYWHAPGQEPIVPGAQGAL

SEQ ID NO: 31037 - protein, 300 aa, unknown
  TnpB Polypeptide
MNRAVKIRIYPNKEQRVQIEQTIGCSRFIYNQMLADKISYYQKEKKMLKNTPAGYKKEYPWLKEADSLALANVQRNLEGAFRKFFREPKVGFPNYKSKKFPEILYNKYDKWKYLPAGKVSETAKDDTHKNKTSSFDTGVLRKSLPGNRENFPDAKRAAGTIRNRGKGLHYVMKRIKNQRKDFHHKLSHDLAEKYDAVCVEDLNLKGIAGGLHFGKRIQDNGYGQFLSMLGYKLEERGKYLIKVDRYFASSKICSVCGHKKKELALSDRMYVCECGNRMDRDVNAAVNIREEGKRIYKECA

SEQ ID NO: 31038 - protein, 370 aa, unknown
  TnpB Polypeptide
MRKTFKYKAKLSKTTEQNAVVWLGLCQKLYNLALEQRITAYRCFSVSLSTYDQHKELPDLKKAFPEFKQVNSQVLQETLDRLGKAFSGFFSRLKKVGKKAGFPRFKSHHRYDSFTLKTSGWQLDGRHLKIKGIGILKLHLSRPIEGKIKTITVRRDGCGDWWVAFSCDDVPERSFPEPRADVVGIDVGVAHFSTDTEGLHIANPKYYRKAQEELRRKQRKVSRRKKGSNRRKKAVKELARAHRKVANMRSDFLHKTANYYITNFQMICIEALKVKNMVKNRHLSKSIADAGWSTFFELLMYKAEEAGRELVKVNPKNTSQNCSGCGKKVPKSLATRVHNCPYCGLSLDRDVNAARNIAATGHGLCLQSLT

SEQ ID NO: 31039 - protein, 410 aa, unknown
  TnpB Polypeptide
MYLSLSETIKVDSITYTILDKMSYFAYKLWNVSNYEKMNYKELGFDKFPDWKKQRSYLKDNFFYKMLPSQTAQNVLSSLDEGWKSFFELKKNNSIENPKPPKFKREPISITFSQNGFRLKNGTLRLTISSGLRLKLKELDIYNRFIFLNIKNLDGLDVKEIYIKILANNKIKLIITYKVPDIDIKPDNTKYLSIDLGIKNSFTCYDNSGKSFIISGLLKITHLYNKKIAYYQEINSRQQYNLDIKYPKPSKKILSMYKNKKNRVNNFIHQTSRYITNYCLDNKINTVVIGDIKGIRDNCDIGINNQGLHSFPYAKIYAMLEYKLKLAGIRMVKQKEYYTSKCSPLSKKVNKTYSSENGKRIKRGLYKDQNQIFNADSVGAYNILRLYAQRNKLDINIPLSGLSNPQRIIF

SEQ ID NO: 31040 - protein, 488 aa, unknown
  TnpB Polypeptide
MKDSIRTYETRISLDCASLSIFSSYAELFAQVEHQLFKKLHPNADSNACKREFLKRFGITGRQYNACKTVLEGKIDSIKEKRDMQVIDLGERIKSLELKIKKIKNPFTIHQKKRLLNNLKTKLEKLKTDKAQNRVRLCFGSKRLFRAQFSLKENGFSSREEWKQAWQKSRSSEFFVLGSKDEIHGNQSCTAFLQEDTSLNIRLRLPNCMQQADKYFWIKNIRFPHGHQEIITALKFKQALCYRFKLDEKGWRIFLSVDTKPAPIISNEKLGAIGIDINNNHLSVVEADRFGNVVNKQTIPLNLYGKNSHQSKALIGDACKKIVESAQEAKKPIVLEKLNFQQKKRILKEGCSSYARMLSSFAYSSILTHIKSRAQKLGIEIKEVNPAYTSIIGRVKFSKRYGLSIHHAAALTIARRSLRFSEKLPSRLTDIPDGRGGHVALPVPVRNRVEHVWTLWKKLGKKLSVALAAHFRAIKNRSMSPHKTAYVM

SEQ ID NO: 31041 - protein, 403 aa, unknown
  TnpB Polypeptide
MRNTKHKLFRDKTLKYLHNDLDICGIVRNHFIALSMRCFRRYGKGLSYSRMSAHLTKLKRLEKYKHWNIPYSWALQNILKRLAQGFKEMRTLGRGRPQFKSCKKHKGMTFRSEQVKLEYLLPKQKRARNHPTYQIRLNGRWYRFALHRNIEGKIIQVQVTRDALGDVYITFTEACKEVKPEPKTGKAEGLDMGIKDFLTGSDGERYTSPMFYKQNANDLAKAQKAYSRKVKGSKNQERCRKQVFRIHKKTANQRTDHHWKLAIELCQKFDIMFFEDLNLNGMKRLWGKQVSDVAFGEFLERLKHQSKKRIKSVLKIGRWTPTTKCCSVCGDKNETITLADREWTCSSCGTHLDRDHNAAMNILKEGVASFGLGDVRPITLLGKIVGYSVEANSPLLKSTNAFA

SEQ ID NO: 31042 - protein, 400 aa, unknown
  TnpB Polypeptide
MTSTSVHCAFRFRLEPTADQERTLRRVAGARRWVWNWALAEMRRYYKETVQTLPASVLSARLTALKDEPETAWLREVDSQALQQTLADLRRAFVNFFERRARYPRFKSKKCDQARFRIPQRVTVVGHGVQVPKIGRVRLRLSQPVVGTTKSATFTRNACGHWFVTPVAERQAPAVDLSAPGPERTVGLDLGLKDAIACSDGTRVAAPRFYRRGERKLRRSQRVLSRREKGSRNRAKARTNVARVHQRVANQRADFLHKLTTSLIKNHEAVCIEDLSVRGLARTKLAKSVLDASLGTLRWQLAYKGRWYGAHVVVVDRFYPSTQLCHDCGHKNDGLSQADRAWVCPHCRVRHDRDLNAALNIRDEGLRLLAAGHAESRNACGGTVRPPMVARPVEARIPRL

SEQ ID NO: 31043 - protein, 419 aa, unknown
  TnpB Polypeptide
MKKTVHKTIKVKIFNPTQVKKQFLGLLRENSTILNHYVSRIEELGTTSKSRLHKETYHKLRKTSPLPSAILQTARDKVVEAYKSYQTRKKHRRKASIPKFKDNTPVRLDERTVKVVETDNKLKYFASVSTQEGRIHVPLLGQRYQYKYLKKVLDGEFELGIAELHHIEDNFYLYFTIKKEVEIPTPNRSFTPVAIDLGLVNLAVSVTPSAIRFFNGRRVQHKREEYAKVRRSLGKKKKLKKIREMQGKDQRYIRDINHKISSAIIEQARKVENPVIVLENLKNIREKINFGKKMNRRLHNWNFRQLQDFIQYKAEWEGIPVVYLDARYTSRTCPKCGDALKSNRKREKHIYKCHYCGYQLNDDLIGAINLSRNFYNSMSAVEGAAVNPALNQSKWTATPLHCEVNQPVQDSGSHLFNRW

SEQ ID NO: 31044 - protein, 377 aa, unknown
  TnpB Polypeptide
VVVRKSYKYRLYTSKRDKHLVRQIHAASSIWNHCLALQKRYYRMYGKSLNANRLKGHIAKLRNRNPYWSLLGSQATQDVIERLDSAWQKFFARQGQRPKFKSYRFYTSFTLKQTGWKMLGGNRVRIGKHNFKFAISRPVTGTIKTVTIKRDRVGDLWICFSVIEKGEFPVANEDAVTTPVGIDFGLKTFITKSDGSEIHSPQYLKESLSELRAKSKRLSSKKKGSNNRRAARITVARLHRKVADQRRDWAFKTAHALCDQYDGIGIEELELRGMVKMWGRKVSDIAWGEFVRTLEYVCAKRGVVFKKVDPAYTSKTCSDCGKIVKLELGDRTWVCPGCRGTHDRDINAAINILGRAFPSSVGGVSPRLSQDDLAIAV

SEQ ID NO: 31045 - protein, 425 aa, unknown
  TnpB Polypeptide
MDYVLKYRLFPDSHQREQLDWVRDTVRQLYNHSLHRFNRIPESAGTVKQRVTQVRDEIPTLKNWWTDLTNIYSTVLQQAVEQIATNIENLGKLKQKGFDVGSLNWKSPDEYRSFTYRQRGFELDEKSGPNGRGTLTLKKVNDESIDVPIRLHRAIPDETDMKHVTVKKDRTGAWYACLNVEQDSPKKGDPSEIDTDDTVGIDLGISTFIHDSDGRQINRLDLSSDRERLEREQRNLSRKEHGSQNWESQRRHVAELHKRIRNKKADFKHKVAAFYTREYDAVFVENLNVKPMLEGERNGRNTAEVGWREFITILTHHGRKRGCHVVEVDPADTTKKCNQCGVKTEKPLWVREHSCPSCGYTTDRDYNAALNVWERGLRKLGVVHSEDTPAETGTAVEQTHREPVSASSVVETGSPCLTEAAVAAE

SEQ ID NO: 31046 - protein, 646 aa, Acidiphilium sp.
VPYALTVSCLHVHRRSRCLSRAWREDASAVGPRGHAFSGRQDQDRAAGLHAGAVGHVPWSADRTPRAAPGHRLLSRLVGGAEAGPEKSEARSGGIRCGTRPCGCRVDRRSRRGPQLQPQAVPRNHGRRITPGGADYRSGTQGSAGAVRLPVVRASLQGARLRHPRAEQRKPVAGTGDGPRPDDHRALFFKPALRFAQLQEEAQRSHRPGCEAMILAHKIALDPTVEQAIHFARAAGTARFAWNWGLAEWKRLYEAGEKPSATKLKAQWNAVRRTEFPWSCDVTKCASGQAIMNLGTAFGNFFRDLKKPKGQPKAGYPKFKKKGQHDSFALWNDQFEAHSCRERFGKDRGEIRIPNLGWVRMREPLRIGGRILGAVVSREAGRWFVAIQCEMPDAEAAHPAPGSVVGVDLGISALMALSRQMPDGRTKIENPKALRKAMRRVKKLSRRISRQEEARKKRAAKTSRRTRKRRAQLAKLHGRVANIRRDAIHKATTAVASTFETIVLEDLNVAGMGKNHALAGSVSDAAFGEIRRQFEYKARMRGGHVYVADRFFPSSKTCSACGCVVDKLPLSIRSWACAECGTVHDRDENAAINLEHLVVGPAWAEPSPGIPAATLGEIAALAASQEAVKLRSVNRELNPCAHVRTN

SEQ ID NO: 31047 - protein, 434 aa, Acidiphilium sp.
MILAHKIALDPTVEQAIHFARAAGTARFAWNWGIAEWKRLYEAGGKPSATKLKAQWNAVRRTEFPWSCDVTKCASGQAIMNLGTAFGNFFRDLKKPKGQRKAGYPKFKKKGQHDSFALWNDQFEAHGCRERFGKDRGEIRIPNLGWVRMREPLRIGGRILGAVVSREAGRWFVAIQCEMPDAEAAHPAPGSVVGVDLGISALMALSRQLLDGRTKIENPKSLRKAMRRVKKLSRRISRQEEARKKRAAKTSRRMRNRRAQLAKLHGRVANIRRDAIHKATTAVASTFETIVLEDLNVAGMGKNHALAGSVSDAAFGEIRRQFEYKARMRGGHVHVADRFFPSSKTCSACGCVVDKLPLSARSWACAECGTVHDRDENAAINLEHLVVGPAWAEPSPGNPAATLGEIAALAASQEAVKLRSVNRELNPCAHVRTN

SEQ ID NO: 31048 - protein, 505 aa, Acidiphilium sp.
MRTDLLASNMTATKEAQVRAVLVAYRHGAVMLASEQWRLFFESGRFNKHHDKDKTTFSAVIGAANRVQMCRYQVVGQLESWLSNRANEFRDIVTRSSLDPDTKHMLHVINRLGAWFSRREIAMKDTGEIVPDAIRSLARSIIRHVMRQHRRPDMRYISMRLDHRAACLETPTEATQKNRVGWWINMSTMTKGTKIAVPLLTYERHERRGGRLCNGVLVTEDLESGALSFGVVSDIGTDCEASRAAYQPEREVMALDFGLSTLFAGDEGQLLGKDWLKALRAYDQRITRIARGQQRHGRKPRDSARYRKAVAALRGWIRTEVGRVLNALVAAKRPAAIVLERLNFQNPALSRRLNRIIQNCGRSVIRAKLADFNDRFGITSEEVNPAYTSQTCSCCGYVDKRNRPSQSTFKCLWCGSNMHADVNAARNIGQRRALSIGSVFQSKASVLAELVRQFRERRVRSTRSGGKGSTADPRSSNSYFGGTNTITARMSGQTSAPNLVLVELT

SEQ ID NO: 31049 - protein, 331 aa, unknown
  TnpB Polypeptide
MLVDRNFKSFFALLELKAQGKYNKPIKIPKYLNKKAGRQVVHYAKDALSFKKKGFIKLSKTNIKIRTSLTRDAVQFVILVPKNHYFVIEIGYNVNEPELKSNNNVLAIDIGVNNIASCVTTDGEKLLINGRQLKYINHNYNKAVAKARSKLKTTHNQNSSKYISQIINKRNHRINDYLHKVTTYIVNHAVSQNIGTIVVGYNKEWKQDTNLGKVNNQNFVNIPFYRLINLLEYKCRLKGIRFQTITESYTSKCSFVDGEEIQKHQTYSGKRISRELFKTKNGLIINADINGAYNILKKYMQKNATWNENLSQTLVRVCSVPSVRKINIRLS

SEQ ID NO: 31050 - protein, 444 aa, unknown
  TnpB Polypeptide
MDIFTTYSVRIDRFTRIFQDTVNWYRRSVDFFIRVILLEKEELFRLKTQTERVNAVEKITVITSGRPEVKYDFGKEFYKFPSYYRRAAIAEALGSVSSYLSRLKSWEKEDPKSRGKEPGLPKAGFICPALYRKNCYVRLTDYTASIKVRVRNTWDWVTVNLRRSDADYIFRYCRNRKECVPVLRKRGKKWYLDFSFQEKVKLEEKEVWNTRILAVDLGINNACTCCVMEADGTVAGREFLSLPAENDCLNHAVGRLKKAQRNGAKRTPRLWAAVNGLNDNIAVRTASFIVEQAVKYNVDTVVFEHLDASGKKKGSKKQRLHFWKAQYVQKMVTDKAHRLGIRISRICAWGTSRLAFDGSGTVKRGKASKKTAGNYSICEFQNGKVYHCDLNASYNIGSRYFIREILKSVPVTVQQGIGAKVPRCLKRSTCTLSDLISLAAVLAA

SEQ ID NO: 31051 - protein, 405 aa, unknown
  TnpB Polypeptide
MLSYKFRIYPNANQIKILEEYLNSCKDMYNLLVDEVKKAERENKNISINDLKNIVSEKSKLFHKFTKVYPRLLEMMAFQLWNNMNVLKKMGLNASRLKFKKRIKTLNYNRRGFSVNLENKRIFLEGVGNVKIKIHREFYGDLRGIIVKKEADRWFAIFQIENEEKTEAKKTNRAVGIDVGIENFAVDSDGNVIANPGYLEKEIDKIVYLCKRLSLKKKNSKNSQKLRLKIERLYNKIRNRRRDFLHKLSKYYVDNYDFICVEKLDIEKMIKQRLASRLRIKDAAWRRFVQMLFYKAQRAGKKVFLVDSRDTSQRCSRCGCLNRKILKLSDRVFICRACGFKSDRDFNAAVNILKSGLGRPFVPVDTYDSRERSRLEKVPLLRTISVKEVIEGRVLSMRQEARSNE

SEQ ID NO: 31052 - protein, 387 aa, unknown
  TnpB Polypeptide
MYQYRLYPSKNQKERIINSFKTCKSIYNELLALNIDSWKFGKVSLNGFDCNKYLSGKYSSIHSQVKQNVSDRVHKAFQNFFRRVKDKSCKGKGFPRFKSRINSITFPQSGFKFVNERRLYASKIGNIPIVLHRVPRGKIKTLTIKVNKAWQWFACFSCELPDVKVVHPSKEKVGIDVNSRDNICFLSNGESFDNPKFLIKSEKKLKRLHKQLSRKKKGSKNRSKARFRLSRQYVKVTNQRTDFLHKLSRSLTTRYGIIAVEDLNIKSMISDSYNSKFIHDASWGTFINMLSYKAINVGGQLLKNPKTRGSSHRCNKCGFYVEDMPLSRKIFKCPECLNVCHRDLNASNNHLKDTVGLTEISTPVDIEPLPSKLKASSVVESGTTYGK

SEQ ID NO: 31053 - protein, 383 aa, Scytonema sp.
LHAIWKQWLAAYRWVYNQCIQLFNAGTVLPKGTSLDQYIQFLQKRPEYEWTQCLGKTRQESVCEAESAKRQALKAWKAKPKTERGKFEMRFRSCRDKSQVIQFKNDAYKNGTWFPSKAKGLLFCSAIGYEVPQSCVYGTELVYQRGQWFACFPEVREVVATRSDKVIALDPGNRCFLTGYDGENILEIGKGDIGRITRLCLHLDSLISQKGSCKGKQNKRKRYKLSLAIERLRERIRNLVNDLHHKASSLLTSTYKLIFLPTYETSQMVLKTARKINRKSVRNMLSWATRRFAKHLEQAAKRNGVIVVRINESYTSKTCPHCGEIHRKLGGNKVFSCPKCKFTAPRDWVGAVNIMLAALQATAFQVKGTQLSIESLTQDVVVS

SEQ ID NO: 31054 - protein, 329 aa, Scytonema sp.
MCNTYPVLYKGQQVKYRQNYQLVDLKVWSGTDWIWINCIPVKKHGLNRHLIDGNKIKSPAMVVNKHTCQLSMPIEVKKVDLPEKTFVCSVDMGINNAATASIVGRDGTVKARKFINPSQDIDRRDKRRMMIAHKAKQTRNITKSDLPKGFCKRLQRKSSNINLQISKTVSKSIVEFAKTHNAKVIVFENLEGWKAKGGRRKSLQKQKFHLWCHRKIVELVTNRWTELGGTIVFINPKYTSAYAYDGSGKVKRDKVNYSLCCFTTGKRYHSDLNASYNIAARYWYAVIMGDNSYSRVFVRASVSEGEGKSSHDTQRTPVTLGTLRSLLAA

SEQ ID NO: 31055 - protein, 464 aa, Scytonema sp.
MRLLNAVQSEALARMELVRNSQAWAEAKKLTKTLTKKGEKIKNPERAEAFEAAKKAYRFTDADLQDYATIVAKPSQWIWSKLDSQSIQKIGTRVFKAVNKILLGVARKVRFKNNRSFSSMEGKQIITGIRVDKNLEMFVWGKLKCPLIIDWLDPCKKHGWDSKWKYARIIRRELNGKTRWFVQIICEGLPYQGRANTQYRDALCSLDVNVSNVAYVSKDKAGLKPFADRVPTYEKEIKTAQRKQERSRRKNNPDNFSLNDIVFKGKNKGRKVKRKGQIKRGKNKTWKNSNNYKRIGQKRRELERRKTAYTKSQNRALANEILRLGGKHINLEDVSIKAWQKIYGKATSAKSPGFFQSEIIRKAESANGIINKYSTQKTACSQTHLNGNRVKKKLSERIHYDETGIVMHRDLFSSYLGLFVNQEGYLSVDDARKEYWGSEPILSAAWAEFQKLSSAEARPRPGFS

SEQ ID NO: 31056 - protein, 378 aa, Scytonema sp.
MDLENTPKKSRKIYLKLTPEQKILIRQWFGVSRFVFNQTLELLRDGVIKANWKAIKGSILNSLPDWCKDTPYQIKSIAIKDACKAVSNAKLKYKQSGVFYNFKFKSRKDPKQSCYIPKSAVSEKGIYHTILGEVKFTETLPKNFGDCRLVCVYSDYYLTIPTNSLQLETENQGRVVALDPGIRKFFTFFSESSFGWLGKNANMKIQKLCFKLDELCSAISKSTGQLKRRLKKAANRIRAKIKNLVDELHKKTAKFLVDNFDVILLPTFETSQMSKKGKRRIRSKSVRQMLTLSHYQFKQFIKHKAFEHNKVVLDVNEAYTSKTVSWTGEIVKIGGSKIIKSPSTGKTMDRDLNGARGIFLRALVDTPWLRENLSLSIC

SEQ ID NO: 31057 - protein, 513 aa, Scytonema sp.
MSFKSKEQKEQDKEKNKNTHISTVVQHLKLSNLGYAVISDILSHANSLYNTLTFNLRQGFFVHKILNFQSLTIDLQTDFKENYHYKMLHSQAAQSVCHKVTENFKSFKQLLDKHFREGTKKPLLPGYRQKGGMFEVTYPSQSVNISQEHGIIFATVSTGIMFKKQHKEDVMGTSLNERLRFRVPDDIDPSNLVELVITSKHREIYLHWVCRKKNEIVATLNKSSVLGIDIGLNNFVTCIPNTGEEGFLINGRPLKAINQFYNKTVSKLKKGKDENFWSGSLARATQSRNNQVRDFIKKSARTIINKCLESGISKIVFGWNQGIKNEIDNGRVNNQNFVQVPFTALRDTLKYLCERSGIEFVVVEESYTSKMSFFDGDELPVYGQETEEQKNLKPSGRRTKRGEYKTGNNTIINADANGASNILRKAKIDTSKITFRVCQILKTINIWIGHAQGKKKRGNAINGYPALPLNKSRGLGIPPFFKGLILGKKFPSRKGTAAGLSCCTTIGLTEPGQ

SEQ ID NO: 31058 - protein, 420 aa, Scytonema sp.
MQNVEKHTIKHNHEWFPYCEEMTNASRQLYNAAQFTQRQGFFYGWGTQSGGTLDVMFKSNSNYGAMPAKVAQLVLKQNADAWSAYFKAMSAYKLDPNKFTGCPKPPSYIDEKNLVKFNYQAIGKKEFKGGYIVPSMSPIRIPVRPGLKFSDLCEVRIVPLTGCFVIEVVYDVPDNPEFFCSLNPELAASIDLGLDNLATIVFSDPTIQPIAVNGKPLKSANQFYNKQVAKFRGFLAIGQRTSRRIQNIVRNRNNFVESYLHSSTKMIVDEMVKQGVRLVAIGKNEQWKTSLNIGKRNNQAFNSVPHAKFIEMLTYKLEKVGITVKVGEESYTSKSSLIDWDIIPTFDPNNKVKHKFSGKRVQRAWYVSKDGLRIHADVNGAFNIARKVIPNSFNCLQEIVERDRGCLVVHPLAFNTFVLL

SEQ ID NO: 31059 - protein, 388 aa, Scytonema sp.
VLKIRLYPSKELHKVWKRWLAGYRYYYNETIVLLRCYDGVMKVSAEQLDKLLQRIETIPDWVKTIPGHQRQEACFEAYDAFNRAKKDGGEAEFKSVKATSQTIQFKAGNFKNGTWYCNTTKGLKFTAFGQTIPYQCEYGTELVYRHGKWFGCFPKHDLVVPTGSDRVIALDPGNRTFLTGFDGENVLEIGKGDIGRIQRLCSHLDKLISRSTKTTCRKRRKMRVAANRIRERIQNLIKDLHNKAVNLLVKSYKVIFLPTFDSSQMVIKKRNGKKRRINNKSVRQMLTLSHYRFEQHLKQAASRCGVIVVLCNESYTSKTCGNCGHIHHGLGGNKVFKCPHCGIQISRDVNGARNILLRALQATAFTVTHDSIVLSDSSELTDAVVNQV

SEQ ID NO: 31060 - protein, 400 aa, unknown
  TnpB Polypeptide
MKRQQAFKYELNPSGEQRRRMVCYAGCKRVVYNKALALQTANHAVGNKFIRYESMAKNLVAWRSDADTEWLREAPYHTLQQALKDLENAFKNFFAKRTEFPRFKKKGQHDSFRYPDPKQIKLDQANSRIFLPKLGWVRYRNSRDVLGTVKNVTVSHRNGKWFISIQTEREVEQPIHSSTSEVGIDMGVVRFATLSDGTPYEPINSFKKHAAALRKAQRAMSRKKKFSSNWKKAKAKVQRIHVRIANTRRDYLHKTSTTISKNHAMVVVEDLQVSNMSRSAAGTVEQPGRNVRQKSGLNRSILDQGWSEFRRQLDYKVLWQGGLFLAVPPMNTSRTCPCCGHVSKDNRRSQAVFACVACQYSENADLVAAINILRAGHARLACQVNGEVSRQQQEPSERAA

SEQ ID NO: 31061 - protein, 326 aa, Natranaerobius sp.
LSKIDCNNHLNRELKKELVWLKEVDKFALTNSIYNLDTAFQNFFRRVKQGNKQAGFPKFKSKHINKFSYTTNFTNNNIEVNFSEKRIKLPKLKWVEAKVHREFDGKIKSATISKNPSGRYFVSILVDTEIAELPRVNKNIGFDLGISDFLIDSDGNKISNPKNLSKYERKLAKLQIQLSKKQKGSNNRNKMRIKIARLHEKILDARKDFLHKLSSQIINENQVIVSEDLNVSGMTKNSKLAKSISDASWSEFVRQLEYKANWYSRTYIKIGRFFPSSQLCSSCRVKNTEVKYLLIREWACDNCGTHHDRDVNSSKNILQEGLRKLA

SEQ ID NO: 31062 - protein, 380 aa, Natranaerobius sp.
VIITKTYKYKLYESKKNKNIHQKIDIAGLIYNHCIALHKRYYKLTGKHLNKFQLMKHITKLKKKDKYQHWNLVGSQAIQDIVDRIDRAYQLFFRNLKHGIKTSPPKFKKIKKYKSFTLKQAGWKYVDDNLIKIGKKVYKFSKSRELPENIKTVTIKRDPLGDLYICFVVKEKIEVPDRQGKSSIGLDFGLKTFLVASDGTKYEAPFYYHHKLKELKKAQKELSSKEKGSNNRNKARKKVFRLHKKVVNQRRAYFFKLAHELTDKYEYIFIEDLNMKAMQKMWGKKIQDLGYSTFVEILEYVAKKKGSRVVKVDRFYPSSKICSKCGEINQNLKLSDRIFECDCGLKIDRDLNAAINIHMGGASSIGLGNVRPAIIEAVSA

SEQ ID NO: 31063 - protein, 277 aa, Natranaerobius sp.
MLFRRVNKGNEKAGFPKFKSKHSNKFSYTTNFTNNNIEVDFSENRIKLPKLKWVEAKVHREFDGKIKSATISQNPSGRYFVSILVDVEKKALPRVDKNIGFDLGISDFLIDSDGNKIPNPKNLSKYERKLAKLQRQLFKKQKGSNNRKKMRIKIARLHEKILDARKDFLHKLSSQIINENQVIVSEDLKVSGMIKNSKLAKSISDVSWSELARQLEYKANWYSRTYIQIDRFFPSSQLCSSCTAKNTEVKNLSIREWTCDNCGTHHDRDVNSSKNIL

SEQ ID NO: 31064 - protein, 520 aa, Lactobacillus sp.
MKRSSKPIKSYSKTIRAYSIKLDEDAFQELDQLFISYGKCRNMFLNQYCGINHMLDVKQYFNLRNELVKSSQGNAYAEKYHFLQKHWKYALRDACANINAMLSNLANQIRKAVQANELVDEDEQHLIYYLLSMRELWYYALTADQAVLAQLKPAYRKHLSELEQSVTAKQRKHAYSYLRRLTRRYKYVPRKHTNLNRSMAYDENMYRFQGEELKQVAISSGVSRQQFAFSLTSPWHYRLKGDLQIILDRDKKRIEIHKVIQARQKKKYQGKQKLGIDKGLATLVSCSSGQEYGKGLSQLTGPQIEKESRYLAQRNPYYGRRYQLKKQIEKLNHVQTRTAIIKRNQLSVELKQIESNNLGHKRKDRRHEALRACRESFINHAIKEMIEHEAPSLIVKEDLTFTKDKATKKGNKYERKARRNLSSWTKGTLNTRLEYYCQQYSIDLKDVNPAYTSQYCPNCGRHFEFRFGKHNEKTICPNCGEMNCNIAASRNILARANDKEIALYTPYDKVKAILDQRIVS

SEQ ID NO: 31065 - protein, 375 aa, unknown
  TnpB Polypeptide
MMETFRQMVNHCIRAGLENDCSTLKRLSSLAYHTLQNYDILSYYKLTAISQACGRLSQMKRDIKKGRKPKSPFVQKPYLVSCYGFKVNGILLSFPVWNREFANILLNDHVTRILSDQSITPRSFTITPKSLSISIAKNVELIKTDKTIGVDRNLRNVTFGNDKKIIQVNTSEMLKIKENYSHVRSTCTRNDHRIRKKVHGKLGKRQTDRIRQRIHRISKSIVSYAKKNKTAIIFEDLNEIRKLYRKGNGQGNRFRRKLNSWSHYELERQTSYKAAWDGVPFYKEDPRCTSTLCPACGGRLQGDRHRYRDLWCGSCRRWRDRDVVAAMNIACKGLHRFCNPQGDTNEAMRGNLKEPAILRVDVSKLVTDWSDTYIA

SEQ ID NO: 31066 - protein, 419 aa, Micromonospora sp.
VRLRYNYRVYPTSSQRQALARAFGCARVVFNDGLRARQDARAEGLPYLSDAELSKRVTAAKATPERAWLGEVSSVVLQQALADLNVAYRNFFASLSGKRKGRKVAPPRFRSRKDNRQAIRFTANARFKVLDNGRLRLPKIGDVEVRWSRNLPSDPSSVTVIRDAAGRYFASFVVQSNDEPLPVADSEIGIDLGLTHFAVLSDGTKVAAPKFLRRAARKLKRLQRDLSRKQRGSQNRKKAVVKVAKAHARLADTRRDWQHKLSTRIIRDNQAVYVEDLCVVGLGRTRLAKSVHDAGWAAFTGMLEYKAARYGRTFAKIDRFAPTSQTCSACGRLDGPKPLNVRSWTCPCGAVHDRDVNAAINVLAQGRWDNSSACGAQVRPALVPAPREEAGIRPDVACSARNVEGISVHYGEEIVKSGG

SEQ ID NO: 31067 - protein, 251 aa, Thermotoga sp.
MLITYKFRIYPTKEQEEKLAKHFGHTRFVYNFFLNYANIIYRVMERPTYYNEWASVLVKLKKTNKYSWLNEVNSQALQQSLKDLERAFKNFFKKQAGYPKFKKKKFSRQTFRIPQHIQLYIKEDNPKYGCIFVPKFKEGIKVRLHRKLPKDGKIKQATFIKTPTNKYYAAIVFEVQDVEVENKSTDALGIDLGIKDTITLSDGRKYSMPDLSKYERQIKRLHRRLSRKQRGSKNWEKARLRLAKLYEKIVT

SEQ ID NO: 31068 - protein, 248 aa, Thermotoga sp.
MLITYKFRIYPTKEQEEKLAKHFGHTRFVYNFFLNYANIIYRVMERPTYYNEWASVLVKLKKTNKYSWLNEVNSQALQQSLKDLERAFKNFFKKQASYPKFKKKKFSRQTFRIPQHIQLYIKEDNPKYGYIFVPKFKEGIKVRLHRKLPKDGKIKQATFIKTPTNKYYVAIVFEVQDVEVEDKSTDALGIDLGIKDTITLSDGRNIKCQTFQNTRDRSKDFTDDYPGSREVQRTGRKHVCVLQSCTRK

SEQ ID NO: 31069 - protein, 326 aa, Thermotoga sp.
MDEVIKQMTVTLTCRFKLELSTAYTNAVNYVLEQNLKDKSTNVKKLHKLYYDTIREKFCLPAQIAINAYRDVSATYKTLWAQFKELKRRKPDSKAVKKFWDKPPKRKSLIVKYTCNRTASFKKINGEWHASLSTLQGRIKWIPMKGWSRHFKYLESCKIGDPILTYDKSSKTFFLLVPVTLEVQEHQPKEIVGVDIGERHIAAVASTRGTRYLIDLPEEFRRRKQHYQRLRSELMSKGTRSAKRKLARISRREKRFTENVLHIIAKKLITSHPGARFVLEDLTQIRANRITYRGEDKEARRQSEQWPFASLQCSPESSCQRPAGQS

SEQ ID NO: 31070 - protein, 382 aa, Thermotoga sp.
MRRTQPHRSKNLQQNDVSCAKDTPKERLLAVLAHRRQIHPPLGRKHQNPRPLKAGICSALLSSPQRVLQSSQKESRCKPPYKKKRYLPFIWKESAVKLLSDGTLRLSLGKEREPFVVQTLLKPPLRIKQARLVFEDGYYLHLAIEVEIEEKSANSGVMAVDLGVLRPITCFDGKEVISYHGGVLSSVLRYRNKRLASLQSAIAECKKGSRRYNKLVRAKKRVLRRLKNQINDIMHKITSSFIGLCLRKQIGTIVIGDVTGIRERADYSDNANQKIHQWQFRKLIEMIRYKAEQFGIEVKLISEANTSKTCPVCGAKNKPNGRRYHCKTCGFEYHRDGVGAINIWKRYPGTGQVVAGLAPVRGVRFHPHLCGHGASLAPWKVA

SEQ ID NO: 31071 - protein, 259 aa, Thermotoga sp.
VHRKLPEDGKVKQATFIKTATNKYYAAIVFEVQDVEVENKSTDALGIDLGIKDTITLSDGRKYSMPDLSKYERQIKRLHRRLSRKQRGSKNWEKARLRLAKLYEKIVNIKSDWLHKITHDLVSESQTGKIVVEDLNIKGMVQNHRLARHIHMQSWRRFLELLEYKAKRCGIEVIKTNRYYPSSQMCSECGYINKEVKDLSVREWTCPVCGAHHDRDVNAAKNLVRYGLMLSVGREPSEFMPVDRALAAEPERGLRATTG

SEQ ID NO: 31072 - protein, 297 aa, Thermotoga sp.
VTWKCDGIKVVDSKLRLSLSKQTREYLKEAHGIESKYIWVALPKDLPLDSVKQVELVPHHRFGHISYTLHIIYRQTFDEKPAVDPGKHLAIDLGVLNFATCVSEDGSFIIDGRVLLSKLRLINKRTAHLKSILDRQNIKTSKRLHRLHRYRRNYLNDFVHKASKAIIDYCLENRIGTIVVGKLSHGITEIDIGSINNKKLHQMPYGKFLSKLKYKADQVGIRVIEVDEAYTSQTCSVCGAVDRSSRLHRGLYVCKHCGSVMNADTNGAFNILKKVSPSPKRVGVGALASPVRLRLVS

SEQ ID NO: 31073 - protein, 344 aa, unknown
  TnpB Polypeptide
VNYIQTRNRSSIRILAAFLAAFLLVLMLFSTTAHADFDSAACNYLQISFMQVQQNNLSTLLALNEGLYYKSPNLGGVYAHVMDVAGDDGQVGIGFCGNHAKALNSRQVRNDTWTYAGLWTPGGSAPFLDYYYATNFESDLIRAENPGQTEEWYAGALNTEEWGYAKYCTASQMHRRMANQLLAMGNEFYVEDMRWKALAKRTKETRRNKKGKILSKTRYGKSIANKAPAMFLAILEQKVIASGGSFQRIVTWKAKASQFSHETGKCNKKKLSQRWHYLEDGTKVQRDLYSAFLIQHTNKNLESFNLRTCEKDFPIFLKMHQEEIERLQSLDKRMPSSMGIKKAA

SEQ ID NO: 31074 - protein, 366 aa, Exiguobacterium sp.
VIILLKAYKFRLYPTKAQRESFLKTFGCVRFVYNKMLEERIRLYEESKLNPVVKQRLPTPAKYKLEFPFLKDVDSLALANAQMDLNKAYANFFRDKSVGFPKFKSKHRDRPSYTTNNQNGSVRIEGRKVRLPKIGFIRFRQHRSFEGVIKSVTVSMTKTGKFFISILVNQSEEKWIPAKSKVGIDLGLEHFAIMTNDEMVSEKIPNPRFLRKSEEKIKKAQRALSRKKIGSKNREKARIILAKRHEKIKNQRTDFLHRTSRRIVDENQVIVVETLKSKNMMKNRRLAKSVGDVSWYEFVRQLEYKARFYGRTFIKADQWFASTQTCSSCGQKGEKKKLNVREWTCACGAHHDRDVNASINLLKLAY

SEQ ID NO: 31075 - protein, 366 aa, Exiguobacterium sp.
VTFVLKGYHFRLYPTKSQRDYFLKTFGCVRFVYNKMLEERIRLYEESKLNPGAKQKLPTPAKYKPEFPFLKEVDSLALANAQMDLNKAYANFFRDTSIGFPKFKSKHKDRPSYTTNNQNGTVRIEGGKVRLPKIGFVRLKQHRKFDGRIKSATVSMTKTGKFFISILVNQPEEKWVPAQHKIGIDLGLEHFAVMTNDEKVSEKIPNPRFLRKSEEKIKKAQRALSRKKIGSKNREKARIILAKRHQKVKNQRLDFLHQTSRRIVDENQVIVVETLISKNMMKNHRLAKSVGDVGWYEFVRKLEYKSTFYGRTLIKADQWFASTQTCSSCGEKGEKKKLNVREWACTCGAHHDRDINASINLLMLAD

SEQ ID NO: 31076 - protein, 367 aa, Exiguobacterium sp.
LRAYKTEIRPTEEQIILIHKTIGTCRYVYNLYLQKNKEAHEATSSFLSGYDFSKWLNNEHATQDEFAWIKEVPSKAVKQAIMNADAAYKRFFKKLSSSPRSKRKSDYGSFYLVGTIHVKRHLIQLPKLGKVKLKEKGYIPFDGVKSATVSREGNRYFVSVLVEEPSRVVRKHGQTDGIGIDMGIKELLFDSDGNTVANINRSNQIIKLTRILKRQQRKLSRRVKGSENFKKQKVIVQRLHRRIKNLKTDLKRKTVLEIVKRNPQFVTIEHLDVKGMMKNRKLSNAFQQIGIGHFVDWLKVKCLEYEIGLRQVDRFYPSSQMCSSCGSRKKMPLHVRTYDCDDCGNSLDRDLNAAINLKNSKEYTVLV

SEQ ID NO: 31077 - protein, 420 aa, unknown
  TnpB Polypeptide
MEFSQSQNRRVTFRLYPNQAQEAEMLKIRALHQQLYNAALEQRITAYRRRGVSLHFAQQCKDLTDLRQTMPEYDALNAQSCQVTLKRLEHAFQHFFRRVKENAEKVGFPRFKPLQRYSGWGYKTHGDGWRLFPQEKKHGLLKLSGVGYIRMRGQARMPGTPKTLDILYKGGKWYASVVLVCEPERKPKDHEPPLVKGAVGLDWGVESFATLAHDSGDYSRIKNERHLRLELQKLAQLQREMSHKKRGSRNWYKAKKKVAALHSKIARKRHEFLHQSSALVVKANGLIAVEKLNTKGMTANGGQRKKGLNREILSTAPGAFHAMLKYKAAEAGTRYIEVPTRKVKPSQTCSGCGNQAKKPLSERQHACPCGLTLSRDQNAARVILNWALESMKGREPALCGEKLFSVKHETPSIPMRVGGM

SEQ ID NO: 31078 - protein, 412 aa, Escherichia sp.
  misc_feature (34)..(126): Xaa can be any naturally occurring amino acid
  misc_feature (334)..(378): Xaa can be any naturally occurring amino acid
VKRLQAFKFQLRPGGQQECEMRRFAGACRFVFNXXXXXXXXXXXXXXXXXXXXXXXXXXXXXXXXXXXXXXXXXXXXXXXXXXXXXXXXXXXXXXXXXXXXXXXXXXXXXXXXXXXXXXXXXXXXXSRQVTGVVKNVTVSQSCGKWYISIQTESEVSTPVHPSASMVGLDAGVAKLATLSDGTVFEPVNSFQKNQKKLARLQRQLSRKVKFSNNWQKQKRKIQRLHSCIANIRRDYLHKVTTAVSKNHAMIVIEDLKVSNMSKSAAGTVSQPGRNVRAKSGLNRSILDQGWYEMRRQLAYKQLWRGGQVLAVPPAYTSQRCAYCGHTAKENRLXXXXXXXXXXXXXXXXXXXXXXXXXXXXXXXXXXXXXXXXXXXXXNILAAGHAVLACGEMVQSGRPLKQEPTEMIQATA

SEQ ID NO: 31079 - protein, 205 aa, Microcystis sp.
VITSDGDKVSNPKHFKKHYRRLRKAQKNLSRKQKGSKNREKARIKVAKIHAQITDNRKDHLHKLTTQLVRENQTIVVENLAVKNLVKNPKLSQAISDVSWGEITRQLAYKCRWYGRNYIEIDRWFPSSKRCSNCGYIAEKMPLNIREWDCPDCGTHHDRDINASKNILAAGLAVSVCRATIRPEQSKSVKAGAKNPSGKKQKPKS

SEQ ID NO: 31080 - protein, 282 aa, unknown
  TnpB Polypeptide
MTGPLAVVWSRPLPDGAEPSTVTVSRDRAGRWFVSLLCQCAVEPHLASDSVVGVDAGITSLLTLSTGEKIANPRHERRDRARLALAQRRLARTQKGSANRDKARLKVARVHARITDHRKTSCISSRPGSSATTLGRDGGPERKEHGPEPPPGPRDLGRGVAAAAGHAGVQVPVVRARLGGDQPLVPLEQDLLGVRAHGGGTAARRPRVGMRALRHPARSGHQRRGQHQSRRAGGACLRSWRKTCPGAFPGGRPAVKQEPRRVIAGIAVLQGGEKSILLLTTG

SEQ ID NO: 31081 - protein, 282 aa, unknown; identical to SEQ ID NO: 31080
  TnpB Polypeptide

SEQ ID NO: 31082 - protein, 378 aa, Planktothrix sp.
MAVQDRKRNYALNTCIQHYQETGKSLKLASYKGMLPQLKKEYPWLKEDCYSSVLQCVAINLDRAYKNFFEGRAKFPNFKSKHHKQSIQYPQSVTVNGECLKVPKIGEIKAIFHREITGKIKTVTISKTSSNKYFASILCETELSGVKESGDQVIGIDLGLKEFAIVHDGDSATKYANPKHLNRHHKNLARKQKKLSRKTQGSSAREKFRKIIAKVHEKIANSRQDFLHKLSRKLVNESQVIVVENLNVKGMVKNRKLSKAISDVGWGKFVNFIDYKLKQKNGELVEIDRFFPSSKTCSSCGYILDELSLDIREWDCPNCHAHHDRDENAALNIRNEGIRILTEGGGNPVFADGGCVRPDNRKVKGHRSVNSLILHRPD

SEQ ID NO: 31083 - protein, 375 aa, Peptostreptococcaceae sp.
MEQIKSYKFRIYPNEVQKELIEKSFGCTRFVYNNMLALQIREYEEKGKSYSKYDLIKMIPELKKEYEWLKEVDSTCLQSAIEDLDSAYQNFFREIKKGNNQGFPKFKSKRNPKRSFESKCVNNNISIKENLIKLPKLKWVRSKISQTVDGKILNATVSKTPTGKYFVSLCCKVDIEQFEKVDSNIGIDLGLKEFAICSNGKVFDNPKWLRKANYRLKLEQRRLSKMQKFSNNWNKQRIKVAKIHEKISNQRKDYLQKVSTKIIRENQIICLEDLKVSNMMKNHKLAGAISEVSWFEFRRMLEYKASWYGRTISVIDKTYPSSQLCNVCGHRNKDVKNLGLRKWICKCGVEHDRDINASKNILKEGLRLVSLGQAC

SEQ ID NO: 31084 - protein, 442 aa, Symploca sp.
MLTLTYEYKLIPDKQQISVIEQTLKVCHSVWNYALTERKDWLKSRKSPVNACSLEQEYIIPSDVPYPNYHNQAKALTKAKKTNELLKSVNAQVLQQVLRTLDRAFADMQSKKLGFPRFKNKYRMRSYVYPQMLKDCVKANEIKLPQIGWVKFRKSRDIPDGFEIKQARIIRRASGYFVMLSMQLNINIPEVQFKGHPLGIDLGLDKFLATSDGELVERPRFLNQLQRKRKLLQRRLKHKKKGSNNRDKLNQKIARLHQKISDTRKDWHFKLAHHLCDQGQSIFIEDIDFRSWGRGMLSKHCLDAAFGQFVNILKWVAWKRDVFVAKVDKNFTSQICPNCGFHTGKKNLGIREHHCPECGYKTHRDVAAAQVIRNRGIEENALGHSVSENACGDDGTGAVPSYQSVKHSLLNVSLRIPRYTAPAVNGGVCQSGITVSCRKAKF

SEQ ID NO: 31085 - protein, 401 aa, Symploca sp.
MLVLEYKVKAKQAQYRAIDEAIKTVQFIRNKCLRYWMDAPRQANLKRFDLNKHSTELRNEFTFVKDLNSMACQASAERTWMAINRFYNNCKSKKPGKKGYPRFQKDNRSVEYKTSGWKLHKSKRRLTITDNKGIGELKLLGKWDIHTYPVKAIKRVRLIRKADGYYCQFCLDIECVDVQSQTGKEVGLDVGLESFYTDSNGYQEPNPRFLRKAESDIKQAQRRIYKKKKGSTRRCKARARYSRKHLRVSRQRNEHAKGLARNLCKSNDLVAYEDLKVSNMLKNHCLAKSIADASWYQFRQWIEYFADKFGKEAVAVPPQYTSSECSQCKRVVKKSLSTRTHSCQCGCVLHRDNNAAINILLKAKSRGGHPRSNAKGVATSTLLGATLVEQVATRNLESPSL

SEQ ID NO: 31086 - protein, 690 aa, Streptomyces sp.
VGASRSVKRAFKYRFHPTDAQAMILSRTFGCVRKVYNLALAARADAWTARQERVGYRETSMMLTGWKKTEELAYLAEVSSVPLQESLRHLDAAFTRFWKNQSKHPRFKSKRRSKASARYTRSAFRYGDGELRLAKMAEPLDIVWSRPLPVDAQPSSVTVSRDGAGRWFVSLLCEDVPGPVPDTGAVVGIDVGLMALVTLSTGEKVANPGHGRGERERLARAQRALSRKKEGSNNRAKARKRVARVHARIADRRRDHLHKLTTRLVRENQTLVIEDLAVRNMLRNRRVARAVGDAAWRELRTMLEYKASWHGRELITVDRWFPSSKLCSFCGATAGAMPLHVREWTCEGCGTVHDRDENAAVNLLAAGLAATAGGAGVRPQRESSSRSGRSVVKQEGPPARVGVPSPWGGGMSKDPRVGEGAAGQQVDVEVAQGHADQGGPGQLHVAGVEPADPAPEPVAHRVLGEVLEPAAHDVAAGVAGQRVGPDQRDVDQEQQGPEAHVAPRVVLVAEGQHGVVREDARDGHGRVEEVPVRVLEDQREAGLAGVPRVRLGDGAGGRGGPEAAVVGLAVVVAGQPEAEREDQDQQCGGQAPPAAEEVPVGAAAHLRAVLREARGVERGDVGGRVVVGVREGPPGRVDDEGEQPGRGDGGGEPPPVGPQVPGRDRGPRGVVDAAGPLLGSFRACGQRGLR

SEQ ID NO: 31087 - protein, 389 aa, Streptomyces sp.
VKRAFKYRFHPTDAQAMILSRTFGCVRKVYNLALAARADAWTARQERVGYRETSMMLTGWKKTEELAYLAEVSSVPLQESLRHLDAAFTRFWKNQSKHPRFKSKRRSKASARYTRSAFRYGDGELRLAKMAEPLDIVWSRPLPVDAQPSSVTVSRDGAGRWFVSLLCEDVPGPVPDTGAVVGIDVGLMALVTLSTGEKVANPGHGRGERERLARAQRALSRKKEGSNNRAKARKRVARVHARIADRRRDHLHKLTTRLVRENQTLVIEDLAVRNMLRNRRVARAVGDAAWRELRTMLEYKASWHGRELITVDRWFPSSKLCSFCGATAGAMPLHVREWTCEGCGTVHDRDENAAVNLLAAGLAATAGGAGVRPQRESSSRSGRSVVKQE

SEQ ID NO: 31088 - protein, 354 aa, unknown
  TnpB Polypeptide
MKHTKTLKVRVRDKHVPLLRQMARSVNLVWNYVNDLSHRSIRERGVFLSAYDIDRYTQGAGKLLGLHSQAVQEVSREYVTRRKQFKKTKLNWRKSTGVRRSLGWIPFKAGAATWKNGQVYHNGHHFKVWDSYNLGQYRFRAGCFNEDARGRWYLNVVVEVEARLSTGQQALGIDLGLKDVATCSDGTRLENGRFYRDLEPALAVAQRAGKKARVRAIHAKIANRRKDALHKFSRTLVQRCNLVVVGDVSTTKLAKTTLAKSVLDAGWGQLKTMLAYKCEHAGIVFKVVGEAYTTQTCSCCGALPDSRPRGIAGLGIRAWTCACGVTHDRDINAARNILALGHERPAVGIPLLSA

SEQ ID NO: 31089 - protein, 466 aa, Streptomyces sp.
MTDAVEGPVRVTGAEAKRVKREALGIADRHERHGRASGPMQPRIRGCDTRQRAYRFRFYPSPEQAQQLEQTFGACRWVYNQGLALRSEAWKSHRVSLGFAETCRALTGWRRAEATSWLQAISSTVLQQALRHLDGAFQRFFRKTAKYPSFKRKRTRQDSATYVRTGFRWLEDPERPGTGLVTLAKQTAPLDVRWSRALPAGVVPVRLSVTRDRAGRYFLSMLVEERITPLPAAFAPGSRAPKAVGLDLGLAALVTLDDGRKLEHPRLLKKYAKQLADLQRQLHRKEKSSKNRGRVRQRIAQLYALISDVRRDMLDQFTTRLVRENHVLVVEKLPISNLMRPAVGKGRRRKAKLNQAIRDAAWGELLRQLRYKCEWYGRTLVVVDRFFPSTRRCSACLVKGPRLDVSVREWTCRECGVVHDRDVNAAVNLRDEGMRLYWLAAAALPPGRTPPSVIKASELKQYAPVA

SEQ ID NO: 31090 - protein, 575 aa, Mycobacterium sp.
MVADAGGIGRRCLSVPWVTMLVMASTGGVLRRITDPVVAAGPAGVRIRTRIHLSAGEAAAVAGIGSFLGSVYRTELAARVERGRLDHKAHAGWRAQRKQALTAVSSSRWAGAITRAVRDQYQLGMRGLAAHVMDLRAAITVLEQRCALRPGQQETIAGGGGGRSRRRRGYRSAGEWFSKTRRLAILRERLVVAQEAWDAGRPSVTVGGKRLWRNRTHLVEAAMTEPQWRARWDAARMFVTADGESGKAGGNETIRVDAAGRVRIKVPAALVERYGTHIEVGAPVAFGHRGTEWGVRVAGRQAVRYDISYDSCRGRWYLDASWKQDIIEPPALDELRSGPVLGVDLNADHLAGVVLDGSGNPVGAPVTIPVDTAGLPASQRDGRVRAAISALLDTATHAACTAVVIENLDFADARATGRETMGRGTRGKQFRRTVAGIPTARFRTRLTAMAARRGIAIIGVDPAYTSRWGNQHWVKPLQQQTSEPVTRHHGAATAIGRRGLGKAIRRRPAGPRNGQRTVAGTPPARPQRRADHVGRHGSSGPPLRTRWIAVPRRTPATSGQHRSGRNRAEHTPAHP

SEQ ID NO: 31091 - protein, 544 aa, Streptomyces sp.
VVVGGVRELAASFVVPGPSGVAVRDRLKHLTPLDEEVLRAVGAHQGALASRDLKTRCAQGLDHSAESWAARKRELTSVSSSRIAGAITKATHAQWALARRCQAAHIRSLEAGIKTLRHRLSLPIGQKGTKRAAGGYRSRREWFQKSRRLTALEARHTAAVADWQAGRVRVVRGGKHLLTTRHHLAEAGLTEDEWLQRWEAERWFLAADGESGKRFGNETIRVTPDGLVSIKLPAPLAHLANAPQGRYILTGAVGLAHRGVEWADRVEANQAVAYRIHYDTERGRWYLTASWQRPTMPTVSLEAARAKGVIGVDTNADHFAAYRLDKHGNPVGEPHRFGYDLSGTTTHRDAQLRHALTRLLHWATQSGVAAIAIEDLDFTAEKTREKHGRRKKFRQLISGIPTGKLKARLVSMAAEHGLAIIAVDPAYTSMWGGQHWHKPLATPRRRMSRHDAAGIAVGRRALGHPVRRRTAPPPHDRSDRAGHRTVQAQPGARGREGTRPPAADHAPGGVSPNGTRKRQPSASNTVRDVRSDQEWVQDPFLLTE

SEQ ID NO: 31092 - protein, 463 aa, unknown
  TnpB Polypeptide
MNAFEPFARRWGTCVRTCGKDAEDWRHSNRRSVKSGSTSQNSILSIGWSLTERSVRKTPKTSSTTSSPIGRRPSARRRRTSIVVIRTSKLDGNSAGCSKATRFSSIPTSTAACVFTSSTAREKSRRGFVMRSDKFRIETDAAGMMSVVLHFSRKAGGDIVLTTRVKTDKTPIQNRNLFVRVEDGKLFIHYAYEKKAKRPCGTGVVAADKGFTEVFATSSGKFFGEGLGKLIIEYCELTTKTNRQRSKLWAYVHKLEENGDFEKAERIRKNNLGSLKRNSRQKRFEEKAADLIYKAVHRLVDEGEDIVVEDLTAVFQQKKELPAKVKRWLSTWVKGKIREALDSVAELRGARVHPVNAAYTSQTDSSTGVLSGRRQGDRFYRESGENVHADTNAARAILLRFYDPEITLYTPYTEVKAILERRTREYESEIASGGNWPSKGSSWMAPVLNGWSNTECGKKHDQV

SEQ ID NO: 31093 - protein, 307 aa, Chromatiales sp.
LPASGDALHVARHLQGVGQVPVCGKAKTPGVPKTCEILHTAGKWYASVTLEVDAVHRERGTEIGAFDWGLKEFLTIATPQGVETVANPRHLRNQLAELKRLGQEVSGKIRMAQQLSGRRWGFPVSSNLRRAIQHLARLHVKVARQRKDFMHQTSAGLVKRFGAIATETLAVKNMVHGGGARNKGLNREIHAAAPATFLKMIRTKAEEAGSWYEEAPAREIKPTQRCHACWKLPDEKKTISDREHQCPHCGAACGRDENAALVLLRWLETKLAGASSPMPGASPGREPSEVWSGGRFTALKHETHTIP

SEQ ID NO: 31094 - protein, 376 aa, unknown
  TnpB Polypeptide
MDLTLKVKLLPADEQGRALLHTMETFNSACDHIGEVAFKNHTANKIRLQKLAYYDVRKRFGLPSQLTIRAISKVCEAYKRDKDVQPRFKPHGAMVYDQRIMSWKKFDRVSLLTLNGRELVPIVMDAYHKPRMGMMRGQADLIFIDGKFYLCVVVDVPEPPKLKSTESLGIDMGVVNIAVDSDGETFSGEAVDKVRSKMAKLKSALQSKGTKSAKRHLKRLSGHVGRFRKDVDHCISKKIVAKAKGTGRAIAVEDLNGIRKTGRTVRRAQRGRQSSWSFGQLRSFIEYKAGLAGVEVVAVDPRHTSQTCPKCHSVDRKNRDGQNFKCVLCGFAGNADHIAAINIAARADVNRPIVACSDTVVSGEHSYKPLNLFMGG

SEQ ID NO: 31095 - protein, 399 aa, unknown
  TnpB Polypeptide
MQRLQGFKYQLKPTDEHRRQMARYAGSCRFVFNKALALQKERHEKGEKKLGYAELCKLLTQWRNGEETPWLKDAPTHPLQQSLKDLERAYGNFFSGRAEFPRFKKKGKGSSFRYPDPKQIRVDESNSRIFLPKLGWMRYRKSRDLVGDVRNVTVSFSCGKWFVSIQTEREVEVPITKGEAVGIDMGIVRFATCSDGRFIEPLNSFRKHEVALRKAQQALSRKEKFGQNWKKAKAVVQRIHARIANVRHDFLHKQSTTISKNHAIVCVEDLQVGNMSRSAAGTSEKPGKNVQAKSGLNKSILDQGWYEFRRQLDYKLAWNGGWLVAVPPKNTSRTCPACHYVSSDNRRHQSAFVCVQCGYEENADVVGAINILRAGLARLACEANEITRRQQEPTEALLA

SEQ ID NO: 31096 - protein, 399 aa, unknown
  TnpB Polypeptide
MIVAHKIALDPNNVQATYFAKAAGTARFAYNWALAEWQRQYEAWKQDNSLPKPSQFSLRRQLNAIKREQFPWMLEVTKNAPQMAIIQLGEAFKNFFAGRAKYPKFRKKGVHDRFTLTNDQFSIDGCRIRIPNLGWVRMREPLRFNGKIMSATISRVADRWFASIAVDVPDQSHLPKAENQGVVGVDLGVSALATLSTGEPPIPGPKPHKALLTRLQRLSRSLSRKQKGSANRKKAKAKLARLHARIANIRQDALHKLTTDLTRRFHTIGIEDLNVCGMVRNRHLARSIADMGFFEFRRQLEYKAAMRGGQVVIADRWFPSSKICSCCGHKQEELPLSVRRWSCSICGVGHDRDLNAAINLKNYAVSSTVSACGGEGAGLGGDAKAKPAPMKQEVSFVPV

SEQ ID NO: 31097 - protein, 394 aa, unknown
  TnpB Polypeptide
MRKSYQFRIYPNKNQEVKLNSALSTCRRLYNDSLSERKRQAELNNLYRSFDVFPWGKPEWINYYDQQNALPDNKNQYQKELHSHVLQNVLRRVDIAFKNFFRGNGYPRFQGRNRYNSFTYPDSNGGYKIIDGLLWLSKIGKIKLVQHREMEGRIKTCTIKKDIDQWYVIFSVDIDKQMPTVEVKTSTGIDVGLSSLLTLSNGEQIKPPEFLRASEKKLTREQIKLSKKKRGSNNRRKQRTEVAKVHRKTRNQRKDFAHKTSRILVDTYDKIVFEDLQIKNMMRNHHLSKSISDAGWYQLISLTKSKAEYAGKTVELVNPKGTSQVCICGCSVPKKLSMRIHNCPKCGLVSGRDHVSAMVIESRGSTAGTAGIKACPSSLSIDIMKQEATSVREE

SEQ ID NO: 31098 - protein, 426 aa, unknown
  TnpB Polypeptide
MFIRKAYKFRLKTNSEIEELFFQFAGCNRKVWNMALALQRDSLDKIKKVLSYNHLAGCLVKWKKDEDTSFLATAPSQTLQQTLKALDRAMKDAFDKKQPGKRFPVWKKKFKCVDSFRYPQGFKVEGNRIFLPKIGWVRFHKSREIQGAPRSVTVSRRGKHWFVSIQTEQDALIPERTVYNPYDVVGIDMGATRFVTTSETDETGIDGLFVEPLNSFKKLENKLARAQRLLARKQKFSNNWKKQKQAVSKIHIKIADARNDFLQKLSTIMSKNHAVVVAEDLRIKNMSASAKGDMEQPGKNVKAKAGLNKSILDQGWGNFLRMIGYKQEWSGGKLIQVNPKNTSRTCPACGHVSADNRKTQALFLCNECGYTANADYVASVNIKARGIEELMAAGHVASSLGRDGVSRPLSQEPVGTGDFVPLLTSA

SEQ ID NO: 31099 - protein, 385 aa, unknown
  TnpB Polypeptide
MEYEYTYRFRLYPNKEQRQVLARTFGCARYVYNWGKELRTNAYHSEGGESMSYTDTARKLTDLKKQEETKWLSNVSAVVLQQSLRNLERAFTNFFEGRAQYPSFKRKHGDQTARYVGTAFDVREGKLKLSKMPGLVKINWSREMPESPTSCTVTKDASGRYHVCFSVKREIPDLPKTKRAVGIDLGLTDVVVTSDGWKSGNPRYLKKSLHRLRREQQKLSRKEKGSNSWKRQKKRVAKAHAKVKDQRKDWIEKLTTKLIGEYDVICVETLAVQNMQKSGSLARGISDVAWGNLVRKLQYKAEWYGKTVVKIDRWFPSTKRCSDCGHTCDKLPLEIREWKCEECGASHDRDVNAAKNISRVGQTRFQAAGDQRKPMQGFELAGSDQ

SEQ ID NO: 31100 - protein, 248 aa, Nitrospira sp.
VESQVDAERNRIPRIANGMIGIDPGFNDVITTSGGEKVPHPKELQQSIERPGQAQRGINRKLVARLHERIKNQRKDRNHRVSLRLVQENSLIVFSKDNIKGMAKKFGKSVASSGHAELRNQIAYKCLAGGTRYMEVSGRNSTKTCSSCGSLSGPSGLSMLSVRQWSCGCGAKHHRDVNAAVNTLLLGMECAALQELRNSSRNPPALAVGRFTMDTPDSPRILTNGNPTRWRAIIIPIRIGEHRPANPA

SEQ ID NO: 31101 - protein, 318 aa, Solobacterium sp.
MQVVGSYGIRIRDSHDALKRTADLFSDAVAHLVRPALENWDALCEAGGAQMRQRMLERMIHSAKGFSSSDAFDQKFPKFPSYYRRAAIMQALGIVSAYQSSLKNWKANGCTGEPPKLDSCKHRMPALYRGNTYKPVIDEQTGKVLPYAAKIKVLRKNDWVWDTVRLSKTDVDYLDKRGRNGDISAPVLEKKHGCWKLRFAVTETVELSAKPVSEQKICAVDLGIRTDAVCSIMDSKGTVLARKFIMRGRENSLRVVNSKCTNETNAHHENPFCTGRVFFRAGCHDYESASVSFHGPCVVDSEELIHCRNDSLLVFLAF

SEQ ID NO: 31102 - protein, 414 aa, unknown
  TnpB Polypeptide
MKHMNEFQFHTGINMRFYPSYKQKKVSARNMGTSLFVYNRMVALNNERYELRKYAWCSPVYRDRLDYLDAVLSSLEEFQNIIPFLNDKDIDAQCIANARQNYHKAWDNFKKNPASGIPVFHKKKHHASYQTNPHYYKNGGCNVYFTDRHHIMIPKLGRCRIKGSPKIMEKLFSMINDIRFGTITVSRDACGRYFISIQLASDTPFHDTLPSTGSMRGYDMNLENYYTDSDGNVIDNPKHKRNIQDKLSKFQRKMSRRAERAKRECRSLRDSHNYQKFRRKVAYLQDKASARREDFQHVLSRHEVESQDYMFVEDLKTKNLMKNHKLAYAIGDAAWSSFHHKLKYKASMYGRTFLKVPASLTSQTCSDCGYVLPKDQRLKLSDREWVCPDCGTYHHRDHNAAKVVLFRGMTALGM

SEQ ID NO: 31103 - protein, 417 aa, unknown
  TnpB Polypeptide
MLLGFQTQLILNHKQTTLAAQHAGVARHAYNWGLEVCRQALENQQKLPTAIDLHKRLVAEVKQAHPWYYQVSKCAPQQALRNLEQALKRWRGGLGKFPRFKRKGVRDSFYLEGSIRISGNRIKVPIFGWLRCAELLPVTTPKNVVISLRAGRWYISFKYEAPTPQVEKTGEVVGVDLGIHHLATCSGGEVFPNPKPYRKAQRRLVRLQRRLSRKQKGSTNRKKAVVQLGKAHKRVADIRTPSRLRDRQDSLHKLTTYLAKRYRVVVVEDLQVKNLLQNRKLAGSLSDCGLYELRTPSRYRERRQLEYKARLYGCQVVVADRFYPSSQLCSGCGHRQKMPLQERVFCCPCCGLGIDRDRNAALNLLRWYRTTPSSGGSDACGDSFGGVVGVNSAASHGSLKQEGSRSAAGTEHSGSVC

SEQ ID NO: 31104 - protein, 382 aa, Escherichia sp.
MRRFAGACRFVFNRAQARQNENHEAGNKYIPYGKMASWLVEWKNATETQWLKDSPSQPLQQSLKDLERAYKNFFQNRAAFPRFKKRGQNDAFRYPQGVKLDQENSRIFLPKLGWMRYRNSRQVTGVVKNVTVSQSSGKWYISIQTESEVSTPVHPSASMVGLDAGVAKLATLSDGTVFEPVNSLQKNQKKLARLQRQLSRKVKFSNNWQKQKCKIQRLHSRIANIRRDYLHKVTTTVSKNHAMIVIEDLKVSNMSKSAAGTVSQPGRNVRAKSGLNRSILDQGWYEMRRQLEYKQLWSGGQVLAVPPAYTSQRCACCGHTAKENRLSQSKFRCQVCGYTANADVNGARNILAAGHAVLACGEMVQSGRPLKQEPTEMIQATA

SEQ ID NO: 31105 - protein, 749 aa, unknown
  TnpB Polypeptide
MSPIKSRSDDKAAPEPSSPKKTASSLKTPGNKGTSSKKKSSDTPTQKQLDEALAFEKAVLEMASLENHEALHFIPSALLGTLDVVNDNPRYVTTTRWVDMEKLDPEVEKTLDDLIERFTRETTKWVNVLDRRELRSYCIGDRYREMRDALVAGTFGPLPGKYAPATGLQARMWKAALQVASSVQSNRWRKAQSEALSELRKRPVWSTLSDAERAYVRALLNELTDSFFYMMNTGNPEVVGSWVKVEEEKPQKPKQKTKTKTKTKAKAKAKAKTKTKTKVKEKKFEGKRFDLPDAAREDICGLIRHLVHEHLGRTPVMSSARTLWLDTGCVDVLEEILESVEKASASSKEEAAENTATAAESKAVDAVNAVKAKASGPRTQYLNIMTTRKGQRVRVPLKGFVPGSLFDGKPREDNTMKLEASTIRIIRTERGFKAVFQHDFKTLDPLPVPPPKTALFEAMNLPATMKLLRIVGLDLGVTEVFTDDDGNHWGGSEDYVVEPGRHRKGMMDARQDEAANGQIKTRTGYMPGLNALMRKFAQYRDEKLRRRNELRDQAKNTKDPVKRRNIEKNNLGSKAFDKKCAAYKAAITQIVNRAINRLFLKNPADVYVLECFGSSFDLSGFSKKTRRYLSSWVRGLIRERICFKCSRRGVKVVEVAAAYSSQACPVCHAVDHRNRSGDHHGCDFCDHKGDADAVGAYAMLTRAANPKFRRFMTRESVLEVEYGLHLAYCAKNGLEPLPEFKPRVHKRSS

SEQ ID NO: 31106 - protein, 338 aa, unknown
  TnpB Polypeptide
VTITGRVYPVSSEDYMRLVRLAWDFRRAVHVATRMIVKGLEEDRILRELRRMLNKAYADSAYNAAKAMVEGCIFNGGNPLHIEVRKLFIISEGESSRLGNRNVRLEDTCLVKVKYPYDSSWITLRAEFGEKYLPLLRELVDLAKQKKLSYTARIVFREGIIYLHLSIPIQLYLKYFKKGEARGELIAAFDLNSDRVNLVIIDEHGRILDTRTAWFPEATSHGFPRGKAKALRLNALARLLEYCYRHSVSIVVFENLLSVKRKRFTRSKIANRKITRFAKKQLIQYSVVMALKYGFRVFLVDPKGTTNSREHYDVMRKYRLDRHAASAYLIALRGLRHQ

SEQ ID NO: 31107 - protein, 225 aa, unknown
  TnpB Polypeptide
VDLGLESFAILSTGEKIDNPRFSRRQAKRLRRAQKALSRKAKGSNNRRKARLKVARIQARIADQRRDFLHKLSTRLIRENQTVIVEDLNVRGMSRRAKAKPDPNRPGHYLPNRQKAKNGMNRSIRDASWSMFRSMLEYKADWYGRRLIVIDRWYPSSQICSTCGKRTGRKTLNIRSWMCPYCGTHQDRDINAVKNIQAAGLAVLACGDGRTVERRNMRSTDPIRP

SEQ ID NO: 31108 - protein, 181 aa, unknown
  TnpB Polypeptide
MSKSRNVKRAYKYRFYPTPEQERLLRRTLGCTRLVYNKALAERSEAWTKEHRSVSYKDTSAMLSQWKKSSELVFLKEVSSVPLQQALRHLQQAYANFFNQTGDYPTFKRKAHGGSATFMKTAFTWDENKRELTLAKMRGPLDIRWSRTLPKGRMPSSVTVSLDTAGRCVLSNFCGPFRRFF

SEQ ID NO: 31109 - protein, 427 aa, unknown
  TnpB Polypeptide
MNFQKTIRIPVHYDTTKTKIGILDRLTARITYCIRLISGLINETTRLDVTTLDKLIKNSDIVEKTGLSSGFIQQCRDKVIWTWKSYHRLHRTWEKQAASAEKRAASARDDKELKKRQKYLEKVLKKEPSIPDFRNKTPCRLDSRTGNVVEGKGKLSPLWIHISTLEKRKTIDVPLNPSQYHLNQLKEAQKIDDFEIVKLNKKYYVHITITRVIEDQPISSIGGIDQGLNRSLAVVLLETPVPREELILDAAKRELLDKYDTIISSLQEAKLWDKLRKLRHKRADVAKYHDWCLAIQTAEVTKGSYIAIGNAPFGQTQFRGNGMPKLRKRIGKWSYGRQRTFIALKRAELGYPTKLREEYGTSKECHFCGSRLITRTWLSDSSYILCYSCNSKEDADITGAYNIAFRCQDDWLKAQMNMKGEKPHASA

SEQ ID NO: 31110 - protein, 413 aa, unknown
  TnpB Polypeptide
MKPMRRAYKTELDLNNEQVTMCLQHAGAARFAYNWGLREIIQARARGEKKPTAIDLHKKLNALKATEFPWMYESSKCAPQEALRNLDVAFDNFFRRCKQGVKKKGFPKFKSRKAGIGSFRLTGTIRITDRTIQLPRLGELRLKEDDYLPADAEISSATVSEKNGRWYVSVLTEAEVAECVTPDMPIVGIDLGIKTLAVLSSGEVIENPKHLRAAQRKLKRLQRAVSRRKKGSGRRKDAVRRLGKQHERVANKRKDAINKFTTKVTRETSVIGIEDLSVRGMMANHHLAGALADASFGEIRRQIEYKAGWYGSTVVVIDRFAPTSKMCSGCGCIKDSLSLSERTFKCDACGLVIDRDLNAALNIKHLAASYADSLNGRGLGSTGDGRKSVVKLPKVKRQLNVKSDAGPICLSFG

SEQ ID NO: 31111 - protein, 395 aa, unknown
  TnpB Polypeptide
MRLVERHIIKDNRFEDICRKSGLLYNYVLYNVRQGIFSGEYLKEYDFSTKLGRENQFDFRQLPSSISQQVVGQVFKSIKSWMKLKKDFEKNPSKYNNHHPHLPKYKKGKKQNMVVFTTSACRIKDGYIHFVKDIVQPIKTKIGDNKLCQVRIIPQATCYVVEVIYEKKEQNLNLNKDNVLSIDLGLNNLCSCISNVDIKPFIVNGRIIKSFNQWYNKKKVKLMSLIGDKGTSRRINRMTCYRNCWIEDKIHKISRYVIGLCESSNIGTIIVGQNKGWKQEINLGKRTNQKFVEVPFTSLIDKISYKAKLLGISVITHEESYTSKIDHLAFEPLNKQENYLGKRKRRGLFQSSIGKLLNADINGAIGIGRKVFGDSYVSRIINSGLAFNPVRVNIL

SEQ ID NO: 31112 - protein, 221 aa, unknown
  TnpB Polypeptide
MAQGQSDPVECVEQRHHGFPQGTSAYFRKAQYGKHRPRFASRNDNIQSFRNAMPIRRMDGNRYPLSRKLGSVRIRKRDRLRHPIESLSSWTVKRENRTYCLVLLFDVDIQPKTRAEGRVGIDLGVKDLLTLSTGEKIDYPNRLRRLEEDVKREQRKLSRRTTGSNNYRRQRAIVAKAYAKLRRYRDNFQHQLSHRLIEENQFIRRRRTLKAYAAASLANAR

SEQ ID NO: 31113 - protein, 542 aa, Cyanobacteria sp.
MKAKSLISKTRQDKDSTMSSPIGAVQLDAKLFAIVASVQPNSETTLPDRLNLCDSNIQTLKSSKTSAQDLTSNEKDCKPYWSDSCEAISSRLLLPVETDCVGSDLSYSSSWSSKTVEKSWFLTELLTVRKPNLQPIFLPSFTSSRAECTDSEALPRKSRKIRLFLNSEQKALLKQWFGVSRFVYNTTIKYLQEPGTKANWMGIKTEILNGLPEWAKSVPFQIKSIAIKDACFAVKAAKKGFKKDGQIRKCRFRSRKDTKQSIFIPKSAINNCGIYHSILGKCRLKEALPKEFSDGRLTLAYGEYYLVVSEQVQPVQIDNQGSQCGLGVSPSGASGVRLVALDPGVRTFMTFFSETSFGWLGNDSNLYIQKLCFRLDRLVSRFVKAPAKQKRRLKNAASRLRCKIKNLVKELHHKTARFLVESFDVILLPTFETSQMVSKSRRKLRNKSVRQMLTLSHYEFKTFLKWKAWEQSKTVIDCNEAYTSKTVSWTGEIVKNLGGARTIKSLSTGLRMNRDLNGARGIFLRALVDTPWLREHLNLCVC

SEQ ID NO: 31114 - protein, 451 aa, unknown
  TnpB Polypeptide
MILKEHAERSGRKKQLNSNLGQIIADDLYRSYADWIFHKKGRPRFRGRGRGLHSLRGKNNATGVVWKHKEQSVRYGKRLYRAVVDPKDRYVREALADPADPSKPRRVRYCCLVRKRIRGKERFYVHLVLDGVPPARTVAAPKEECMGIDPSLRNVTCVHANGSVAKIDISAPKEDAKEVRRLQRAMDRSLRAVNPDNYNENGTPKKGARKWVRSKHYLALQAELADLKRRGVETRRNIHGRVVRILVGSAGTIRVEENNWKALQRGRYGKSVLNGAPSEFIERLRRTAESAGSEVILVNPRELKPSQHDPMSGTFVKHELWERRCRLGDTAFFLDRDVMAALNLVHAEVTTNTYDSEALARALQTSKQHWLDAGVVVEMKTANRTSERKLRRFLRRGLDPVSVERLHPHSFLRGVGPHSLANGAIVSDACPEEASSDADDGQERPPTSETL

SEQ ID NO: 31115 - protein, 267 aa, unknown
  TnpB Polypeptide
METAGSFAAACNAINATVNPKLTNRVCLHRDGYWYVHIQLKSEPPKPIKSNIVIGVDLGRREIAKTSTDKGWEGKQLNKTRDKYTRVRASLQKKATQGTRTTRRRCRTVLKRLSGRERRFQKWINHNISKSIIEEAKALKSAVAIEDLIGIRERTNEKPRTKSERRRSNSWAFYQLRIFLEYKGIKEGIEMIAIPPAYTSQTCHCCLHIGQRTNKQFKCTNLVCGWLGDADFNGAKMIELWGCAVNQPGGSELLSCAIEPGLLKAHT

SEQ ID NO: 31116 - protein, 482 aa, unknown
  TnpB Polypeptide
LENDKQVFVYTRKLNANKSHKEQFAKRFRMADDIYKKTLITLLKRYSKMKKDPLYKKAYKFPKGKERNAILKELGVKYDLVGKFTASKFANDYRNARNYSDYVPCAVAQSLGFRAWNAFSKMIFAQGAERVNLRGTIDSFEGQLNVAVVVKDNIFTISTRKKKVSCTIRNVGDSFEEEVLRNTLKYNRLVRRFEFGEWNYYVQSIFEGTLPTKYVSNLEGSVGIDIGISTIAVSSYYQTELEELAKDVTIDEQEVARLQRKLNRQRRANNPHKYNEDGTIKRGVREPWVDSKEYLKTKAELNELHRKATAQRKLAHKTLANKIVQMGTTFVVEQMSFKGLQARTKETKVNKKTGKYQSKKRFGKTLLHKAPSMLIEQIRYKTMYQGKTFILANTREVKASQLNHLTEEYNKISLSTRAKMIGDDLVQRDLYSAFLLQHVGLDGVTVDIDGCKSDFDTFLRNQEFTMSQLTTDLKSVGREYFN

SEQ ID NO: 31117 - protein, 233 aa, unknown
  TnpB Polypeptide
VYDKTPIALQLDKRRVIGIDIGLNNLVTVVNNAGLAPWRVKGGVVKSINQYYNKEQARLTSCKDQQGLTNQTRRLHRLRLKRKNRITDIFHKVSRRLIEYCISNDFGRIVIGYNKTWKQFIRLGKRTNQAFVNVPFRKLVLQIQYKAALVGIEVSLIDEAYTSKVSFLDDEPITQNETYVGQRIHRGLFRSSTGVVLNADVNAGYNIGRKAVPEAFAVDGIEGVGLHPDSVTV

SEQ ID NO: 31118 - protein, 405 aa, unknown
  TnpB Polypeptide
MLKAVKLRLYPNKKQEVYINMLLGSCRFVYNKCLNLKKTDYDDLKINHNLSSLGKYFHNDLTKNPEFSWLQEYNTKVLKQSIIDMLDAYSRFFKQGNGFPKFKSKKDKLSCRFPIDTISRKQNFIKSKITLTKQLKDLKFKTSNKYINYLIKNQSNIRSATLSKNKSNEFYLSILIDGDLLKELDKPKNDIIGIDLGIKDFVITSKGQKFENIKTIRNNQKKLSKLQKQHSRKKKGGKNKEKARKRLARFHQRLTNIKENYLHKVINTLLNENKVICMEDLNVKGMMKNHKLARSISELNLGRFEKILKYKSILYGRDIINIDRFFPSSKTCSDCGFIKHELKLSDREWTCSDCGIIHDRDLNAAINIEQEGLKILKIPIRYGELTPLESSHKTLNELGSKLTHF

SEQ ID NO: 31119 - protein, 411 aa, unknown
  TnpB Polypeptide
MLRAIKLRLYPTKDQEVYINKLLGSCRFIYNQCLNKKINDYKELKINHNLSTLDKFFRNELVKNPNFEWLKEHNTKVFNQSLIDMLDAYSRFFKQKNGFPKFKSKKDKLSCRFTYEAISKKQDFLKSKIKLTKQLKDLKFKTSDKYINYLIKNQSNIRSATLSKNKSNEYYLSILIDGDLIKTLDNPNNFSIGIDLGIKDFVITSKGEKFENIKTIRNNQKKLSKLQKQHSRKKKGSKNKEKARKRLARFYQRLTNIKENYLHKIVNTLLNENQVICMEDLNVKGLLKNHKLARSISELSLYRFETILKYKSNWYNRQVINIDRYFPSSKTCSDCGYINHDLKLSDREWICPDCGIIHDRDLNASINIEQEGLKIYLELYKNKIPIHDGKLTPLESSHETLSELGSFKLKN

SEQ ID NO: 31120 - protein, 393 aa, unknown
  TnpB Polypeptide
MILTERHIILDNRFEEICHKSGLLYNFVTYHYRQAIFGNQEYFSEFECSKLCAEFNQEDFRSLPSNVSQQVIKQVFQNFKSWRKAKKEYEKNPGKFKGRPKLPKFKVGDKQNLITFTTTTSRLKRGHIHFVNNIIKPIKTNVTKFKQVRIIPQATCYVVEVVYEKEEINHELNKENFLSLDLGLNNYVSTINNVGRKPFIINGKIIKSFNQWFNKNNAKLKSYVGVKGISKRLTRLNNYRNFWIEDKNHKISRYIINHCIENDIGSIFIGKNDGWKNGINLGHKTNQNFVQIPHAKLIQKIQYKAKLVGIDVILTEESYTSKIDNLACEPLQKQESYLGKRKKRGLFQSSSGRLINADINGAIGIARKVIGDSAVSQIVNSGLECNPYKINIL

SEQ ID NO: 31121 - protein, 379 aa, Enterococcaceae sp.
MFRHKTYKFRLYPTVEQEILIGKTIGSSRFVYNHMLNAWNSSYKKTGKGLSYGKCSAMLPAMKKSGDTSWLKEVDSVALQSSIKNLADSFNRFFKKQNQFPNFKSKKNPVQCYTTKNTNNNLSIIGNQVKLPKIGLVKFSKSREVNGRILSATVRKNASGKFFVSLLCEEEITELPKTNKHVGIDLGITDFAILSEGQKIDNNKFTSKMAQKLKREQRKLSRRALLAKKKGINLFEAKNYQKQKQKVARLHEKVMNQRNDFLNKLSTEIIKSHDIICIEDLNAKNMLRNHKLAKSISDVSWSSFVTKLQYKADWYGREIIKIDKWFPSSQLCSNCGHKDGKKPLNIREWTCSVCHFHHDRDINASINILTEGLRIKQLA

SEQ ID NO: 31122 - protein, 372 aa, unknown
  TnpB Polypeptide
MLRAIKYRAYSNKEQEEFFAKTFGCVRFVYNLMLDEAIKSYAESKTFDRHSPAYFKDEYEFLKEVDSLALVNAQLNLNSAFKNRFSKKSKRQSGFPKFKSKKYKQSYKTNNQGHTIRIEGSKIKLPKLKSPVKIKLNRLPEENWTIKSATISKTTTNKYYISVLFETPDIEKLEESEFAIGLDMGLKEFCIISDGEMIENPRFCKTAQDKLAQAQRALARTKKGSNRHEKARLLVAKHHEHIANQRKDFQHKLSKRLIDENQVIVVEDLNVKGMVKNHKLAKSISDAAWSQFISMLEYKAKWYGRTFIKISPWFASSQICNKCGTKDGPKPLSIREWVCPVCGSINERDINAAKNILDEGLRILGLEQASGN

SEQ ID NO: 31123 - protein, 248 aa, Bacillus sp.
LFSLCIQSFPILSLWDHAYKETGKGLTYGTCSAKLPAMKKEFVWLKEVDSIAIQSSVRNLAAYMCFFKKQNSASRFKSKKNNVQSYTTKQTNENIAVVGNKIKLPKLGLVRFAKSREVEGRIVNATVRRNPSGRYFVSLLVETEVQELPKTSSYIGIDVGLKDFAILSDGTIYKNPKFFRSLEEKLAKAQRVLSRRMMESSRWNKQRVKVAKIHEYISNIRKDYLDKISTEIIKNHDVIGIEDLQVSI

SEQ ID NO: 31124 - protein, 190 aa, Bacillus sp.
LGVLALYSIISYPYGITHTKKLGKQNSAPRFKSKKNNIQSYTTKQTNENIAVVGNKIKLPKLGLVRFAKSREVEGRIINTTVKRNPSGRYFVSLLVETEVQELPKAHSYIGIDVGLKDFAILSDGTLYKNPKFFRSLEDTLAKAQRVLSRRMKGSSGWNKQRVNVARIHEYISNARKDYLDKISTEIIKY

SEQ ID NO: 31125 - protein, 427 aa, Cyanothece sp.
MLTLNYTYRIYPDSQQEVMLDEWLEICRRSYNYALRELKDWIASRKCRVDRCSLESEYIMAADYPFPSYHQQQNNLPQAKKQFPQLFKVPSQVLQTNVRRLHDAWDFFRNRGFGFPRFKKYGQMKSLLFPQFRSNPLTGWQIKLPKLGKVRINLHRAIPDGFVIKQVRVIKKAMGWFAVLSIQSDLNLPEIEAPFGHCLGVDLGLDKFLATSDGFLEKGRKFFKSEQRRLKVLQRRLSRKNQRSNNYEKARKKVEKQHNHIAFKRKDYHFKLAHLVCDMGDSIFLEDIDFRTMAKGFLGKHTLDAGFGQFRTILRYVCQIRGKYFGVVDHRGTSQTCPNCRAEVKKNLSDRIHDCPECGYRCDRDVASAQEICNRGIEKTTLGLRGKETVCQVEVSGVMSLDNWRRGLPLWAEISLREGGSLHYTEG

SEQ ID NO: 31126 - protein, 314 aa, Calothrix sp.
MLLSFKTALMPNNQQQTAFKKACGVARHAYNWANAAIIEVLKQRETNKAVKIPSAIDLHKRLVAEVKSQHDWYYEVNKNVPQKALADLRQAWDRCFKKVSKQPLFKKKGQRDSFYLESGTKAKPMIKNDGKRVKLPSIGWVKLAEPLPCTLIHNCVISRQANRWFIAIKYEIDKPSVAANRPIVGVDIGIKELAVTSTGKVFKNPKAYKRMNRRMKRLQRSVSRKVKGSKNRAKAVKKLSRIHATVSNIRQDAIHKLTHYLAKNHSEIKIEDLSIKAFLKNHKLAGAIADCGMYEFKRQLEYKTEKFSSKLTRF

SEQ ID NO: 31127 - protein, 235 aa, Lactobacillus sp.
  misc_feature (145)..(178): Xaa can be any naturally occurring amino acid
MAESPRWQGEIKQVCIVQDADGYYASLSIEAAVLAEKRPIRRVTGVDVNVGKFDYRTASGYAIQPTIPASLPALYARITHYQKQLARKRTTNPKRFNSATYRATRTKLKRNYQRVERIQMDLLNKFTTKLIVDNDLIGIEDLDNXXXXXXXXXXXXXXXXXXXXXXXXXXXXXXXXXXPIQCFRVRNGVQNVVTSKLVKRNLLCTVMPNTTLDMTITFATNAVLGCGAMKMQLIT

SEQ ID NO: 31128 - protein, 405 aa, Paraliobacillus sp.
VKSVQKKFKEHIGSFEAQKLATRSFQTVEKLHFGKSKKVLFKKMTDNISVENKSNKTGLRYSEGAILWGDKPTKKNPKPKNWLLMPISPKPNDEYADLALMDKTKYVCILKREVGGKVRYFVQLIQEGYPPPKKNRKISNDEKKRVGLDIGTSTIAICSEDQVKLQELAPNCIYSEKELRRIQRKMDRSKRSMNPNNFNENGTIKKGKLNWVYSKKYEELREKRKEIYRKITVQRKMSHEKLANVILSFGSDVRVETMRFQSLQKRAKNPTRNKKNGKINCKKRFGKSIAKRAPAMLLTIIDRKLGYQNRSLKKIDTYATKASKFNHITREYSKKQLSERWNVFGDVRIQRDLYSAFLICNTTKTLNAVDVDLCNTKWDEFVKLHNIEVNYLKNAQSKTLRWFVA

SEQ ID NO: 31129 - protein, 373 aa, unknown
  TnpB Polypeptide
MAMLLNQKYEIFPTEKQKETLGRWLQYCRQTYNSALLDKERKYKQSKEQYNRYDMQKRQTLDKKNYPFLKEIPSQPLQEVFVRLQKAFDNFFRKDAKYPKQKKYKEYTSMTFPQFGFNKKGNRMAMSFSDNGKLYNTKLGEIDILLHRPIEGAIKQLIVKCQGNRWYAIFCVERQALPTIVDVNNAIGIDVGINKYAVLSNGSEHENPRFLRKKEKQLKQAQRKLSKKKKGSTNYIKQVQWIRQLHEKVANQRKDFLHKLSYNLVKEYSVIAVENLNIRNMIRNRKLSKSISDAGWGMFRNMLTYKCEKQGGVLIKVEPKFTSQDCSCCGNRVKKSLSIRTHICMKCGTVLDRDHNASLNILQKALEELLVTN

SEQ ID NO: 31130 - protein, 481 aa, Moorea sp.
MSKRKKKSGTTKKLSTQVVPVIGMSMAVETELFAIMQRLGIVRSESYNKLGSVSHWGLDWRKAYPEVRSLRTPESLGLPSKLMEWTVSDVAKAISAQQAAGIEALGKILHKRFPGKENEKRRSQCYKQLSTPSFLSDPFLHRIVRKTFRRGHSWVKNQIVYQQGGYSCKRIYRYTYQLELAGLRRGKRNRLLVRSNRKITGQIRLIYNPLLQRFEIHFLVNYGVVNVTSERRCLGVDKGYTEVFYDSDGRAYGLGLGKLATNKSDRIVKKNRNRGQLWALHRKLEKIDPAKSARILENNLSRKTENRRLRKDQAGIIAIIGAASRSLFNGESLKVFAEDLTQPIKGKRQSLSMSRKLNSWMKGAIRDSLQKWANWTGSVVSEIQPSYTSQIDSVTGTLLGVRKGDSFIRFNGVVLQADHNAALNILARGTDKEISRFMTRVEVQAVLLRRTARFLEDMDLSLANAVELGWLDPKHELCSIF

SEQ ID NO: 31131 - protein, 609 aa, unknown
  TnpB Polypeptide
MGSKKQSQQSSPPKEKTPTFLLELPLVADAGQAAHLGGHLEVGRQFYNAMLSAGQQRLRRMKADPAWQAARAIPRTHKLERRAAFAALRERYGFSEYAFHKLARKLRVAWLAEHLDAVLAQTLASRAYRALNRVCVGTARRVRFKSRSRGLSSIENKRNDTGMRFVLQPGAAGRPQGYLLWHDDQLRALIDWDDPVVAHGLAHEIKYARLVRRRASSPRAQGADRQGERYFVQLVLKGLPHHKPKHTVGTDTIGLDLGPSSIAIVPREAEARLEPLCAELRPDVQAVRRLQRKMERQRRAANPEHYDERGRPKKRKKGAPRWKQSRGYQASRRRKAARERKLAAHRKSLHGRLVHQIVRIGNTIILEKISYKAWQKRYGRSVGLRAPGMLIDHLRRTVASTGGTLHEVPTRSTKLSQFCHGCEAFVNKPLWQRWHQCPCGVGPVQRDLYSAFLAAFLDPADPIPSCARYVVPWEGAEARLRAAHERAQERANEGQVVPRSMGISRAGARLPQSPSEATQELLFLSNRGKVEAWKHRSEPSGLQPGESSGPLVRTRSVCAASNTPCTSKISARSRKICLSTSMSAREYCSKAQTAAAPNITSSTIRSSNR

SEQ ID NO: 31132 - protein, 374 aa, Phormidesmis sp.
MKTLKFKLYNHKRNRFLKRSINAAGVIYNHCIALHKRYYRMWGKHLNCAKLQAHIAKLRQRKEFWQLVGSQAVQDICQRIEKAYQLFFKHPKKGVRPPNFKKVRRYKSFTLKQAGYKFLGGNRIKIGAKVYQYWNSREIEGTVKTLTIKRTPLGELFMVVVVDSVDIPEIKVETSRIAGFDFGLKTFLTVSDGSQIESPQFLKQSLTAIKKANRQHSKKVKGSANRERARKHLVRKHEDVANRRSDWFWKLAHDLTDRFDVLCFETLNLKGMQRLCGRKISDLALREFLQILDWVAQKKGKLTVYIDRWYPSSKTCFECGHVLKELDLSVREWRCPSCQSINGRDENAAKNIQAVGASTVGLGDVRRALPAIAV

SEQ ID NO: 31133 - protein, 315 aa, Methanocalculus sp.
MLQAYKYRMYPSREQGTLLMKQIHACRFVYNHSLEQKIRAYEQEGRKLSCFDLNNHLPALEEEHPWLKDVNSQSLQSANKNLDNAFTRFFREKKGFPRFKSKKNPVQSFQVPQHYRVNFEHGRIKLPKIGEIKTIFHRFFTGKVKYATVSVTSTGKWFISILVDDGNPEPEPSLISPGTTIGIDVGLTDFATFSTGENVANPRHLESSVQRLKVMQRRVSRKVKGSKNRQKAIQKLARCHEKVANQRNDFLHKLSNQIVSENQAIAVESLNVAGMQKNHNLARSISDRPASTEPCRGIRCGTRRCACGLASIEGG

SEQ ID NO: 31134 - protein, 359 aa, Moorea sp.
MQRAFKTKLKLNNKQRTLMAQHAGYSRWVWNWALNLWNEAYKAGLKPSANKLKKFYTNHVKPQYPWMKNLSSKVYQFAFMHLGEAFNRFFQGKAKHPRFKKKGKNDSFTIDNSGQVMEFSGIRLKLPFMGWVSTYEPLPEIKTKRVTISRVADSWYISVAYEFEPEPTVKSRDFLGVDVGVKVLATCSDGTVFENPRAYKKAKKKLARLQRELCRRQIGSANRNKTKLKLAKVHQHISNIRKDAIHKLTSWLCKNHAVIGLEDLKVSGMMKNHKLAGAVADSALYEIRRQAEYKADWYGSQLVFADRFYPSSKTCSKCGHIQEMPLKERIFDCQACGQVQDRDYNASLNLKHLAEGYSV

SEQ ID NO: 31135 - protein, 198 aa, Bacilli sp.
LKIRQRRISHKLKVAKKQAGITGAMPKGTRLPVSNNRRKASMKVAKLHIRIANLRSDFTHKTTTRLVSENQAIGIEDLNVCGMTKNHKLARALADVGFGEFRRQIEYKAKWYDTTVVWADRFYSSSKKCSVCNYVLPKLELKTREWDCPQCGTHHDHDTNAARNLKRLATETVLPVANQPVIVGTSLRVSDTLAMAGK

SEQ ID NO: 31136 - protein, 445 aa, Natronomonas sp.
VQSSKLTQNLSFGLDIHTGSGDDLQTGCLEARRIRNETNRLDRQGWDWDDIKSTVVDNADHVNNTTQLIVDKALGELETYHDNKDDGWRRPYPYIDESYPMVMNHGEGYRLFLEDDGTVRFRITATRGTHVKGDLRGSPDHFDRLQTAFNDNEWRVGTAEVVHKHNEWRLHVTVTHETHHVASKHDADTIVGIDVNEDCIALAAMSQGGSVEDSAVFEYPSVKEHRHEFFTKRKRMQKAEQTAFETVVQTEERDYVHDCLHKVSRKVVEWVSQFSAPVIVFEDLKDMRESIDYGTRMNRRLHSLPFAALQEMVSYKAAWEGIPSDDVNPEYTSQRCPRTECQHTARGNRHKKRFKCQQCEFQDHADRKAAVCVVQEWFDDQYGNVPSLDRLPGRVRVMRRAASGAGGGPDSHGAVFASGVTSAGEARASGQAREKLKTVASAVQD

SEQ ID NO: 31137 - protein, 502 aa, Ruminococcus sp.
  misc_feature (124)..(127): Xaa can be any naturally occurring amino acid
MLLSKKTSIKVSREYANLIGHMCYAASKLWNVCNYERQHYKETGMEQYPDWYYQKKAHKEDLWYKQLPSQTAQEVCKLLDKAWKSFYALKRSGGIETPRPPRFKQESIPITYLQMGIVHERDTXXXXGMEQYPDWYYQKKAHKEDLWYKQLPSQTAQEVCKLLDKAWKSFYALKRSGGIETPRPPRFKQESIPITYLQMGIVHERDTDRVRLSLPKALKKYIEETYQIHENFLYLENKIFRGMDQIKQLRIYPPEKGNCKIIVVYEVPDQEELPQNGHELSIDLGLHNLMTCYDSENGNTFILGRKYLGLERYFHKEIARVQAQWYGQQSGKGVKHPTTSKHIRKLYKRKHDSVTDYLHKVTRYLAEYCREQGITCVIAGDIRNIRREKDLGHRTNQKFHSLPYNRIYIMLEYKLKRYGIRFIKQEESYTSQCSPLSPKVEKRYAEPSKRKERGLYRDGNRTYNADAVGAYNILRKYHSVSGVKRELSVTGLKTPEIIKVAV

SEQ ID NO: 31138 - protein, 280 aa, Euryarchaeota sp.
VKLKLVVSQYHRKYLDDATLSLGSLTVLPDRVIVAFRKETPKPYAPDSIISLDTNEGSLDGVCLQGNDTRVVRAVYPDLAVIQQRHHDRRRRLQKKKAHDRRTSRTLCRREGRREHHRVDYRMHQVANSVLRFAEQNRSAIVLEDLKGMKFTRNKQLNRRLTIWPRRKQHHFIEYKAQWRGIPLVKVDPRYSSKKCPICGRIPDSRMGTLFECECGWRLDRHINASINLLQTAISKGLEVAGGLRFDPGAFQHDVMMTLYDSARGARSEPNGTRCVQAVT

SEQ ID NO: 31139 - protein, 393 aa, Streptomyces sp.
MYPTAAQQTALLVQGGHARYLWNLALEQWSMWTPDKGATPGYVEQARQLTEARAMFDWLRAGSQTVQQQALPDFDQAVKYFYAGTHRRPTWRKAGLHEGFRIVGGQASRIVKLSRKWAAVNVPKVGWVRVRLSRGIPAAQSYRVTRDRAGRWHIAFAVIPEPIPAPGTGEVVGADRGIAVSAALSTGELLSCPSLSDGEQMRLKHLQRRLSRCRRSSNRRQRVRAAIAKLHARAGDRRKDWVEKTSTDLAQRFDVIRVEGLRIASMTRRPKPKPDPERPAGYLPNRRRAKAGLNRGILANGWGDLVRRLEHKAAGRVEKVKAAHTWQTCSVCGHCAPENRESQAVFRCVACGHQANADVNAAVNIAAGRAVSARRETPVPVSPKREPQHATST

SEQ ID NO: 31140 - protein, 171 aa, Enterococcus sp.
MAKKLKREQRKLSRRALLAKKKGINLFEAKNYQKQKQKVARLHEKVMNQRNDFLNKLSTEIIKNHDIICIEDLNSKGMLRNHKLAKSISDVSWSSFVTKLQYKSDWYGREIIKVDKWFPSSQICSECGHNDGKKMLEIRDWTCSVCHAHHDRDINASINILTEGLRLKQLA

SEQ ID NO: 31141 - protein, 377 aa, unknown
  TnpB Polypeptide
MYVEYSYKFRLYPNRTQENQILRTLGCCRFVFNHYLAIRKEVYERDGRTFNYYDCAGDVTQLKKTLEWLREVDATALQSSLRDLDAAYQNFFRRVKRGEKPGYPRFKSKHDHRQSYKSKCVGTNIKVLDKAVQLPKLGLVKCRVSKEVKGRILSATVSRNPSGKYFVALCCTDVEIEPLLSTGVAVGLDMGLKSFAVSSDGVEYPNHKFLTKSQEKLARLQRQLSRKTKGSKRREKARLQVARLHERISNQRQDMLHKLSSQLVRDYDFIAIEDLAPKNMVRNHRLARSISDASWGEFRRQLEYKAGWYGKQVVTIDRFYPSSQLCSACGAQWPGTKDLSVREWNCPSCGTVHDRDTNAAKNILNEGCAFWRRQYIW

SEQ ID NO: 31142 - protein, 573 aa, unknown
  TnpB Polypeptide
VPQSHPECVEIPLIISNENESDQSRLSSNAVANNAGIFAINREVEMFQVQRIQIPYSERLNEICKFAKRLKNRTVFIGRQTHFFRTRKNYADLPKRYPDLAKRILAFMETKLDDPDLTDELKRKFENPALELSEKVRKALGKFEQFTPLDEFLKFESVYNDLGAIYSLLPQQVLKYVANSWSSYYEAHASWKNNPDEFEAEPRIPSTKRKEKEFLISFPAGIAKSAFTNLKTQVDHYSTTIQPTRRSEKRKYKQYKASSELLLPSAFLKNFLNFPKIRTTIDLKSIVEVRIVPKKCCFEAQIVYKIPKIPKNLDDRRAYSIDIGVNELIALTNNFGVPSILIRGRPIKAINQWMNKKVGSLRSVQTQGITFEKGDVLLETQEMARIRRKRDNFINDYFHKTSRFAIECCLKCSSKNLAIGYNSGWKKDLLSTENKKMGHRQRQSFAFIPFLKLIEMIRYKAELVGINVKIIRESHTSKCSAVDFESIKHHDEYIGVRGISRRGRNKTRLIKKGESEFKSYQARGLFRSKDGHLIHSDVNASYNIGRRAFPDLFNESTLSKRAMLKSPISVQIV

SEQ ID NO: 31143 - protein, 417 aa, Paenibacillus sp.
LVGGSKNLPPFDIIGTYILLWGEVKIMLVKKAFKFRIYPNKEQTILIEKTFGCARFVYNYFVGKQIDKESYWYVVNEMVQNGQLPSNNWRGEFFHKNKSMKELPELKKHYPFLKEVDSIALQKSVEIVNDAYTRYYKKQNSEPRFKSKKNPIQSYTTKYTNGNITIVKNKIKIPKLGFVRFAKSREVHGRIISATIRRHPSGKYFISILSEIEVQPMKKTGSIIGIDVGLKDFATLSDGTIYHNPKFFHTLEEKLAKAQRILSRRKLGSSNRLKQRIKVARIHDKIANARKDMLDKISTQIVKNHDIIGIEDLSTKNMMKNKNLAKAISEVSWSKFRTMLEYKARWYGKEVVAVAKNFASSQLCSNCGYKHKDVKNLALREWTCPKCMCHHRSRDINASINIRNEALRLTAGTAGIA

SEQ ID NO: 31144 - protein, 427 aa, Escherichia sp.
MHQENTMLPRRISVSLFIDQSIIWPVKRLQAFKFQLRPGGQQEREMRRFAGACRFVFNRALALQNENHEAGNKYIPYGKMASWLVEWKNATETQWLKDSPSQPLQQSLKGLERAYKNFFQKRAAFPRFKKRGQNDAFRYPQGVKLDQENSRIFLPKLGWMRYRNSRQVTGVVKNVTVSQSCGKWYISIQTESEVSTPVHPSASMIGLDAGVAKLATLSDGTVFEPVNSFQKNQKTLARLQRQLSRKVKFSNNWQKQKRKIQRLHSCIANIRRDYLHKVTTTVSKNHAMIVIENLKVSNMSKSAAGTVSLPGRNVRAKSGLNRSILDQGWYEIRRQLEYKQLWSGGQVLAVPPAYTSQRCAYCGHTAKENRLSQSKFRCQVCGYTANADVNGARNILAAGHAVLACGEMVQSGRPLKQEPTEMIQATA

SEQ ID NO: 31145 - protein, 367 aa, Methanomicrobiales sp.
MNVIRTITFKLQLPDGGSTALLDTMRAYSTAFSASAQWGYENRTWNKVENHKATYKAVRDTVPDLPSSLVQGARDCACEALKATKCKSLPERKPLAAMRYNQRVITVNLIHGIATIASVKGRIKVVFPISEYHRQYLSWTVTSSTISYDRGKRVFYLHISMEHPDVEPVQEVRVLGIDRGIVNVAVCSDNSFFNSRRVKNARAKYAHLRAELQSKGTRSATRKLRTMSRRERRFVTDTNHCIAKQIVNSDYTVFALEDLSKIRVQKRRSRSFNRKLNNWAFHELEQFLRYKAEALGKQILLVDARYTSQKCSVCGHTYKGNREGSSFQCRKCGFQLHADLNAARNIAQAGISCLSRLPVNQPNVACL

SEQ ID NO: 31146 - protein, 308 aa, Bacillus sp.
MILAKKVRLIPTLEQEKVLRNHAGAARFAYNYCKRMSDRYYKLFGKSVSQLALQKRFTKIKKRKKYEWFKDINAQVPKQASRDFDAARKNSFKKYKNGSHTSYKSKKDVIQGFYANYERLIIGKKVVHIQSIGEVKTSQQLPKNKKPSNPRVTFDGRHWWISVGFQEDFELQELTNESIGVDVGLKELFVASNGMKERNINKDAKVKKLLKRKKSAQRDMSRRFKKGAKIQSAGYEKAKAEHLRLSRKITNIRTNHIHQATAKLVKTKPMRIVVEDLSISNLLKNKKLSKSFSFQKLNFFFQCLSYKC

SEQ ID NO: 31147 - protein, 265 aa, Okeania sp.
LFQMYCCQQVLVGKNPELIAILTFLCEQSHKLTNMGIYYARQLYFKSQKGIRKYDLEKVYKKSNHYKVLYSQAAQQILRTVAESFRSYYGLVIAYNEGKITDRPKIPNYRKKGGMATVSYPSQALKLKDNQIRVPLGNICKRWFGIDCFLIPMPSNLEFSTLKELRILPRNRCFYWEFIYEKEIVVKPQLNQENVLGIDHGVNNWLTCVSNVGTSLIIDGKHLKSMNRWYNKQISTIKENQPTGFWSNRLAAITEKRNRQIRFGY

SEQ ID NO: 31148 - protein, 438 aa, unknown
  TnpB Polypeptide
LKQSTARSHRLQQDKNRTAKDFLKSVSKFETLTLHKFVSVKYAYKFRLYPTKDQQVLLAKHFGCSRYLYNYFLARRKQEYLSTGRSTNYARDCKELTELKKTLPWLTEVGSQSLQQVIKNLDAAYGNFYEKRAAFPKFKNKDGKQSFRVPQNVKIRNNRLVMPKFLEGIPIVLHREVKEEISYCTITKNKAGQYYCSLLVEKEIEQLPESKKEVGIDLGIKTLIVDSDGKEYANIKPYRSMKRKIKKVQRKLSKRRHKTTNKKSRRIEKLRLKLAKVHQKVKDVRSNHIHQTTKKLIDENQVIVVETLAVKNMMKNHSLAGAIADCSWFEVLRQLTYKAAWYGRQIVQVDRFFPSSKTCSGCGYIKQDLRLSDRDWTCPACGEHHNRDHNAAKMVLKQGQVQLRVERPEVKPADSGTLRLNYQSAEVEAGSRSPLGER

SEQ ID NO: 31149 - protein, 270 aa, unknown
  TnpB Polypeptide
MNKMFKSFPKVTRLRKDIYDKFWCKAIKELEQRLRYPNKTLKWEKADLCKDMKKVGGNDLTIVYKKPLESSSKQTSITRKTKSVVDMRPTHKMTLRPRKTVTTTIAALDPGVRTFQTLYDTENNVIEFGVGDVYLYQLDKKGLKTKIKNIHKRLAKFLCNRYGLIMIPRLEIENSKDPYLAVWDHPGFVDRLFDQAKKTKNCKVVEVEEKWTSKTCSSCGKINNVGKSKTLVCWNCALVIDRDINGARNILLKNMNILGIDLRRQTATCE

SEQ ID NO: 31150 - protein, 381 aa, Methanobrevibacter sp.
MGDFIRGLVVKLHVTPEQEVEFKKNYGCTRKTYNELLNKYKAKHGEDSTEIPTQKELNQFLKETKKELPYLKETESTSLQQARDDLHKSFKNCHKSKRHNPPVYHSKKKTRPSFRQTVRKDKRPVEKNTLTLRKHGKVTFSTSIEYLDLLNHPYTKFNSITVYFDGLNHYASFNIETNPPEHLELTEKYIGCDINSNKNGWLVTSEMQKEFFDVDHENQMIKHINKLMSQCRNMSRRWKKLQKRLQKWYNKRTNQLNDYIEKLTYNLVKKYDIIVFEENYSTIKILIGGEENMIFPLSRFIKRLKDKFQLYKPEADGVQFVKPHNTSRTCHHCGHINKELKVKTRNWKCPKCGKILDRDTNAAINILNRWFNGDGLIKYLN

SEQ ID NO: 31151 - protein, 380 aa, Methanobrevibacter sp.
MVDVKKGMKVKIYPTREQKDCFHRNFGCCRKAHNVVLDKYNKMHSNDSNLRPTFTFLNKLLNEAKREFPYLEDVESTSLQQEIRDLATSFDNFFKNPSHFNKPHFHKKKTVKLSFRQTIRQDIRIIQKNKMILRKYGKVKFHTSQEYFQILNDKNTKFNNVTISFDGIDYFATFNIDFTEEEWELTGKNVGCDINSNVNGWLVTSDEEKEYFDIDHENQMVKFINRIMAKCTNGSKKWKKQKIRLLKWYHQRSNKLDDYIEKLSTEMVKKYDAIVFEKNYSKIKILIGGEQNMVFPLTKFITKLQDKFARHKPQAEGVVFVDAKYTSKKCHFCGNINHELDVKTRKWKCPNCGKILDRDINAAINILNRWDYGDSLENAK

SEQ ID NO: 31152 - protein, 418 aa, Methanobrevibacter sp.
MCDKTFILTDKVEFVPDEEMEKELWFNINASAFVYNKTLEYSIYRENLVKEFAIGNKFKVNRTYTQKIVKTLKKHYPFLEDADSTCLQASTDRLIKAYEGYYDHRTGAPRFKKRKKNPVTSITLRNNFYDTKEGNVGAIRWLSENELRVTKLGKITVKHRRHIKGKIKEATLKYENGRWYVCIVYELDENRHGEFSYGGLYVGIDVGITDFLTFSNGKVIAKPDLKKINGRIQYYQQKLDGKKEGGSNWKKTLKKLHKWIRKKNNVVNDYYHKISYNIVKHCQFIAMETLNIRGMIKGNLSRSIHEIGWGKLIEMIKYKAELYGREFVQIDRWFPSSKKCHVCGEINHDLGREEREWECPHCHAVHQRDVNAAKNILDEGLRATGSMVLCLVDFMPNSQGKSIYYYEWKCFDEKIGMA

SEQ ID NO: 31153 - protein, 402 aa, Methanobrevibacter sp.
MLGECNIVNEGLKVKLYPDKVMVDKFNRSLGNVRFVWNNLLTEYQKTFELFKQHGYTKLKCNQTTFNTMLTMLKKEYSFLYESESSTLQQVYRDLIRSFNGFFKKNSNYPKFKSKKNPKNGFRIQNNNNIKITSSIIVLPVLGEVHYRTSPQYKQLLKESKINNVTIKKEHNHYYAVFNIETEKQPMEKTDKAVGIDLGIRTLATLSNGLKITNLDTTHEDKMIKKYYRVLSRKKYNSNRYNKILKTLGKWIQRKTNRINDAYHKLSHYIVKNYDIICMESLDIKELFQNTDLSSRLQSISWKKLVEMIKYKCEWYGKKFIQISKWFPSSKICSQCGYYCKDLGDKKEWTCPHCQTHHDRDINAAKNIKKEGLRLLMDETFVNLRNWGDSTVILLSWESTGP

SEQ ID NO: 31154 - protein, 378 aa, Salmonella sp.
MQIKMAIASGIFCSGKHSRPQIFQFSTRLQFLTPEPVFPLLSSRIRTLPLMHPIKSQPRDFMCLNQSSECLLSSPAFRPGRKGAVFRLTVFCIITFSSLVCETMKRAYKYRFYPTPEQAEFLAQTFGCVRFVHNSILRWRTDAYYERKEKIGYLQANARLTALKKEPEFAWLNDVSCVPLQQSLRHQQTAFANFFAGRAAYPAFKSKRHKQAAEFTASAFKYRDGRLYMAKNKIPLDVRWSRQLPSVPSTVTISKDAAGRYFVSCLCEFEPASLPITSSIVGIDAGLKDLSTGSGALHFTRFRIYRLSVGSHCQPGSVDISGSINVPFMGFSTLRTSPVTNIRRHFLHGEAATTTASGRREKLVDCDHAAPRPFAFVL

SEQ ID NO: 31155 - protein, 353 aa, Salmonella sp.
MKRAYKYRFCPTPEQVELPAQTFGCVCFVYNNILRWRTDAYCDRQEKLGYTQADKCLTAAGIFMARQCFRRTAPESDPSPTNRLCQFLCRTDEIPDIQKQAATFMNTAFKYRDGRLYMAKSKTPSDVRWRRERPSAPSPITISKDAAGRYFVSCLCESEPASLPVTAKTVGTDVDLKDLFVTDTGFKTGNPRHTAKYAKRLALLQRRLSRTQKGSKNRARGRLKVTRLHVKIAGCRMDNRHRLFRKRINGNQVVCVESLKVKNMFRNQNLSKAIADASRGERVRQLQYKGERAGRSVVAIDQFFPSSRRCGCCGFTMKKMPPDVRNRTCSECGEAHERDINAARNINAAGLAV

SEQ ID NO: 31156 - protein, 426 aa, Azoarcus sp.
MERRKVTFKLYPNARQAERLTCWVRLHCELYNAALQERIEAYRKCGKSISYYDQQNVLPEIKAARPELVELGSHALQQTLRRLDLAFAAFFRRVKAGQTPGFPRFKSSARFSGFCYPDPAGWKLMQCGKRGGTLRLGSGKDAMSIRLRGQHRFGSEAKPNDLTITRKNGEWFASVTLRVQETACARERSDAQHRGIDFGISDWATFDNGKAIANPRWVREELPKLATLQRERARKRKGSLRYKRISWQAARLHERIANLRREFVHQETTKLVQTCAVIATEELAPKNMSRSARGTVEAPGRRVRQKAGLNREILSAAFGMAHQMLSYKAAEAGTRLHLANTRQLKPSQRCAKCWATVPKTLAQRVHVCPHCGHTAPRDQNSASVVLIDAHTPGTGVAARPKPLPTVRSRKSKSMTRETPATTTQGV

SEQ ID NO: 31157 - protein, 501 aa, Pyrobaculum sp.
MGGGGMECVRRAVAVELERPPPELYAVEEPYRKIVEEVAAYVAERRTLERERYNELYRRFRKQYPLPAQLIQQAMNQGVETGKSFLELKRDGRVHKPRPEVRRVSIRFAKDSWSYKKAISSVAPVRLGLSLPGGRREIWIKPHRRFWLYWWKMLRREVELASTLVLKRRRGRWFAIFVFDVVPKREPPAEAVAFDVNENSVAVAKVSLLATVDAVAQWNRQYLNPAVYSIRTDFGRLAKRYEAVRNAKLEELKRKYPYAGRDDEEKVQNVTDTREFRKFARRLRERRRKEGRVRQIAREMTKSPALIITEELSKNPQEEMIGVEKKKVKKRELRHRVKQTPFKKLLKTIEDKAREVGSVVVYVSPYRNSRVCPTHFALLKNGGGWHDLHCPRGHAVDRDAAAVLNMLWKTTPTGWVKAVWWDVKEIGKRLKKEIVPREAVGKANPIIPRPIVHAAWTSLKALMASSQWPAVLARAAPMTPARGADEGRARAPPRPEGTPAL

SEQ ID NO: 31158 - protein, 513 aa, Pyrobaculum sp.
MECVRRAVAVELEHPPPELSAIEEPYHRIVEEVAAYVAERRTLEKEKYGELYRRFRELYPMPAQLIQQAMNQGVEIGKSFLEAKRNGRVHRPRPEVRRVSIRFAKDSWSYKKAISSVAPVRLGLSLPGGRREIWIKPHRRFWLYWWKVLRKEAELASTLVLKRRRNKWYAIFVLDVAPERKPPAEVAAFDVNENWIAVARVSLLSTVDRVASWNRQYINPAVYSIRTDFGRLAKRYEAVRNAKLEELKHRYPYAGRDEDERRQNVADTREYKKFARRLRERRRKEGRIKQVVREVTKSPAVIITEELGKNPQEEMIGVEKKKVKKRELRHRVKQTPFKKLVRAVEDKARETGSAVFYVSSFRNSRVCPIHFARLQNGDSWHTLHCPHGHDVDRDLAAVLNMLWKITPEGAAKAVWWDLKDVKKRLEKGRRLVPKEAVRRRNPLVTWPVVRAVWTSLMALKAGDKWPAVLARAAPMNPAQGADEGGTRAPVSRPGGGNPRPSGRGGGQNCQSAI

SEQ ID NO: 31159 - protein, 496 aa, Pyrobaculum sp.
MEYVRRAVAVELERPPPELSAIEEPYRKIVEEVAAYVAERGRLEKEKYKELYRRFRELYPLPSQLIQQAINQGIKIGKSFLELKRNGRVHKPRPEVRRVSIRFAKDSWSYKKTVGSTAPVKLALSLPGGRRKVWIKLHKRFWLYWWKALRKEAELASTLILKRRRNKWYAVFVFDVAPKRESPAEVVAFDVNENSVAVARVSLLSTVDAVAQWNRQYVDPAVYLIRTDFGRLAKRYKAVRNAKLEELKHKYPFAGRDEEERRQNVADTREFRKFVRRLRERRRKEARVRQVAREVAKSPALIITEELGKNPQEEMIGVEEKRVKKRELRHRVKQTPFRRILRAVEDKAAEVGSAVFYVSSFRNSKVCPIHFVLLKNGNGWHTLHCPHGHVVDRDATAVLNMLWKITPEGVVKGVWLDVKEIGKRLKKEIVPREAVRKANPIIPRPIVHAAWASLKALKASSQWPAVLARAAPMTPAQGADEGGTRAPPHGAETPAL

SEQ ID NO: 31160 - protein, 510 aa, Pyrobaculum sp.
MGGGDMECVRRAVAVEVESPPSELYAVEEPYHRIVEEVAAYVAERGTLEKEKYSELYRRFRKQYPLPSQLIQQAINQGVEIGKSFLALKRDCRVHKPHPEVRHIAIRFAKNSWSYKKAISSVAPVRLALSLPSGRREVWIKPHRRFWLYWWKVLRKEAELVSTLVLKRRRNKWYAIFAFDVKPREEPPAEAVAFDVNENWVAVARVSLLATVDKVATWNRQYINPAVYSIRTDFGRLAKRYEAVRGRKLEELKQKYPYAGRDEDERRQNVTDTREFRKFVRRLRERRRKEGRVRQTAREVTRSPALIITEELGKNPQEEMIGVEERAKKGAKKKVKKRELRHRVKQTPFKKLVRVVEEKAAEAGSVVVYVSPYRNSKVCPIHFDLLKNCGGWHTLHCPHGHDVDRDHAAVLNMLWKITPEGAAKAVWWDLKDVKRRLEKGGGLVPKEAVRRKNPLVTWPVVHAVWTSLKSLKASDKRPAVLARAAPMTPAQGADEGGTRAPPRLRVTPAL

SEQ ID NO: 31161 - protein, 402 aa, Salmonella sp.
MMLILKAYKFRLEPTPEQSQRLRQLCGCARFVWNLGLAETKRILGSGEKLPSAFELNRMLTVWKKMPGHIFLQDAYTDNLQQKLKYLHAAWKRCFDKKLAAKAPVWKRKNEGRDSIRFVNFEKYCRLENRRVKLPSGLGWVKFRQSQRVNGKIKNATISQLAGQWYISFQVEVETAEPNHTSTTIVGLDAGVTKLATLSDGTVYQPVNSFKASQRKLATLQRQLSRKVKFSSNWQKQKRKVQRLHSHIANIRRDYLHKVTSEISKNHAMIVIEDLKVSNMSKSAKGTAEQHGRNVKAKSGLNRSILDQGWYEMRRQLEYKQLWRGGQVLAVPPAYTSQRCACCGHTAKENRLSQSKFVCQACGYTANADVNGARNILAAGHVVLACGGMVQSGRPSETGTRR

SEQ ID NO: 31162 - protein, 514 aa, unknown
  TnpB Polypeptide
MANYVMTYELILDSRAKNKIDSQLNIASNIYNELLSVILKRYNKLRNSSEHRKLLKAYINVKTKLENLKLNKKNTQEIKEKLKKLSEIKKTVTEKLKQIRLDYGFSEYELHKYCTTINRKNNYDFNSMLVQKLATRAFKSVEKMMYNSKTKKVKFKKLGTASFEGKNNRTGLRYDLSKNELIISRKIKCRLKMDTYQMNCFKDKICYCRMLSPRIIRNRKRYYVQIIFEGVPPLSYSINKNKVGIDIGTSTVAIAGENAVKLEALSNTEKEKSKIRRLQRSITRKNIANNISNFNENGTIKKLPKGQERKWIISKREIKARNKMKDIYRKRKVKDTEHKYKLANEILNLGNDIKVEEMNFSALSKRSRKTSINIRNGKFKCKKRFGKSISENAPAKLLTIIITKLEYIGRKIEKIDTRKAKASQYNHIKNEYRKTGLEIRYKELDNNITVQRDLYSAYLIKNIENRSEYNRFNLIKGFDSFMEMHNRELERLKNNKKLKFYINKTAKNTMTYCS

SEQ ID NO: 31163 - protein, 346 aa, unknown
  TnpB Polypeptide
MLKAKKKHIAKIHSGRKTDTKKLRKLKFQIYNICNSINRLEQKKETFQNRIDNRKPNVCLGTKKLLRQSRTKFIAQRDSQINYVGSKEETSGNSMFQFSYNKQRNCFGFKIRKDFGKWKSDRSSERYTEGRCHFKYMSRELRKVLEDKSSPVTVSIIRKNDRYYLHVSITLQYTAEAICTRKEYGTVGIDFNKGMLAIAETDQAGNLKNVFQRKFCFGKGGKTKAQLSKILSDICKYAIGKGKDIVIEDLKSFKKKKAKTNKAKTEQGREYNDMLHKLPYSMYSQLIEDMCFKRRISLIKINPYNTSKIAGQKFCKRMSLNIHSGAVYVIARRGMKIKDIYIKKVS

SEQ ID NO: 31164 - protein, 353 aa, Acinetobacter sp.
MKTLKLRIKDKHCKVLDQLASEVNFVWNYVNDLSFKHLKRKGEFFSAFDMAKYTKGTSKLCGLHSQTVDAIREELVTRRKQFKKAKLKWRVSNKKSARRSLGWIPFKRSGLKYADGYVEYGKIKFGLWDSYGLSKYTVRTGSFVEDSRGRWYVCLVVDTPKVEKANTTKAIGIDLGLKDIATCSDGTVISNPKYYRHYEQKLGVAQRARNKKRVRALHAKIANSRKDHLHKASTALVKNNALIIVGDLSARKLVKTKMAKSVLDTGFSALKTMLRYKCENAGVLFEEVNEAYTTQICSCCGNISNSSPKGRTDLGIREWKCVECGTFHDRDRNSALNILALGHKRLAVGIPLL

SEQ ID NO: 31165 - protein, 449 aa, unknown
  TnpB Polypeptide
MLKQKYTTVTQLHKTNNKEIIEYFENACVYFCKLQRKAFHIFKNENIKGIKTEYKKFRQDFMKEHNISRRTADSILRDVQGRINALIELKKYEVSQKEYKIKTLKESIEKLDDKILKLQEKLNNKITINHLTYRNLKKSRAFKKMRLNKFKMRLEQLKWEIKTGNYKLCFGTKKLLKSKKAKFLLQRDSQVTYIGSQDETGRNQMLQLSYNNKNNQFNIKIRKDFGFDTETKYVFRKCYFNNYKNELIKALQNKNSTPLTYSIIRKNNRYYLHCTFEYRIENKSNFLTRKTYGTIGLDFNKGFIALSEIDRNSNLIGTDILKYRFGKGSKTQSDLEKCISKILKRALETGKDICIENLNFKAKKFKTEKAKTKKGKQYNNMLHSLSYTLYDKLITNIAFRNKVDVIKINPAWTSWIAKNKFCNRMKLNIHIGASFVIARKGIGIKDEVK

SEQ ID NO: 31166 - protein, 386 aa, unknown
  TnpB Polypeptide
MISYKFRMYPNKQQTEKLDFALDICRQAYNIMLGELRDQAIIDRNMIQSILPDLKICEPRFGEVYSKTLQYECYKLFSNLSALSALKKQGRKVGQLKFKGKKFFDTITYNQSGFDLEHIFGKNGRLKLSKIGDVKLKLHRLPEGNVKQVTLKRMNDKWFAFVISDGKTRLKHGDKVLGIDLGINHYLVDSEGNKVEHPKNYERMLPKLKMAHRNLSKKKKGSKNRLKAKKSLNRIYEKVNNQRTDFLHKTSTNLIRQCKVIVVEDLNIKGMMEQRYFNAKNITDSSWNKFIQMLEYKAENSGVEIIKVNPKDTTKICSNCGHIQKMHLWERTYKCKDCLFEMCRDENSAINIKFLGLGQPYVEIVSDFPSGEQLSMKQEAITSTQC

SEQ ID NO: 31167 - protein, 480 aa, Cyanobacteria sp.
MLLAYTYKLNPSPSQIAIMERWLHLLRLQYNFRLRERIEAYEQARAPKLGNYCNLDSQAECCPLACSVSKNALYGNPWAIAGKKRSAWAQQDADLTNLRKDRPWYAEINRSVMNQMLRQLEAAFKGFFTQGRGYPKLKRRGRFRSFTYPPGLVGFQGSRIRLPGIGSMTFFLSRPFPDGFSIRCVTIRKKVDGWYTSVRLEDNTVPEPASPSAAQAAVGVDLGISKLIALSNGETVANPRFYKQKERRRQILARRASRKVLGSKKRAKAYQKIARLEHKIARQREDYQWKTAHKLVGRFDFIVFEDLNIIGMKKRCQPKQDDITSEYLHNGQSAKSALNQAISDAGWGKLKQKVKVLAARSGILVREVNPCKSSQECSVCHYVSPENRDGEKFICENCGYHADADVDAAIVILQRGLKDLGISFPKLPGVPRKVTPTETSTVLPVEPGNPRKNEEIQSKGSDCFLNVETQLFRVEESLSD

SEQ ID NO: 31168 - protein, 441 aa, unknown
  TnpB Polypeptide
VSSERGIPRTVATKRYKYQVRGPLAPEQVVAVAKTFGCARVVYNDTIHARETAYANGDPYPKSGDLSKQLITQAKNTPEREWLAEPSVVVLQQALADADRAYRNYFQSLSGKRKGQRVGKPRYKSKRDRRQSARFTRNARFKIRQVSAKRALLTLPGIPDRLPLAYSRPLPSEPSSVTLIQEPDGTLFASFVVDVPSVESLPDNGRHAGIDPGLDVLAAVVVSDGTRYKIPNPRHHRKMERDLKRKQKALSRKEKGSKNRNKARIQVARAHRKVRNARYDHAHKLSLMLVRENQTISIENTNVAGLARSGARGRRGRGLRKSVHDAGWGQLTRLLLEKATEYGRIVSLSEAAFSSQSCCVCGVLDGPKPLSVREWECRSCGAWLDRDYNAAVNFLVAAGHAETLNACGGDVRLMLASATPREAGTSANPRGSSTLQAAPAA

SEQ ID NO: 31169 - protein, 456 aa, unknown
  TnpB Polypeptide
VKRTNVVKLVVDKETHEKLKELGITTAKCWNEVNWSRVQQFRKGERVDFAKTEKEVYEKYKQVLKVNAQQVARKNAEDWRSFFSLIEEKKEGKLPKWFKPRLPGYWKSEEGKYKLIILIRNDRYEVNESKRVIYLKDFKLALRFKGKLKWHGKQGRLEIIYDEGRRSWYAHIPVEVEDEEKVKGNLRASVDLGIVNLATVYVEDGTWYVFKGGVLSQYEYYNRRISEVQKVLTKHKQSRSRKLKLLYDKRRRFLRHSLNSMVRKIMEELKEKGVSEVVIGYPKEISRNHGNKLIVNFWNYSYVIKRFEEVGEEVGMRVVKVDESYTSKTCSLCGEAHESGRVKRGLFKCPRMGKVINADLNGAINILHIPESLRSTDRRISVVRDRGDGLKTQPVIYRWTNGVGWLLATSYEVVKMKAVNHKPMIRPKGTLALPGRGGGQKHHIIGHVANFDAEYL

SEQ ID NO: 31170 - protein, 341 aa, Firmicutes sp.
VYILKQKAFRYRIYPTEEQKTYFAKTFGCVRFIHNVMLHDKIEYYEANGEMLHNTPAQYKAQFPFLKEVDSLALANAQLNLESAYKNFFREVAKDNKNQGFPKFKKKTYNQKFKTNNQNGTVDLVDGKFLKIPKLKTLVRIKLHRQLPVDAVIKSVVIERSSSGKYHASILVETEIKPLQELTKEVGIDLGIKTFAVTSDDKEIIAPKALLKYEKRLIFLQRALARKKKGSNNYYKNKRQIALLHEKIANIRKDFLHKVSTKLINENQVVKVETLKVKNMVKNHKLAKHISDASWSKFIEMLSYKADWYGRELVKVPTFFCIQPALSRLWIQEQRSQKPRR

SEQ ID NO: 31171 - protein, 511 aa, unknown
  TnpB Polypeptide
LFTRPEAETLGGYSTSRWTWSSSPSISTRRASKSRHTSAKISRRRSMAGPSNTRRRYLATKTKWTWRMKTQCRPCRVSLSAVIGQVYRAPMRLLKACRFRLEPTPTVAREMGRAAGCCRFVFNRGLELERGRFERREKHLGYADLCKELTSWRHAPDTEFLAAAPIHPLQQALKDLDRAYRNFFEGRADLPRFKKKGRRDAFRYPDPEQFAVDDRHGRVKLPKLGWVRYRKSRSVSGTPKQLTISREGGHWFVSIQTEQEVAAPVHPANSAVGVDVGVVKFAALSTGETFAPVNAYAKLQKRLAREQRKLARKVKHSKNWRKQKRRIGRLHVRIARVRKDFLHKTSTTISKTHALVVLEDLSVKSMSGSARGTVNAPGQNVRAKAGLNRSILDQGWAEFRRQLEYKQTWRGGKVITIDPRNTSRTCAECGHVSAKNRKTQAVFRCVRCGHAADADVNAAENILARGMEQRAEGQDTMDASIGCASTAQIACGDTKGAVRPPAQEPTVSEVA

SEQ ID NO: 31172 - protein, 406 aa, unknown
  TnpB Polypeptide
MRRTSVVELVVDKSFEEKLKLLCSLSSKLWNEVNYSRRRMFFEKRGVDLKTTYKEYYEKYKTLIGSATTQQVLNKNDEAWKSFFKLLKLKKEGKLPPFITEINPPGYRKKNNKRTLWTVLRRDQYRIEGDKIVLRGLGAIGWIELKYKGLIHLKGEQGRLEIHYDQDRKRWYAHISFEVLEKAVRGGWTNVPKKPRGDLVAGIDIGVNNLMAIYVENDLTKLVNGRPLKAVSHYWRMRIAEYQSTLYKHGLKTSRRLRSIYSKWRRQVKAYIDSRVRQAIEWLYSVGVSVIKIGYPKYIAQENGDFNNAHVWTYGYLLRRIYEVAEEYGIAVVYTDESYTSSRCPIHGDGCGKRIKRGLFKCTKLNKVFNADLVGAFNILITPSPRGVGVTGRRPGPGLNPRGEGM

SEQ ID NO: 31173 - protein, 233 aa, Fervidicoccus sp.
MCLKPYKSEVHSLEIRAESLEKPRGLAPGAKAKLNRNSRRLIIYLTFKKSVEAYEPRGLVAVDVNENHVAVLVEDKVYLFETGFKDIVLGCYYRRKGVQERYDKLYGVNCRVKRRVFRKLKEEEKKSDIRWKLANIIVRFAEERQYAIVLEKLGKKPANNMVKRIKDAQLRYRIYQVSFKGLQKAIEEKARECGVPVVYVDPKNTSRKCLVHSAKIVYSNCSRVGKCSVGGEL

SEQ ID NO: 31174 - protein, 417 aa, Chloroflexi sp.
VKINRAHVIRLNPTSEQELYFRKACGVARHAYNWALARWKEARAEGKRVKIKDLKAEYNRIKGEQFLWVYEVTKCAPEQAFSDLNRAFANYWRMKREGTQPKLKKPRKDGEEAGFPHFKSKKRDRLSFYLANDKFSVHGHTLHVPKLGEVNMTEELRFGGKIMSATISYRAGWWFVSIAVEMEYEIPTHSGGSVGIDLGIKALATLSSGEKFENQKHYRQNLGRIKGLSKGLSRKREGSQNWWKNVKKLARAHYRVAYQRQDALHKMTTHVTRTYALIGLEDLNAKGMRTNHPLAQAVSDVSFFEVKRQFIYKAEQQGGYVQVLDRWYASSKTCSGCGWVKQDLDLADRTFRCKYCGLVLDRDLNAAINIEQETLRLVTDVPGVASSARKFACGAGSSGMVEIPYETFCDEAGTRML

SEQ ID NO: 31175 - protein, 293 aa, unknown
  TnpB Polypeptide
MDRAYQNFFSSRSGVRKGKAIGFPKFKAKRHCRDSFTSKVGLAVRDGAVKLPKLGWVKAKTSTAVQGRILNATVSITRSGKFFVSLCCTEVDIQQLPSTGAAVGLDVGIKDLVITSDGAKYANHKYLSKSEKKLAKLQRRLSRKSKGSRNRDKARLKVARLHEKIANQRNDYIHKLTTQLVRDYDIICVESLNVQGMMKNHSLAKAIADASWGEFCRQLQYKAAWQHKRIVEVGTYFPSSQLCSCCGHKNPDVKDLGVRVWVCPTCGTKHDRDVNAAINILMEGLRLLGILAA

SEQ ID NO: 31176 - protein, 386 aa, unknown
  TnpB Polypeptide
MPNFINVCIQYNSMFIQKRYIKLKLRKPTARKEILLAKTLEKFKGCMNMWLEELKEFNGEYPTMGKLHNIGYKDVRTKYPELHSNVVQEAMNRSLGIYRTWRKVKGEKKYPIYKENTMSFKSVDVKIESNFISVPLLNKERMWLPLIIPQKFKKYMKLERGNVIFKREKDDWFSYIALKVPLKEPYKPKGFIGADLGINNLLTLSNGKFFDGKYVKKYRKRMLETKRKLQSGKSRLNNKSRKLSQLRRKESRFTDYINHKIAKEVVLIAKQKHYGLGIENLVGLVKGMHKKSKRMNRMLHKWKYRDLVQKIVYKAQINQVPIVFVDPRNTSKLCSKCGHKNNIKYERWFKCSNCGYQLNRDLNASKNIEQRAFLSMSKDRSLLLTS

SEQ ID NO: 31177 - protein, 427 aa, unknown
  TnpB Polypeptide
MGHRWASKGDKRTVAIGYQPSESMLTYLKDVRDALRMALAYAYVMAEEDDNRVPSPIALRRRLREWFHPRYSYARHHINPLCRNAVALLRSYKRKHKRLAIHEVRRLAVRIDAELFKMEQNDDGRVCVRVTLQPFRYEHIEFTPKHRRWVDYVKGRASELLITDRKIFMTFVIGDGDKPLGSKLIASDLNFSTIDSTMASKEDGVVKLQQVKTEPISKIARIQNDFSRRRRRIQLHVKNPEKRSRKLKETRGRQRNRIRDVLQKLSTEEVKSNPNTSFIFEKLSGIRENGDARNCKKLRTYLNRWPYRMYQSMVDYKSPFKVLYVSPGGTSSRCPVCGGRLKHPTWAVSRCNRCGVDYDRNRLASLAILLRSLRLCGQPFAVSADASWQLLRNEHLHTPAAPDSWRAGWTKQAAKAPNENMYTKIHV

SEQ ID NO: 31178 - protein, 537 aa, Eubacterium sp.
MLRTLTIDLKKDCPAYVYLKRNTTGTRALRNTALFYLRNTMTGLRKSPEERTKLETEVLHDVFTGIHMANEAKGKRYRERMLRLRASGMHGMPVYGYIMGAVRDAKPLPCPDETHWHLSYAQLDAILKFTKNPSYYSCTSQVNQQAVKKTVQAWKSWLSALSDWRGHPGKYRAKPKMPGYIRAKEATAHFTNQVAKIAVAGDGRLRLTFSTPRGWEKAPVLYLGPASLLKGKYVKLEVKPYHGKYRLLLTYEDRTEMPGRPDHPGRILGLDPGLDNFLAGVTNTGALPFLISGKWLKSRNQWFNKERARLLSARTKGKDSRHSEKASRRLSALSRKREDTFRDFFYKAAHWVCRYSVRYRIEAIVIGHNEGQKQELPFRKKDNQNFVSIPVSRFLLCLQSVAARYGLPVIIREESYTSKASLRDGDPIPTYGADDPKEGDTFSGKRVKRGLYRAGDGTEWNADLNGAGNILRKEYPYAFDGKEPAASPIQVITREQLCHAKKKAPAATYRREKSLISRLRHEERKERRRACQEAFAA

SEQ ID NO: 31179 - protein, 375 aa, unknown
  TnpB Polypeptide
MKTYKYKFGHQSNCIRLGNLLDDMWQVHEYFHTWQRQRYKDGLPYANYNAMSAHLTDLKRTTHPHWKALPSQAIQEELRRIDNAYVRFFKKLGGRPKIKKRHKFKSLTLKQAGWSLKENRITLTFRKWENGKWRYDKVAYTFHKHREFHGNISHITIKRDACGDYWFYILTDFVETKLLSTTGKSVGADYGMKDAYLTLSTGEKKQHPQPLKHSLKKLRILNKALSRKQKGSHGWWRCVRQLARLYRKISNQRKDFHWQLASELCKSFDTIAIETLNLVGMKRLWGRKVSDLAFYQFVEILKYKCEKHGRKLLQVGQWTATTKPCSDCGFHNQNLTLNDRQWRCPECGSHHDRDINAARNILQAGIPVKVSARYA

SEQ ID NO: 31180 - protein, 284 aa, unknown
  TnpB Polypeptide
MVRLWLRKNLNRDYSLTQNCFSVNTLNGRVKLPYFAEGMSKYFNHSIYKFGTAKLVNKHGKYYLHIPVTYDVEESNISDICNVVGIDRGINFVIATYDSKHKAGFVSGKAIKQKRANYSRLRKELQMRHTPSSRRRLKAIGQRENRWMQDINHQVSKALATGNPKHTLFVLEDLTGIRNVTERVKPKDRYVSVSWSFYDLEQKLIYKAKQNQSSVIKVDPRYTSQCCPACGHTEKSNRNKKIHLFTCKNCGYTSNDDRIGAMNLYRMGINYLADSQVPNTVVTE

SEQ ID NO: 31181 - protein, 373 aa, Anaerobutyricum sp.
MVANRAYKFRIYPNDEQKILFAKTFGCVRMVYNHWLDRKIRQYEENKTNVTYSICAKEMAAMKKTEEYRFLKEADSIALQQSLRHLDTAFQNFFKQPKTGFPRFKSKKRNKNSYSTVCINGNITISNGYLKLPKIGQVRLKQHRIIPEEYRLKSVTVSQTPSGKYYASIVFAYEDQVQEKEMQKFLGLDFSMRELYRDSNGKEPAYPRYYRNAEKKLAREQRKLSKMQKGSNNRNKQRLKVAKLHEKVSNQRKDFLHKQSRQITNAYDCVCIEDLDMKAMSRSLNLGKSVSDNGWGMFTTFLRYKLEEQGKKLVKVDRFFASSQTCSVCGYKNAKTKNLALREWDCPQCGTHHDRDVNAAINIRNEGMRLVNA

SEQ ID NO: 31182 - protein, 457 aa, Thaumarchaeota sp.
MPASGQLLGDEGREPISPAIPGEGIQEVKHAGRRTNVVRLLPSGSQGRRLRRLASVSARLFNEVNYERRQQFFRGEGVDLEGTYRKYYEKYRSVLGVNAQQVLNKNNEAWSSFFSLLKLRKEGKLPPHMRRVGPLRYWKDRGSKERRLILVVRQDRYMVDEQNHRLVLRDFGLEIEFAGGLRWHGKQGRLEIRHDEARGAWHASMPVEVGVETTRNGNRSKHIVRGERKSIRIAGPRGNEAAGVDLGINILASAVTSSGTWLLYRGSRAKEEFFYLTRKIAKIQSEADIARNAGDEAKSLRQNRRKRRLFRKLVGRMAHLYWNLANHLVRSLWELGVSRIYIGYPFIIAQERGNKLTSNLWTYRKLMDAIELKAQEYGIRVYEVLEYSTSNHCAIHGTKVARGPRGVVKCPLGHKLHSDLNGALNILRRGAGSIPATLEGPLSFLVDHGGVAPAKGA

SEQ ID NO: 31183 - protein, 367 aa, Mediterraneibacter sp.
VEKAFKYRIYPNKKQQELIQKTFGCVRYVYNYFLALRIKEYKENKNFLSYNDTSKLLTQLKKELIWLKEPDKDSLQKSLKDLDMAYRKFFKEHAGFPKFKSKKNNHKSYRTSRTANNITFVEKHIKLPKLGYVKTKDKQIPQGRILNATISQEPNGHYYCSLCCTDVEMPQYQKTRSNVGVDLGIVDFAILSDGNKIENQRFYEKSEKKLAKLQRSMSRKTIGGKNWNKARIRIANLQKHISNQRTDFLHKLTTKIVKDYDVICIEDLEVKSMKETDYTIRNKRVSDVSWYEFRRQLAYKCQWYGKQLVIVDKYYPSSQICSACGKRDGKKSEDIRVWVCPHCGAELDRDLNAATNILNEGLRILNS

SEQ ID NO: 31184 - protein, 471 aa, unknown
  TnpB Polypeptide
MRRTVSIPVDLPSDRFLPLLAECADVFNRHVEWALTARTYSKAKAHHALYEEQRSLHPTVPSALIQTVRDTALEAIKATAFAKRPRKKPTSGLRYDRRTFTLRGAQITLSCIGPRVRAVLHVPEYFRTIYDTCACKSAMLTYSRGSRQFWVRLVFEAPDPPRQEGASAEAATIGIDRGLYHLAVTSTGQTYSNSHVRAVQRRYLHNRKTLQAQGTKSAKRRLRRQSGCEQRFSQSVNHVVTKAIAHLPAATFVLEDLSGIRAQRRGKKINKWLGSWPFSQFAFFLTYKAEALGKRVVYVDPRYTSQKCSRCKRRSSAYRYKSRFRCGSCGYRAHADLNAAYNIRDDYILSSTPHASEEQAAVNRPYVSPLGHGAERVGTSRTPRGAVVDVDFNTMMMDPEERIYIGKEGSAQDDQDMLSVLRPGTPVVLHDGEMQVEATIEYDGERKIWFGKPDWATRRDTAPMKQEAATL

SEQ ID NO: 31185 - protein, 355 aa, unknown
  TnpB Polypeptide
MYGNPVNSTKIRINGVENTFFTSFAINTHRGWVHLDLEPSKEFYKLLARGFKPTSHAKIKLDRRNRRVLFHLFLEKEVEIYRPENIKPVDVNESSVATIYEALAIILETDLAKTTLGYSYRRESIQRRNGSGGKEARKAMEKLRERKKKRDYRMKTANLVVKDAMMTRGVIIVKRISGDDIRVMIARYKNKQLRRRIYQSALKGGLNAIIDKAREYSVPVLIVDPRNTSKICPIHKATIEYGEDRIGVCSKGGERWHREVVALINIYLKTLEALYEGSAQRGFGVLSIDGSPFPLGSTAIGEPTEIPRSLWGVEIIDGHRDVITSLWVKKHSNPNKRKSIASTIIMGASGLPPAN

SEQ ID NO: 31186 - protein, 394 aa, unknown
  TnpB Polypeptide
MKRAYKYRIYPNREQEEKLAKTLNTCRILYNHMLAERRDKYGNDGRSPSFYEQKRGLVNTKNTNHYLQDVHSQVLQDVTLRIDRAFNAFFDRARKKKEGKWNGKVGYPRFKGRNRYDSFTYPQYENGCKLTTGKLFLSKIGSIRIVQHRPIEGTVKTCTIRRDVDRWYACFPVEIPVTVVETKHPKNPVGVDVGLKSLITLSNGEKIEPPKYLRKMQKRLRREQRRLSRKRKESNNRDKQRIKVARLHRKVRLQRTDFNHKLSHTLVNRFDLIAFERLSIKNMIRNHHLAKSIADASWYQLQTFTSYKAEYAGKSVRFAESRDTTTECSRCGFPVPKNLSERMHLCPNCELMKDRDWNSAVNILNRVGWGTPESTPAKIEPLPLPQKGGGKFGR

SEQ ID NO: 31187 - protein, 434 aa, Anabaena sp.
MLKVVKVRLYPDSQQQQSLAQAFGSCRWLWNYCLNLMNETYKETGKGLSGYEVKKLIPQLKKENDWLALTYSQCLQQACLNLGVAFNNFFEKRAKYPRFKSKHGKQAIQYPQNVKISDHQLILPKIGKVSAIIHREIEGKIKTVTITKNCSDQYFAAILFDDAKEKPELIAEGKSIGVDLGLTHFVITSDGSKFDNPRILNKHEKNLKLKQQQLSRKQKGSNNRNKSRKKVARVHRKITNCREDFLHKLSRRIVNENQVIVVENLHIKGMMQNHCLAKSIQQAGWGMFCTILKYKAENEGKIYQEVDRFFPSSKTCHVCLNQVGSLPLDVRYWTCEKCQTKHDRDINAAINLRDEGLRILTSQSPQVGKPAHGAGSSGTGDKAIKCGLGGFPHEQLHQEACRPDVSHSNRGRKKSTTTLSVGQEAHTIPSGQCG

SEQ ID NO: 31188 - protein, 407 aa, unknown
  TnpB Polypeptide
MGGGDMEKVRRAVAVEVENPPSELYAVEEPYRRIVEEVAVYVAERGRLEKEKYNELYRRFRKQYPLPSQLIQQAMNQGVEIGKSFLELKRDGRVHKPRPKVRQVSIRFAKDSWSYKKAISTAAPVKIAASLPGRRREVWIKPHRRFWLYWWKTLRGKAELASTLMLKRRRGRWYAVFVFDVKPRKEPLAEVAAFDVNENSVAVARLSLLATVDAVALWNRQYLNPAVYSIKTDFGRLAKRYEAVRNAKLDELKRKYPYAGGDDEEKVQNVTDTREFRKFAKRLRERKRKEGRVRQIAHEMTKSPAVIITEELGKNPQEEMIGVEEKRVKERKLRHRIKQTPFRKLIGTVEDKAREAGSVVVYVSSYRNSKVCPVHFTFLRDNGGWHTLHCPHGHAVDRDAAAVLNML

SEQ ID NO: 31189 - protein, 410 aa, unknown
  TnpB Polypeptide
LELRESHQLCSPRPAGLSLPGGRREIWIKPHRRFWLYWWKVLRKEAELASTLMLRRRRDRWYAVFVFDVAPRKESPAEVVAFDVNENSVAVARVSLLSTVGAAARWNRRYVDPAVYFIKTDFGRLARRYEAVRNAELEELKRKYPYAGRDDEEKVQNVTDTREFRKFAKRLRERKRKEGRVRQIAREMTRSPAVIITEELGKNPQEEMIGLEEKKIKKRELRHRIRQTPFRRILRAVEDKARETGSVVVYVSPYRNSKVCPIHFTLLRDNGGWHTLYCPHGHVVDRDVAAVFNMLWKVTPAGMAKGVWWDLKDVKRRLEKGRGLVPKEAVRRRNPLVPWPIIRAVWTSLKSLKASSQWPAVLARAAPMTPARGAYEDGTRGPMNHPKGNNSRGGEEVSSSRNTARWAFCF

SEQ ID NO: 31190 - protein, 369 aa, unknown
  TnpB Polypeptide
MHEDAAQKLHKTRLLYRDACNFLVKYVCRDPNERNWQRYNLHHVAYYDLRLALPVLGSQLACNAIRSVSSAYKTELTNHPRKNKEESLKEIVFKNPSIHLDKNTIRYQSDMTEATVFTVEGRVKVRLCPGDFQKRLLDSGKHKESNLVYRKNKKGGFWFLHISLEYDSTLSALTAKLKKEEVIGVDVGENNIAAVSSGKVWKADELKHKRDKYLGLRARLQSNGSQSARQHLRKASGKERRHVTQVNHVVSKSIVEEAAKQKAKVIVLEDLTHIRDRVRAGKRVRSRLHRWSFRELQQLIEYKAQRRGINVMYVDPRYTSQTCSACSQLGKRTKHRFVCPHCGLRAHSDLNASRNLQGLGYQLIAQGLL

SEQ ID NO: 31191 - protein, 228 aa, unknown
  TnpB Polypeptide
MCYAASKLWNICNYERHHYKELGLEKYPDWYYQKKTHKGNLWYKQLPSQTAQETCKQLDKAWKSFYVLKKTGGIKDPNPPRFKQDNIPVTYMQMGIRHEKGSDQLRLSLPKDLKSYMEETYGIHDKFLYLENKIFRNMDHIKQLRIYPPENGKCDLIVIYEMEEPEQLSQNGHYLSIDPGLHNLMTCYDSGNGRAFILGRSIFPWKDIFIKKSPECSLYGMHSNRKEG

SEQ ID NO: 31192 - protein, 422 aa, unknown
  TnpB Polypeptide
MAKYIACVNSLVAQDLSGESIRKFTSKDVNAELASAVRSQAVLDAKSVLRRYAKDQRKVERKRAWFEAQGKTPRHPIRDAKVPILRKPVLFVNNQNFKIELDAKTVSVPLFLDGKMTRKTYRVALTPRQREILTTSHLATLRIVRRGDKLFAQVGYKVEEPETTHLDALLADPKTVVMGVDLGIKCPAVSYSTDGKVRFFGNGRENRYKRRKFYARRKKLQKAKKLCAIKRVSDKEARFMKDRDHQVSRAIVNEAIRQGAKVIALEDLDGIRESCTQSTPTRKSRKNVDKPKVDSVTENVKCVSLTVGEPAQLDLFSETDTLTKKERLQKRKLSKKQITARRKNNRSLNSWSFYRLTKYIAYKAALAGIHLVYVNPYKTSQRCPVCGSEHKANDRRYECECGFHAHRDIVGAINIAKNALNQ

SEQ ID NO: 31193 - protein, 357 aa, Crocosphaera sp.
LQWLKECYSQVLQSTTLNLTKAFKNFFDKVAQYPRFKSYHGKPSCQYPQNCEVVDKGVKVPQIGVIKASIHRLFDGQLKTVTITKTPTQKYYASLLFDTEQETPEVVPRVKVTGVDLGLKDFCITHDGVKTSKYANPRHLKKHEKNLARKQAKLARKKKGAECTAASDLPFNGRSVGGSKSREKARKLLARVHERISNARQDFLHKLSRKIVDDNQVVVVENLNVKGMVRNHNLAKAISDVGWGMFVNFLAYKLEQKGGLLVEIDRWFPSSKTCSNCLHPMSEMPLDVREWTCPSCGTHHDRDENASKNIRAEGIRQLSVLGTRTAAEGGEVRPKGGRKSVLRHSPVNSEAPTIPIG

SEQ ID NO: 31194 - protein, 429 aa, Azospirillum sp.
MRLIQAHRFRLYPTPAQEEFFRRTAGCCRVVWNLALEQRQTYGRRGRTIAFKAQAAELKDLRREVEWLAEAPSHCLQQTLRDLDKAFARFFSGRAGFPRFKSKHRGEDSFRFPDYNQFEVGPDFVDLPKVGKVSMRAHRPVQGQVRNITVSRDGDHWYASICVSLRRRVRQAPTGTAVGLDLGVAQPIVQSDGVTHDLPRVTPEEMRRKARLQKGLTRKKKGSRNRAKARQALARFEAKLRRRRQDGLHKATAVIARSYRLVVVEDLKVRNMTASAAGTVEDPGRNVSAKAGLNRAMLDVAPGTVRRMLEYKVKRHGGKLVAVDPRYTSQTCSCCGRHPKDSPETAHLPHGRVSRDRFVCPLCSFACDADVNAARNILVRGKLAINDNVDDLIVTAGGSPVAACGALGTGRAMRQEAKTRQPNGLPQAA

SEQ ID NO: 31195 - protein, 410 aa, unknown
  TnpB Polypeptide
MNLGYQIRYLHFVYFPLDNGQVSIRFIYNLIFMNYMKDRAIIKIKLKDNASIRDTLSVYSDAVNYAISICWKRYRSYLKLYYACYHTIRAKFPQLQSQLVATAVKRAYECCKRAESKPTFNGSIRYNPPRSFSFKNNILSISTINGRVKIPVNIPSYFSKYADWRIAESELFMRNGILFFHLGVTNQVNINLSSVKDMVGVDLGINHIAVASNKQFFGNVKNHINRFRSLKARLQSKGTKSAKRHLKRLSGRQQRFTRNMNHIVSKSIVGSVKSRSLFVMEDLTGIGNRDRGKRFNGKISNWSRLQLRQFIEYKAVRSGHMAMTISPDYTSQTCSHCRELGVRNKGFFHCNHCGYSCNSDLNASFNFLRRAEPLATALGLNVNQPIVANELFHCDFSPEFSDKPTSFMSG

SEQ ID NO: 31196 - protein, 409 aa, Mycolicibacterium sp.
MAVRYRLYPTAQQAGFMLQRHCADARYVWNLAVEQFNWGRAGRSGPGPATRQKQLAQARQEFEWLAAGSSAVQQQALRDFDRAVAGFFAGTHRRPSWRRKHLNEGFCVRDSRVEPVNRKWAQLFVPKLGLVKFRLSRPLPAGKLGMARITCKTGRWHVSFPAPQPEVPAIAGREHRVVGIDRGVKTTLALSDGTMLRAPIMRRSEQKKLVRLQQQLARCRKGSARRAKVKARIATLHARVADRRRDWVEKTTTRIAATYGVVAVEKLATRNMVRAPKPKPDPDNEGHYLPNGKAAKAGLNKGIYANCWGVIAQRLNHKTSASGTTLIGVPAAFSSLECRNCGHSVKENRKSQTEFRCVKCGHEDHADLQAANTILARATRPALTSGPEATPADAGVLAQARRPDDAQAA

SEQ ID NO: 31197 - protein, 177 aa, Richelia sp.
MPATTKKAKTKLSKLQWRNRNKVLGNFKLGIKASSNARKYYIKLASHYAQLSNIRQDTIHKMTTDLSRKVYCIRIEDLNVSGMIANHKLANAVSNNCFYEVRRQLVYKQVHYGSKVEIVDRWFPSSKKCSLCGHIQSMKLSDRVFCCHKCNHTLDRDENASINLENAPDKLVRSARP

SEQ ID NO: 31198 - protein, 377 aa, unknown
  TnpB Polypeptide
MKLTLQIKLIPSDEQAIMLKKTFSVFNEACNTISQIAWERRVFNQFSLHKEVYHPIKGTYSLPSQLVIRAISKVADAYKLDRKKQRRFREFGAITYDSRVLSYNTQRGICSISLIDGREKMAYTCYRPQLMKFAKGEADLVLVKGKFYLYQTIDIPDEEEETAEVFLGVDMGITDIVSLSDGTNISSDEVKNIRNRYNKVRASIQSKGTRNCHKLLKRLKGRERRFATIVNHRISKQLVAKAKEEHKGIAIEDLKNIRWGMNSKKRNKTFRRRSNSWNFYQLRSFLEYKCKMAGVQIVAIPPAYTSQTCHECGHIGIRNGKRFCCAHCGNVADADINAALNIATWGYVNTHERWELLSCPIHDDISTSKAHKFLHCE

SEQ ID NO: 31199 - protein, 398 aa, unknown
  TnpB Polypeptide
MEGGVRRAYRFRLRPTARQHVALGHCLASHRELYNAALQERRDAWRLRETTVSYGDQSAQLKEIREVRPDIAAWSFSSQQATLRRLNRAFAGFYRRVRAGETPGYPRFKSPHRFDSVEWPKDGDGCRWQPEIRRVYLQGIGQVKVTVHRQIQGRVKTIQIRREGRHWMLILSCDEVPTRPLEPTRAAVGVDVGIASFATTSDGQHVPNPGWGRVAAARLGTAQQVLARKKRGSNNRRRARATVAGRHRKLANQRRNFHHHTARALVVRYDLLVVEDLRIRNLVRRPAPRPDPDHPGGFLANGAAAKTGLNRSIHDAGWAQFVSILRAKAEEAGRVVIDVDARHTSDRCEACGHTPRENRATQAVFSCRGCGHTVNADEHAARNILRAGLARLAATPAA

SEQ ID NO: 31200 - protein, 365 aa, unknown
  TnpB Polypeptide
VRIAYKCRAYPDAEQVSVLNRTFGCVRYVWNRTLAWRHARYHGEQVKTNFTQANAYLTAMKATEDLAWLNEVSSVPLQQAIRHQQVAYTSFFAKRARYPRYKSRTGRQSAEYTRSGFRYRDGQLFLAKMDTPLVFVWSWPDIDPAGIGPSTVTVSRDPCGRWYVSFAVEVADPEQLPTAGHAVGVDLGIKDFAVTSDGEKIPNPRSLARRERNLARYQRRMARCQRGSANRAKAKAKVARAHRKVRASRADFLRRTSTRLVRDHDVIVIDRWYTSSKTCSSCGHLLAELSLKTRTWQCPSCGTRHDRDINAAKNILAAGPAVAGGNPGDACGADVRPQGTPLRQSAVKQEPQLVRAGIPVAHDGE

SEQ ID NO: 31201 - protein, 406 aa, Moorea sp.
MRSAYQYRLRLTKSQVTKIEKWLDMLRHQYNYLLADRFNWYEQNRCSVNSCLLVCHLPELRNNPDYFSQKRTLPQLKKDRPWYKEIHAHVLQDCVKRVDLAIARFLKGDNNGKKSGRPRFKSKNRYKSFTFPSLSKTPINGKILTLPKFGQVKMIYHRPIPDGFKIKTATITRKADGYYVTLSIQDDSVPDVIPVDKVTNPIGIDMGLKSFLVKSDGTEVPIPQYYRKAQKQLKKIQKAVSRSKKGSNNRKKAVIKLGKAHKKVADTRKDFHFKAAKELLDNHDLVAHEKLNIKGLAKTKMAKSVLDAGWGQFLSILSVKAENAGLITKAVNPRNTSQNCSNCGKKVPKKLKDRIHCCPHCGYVTDRDVNAAINILNLAVGHPVSNKAYRVTELLGGFGKKPALSR

SEQ ID NO: 31202 - protein, 294 aa, unknown
  TnpB Polypeptide
VLFATVVRHADRWYVCLTVLAPDLHPDRRHHSRGDRTRKGFVGVDRGLRQFAVAATADGTEVGRWPAPRPLTRRLEQVGRHSKALSRKKLGSSNRAKAARRLSREHARITNVRRTFLHQVSCRLAQTHSKLAIEDLRVANLLANRRLGRALGDAGWGIFARQLTYKVGWLGGELVICDRWFPSTRTCHVCGTIKRHLKVEERTFRRRRCDNSCDRDRNAAANLAAWAERSGAPDRQAAGRVDNVPGGNGAGHRLTDGGSGPDEGETDAPAVAEAPGHPRRMASVTSAVPDVLYP

SEQ ID NO: 31203 - protein, 462 aa, unknown
  TnpB Polypeptide
VEQHQINKNHELFKLIDEYSFKTKNLYNYANYLIRQTFILTSRLKDGIKINEEQLQFLNWINTKVDEFNSFKLDNFQKSQLKGKKLDKQFKILKYFDAEHKYLGYDFLEFLVSDEQDYKTLMAQVSQQVLRILDKNWISFFESIKDWKQNPTKYKGMPKLPKYKHKTKGRFNINFTNQNCKIETGFIKFPICFNQYLLKTKVNEKLQQVRIKPLGSQYLIEIVYQKEVKEIDQESKNIIGIDLGLNNFVTITNNIGLKPVVINGKIIKSNNQYYNKRMSHYKGILKKETDRDWSKRQGKLTIKRNNKIKDFIHKSSKFIINYCIENNLDTIVVGNNKNWKQDIELGKRTNQNFVQIPYSMLISQLEYKGLDVGIKVIVSEESYTSKASFLDNDILPKYKKDNEEKHDFSGKRIRRGMYKSKNGILINADVNGSYNIVRKVFPKAFADGIEDVGLHPIKYNVA

SEQ ID NO: 31204 - protein, 399 aa, Vulcanisaeta sp.
MKRTSVVELVPDKASEEKLKALCSLASKLWNEVNYARRRQFFENKRVNLKETYREFYEKYKMLIGSATTQQILNKNNEAWRSFFTLLKAKKEGKLPPFVTRVNPPGGYKKRHGSRVLWVVLRNDQYVIEGDRIVLKGGLGAVGRIEVRYMGLIHVRGGKQGRMEIRYDPDTRKWYAHITFEASEKAVRGVWRRVPLPPKGGLRAGMDIGINNLFAVYVENGESLLVSGRPLKSISHYWRMRIARYQSTLNRYGLRTSRRLRLMYRKWRRQIKHYVNTAVRKLAEELYNIGVSTVYTGYPKMIAQENGDFNTVQVWSYGYLLKRLSEVLEEYGINVVLVDEAYTSSHCPLHGSGCGRRIVRGLFKCATLNKVFNADIVGAYNILTKAITPPSPPHAGDRG

SEQ ID NO: 31205 - protein, 239 aa, Succinivibrio sp.
VPEGYILKAVTVSQNGSGKFYASILFAYDEEITPKEPKSFLGMDYSMKDLYVDSEGNKGEYERFYRKSEHKLKKEQRKLSLMKKGSKNRAKQKIKVAKVHEKIANRRKDFMQKKSRQIANVYDCVCIENLDMKAMSKSLNFGKSVHDNAFGKFIEMLSYKLQRQGKYLVEVDKFYPSSQLCSVCGYQNKETKDLSLREWICPHCGTKHDRDINAAVNLLKEGKRLLLNKIKQEPRGTRG

SEQ ID NO: 31206 - protein, 276 aa, unknown
  TnpB Polypeptide
MCVSCLWEIPSFWNSPSNMMVLRSENLKLDTSAACSIDLGIDNFATMISTKAEAPFLLVKGGKVKSINQWWNKQVAELKSLGKFGHIAAKSRRRYSQMEDFLHKVSRLVIEYCLTYDIGTVIIGYNPQWKMECNLGKVNNQKFVAIPHARFIDKVKYKAQVYGIKVIVREESYTSKASALDFDAVPDYRTDDESVKAKFSGNRVKRGLYRTADGTEINADINGALNIARKELGDEWFKKQLKANGGRMNRSVSVRDIGQTLKEGLRPLETASLRAR

SEQ ID NO: 31207 - protein, 415 aa, unknown
  TnpB Polypeptide
VIEVVKTVVVPSVRLAEKKFEVFRELEELYKQVLVELVDYGFRNSVDSFTRLKRDKYRELRGRNPHLPSHYIHTACQDASTRIKSFNKLKKKDLAKSEKPEVSRVSIWLDDHLWRRVGYTTILIYTHRGWIPVELVPHKLYWRYINNGWTLRTQPKVKIDCKHKRLLIHFIFVKTTSTGEDGAKRVISVDVNENNIAVKVLDKVYILETGIKRITIGYARYREVVQSVKGNGYVCRAIRGRERKRKKDIRLKIANIVANTAKNINAVVVLEKLPKQCPRNMIKGVKDPALRHRIYQAGFRGMARAIEEKCLERGVPVDKINPRNTSSTCPFCNSKLMRGDAPRQLRCPKCEFESGRDVIAVLNLEKKYLTLKGCVPFTPMPCEPTLEVVALPMKEWARRKSLDATNKHELMRMSI

SEQ ID NO: 31208 - protein, 384 aa, unknown
  TnpB Polypeptide
MKKRRKRKQYRRTYKYQIREHPQNMRLGNMLDDLCDVHNHFLKLENRYYRIYGKYAGRYRLQPHLTNLLQRTHQHWAWIPRDTLDAVIIRLELAWQRFFDIPGCGRPRFKRKGRYRSAKFQSGYLLEEGRVRISFKEWDEPPQSFKYNKRWFSFHHHRDWKGKVCYIQILRDAVGTYWLYVVTDDTSKEVLPATGESVGADFGMDTYLTLSTGEKIHHPQFLKQSLNELRTLYKALSRKVKGSGNWWRCLRQIVRLFRHITNQRKDWHFKLATDLCRRFDFIATETLNLDGMKRLWGRKVSDLAFYQFIEILRYKCFKHNREFHQVEQWTPTTKPCSECRYKNENLTLSDRQWTCPECGTHHDRDVNAAINILRAARDPSVEQM

SEQ ID NO: 31209 - protein, 392 aa, unknown
  TnpB Polypeptide
MLVNKAYKFRIYPNKKQVELINKTIGSARFVFNFFLGKQKDKDAYWYICEEMVQNGQLPTNNWKGEFLNKYQTVKAIPELKKQYSFLKEVDSIALQKSVENLADSFDRYYKKQNKYPRYKSKKNPVQSYTTKCTNGNIAVIGNHIKLPKLGLVRFAKSREVEGRILNTTIRRNPSGKYFISIGTEVEVSEFPKTQSAVGVDVGLKDFAILSDGTTYANPKFFRTLEEKLAKAQRVMSRRTVGGSNWYKAKIKVARIHEKITNARNDYLHKISTEIVKNHDIIGMEDLSISNMLKNHNLAKAISEVSWSQFKTMLEHKAKWYGKQVVTVAKNFPSSQLCSCCGYQNKDVKNLALREWNCPKCHVHHQRDINAGQNLKNEAIRLLTVGTTGIAY

SEQ ID NO: 31210 - protein, 401 aa, unknown
  TnpB Polypeptide
VQLRYNYRLDPQPRHRLALGKAFGCARVVFNDGLRAREAAYQSGEQCVTDSELSARLTAAKATPERAWLTEVSSVVLQQALADLTTAYRNFFASVNGTRRGPKVGKPRFRSRKDHRQAIRFTANARFRVLPNGKLRLPKIGDVPVRWSRPLPSRPSSVTVIKDPAGRYFASFVVEAQPGPQPQAEPVIGIDLGLGHFAVMSDGRKITAPRFLRRAEKLLARRQRELSRKQNGSRNQEKARVKVARAHARVADARRDFHHQLSTALIRDNQAVAVEDLAVNGLGRTRLAKSVHDAGWSAFVAMLEYKARLYGREFCRVGRFIPTSQTCSACGIRGGPKPLHVRAWRCRSCGAWLDRDVNAAVNVARAAGLAVTACRAQVRPDLVPAQRGEAGTHPKPRREAA

SEQ ID NO: 31211 - protein, 434 aa, Halorubrum sp.
MCFGVVGLGVTATATKTLEATLAPPTAHKEQRLQRTVATYRRALSDAFESGANTQTAVNDVVTPYTLTSYAKDALKNYVPQLRDTYNASELEDDHPVRFTNRGWCLDHSDDREHEFCWRVPQAGRGNAFWIPLRINPAQRELWDDLLDGDVTVGEFRLTENRTNWVLHVTIEYAVAEPEEPDNPTPVGFDIGESKLLTGCACQDGTPTKPYIYDGGRARHLRKEMFTTLRRLQERDAEWRVDERFDHYQNALTDIVEKASRQAVEYARQFENPVIVLEDLSYIREHLDYGKWMNRRLHNWAFARLTGRIEDKALDAGIPVRFVNPAYTSQTCHACGHLGSRSSQAAFRCTNTECWVTEYQADINAAANIAGRLNPWGERCALKPHTNDSPQDGSACDSTTGHREQSRQSRQTTLGDFSSETSDDEASLVGSPAL

SEQ ID NO: 31212 - protein, 226 aa, unknown
  TnpB Polypeptide
MRGFGRSRSNRVTSSGSIVALVGCGCPRWGGCDFACRDRYQLAIAKLKAKDAARRKDWVEKLTTDIAGRFDTIRIEALDIRAMTRSARGTVEQPGTRVAQKRGLNRAISLSGWGLLAARLQHKALGRVEQIPAAYTSQRCSACGHVAPGNRKSQAVFQCEACAAGRCNADVNAARNIAAGRAVTARGDLASRQSANREPQIATPAAKVDGAAREIPGHESGEDVKI

SEQ ID NO: 31213 - protein, 253 aa, unknown
  TnpB Polypeptide
VRGPRQAEDPDRRGTTREDKGGDLGLHQFLTLSEGSLPNYPRFLRRSEDKIKRLQKVLSRAEKDSNNYRRLALRIARLHLHIKRQREDYQNQVIAGLYRDNDALVLERLHVENLLKNHKLAKSLQDAAFGKFIDKARFKANMLGKWFVPVDPWGTTQLCYNCLMWVPKDLSERQHRCPRCGVDLPRDENSAKLIKRLGLNCLPGTGYAPGRGVNTPIEPRPLPSLKGWQAWAVKWEAPDFSRGEDATIVLSGK

SEQ ID NO: 31214 - protein, 376 aa, Microcoleus sp.
MKTLKFKLYQHKRNRFLKRSINAAGVIYNHCIALHKRYYRMWGKHLNCAKLQAHIAKLRHRKEFWQQVGSQAVQDICQRIEKAYQLFFKHHKKGVRPPNFKKVRRYKSFTLKQAGYKFLGGNRIKIGSKVYQYWNSREIEGTVKTLTIKRTPLGELFMVVVVDSVIEPQNKVETSRIAGFDFGLKTFLTVSDGSQIESPQFLKQSLNVIKKANRQHSKKVKGSANRERARKHLVRKHEDVSNRRSDWFWKLAHDLTDRFDVLCFETLNLKGMQRLWGRKISDLAFGEFIKILEWVAQKKEKQVVFIDRWYPSSKTCNHCGHVLKELDLSVREWRCASCQSVNGRDENAAKNHLLAFLRINRSALGNVRQAPPAIAV

SEQ ID NO: 31215 - protein, 428 aa, Microcoleus sp.
LTAGFFSKLTVARNSVQLNRRIKQVFNLTYEFKLKPTTKQAAIFEDWLELCRRVYNYALAERKHWFQSRSCQINACSIRSEFIIPAEAKRPTYAIQCNALTAYRKTSIDLQQVQSQVLQQTLKRLEKAFVSMWEQNHGFPRFKKAGKMRSFVFPQLAASPLQGQAIKLPKIGLVKFRKSRPIPDGAKIKQARVVRKNSGWYVLLSLQWDVSVPSAMPHGEGLGIDVGLTNFMATSDGLLVKRQRFFIDAQRQLKLLQQRVSRKKTGSNNWKKAQKQVAKLHEYIANSRKDWHWKLAHQLAGNAGMIFVEDLNLIGLSRGMLGKHCLDAGWGQFLAILEQACFKHGVYFQKVDAIKTSQICPNCGVETGKKELSERTHVCSNCGYTTDRDVAAAQVVLMRGLAAVGHTVKMLGEGKFIGIPANQESSRL

SEQ ID NO: 31216 - protein, 353 aa, unknown
  TnpB Polypeptide
MKFLLDLDGEIFDHAGFPVCEGYKALTVVRTDISKLHRHDEIPDRSEVCTHESGGIENPGTPRYKKDKMPITYMQNGIQHENGSFNVRLSLQKKLKEYMAHTYNIRAAYLYLKNPVFSNMDIIKQIKIYPPANDGTSRILVIYEVEDVLPEEHNGHYLSIDLGLHNLMTCYDNVGKTFIIGREYLSLSYFYNKGIARVQSQWDRIQAAREKEDLKTSKHLQKLYRKKNDCIKDYIHKMTRDITNYCVKNDIHTVVIGNIKGICKERNVGRKTNQKLHGLPYARIYMQLEEVSRIYAEKRNRKKRGIYIVDTMIYNADAVGAYNILRKYHAVFGKEIDMPVTGLSSTKTIKVAV

SEQ ID NO: 31217 - protein, 381 aa, unknown
  TnpB Polypeptide
MRNTAYQYRLYPSSAQIEMFKKTFGCCRFIYNRMLSDKKAAYEKDGKLPRITPARYKKEYEWLKEVDSLALANVQLHLEKAYQRFFDSSANRYPRYKSKHDAGQSYTTNVVNGNIRIEGNRIRLPKVGRVKIRLHRKAPEEWKLKSVTVRMEASGEYYASLLYEEISPEESMYGTLSPESENQAFQGKDRRDIQILGIDYAMHGLAVFSDGTRADYPGYYRKGQEKLAREQRRLSHCRKGSHNYEKQRRKVAKWHRKVRNQRKDFQHKLSRKIVDRYDAVAVEDIDMKGMSRSLHFGKSVQDNGYGMFRDMLGYKLERQGKKLIKVNRFYPSSKRCSCCGAVKKELRLDERVYICACGNRMDRDVNAAVNIREEGRRLLSA

SEQ ID NO: 31218 - protein, 419 aa, unknown
  TnpB Polypeptide
MEKRRTVPIKLDVGSDDATLLRDTIDEFLWAANHVTRHAFKGEYVTTSKTTLHGDTYADVRDETRLHSNHVQAARNKAADACKSVVEKWKQGKKASMPHFTSPHLIYDHRTATFHDEYVSLATVDGRIETDYVLPDDEQNTPHAEYLFSDEYETTGAELHYTNGNWMLHIHCKTDVDPDTSDTDTATTENGTVLGVDLGVNNLAVASTGTFWTGDEFDHWHREYENRRGDLQEHGTRWAHENIQSVGRKEDGRFTMTLHRISNELVAEARDHGCSVLVFEKLTDIRERTGASWGHKWAFNRLYEYVEYKAAEYGIDVGKVDPENTSRRCSHCGFTHPDNRDGEDFECLKCGYENHADYNAAKNIGLRYLRRNQTGDGGGAPLGVRLNSGMVNVNGDYESPADISARTGVHAESHPFTGG

SEQ ID NO: 31219 - protein, 239 aa, Nostoc sp.
MLNRKIKKASKEKRRKRAPNRNKKIKASRRYKKAQSKVTKLVRKVGNQRQNWVHQVAAEIVSGNSFVATEKLEVKNMTSKAKKGKRKKQKAGLNKSILDVAFGMLRNTIKYKVEQIGGVFVEVPTKKVKPSQTCPKCGHQHKKTLDIRVHNCVVCGYVQDRDIAAAEVMLYWSKGTLPGLGTSLVVAESPSSPTSTGKRKQSGSMRQLGAKKRQKSTEKLAKNELGDVETHSSGEANCG

SEQ ID NO: 31220 - protein, 216 aa, Nostoc sp.
MTFRLYPNEKTELILRYHRKLHKDLYNAAVNNRFNQYKIYNHKVDYFEQQNCLPAFKDVWVEYKELPSHALQATLKRVDFAFERWFKGLGKRPRFKSIRHYSGWTYPDCAGFKVESEGENGYLNLSKIGRIQMRGQALGWGKSTTCTIVYRNSKWYASITVDVLDQALKPKVLPVGAIGIDLGCKAALSITDGENHQQIDAPKFLRNAEQKNQKSF

SEQ ID NO: 31221 - protein, 445 aa, Nostoc sp.
MTFRLYPNEKTELILRYHRKLHKDLYNAAVNNRFNQYKIYNHKVDYFEQQNCLPAFKDVWVEYKELPSHALQATLKRVDFAFERWFKGLGKRPRFKSIRHYSGWTYPDCAGFKVESEGENGYLNLSKIGRIQMRGQALGWGKSTTCTIVYRNSKWYASITVDVLDQALKPKVLPVGAIGIDLGCKAALSITDGENHQQIDAPKFLRNAEQKIKKASKEKRRKRAPNRNKKIKASRRYKKAQSKVTKLVRKVGNQRQNWVHQVAAEIVSGNSFVATEKLEVKNMTSKAKKGKRKKQKAGLNKSILDVAFGMLRNTIKYKVEQIGGVFVEVPTKKVKPSQTCPKCGHQHKKTLDIRVHNCVVCGYVQDRDIAAAEVMLYWSKGTLPGLGTSLVVAESPSSPTSTGKRKQSGSMRQLGAKKRQKSTEKLAKNELGDVETHSSGEANCG

SEQ ID NO: 31222 - protein, 428 aa, Natronobacterium sp.
MEHSHRYHAYPTQEVAEGLEHHLNVHRQLYNHVRWDYENSPEDDKPSEYDQNNKLPEWKHKWAVFSELHSKAAQATVARFHRNLSNLRKKKEKGYNVGRLKRQGPSEYRSVTYNQSGFDLDEKRGRDRFAYVRFSKIGWVKIRYHRPIPDHATIKEVTFKKETTGEWFVSFGLETDEADLPEKPDVDSLDASNSVGIDLGIQNYIHTSDGKTVDWLDLEDEYERLRREQRKLSRKEKGSNNYEKQRREVAKVKRHIKWKVLDYQHKLTTWLVRKYDAVFVEDLDAKGMLEQSHNARNKQDAAWRQFITLLEYKSDLYGCHVVQVKARGTTKECASCGVETAKPIWVREHSCPACGFETDRDANAAMNVLQRGFSKLGLGWPEDTPVETVTATDTTHFESVSASRVVETGSLGVVRESVMIKITFANMD

SEQ ID NO: 31223 - protein, 375 aa, Natronobacterium sp.
MKNQSCWKDLNAQSSQKVIEELSDAFQSWFDLRQTDDKANPPGYRKHGDTRPKSTVTFKADGFKHDPKNNRVRLSKGSNLKEHWSDFILCEYQTRPNIDLSEVNKVQNVRAVWNGDEWELHFVCKVELETNDAAGGVAGIDLGITNIATVAFPDEYVLYPGNSLKEAKHYFTRAAYETEGENGPSETSMWARKKLAERETHFYHVLTDTIITECVERGVGTLAVSWPEDVRNSDWGKTGNKKLHSWAFDRLYQYLEYKGKVRGVEVLKENEWNTSKTCSRCGDDTTSNRVERGLYVCSSCELVANADCNGAENMRQKITPSPHGEDRSNGCVVVREILRSLVITKGASAFRTTQPSVHLFDRESGTFTTREQVVS

SEQ ID NO: 31224 - protein, 440 aa, Natronobacterium sp.
MQRTNTFEVRPLSVNDEELLLDVLDASAALWNEVNYERRQNFFNGESVWEVSDYRERYKDVLGSATAQQIIRKNKSAWKSFLSLNEKWKDGDLDEKPSPPGYWGNEDDGRELSTLIRNDMYSVEFGDRSRLEIPIGSKLKDEYDYGYYERLRLEVAGEPKWTGEQGRLELTYDETTDTFRAIQPVEVPDSARDSPLASEEAALDIGANNLVACTTTAGDQYVYEGRSLCERFRETTEEIAHCQSLLDDQRRTSKRIDRLYDKRTKRRNHAQDALVRDLVEQLYEDGVYQLYVGDLGDVLETHWVAEVNEKTHNFWAFGRFVQRLESVCEEYGIEVCEESEEWTTQQCPKCNERDNTHRNEDYSRCNECGFEGHADLAASRVFLEKETSESVGLMAQPVCFEWDDHEWSEVSYSPVRVSPKEAHTNQSTYVVGKLASVDSA

SEQ ID NO: 31225 - protein, 449 aa, Natronobacterium sp.
MYYAYKYRLKPSDAHREELDRHRDICRQLYNHTLYRLNEYQDEHGELPSMTALRSELPDLKKWWDDLSDVYSKVLQTVVERLFDNLKGLSKLKENGYGVGQLKWKPPREFRSFTYSQSGFKLDKKGGQTVLSLSKLADIPIRLHRAIPDVYESDSSRAAHQKSPISEDDAKLKQVTIKKEPTGEWFATFGVEMDREPPEPPENPEKCVGIDVGILKYAHDTDGTAVRSLALSDERERLEREQRKLSRKQHGSNNYEKQRRRVAECHADLRRKRRDFLHKLSNYYAQEYDFAAVEDLNVKGMMESPSNSRNTASAAWRTFLSLLEYKCEREGTHFVTVNPRGTTKECASCGVSTEKPLWVREHSCPACSFDADRDANAVVRRSLTGSKIARDFATVWNILSRGFEDVGVGDSESTPVETALPVDTPVSAKRVVEAGSPTLKERTASAVSE

SEQ ID NO: 31226 - protein, 435 aa, Natronobacterium sp.
MYYAYKYRLEPSDGQREELDRQRDICRQLYNHTRYRLNEYRENHGELPSMTTLRSELPGLKKWWDELNDVYSKVLQTVVERFFNNLRSLSALKENGYDVGQLKWKPPREFRSFTYNQSGFELDKKDGQTVLSLSKLADIPIRLHREIPDNAALKQVTLKKEPTGEWFATFGVEVDREPPQKPDQPTDVVGIDVGILKYAHDTDGHAVESVDLSDERERLEREQRKLSRKDHGSNNYEKQRRRVAECHADLKNKRRDFLHKLSNYYAREYDLVAIEDLDAKGLVELDGNSRNRAGAAWGTFLQMLEYKCEREGTRFVAVDPAGTTKECAACGVSSEKPLWVREHACPSCGFTADRDWNAAWNILSRGIKQVGAGRSESTSSESPCDSDGLRKSRSDFRTPVETALPTGTTSVPAKRVVEAGSPICSRARSARSHGP

SEQ ID NO: 31227 - protein, 408 aa, Natronobacterium sp.
VVPDEYLRRTAVTRLVLTDEQQNLLEETISQWKTACNIGSRVGWKTDETRATVLQDKVYDELRERTDLGSQHAILAVRQAAAALDGVNEIEATDENYETSRPTFTSDTITYDPRTMTVFDDQTVSLATIDDRIRCDIGLPSDEEGYQFQYLRDDEWEITESTVSKRDEGYYLHIGFRKPKPTPRAEQMADDEDRTVLGVDLGIVNIATTSTAYFASGRELRHRHREFERVRSDLYETGTQSAYRTIRQMSGRGSRYVRDVLHRVANDVVEEATTYDCEYIVFENLKHIRERAPPVKQFHQWAHRQLVDMVEYKAKARGICVEFVPPENTSRRCPECGHTSRKNRRSQSDFECRQCGAIANADYVGAKNVGLRFVRRGLQSSRRTGDSQLALKSGTVTPNRGFSPYATG

SEQ ID NO: 31228 - protein, 310 aa, Bacillus sp.
  misc_feature (6)..(6): Xaa can be any naturally occurring amino acid
MVHALXKEVDSIAIQSSVRNLADAYTRFFKKQNSAPRFKSKKNNVQSYTTKQTNENIVVVGNKMKLPKLGLVRFAKSREVKGRILNATVRRNPSGKYFVSLLVETEVQELPKTHSYIGMDVGLKDFAILSDGTTYKNPKFFRSLEEKLAKAQRVLSRRMKGSSRWNKQRVRVARIHEYIANARKDYLDKISTEIIKNHDVIGIEDLQVSNMLKNHKLAKAISEVSWSQFRTLLEYKAKWYGKQVIPVSKTFASSQLCSCCGYQNKDVKNLNLREWDCPECNSHHDRDINASINLKNEALRLLTVGTTGIA

SEQ ID NO: 31229 - protein, 480 aa, unknown
  TnpB Polypeptide
MIGSVSVKATYRFRLYPTGMQERLLLGWLELCRLLYNWALAKRREHYKRTGCGLAYVDQQESLPAYKQEHSKYLAVHSQVLQNVLLRLDRAFVNFFEGRARYPRFKRYGEYRSITYPQIRPEDVGKHSVVLSKIGRVRMVKHRPVKGTPKTLTIIRQPSGEWYATITVALKPHLPAERVRLPQRPVGVDSGLTNYLYLSDGTHVDNPRFLNEHETRIRKAQRQLSRKRRVKKNITLRTGEVKTVTAWSNNGLRAKILLAKRWQKYTDVKNDWQWKRANQLTAKYDFIAYEDLPIQNMLKNHNLARAIQDASWAGFWSKIENKAAQADSTTRTQKVPPAYTTQRCSRCGCRHQVALSERTYRCPSCGYVAPRDHNSSEIILADGLDASGLRVAQPIGMDVPESTPVEIEPLPPETERPVMVVSLVEEAGNKFPACRRTPPDSGGITCMEAHELQPWENVTVMQDPTGVHANFCLDCRHAWS

SEQ ID NO: 31230 - protein, 485 aa, unknown
  TnpB Polypeptide
MIKSFVLKSKLNNTKKICVLQILKEYRALAGKISSIQWNSFYTNKKFDKNIDIKTVNIALSARYKQTCQYQVAGMLESFISNRQNDFRDIVSASSLSDRQRKALYQINRRKLWFRTEADGFNDLDLTLSRSIMKHLFKTNRKPSMKHINMALDFKVAKITNKEDNKGSSFDYWIKLSTLEKGKPINIPVNSNDYFSKNEGVLKNFCQLNIDRDNRFSIVFSKEQNDFSVLGEDEKALRYQSKIDKLGLDFGLNNLFAASTSTGELYGRGFKTPLEKYDAVITKIAKNRQKQGLKTRSPRYDNVVNKTRAYLKNEINRVINTIVSNNKPKEIVVERLNFQSPKLSKRMNRILSKFGKKMIQDKFKRLEEELGIIITEVNPAYTSQECQCGYIDKENRKTQSKFLCRCCSKKSNADINASRILVVRSSCKSAGVYLKKESVLRIRVERFLAERSRILDGTRHNSLAKVLDNNPYYKGWRQDQRMDIE

SEQ ID NO: 31231 - protein, 246 aa, Actinokineospora sp.
LIGMSRFRLQPTSAQERALLEHCGHARFVWNPAVEQHAHWQLGRKSAPGFVEQCRQLTEARAVHPWLAAGSVIVQQQALKDFGQAMANFFGRFHRRPSWRRRERGEGFRIVAVKLGDVRRISRKVGEVRGPKVGWVRFRWSRAVVDGVKSYRVTRDQTGRWHMAFAVVPEPIAGPGSGAVVGVDRGARESQAAFRCRSFGLARNADVNAALNIRLAAGHAVTARGGPPLGEPANREPQHDDHLLVR

SEQ ID NO: 31232 - protein, 437 aa, unknown
  TnpB Polypeptide
MCSYEAVKVRLDPTPRQERLMASHAGAARFAYNAGLAHVKEALDNGESPEWSHYGLLRWWNANKDELAVNQTTGVVWWSQNSKESYSMALRSLAQGFSNWSKSRKGQRKGRRVGFPKFKSKNTTMQFAYSTDFTAPTTSDPYGLKLPRIGRVHCMENVYQRVAGAHLVRVSVSRRAGSWYASLTVEREPAAPASVSAPKGGAVGVDLGVKNLATLSDGTVISNPRALGARLKTLRKAQQALSRKVMGSVRREKARARVARLHARVADVRADAINKATTMIASNYSTVCIEDLNVAGMVKNHHLARSVSDAALGEFRRQLEYKTARTGAVLRVVDRWYRSSKTCSKCGSVKDKLSLSERTYKCDNCGLTMDRDLNAAINICVAGSAPETLNARGEDVRRSDLVSGNADLGEARTKRSPAGGVRLGVGLGNEAMRPSVS

SEQ ID NO: 31233 - protein, 379 aa, Actinokineospora sp.
LRSWSASRSGKHKGRRVGFPRFRSKRSAPGSCRFTTGAIRLEDDHRHITLPVLGAIKTHESTSKLHRRLVDGTARITSATVRREAGRWFCSFSCVVERAERTPARPDAVIGVDLGIKALAVFSDGRPPSANPRHHDIARRKLARMSRAVSRKQGPNRRIGRAPSNRWRRANDRRNRVHHRVGNQRRDAIHKLTIDLARVYGTIVIEDLHVAGVLGSRRLARAVADAGFAEIRRQLTYKTAWNGGTLQVADRWFPSTKMCSRCQAVKPRLPLRVRTFCCEYCGLTLDRDVNAALNLAALVDRHVAGSGPETGNGRGADRKTAPGAAGGHEASTPHRAISAGSDGDLHLVSGGSRRVIITPLNGEAEHIGHQVDSGATQSA

SEQ ID NO: 31234 - protein, 360 aa, Sulfobacillus sp.
MRKTYKYRLYPTKEQEAKIQFTLERCRLLYNRLLDERRVAYNTDKTTLNYYNQANTLTERKKYIPALKQVHSQVLQDVVKRLDKAFQAFFRRVKTGEKPGYPRFKSVSRYNSFTYPQGGYSINGNRLVLSKIGEVKIKLHRQPQGKIKMCTVVVKNGKYYACLSCEVEPNILPESHKTVGIDLGVKHLAITSDGEFYEHPRFLRESERKLRKKQRSVSRKKKGSSRRRKAIRELAKVHEHIANQRRDYAHKVSRRLVNGYGLMAFENLNVQGMVKNHHLAKSIVDASWNQLVQYTTYKAEEAGRRVVLVDPKNTSQLCSNCGEIVPKKLSDRVHRCEHCGYVQDRDINAAQNILKRALVV

SEQ ID NO: 31235 - protein, 322 aa, Sulfobacillus sp.
LPSRGGHWWLSFAAEDFNITLPESDADATTERIAEDLRHLSREQLTERTLGGDRGIAKPLTTSNGQVHDLQPVQKTRIQKHRKAAKRWQRQAARRKKGSKNQKKAYRKVARYQQYEKNVRQDYAHQTSHRLVANAAYNLYVFEDLKISHMTKRPKAKRDAQGHWVRNGRRAKAELNRAILSSAWGNVVAFTRYKALRQGKLVITVAPQHSSQECAVCTFTSPDNRPSQAEFVCQRCGHADNADHNAAVVIAKRGIQKLLAGEPLTRPRKRTRFFRPLGPERSEVTPGEISVRRLGPTAPAQRSMSQKLPGAIPETPALTREG

SEQ ID NO: 31236 - protein, 533 aa, unknown
  TnpB Polypeptide
MQSGMPKAEPSKVFQGVHARLVFLKEGDEAAVLDLMRRFSSATRFAYQRLLEGKTREELKREDGPLCRLFGLNTRYADGAIEKAQATLDSARELGQDPRKVVFGGRKLFEQMKRKHLSGETLLALKREWKERRQGLLYSRGDFAKKGNANLRLEPGDGVLWLRINLGNGAYVRARVQTSHPQREALLQRAYASLPYNVTLRLEDGKVYAHFTWGEALPPPVHTKANGVLGIDVNADPYHLALAVVSPDGNLKRHLTLSLEEVDRVPNKGAKELLLWRIAHQVVALAEEHGAAIATEHLKYLRKSKRGDGSGRHFRRKQHRFAYRSLLEKIHSLARKRGVEVVEVNPRDTSTIGMLKYAPQLHLSKDVAAALVIGRRALGFAERLPRGYRALLSDRSFLAHAEGFYQSRLQELTSLREAEKNPHLKRALSREMGKARKALSLLLSFPRPQRGRKASLQGSSGSRRKSTDGRNFPGANPWRVLRVGLFLPLLGLEVPRDLSPLKPILNLTSLTQGSWEGWKVGLGPPPGGWAGVR

SEQ ID NO: 31237 - protein, 353 aa, unknown
  TnpB Polypeptide
MSTTLRSYKLKIYANKNKLAKLDALITWWQQEVNRKINIYWQLPKVSGSQPPKETTRGGRLVKDASNKAWGIVKGARKQSNPQLPIYKGSEIDLNEHSVIFQGWTTKSFDMWVKVSHLEKRHRLVLPCKKIVKLNKAISKGGKLRKSAKILKVKGKYYLQVYVNLPGRESKSTNSKLGIDVGLTNAVATSDGEFYGKDLRDLRIRTKHRKYLKKTSPFKQGLNGVANELIKDYKNTDFVMEDLLFKGKKGRSRKFRRNNKNWAYKHLANRLEQHGELEGFKVIKVEPAYTSQTCPKCKYVDKENRSGDRFTCKKCGYSNHADIVGAINILERVSKECSVPLSYTKRKEGYQYG

SEQ ID NO: 31238 - protein, 332 aa, unknown
  TnpB Polypeptide
LRGDPSVELYSANKQQAKRFYRRVNPEREYPLSIRKDLIRVERRDTKIARYWVRISVKLRRGGVWVAVKPHCEIDDDLEICESKLLRRNGEYFLHLVVKREVELKNSYSSVLAVDLGIRHAACSVDTRSGETCFYGRELRRVRGHYFHLRRKLGQKKLLKVVKRIGNRESRTTNDQLHKIAKTIVDEAEQLNAIIAIGNPRGIRRNGRGRRFNRKLNSWPFWKLLKYIEYKANWRGIRVVEVSEAYTSQRCWRCGATGLRSGKHHGLFECHRCGLKENADRNGAFNIGRRALGQVSKVGAVVSQPGTGALPPTELGSVVQFSTPEALPFRAG

SEQ ID NO: 31239 - protein, 306 aa, Lyngbya sp.
MQRAFKTKLKLNNKQKTLIAQHAGYSRWVWNWALNLWNEAYAADLKPSANKLKKFYTHHVKPVYPWMKTLSSRVYQFAFMHLGEAFSRFFKGLAKYPKFKKKGRNDSFTLDNCGKVMQFSGTRLKIPFIGWVSTYEPLPEINTKRVTISRVADSWYISLAYEFEPEHTIKSRVYLGVDVGVKVLATCSDGTVFDNPRAYKKATKKLARLQRELSRKQKVSNNRNKARLKLAKAYQRVANIRKVSIHKLTSWLCKNHAVIGLEDLNVSGMLKNHKLAGAIADSALYEIRRQIEYKSSWYGSRVVFAL

SEQ ID NO: 31240 - protein, 431 aa, Methylobacterium sp.
MDSAGRDRSLPGHRSNPFAFVPHSFYPRPVLRVQAYRFVLRPDGAQERLMRRSCGARRYVFNRALALQKERYAAGDKHLSYADLCKHLTAWKADPATAWLKEVHSQALQQALKDLDRAYRNFFEGRAELPRFKRKGKDDAFRHPQKVELDQPNGRIRVPKLGWMRYRASRLVEGEIGQGTVSLRAGKWHVSVQTKREVEKPVHPSTTLVGIDVGVTRFATLSDGTVIEPANAFRKAEASLAKAQRAMARKIRFSSNWRKAKAKVQRVQARIARIRSDFLHKASTTVSKNHAVVCVEDLDVRAMTASAAGTVEEPGVNVRQKAGLNKAILDQGWGEFRRQVGYKQKWLGGWLLPVPAPNTSRTCPECGHVAAGNRPSQAVFWCVACGYAANADDVASINIARAGHARLAYGETSPVRASAQEPTEAGPALAA

SEQ ID NO: 31241 - protein, 552 aa, unknown
  TnpB Polypeptide
MEKHIEQSLTKNTEFITLSIKIKNDGQKEEIKNLLQTYNHFENILLDLIIQNYNLYIEGKDTNDFELLTSSQLIVNALHNDKSKYSEQLEYLKTKYENNKLWKELKETANRLNPYNLIYVIKRVKKRVETNSKFYIKNLERYEQNPILLEEVMSLLKPRDLSELKNYSIELDKYKSLSFERLEKENLIGINLSKGIVHINVNKKQMKKLKEIDRLYSVRVVYDNGNLYLQIIYLRELQIIHLKELSKTERDIVKYDETENNQIKYETGNETDNDRIKYAGIDMGETNIIAMFIDDKITPSLLVDGKPFRDYNEKFNEIIAKLKARMIKEAVEWDISKDETRCPIKYTEKGEKIGNFILFLCSERNKFFTDQFHKIAKNVVDYLDLHGVTDLFLSKNLAESKNDGECEAIKVVRQNSIQVVEHNFIQIPLAMLIKYIDQKAKEYGIRVHYIDESYTSQVSCISGDINRIQETPNLANAFNGKRRDELFHDTVINKKFHADINAAVNHIKVGTGKSFEWLKDKLFKLSKPVKVKVKVDIDIIDIIIDTIFDAFP

SEQ ID NO: 31242 - protein, 408 aa, unknown
  TnpB Polypeptide
MEEVLRLQAFRYELRPNGQQERNLRRFAGSRRFVFNKALALQKERYERGEKKLGYAALCKKLTGWRNGDETPWLADAPVHPLQQSLKDLERAYANFFQGRAAFPRFKKKGRNESFRYPDPLQFRLEQDNNRILLPKLGWVRYRNSRNVEGKPKNVTVSLSADRWFISIQTEREVATPVHPSTSEVGIDVGIVNFATLSDGGTVAPVNAMAKHRDCLAHYQRIMARRRKFSKNWNKAKARVQSVQREIADTRRDFLHKISTTISQNHAVVYVEDLQVKNMSASAAGTIEKPGRNVAAKSGLNRAILDQGWGEFRRQLEYKLEWRGGQLITVSPQYTSQTCPNCGTVCAESRKTQAVFRCVRCGYGSHADIVGAINILRAGQARRACQASGALMPPATGTHQGEALCASR

SEQ ID NO: 31243 - protein, 408 aa, unknown; identical to SEQ ID NO: 31242
  TnpB Polypeptide

SEQ ID NO: 31244 - protein, 488 aa, Acidobacterium sp.
MHMIVLAVHLDQLRLEVGADFGEHRAQPVDGVAIEHVATILRYKDQVNVHLENAMPAMPHIVMQRLQAFQYELMPTGEQQRQMRRFAGSCRFVFNKALALQKERYEQGEKKLGYAGLCKLLTEWRNSPDTAWLADAPIHPLQQTLKDLERAYSNFFAKRAGFPRFKKKGQSDGFRYPDPKQIKLEQHNNRILLPKLGWLRYRNSREALGRVKNVTVSHRCGKWFVSIQTAREVEQPVPQGGAVGIDMGIARFATLSDGTFVAPLNSFKRHETALRKEQQAMSRKVKFSNNWKKAKARVQKIHVRIANARRDFLHKTSTTISKNHAMVCIEDLRVRNMSKSAAGAAEKPGRNVRAKSGLNKSILDQGWFEFRRQLDYKLAWRGGWLIVLPPQNTSRTCPCCGHVSTDNRQTQARFECVECGFEENADVVAAINILSRGMKKLRDEGQDMAHACVGCESTARIACEVSDAVGSPAAGTHRSDSGAARCRA

SEQ ID NO: 31245 - protein, 458 aa, unknown
  TnpB Polypeptide
MTKQVRAYKYRLYPTIQQRQFLAEWFGATRFIYNNLLEQNDKEHKDWFKQQCDEWISSHGTMDGFKKPRYDKQISKYTFQYRLPQLVKDNEWLDVLPAHTKQFVTHNLYSAFKNFFKGQGKYPSFHSRRGRNSFSENTSTKIVGNKLFIPKHLKDGIEIRVPKHYRLQKGCKTNKYTVSCDGDPTNPKTRYFVSVQAVCDRKGRFCKNKHAVGLDMGLESRCVGSRPNFITDKSMLKAEDLHKVLNLRFDKENEEKIKKTQSILSRKVDKAKRYHKSLHSRSIERQYAKLRKLQTKQRNQRLDFLHKLSTDIVKNNGYIFVEDLSVKSMQERKNGSKNRMAKAIANASWFEFQRMLEYKSTWYGRLFFKVDARNTSKVCSCCGEKTLQKFTLGTRDWTCEKCGERHDRDVNASYNILARGLSKLASDGTADYTDIVCGEGFSKTKFFRSAYMSKKLCR

SEQ ID NO: 31246 - protein, 468 aa, unknown
  TnpB Polypeptide
MRSLDPSTILNSISPILSTRRTFIQSPADWILRCLHRGGNRQTESTLTCTRYRYVEMRKVVVLNIRELTAKKTEILSAMQSQYSRALECCIAFLPSAESAVELHSLTYSRIRNSSNLPSDVIEEARKDAWKFKSVLKRNNYSGVNVRNCSIRLNKRWFRYVQSNRGNPCFKITYSPRKTVVIPVATDNQFTRFHSFLSDGWVFDNVSLLKDGRIAVVLEKEFSKPAENKRFVVGADVGSSTLAAVSVLDTVSGKVCKQLYFGRDVAVRQARFAERRSKLQNLADTGSDRAKKSLKRLKNNQRNFVKTRSGQIAKEIVSLAKSYDASIAVEKLSIRATKNGKIGKDGRKKINRIPYNSFFQFLDSNSEQSSIFLHKIDAYHTSKWCPHCGAVGDGHSKGNYALFACRGCGMIVNSDRKASLAIAVKSILERANSHLNNPSFAQISKMRVPVNGLLRPDAVGYTTAVQHL

SEQ ID NO: 31247 - protein, 408 aa, unknown
  TnpB Polypeptide
MKRSNVFSLAPTRGQHDILEELAVNCAKLWNEVNYLHRQQYENYLQLDWNPQVYKKYVPLVGSATAQQVVRKNNEAWRGFLALKRMEKNGKLPSTIRRVKPPGYWKRNGRYLLRILFRCDSYRVRNNRVELPRHLSIPFKGELKWTGKQGRLEVAWDSLSKKWRAFQAIQVKPIITPLGSKTCYIDMGVRNLATVWIPEWRQPIAYHSGRLLADWWYWTNRIARHQQRLIGVNGRKKSKQLSRLYRIRKNRFRHAVATFARQLVKDLYRQGVSRIVIGELTGIRNGNSHGRQGNAMVHNYWSHKHVADRLRWTAEEYGMKVRTVSEAYTSQTCPRCGSRHSLRVLRGFRCLDCGLEAHRDAVGVLNIAARCGGYAVRPMVWPMLLRWDGCGWNRNNGMPTQQRIRVEA

SEQ ID NO: 31248 - protein, 403 aa, Mycobacterium sp.
MQMRYRYRIDPTSAQQAMLSRVFGCCRVVFDDALRVREDAHRAGVKLSDSEIQRRVITEAKTTEARAWLCEVPSVALVQSVNDSRRAWRNFFDSGSGKRKGRKVGRPRFKSRKDHRQSFRLTRNGFSLKANGRLYLAKVGEVAVRWSRELPSTPSSVTIIREPDGHFYASFVVDVPASPLPAVAREAGVDVGIARLATIATTDGGRSDIANPKHLGRRLRKLARLEREKSRRQKGSTNRDKSRRKIAVAHAKVARARRDYHHKQALALVRENQVIHLEDLNIVGMVKNRRLARAISDAGWGQFLRIIGEKADRYGRTVHTVSRWLASSKTCSGCGHRLAELPLQIRTWTCPACRVLHDRDHNAAKVILAAGRAERLNACGASVSPPSTREARGDEAGSTPTAA

SEQ ID NO: 31249 - protein, 664 aa, unknown
  TnpB Polypeptide
MKKKPKLKIKKNCDFMKTSKDNIKNIVRQNDILNIVNNLAINTNKIVIHAYHFLKLYVLHLYENNKDFPTINKGFIRNVFKVITIRKCGSGGYTDDKMPLLLKDLTKFYNEHYKNTRTENDILYYDKMSYILAYEAIDMIKNIENNIREHFICHVNKFINLTFGIKEQINKINKDTKDKDIRKQIKKDIYKEIQLVKNDLANVSNTELLSNEKYHQWIQEQKKYVIPNKTTFDKNNINYDLKSNTMDYLKPMIYIGIQLEKIYDSNEENTKQIRLFNILPLRTNIIPKNITLDTAGLVQNFSENNKIRCEDSKKYKENNKQYELWNRHFNLNKRVFKKHKYEFNYMIKTDGVSVSILFAKLNNQIKTLKKNEYIDYIENVKWTDELKKKKIVCADPGHSDLIYCGSKDEDNNLQTFRYTQNQRRLETRTKKYSKIIDKDAKNSYINSKSIKQIESDLSDYNSKTINYDKFLLYVKEKNKINDLLFTHYEKYMYRKFKLNRFINTQKSESKMIKNFGNKFGKPENTIFVIGDYDKGEYNMKGLEPIICKKFRKIFRDAGYETFLINEYHTSKLCNECHNELEKFMYHDNKKPKQKGNSCLVNGLLRCTTVKPQCEIIHNRDKNAVMNMIHIIEELKLTGKRPKEYTRETSFPLHGDCYENITIHK

SEQ ID NO: 31250 - protein, 642 aa, unknown
  TnpB Polypeptide
MEIKIQDTGQQTHRSVKVKLKTILRNYTEFYPIIYDVLVRTNQLAIYGNQFLRMFILEKYTDNMKIDRQFIYNILKTIGTQEQIKYSNDNKYATIFEYYNNNLKKLKFDKINFKNISFVLQYASIEIATCLENNLMCHFKDHLNKYINILFLKKEKAKIKESCSDSKECGNKIKELVKDIKNLKYDLYTNSTLVKYNGLHSKWLTDNRNKIVPIFEKNNIGYHLKKDPLSILKYSIYINKQIEQLGKRPYQIIPQRNNSVYRHITIDHAGIVDMLGNKLIDTMNIQKKKNYITLHPKECQQKVFDAVFNMNHKTFRQGKHIFNYQFKTDGVSAVLDFVNHRVDKYEKKEKKTNNDVKKVTKKDILKNPKNDEGLLELEKLKNDEIKEINTKYKLIGNDPGLKSLMTAVDEKGKVFQYNAVQRRHETYHKFAHKIKQKERKSNGIDKIEETLSNYSCRTMNIEKYLDFVHSKNEVNKKVFKFYDEPKFRNINFRVYCREKSSEATLLNNIEKYFSDDTKKPLLFMYGNFSRSSAMKYFFPTPGKWFRKLISSRFKTILVDEFKTSCICNITEQENIKWKYMVNGKLKECNKVLSSIKNTNPRGEIVSRIFVDRDINGAKNILKIGKSWLKNKTRPFVFCRNKL

SEQ ID NO: 31251 - protein, 369 aa, Bacterium sp.
MLTYRYKLYSSKRNRKIDAMLREACFVWNHALALQKRYYSLTGKYINLTRLQKHFSKRISRCRLHSQTVQEILERLDAAYQRFFLHLSSRPPKFKRAEQFRSIVYKQGGFKLNSNVLVLNSIKQHFQFSYSRTWEGTVKQIRVKRTPLGEYYLYIVTDGVANPRRKSHDGASVGMDFGLKTYLTLSDGRRIENPLFLKQGLNELRKASRRLSKCEKGSAHRRAARLALDRVYEDITNRRDDWQWKLAHELCRRYDTLCVEDLQLTGMSRLWGRKMADLAFGSFVQKLEHTASKYGCNVKKVDRFYPSSKTCGCCGYVYEHLDLHDRYWTCPQCGTALDRDVNAAMNIMRQGIVSSGSPRKTKVTLRKGR

SEQ ID NO: 31252 - protein, 379 aa, unknown
  TnpB Polypeptide
MKVVRGYKTELDPTSEQYVLLCQCAGVSRYAYNYGLARKEEAYKRGEKTPYAIHLQKELTARKHDDLLWLSDVSKWVVQNSLRDLDTAFENFYRKCKLKKQGQWTGKCGYPQFKSKHKGGGSFRLDCPVHVFDGSVQLPKLGTIRLKEHGYIPTWGVEVLSATVSEKAGKWFVSVQVEEEHADPTQATGTPIGVDVGLKTLATLSDGRTFDNPKSLRSRLKALKRASRHHSKKKKGSNNRRRAQKKLAKLHMRIANIRKDTLHKVTSQIVAKTKLPEERPSVIVLEDLNIKGMLKNRKLSRAMSDVGLGEFKRQLTYKAMQAGIEVKQVSRWFPSSKTCSSCGTVKEELALSERVYVCEDCGYVADRDYNAARVLAATA

SEQ ID NO: 31253 - protein, 330 aa, unknown
  TnpB Polypeptide
MARSVNFVWNYLNELSSRSIRERGVFLSAFDMHPYTKGAGKDLGLHSHTLQCVAKEYVTRRRQFRKSRLAWRRSHGARRSLGWVPFNTDAAKWKNDQVFHNGHYYGVWDSYGLAQYAFRAGNFSEDARGRWYFNVVVEVEVQPSSGQGAIGMDLGLKDVAATSDGEKLENARFYRDLENKLAVAQRAGNKQRTRSIHAKIRNRRKDALHKFSRRLVDQYGEIYVGDVSPTKLAKTRMAKSVHDAGWGLLKTMLDYKCDHAGIVFKVVDERNTTRTCSSCGALSGPQGVNGLRIREWTCRGCGVTHDRDVNSGRNILAAGHGRPVEGISGL

SEQ ID NO: 31254 - protein, 378 aa, Bacillus sp.
VGNVILAKKVRLKPTKEQEFIMFKSAGVSRWAYNWTLSRQQEKYKDDKGFIKDTELMRMITQMKNTDEFSWLKDVSAQIPKRAIKEACESYRKFFKGLSKKPRFKSKKRSSVSFYNRNDKLNISENMVTIERVGRMMFVGDIPKVEKYSNPRITYDGKYWYLSVGIDEEQPHIELKNTVIGIDVGIKDLAVCSNGLVFKNINKSSKVKKLEKRIKRIQRSVSRKYEANKQGNTYIKTKNITKDERRIKLLYRRLLNIRTNHIHQTTNAIVKTKPCMVVMEDLNISGMLKNKHLSKLIWEQKLYEFKRQIEYKCKKYGVDFVQVGRFFPSSKMCSTCGSVKRLLKLSERRYKCDCGLEIDRDMNASINLKKYGESLLSQ

SEQ ID NO: 31255 - protein, 391 aa, unknown
  TnpB Polypeptide
MLSKKIKLNLDYHQQLILNTLSNEHRLLYNYLLEKAKIKMDFKELNNHYKNFRTSNNLTINSKSSQNTCISLINNIKSFLTLKKTEKTSRFPYKFKSYKYFTTFILDYNKGCGGFKLNNRYLELNLNSCKNKLVINLPEYIYDISNINIKTITFSKKDNDYYLSLVYQETKKENELNKDNYLSIDLGYSNIITGVTKKENITVNNLKQNKLQDDIEILQSKKDKLIKGSRKFKKINKSFKKKRSKLVNRQKDFQHKLSKKVIGYCINNNIGSLIVGDIKVKSINKKENKKINGLSKSTGIGRFKTYLSYKGDNAGIETRFINEAYTSKINCLSGLIEFSSELKNRKFIYQDMVINRDINSAINILTKSGKCLTQDQKIGLLLNKISEIKVY

SEQ ID NO: 31256 - protein, 364 aa, unknown
  TnpB Polypeptide
VNKGVKFRLYPNSRQRNQISQTLGCSRLIYNRGLDMRNKAYENGGKANYARTSAMLTELKKQEDYSFLKDADSIALQQSLRDLDRAFKNFFDKKSRHPQFKSKHDYRQSYRTINQKNGIRIDKKYIKLPKLGYVRFKQTMEVGHINHAVIERTPTGKYFIVLNVDFEPEKLSAVDKSVGIDVGIKNFCHMSDGTVIDNPRHLEQMTRRLKREQRRLSRKKKGSSNRQKQRLRVARINERIADQRNDFLQKLSTKLIRESQTICIEDLNVKGMVRNHKLARCISSASWSKFFSMLDYKASWYGRTVTRVPTMYPSSQTCSCCGYKNPEVRNLAVRKWECPVCHTVHDRDLNASINILYKGLSMAA

SEQ ID NO: 31257 - protein, 394 aa, unknown
  TnpB Polypeptide
MINRAYKYRIYPNKEQQELLEKHFGCVRFVYNWGLSEKIEAYQKDKKRLSCFDLINKITELKKKKEFEWLNEVNSQSLQMSLRNLDNAFTRFFRKKKGFPNFKSKKRNINSFQIPQYLKLTDKLTLPKIPDIKIKQHRKLEGKIKTAAVSKTPTGKYYISILVEQNKKLPKKPKIKNKTTIGIDLGIKTFATFSDGKKIENPKYLKNSSQKLKKQQRRLSRKIKGSNSRKKQIYKVASLHEKIKNQRSDFLHKITYQLTHDNQVGSIAIEDLNVKGMVKNHCLAQAISDVGWREFRRQLEYKTEWYGKNLLVIGRFEASSKTCICGYVNQELTLADREWTCPKCKKTHDRDLLASQNIKRFALIPQGLGKSSTPLERTALVGSLKEEAIGSLAR

SEQ ID NO: 31258 - protein, 369 aa, Lactobacillus sp.
MKLWLLKLSWLSRKIQLGTRKYRIYPEGEEIAWIWQLFGANRFVWNQFVAAFEARYEANPQLKFPKIGILKSWLPLMRKEHEWLKRINSTSLQFTVERFSDAMWAFLTKKQVKQGKPRFKSRKYYSQTTTIKNVKYQTRAGAQAQIEVLSPHHLRIGKKNGIDVGLGKEWLVTSDGRHFNVPDTFELEKEMIRRQSHCDRSRTAIEKRVAKFNKNHKEAKIDKYDYYNWQNLRKTKSKYQLKIRNIRYDYLQKVTTELVKSYDVIAIEDLKVKNLLGNHKLAHNVANASWATFRRLLAYKCEWYGKKLIVVAPQYTSRICSACGRKNPQFAHMKTRDWLAVRNWTCPYCQTDHDRDENAAKNILARAAS

SEQ ID NO: 31259 - protein, 348 aa, unknown
  TnpB Polypeptide
MILAYKIRHTEDFTHELRKAKQIALYVASHQGKDIRLRHVQHFGLDGALAKQLIKVYRNNSQCKRIKNVNIVVPGTCISLNRRKRRIVIPALGYAFEYEFPNDFQRISLIEVGCRYVYVSVITGEERQQTATWLGVDLNTTGHVAVMASPLTGKVCKLGRSLPHLHEKYHNLLMRHEAFPKRHRSLKKRYNRTLANAAGDISNTIVAMAQSQHAGICLERLGGREKKKKNATPTRDNDSLNSWVFMHLAAMIEAKARLRGVPVAHIDPYNTSKLCCVCGHMGKRHQKAFECPVCGHIEHADVNAAFNIALRQDGMIRSHVDRGACEGRAGVPEACEGWTRLPAECAAS

SEQ ID NO: 31260 - protein, 391 aa, Streptomyces sp.
VKIVVQVRLLPTPNEALALTATLRAANAGANLASALSFEKGITSRNDLQKLVYGRLKGEFGLGAQTAVRTVKKVVDAYATLRANLRAGRLGPQGSKRRAKATSKPVTFREDAAQPFDDRILSWQHDTGTVSIWTVAGRLKGMRFIGSPDQIKTLAEFRKGETDLICRDGKWFLIAVCEVPAEPLNTAPVDWIGVDRGIVNLATTSDGTNYSGRRLSRYRRWQARKKAELQAKRTRSANRRLKRRAKREARHAAHINHKISKECVAVAKRTGRGVALEELRGIRDRVRPCRDQRAPLSSWPFHQLDRYIAYKAERVGVPVIWVDAAYTSQRCPRCGHTAKTNRPARDQFRCRRCGLAGPADIVAGVNVRNRARSAWVLVNGPASQGTCTPPL

SEQ ID NO: 31261 - protein, 368 aa, Nonomuraea sp.
MAQMVKRACKYRFHPTPGQASELARTFGCVRLVHNKALEKRSRAYALEGRRVSYVESSARLTEWKRSGEFDFLSEVSSVPLQQALRHLQAGFANFFAKRAKYPTFRSRKKSRLSAEYTRSAIRWRDGQLTLAKMDAPLAIVWSRPLPDGAEPSTVTVSKDAAARWFVSILVEEGISPLPPVEANVGIDAGITALATLSTGEKIFNPKYGCRDRRKLAKAQQAFARKEKGSNNRARARLKVARAYARITDRRRDHLHKVTTRLVRENQVIAVEDPTVRNMVKNRSLARAISGASWREMRSMLEYRTARYGRTVIAVDRWFPSSKLCSACGILRDKMPLNVRAWECTCGAVHDRDVNAAKNVLAAGLAES

SEQ ID NO: 31262 - protein, 254 aa, unknown
  TnpB Polypeptide
  misc_feature (6)..(6): Xaa can be any naturally occurring amino acid
MIVFEXQAYGNTAQFNAIDEAIRTMQFVRNKCLRLGMDGNAKSCFDLNKYTKVLAIEFDFADRLHSMAGQSATERTWAAISRFYDNCKKNIPGKKGFPKLQKDCRSVEYKTSGWNLCTDRKSITFTDKHGIGRLKLKGTRDLHFYQPNQIKRVRLVKRADGYYVQFCIKVDRTEVIEPSHQIIGLDVGLESFYTDSESNKVENPRFYRTGEKKLKRSQRLVSRKVKGSNNRPNARTELGKVHLKISRQPYCTMP

SEQ ID NO: 31263 - protein, 440 aa, Halorussus sp.
MVQTLQQNLRGLSADEYEVLRSLSHLSKNLYNKTLYEVRQHYFDNGEYLTYYDAYDQLKTNWNYEVLPSQVAQQTMKQVDRGFKSFFTLVEKKHENNYDADVSPPSYLPKDGFYTLEYPSQSFQVKDDHIRLGIPRAYRDEFDCDLTEIQIQFTYDEVRDANIKRVQILPKADAQYFEYRVLYEQDVEEVETIEGSWLGIDLGVDNLATCVDHRGHSFIVDGRHLKSQNRWFNKRLAHYQSIKDKQGIEGTTRRIERLHQKRRYAVNDYLNKTVRTITDYCIENCIETVYVGDGKGWKQNVNLGDRTNQNFVQIPFDTLKQKLKHKLNARGIEFELVPEAHTSKCSFYDEETVEHHDDYVGERVERGLFEASDKTRYNADVNGAVNMARKATGKPNSDLFESEEGVERAVDAPRRISLSDMEEPSTEAPASRSERVSATE

SEQ ID NO: 31264 - protein, 566 aa, Halorussus sp.
LLAREYEAFQTEVHGGDADLYSATKQQASKVQRQKDQNPDTEQPVVLRNDVFDVAYDEDTVLSSWWVRVPVYDPERGRGNSTWCPAHIPRKDDQLVREGDIRDSELVRRDGDWYVDLVVKRSVTVQDEYADVLAIDMGARWVATTAFLSDRKTTFYGEEVRRIREHYKQLRKSIGKAKPRQGKQVVERIGDAEARKVDDRLHKISRAIVAGVGLARPETQVLVPRDDEPANLSVSVGSTPSGEPHGFSPERMSVDEVLELGKDLVVFVAVALALGLDLDVFLGLGLVLLVFLLDDFDFEDGQRDVFETLADLLPGDARGVFLALDVEHRHLQLQRDETLVGGDEGGVEFLPAMGAGPLAHVDFDVVEVRVEQLAGLRDGDPNGLVRGLHVVDRDCGFHDNSAVHSHVEVVAPTVSSLALKRKLSTFGGRRVPRCTPVRYLSPTSREVSTCRRRSKAARPSSGGATTTAPTRRPTPTAGRRGTTPSSASPPEADAPAETPTWSASASATACWSGRPPPTPTRFSPSDCASTTTSRPSSPSCQTTNSSRRRPTPTAGFESWTTPSSPV

SEQ ID NO: 31265 - protein, 407 aa, Halorussus sp.
VSDDLDSLGFSASKLWNVGRWTISRVWDEIGYIPDHDELTAYLKSHERYDDLHSQSSQRVLQELAEAFTGWYANRRNGDTNANPPGYRKHGDEHPRSTVTFKQMSFKLDTQYNRVRLSKGSNLKNYWSDFILCEYRTRPDVDLSTVENVQQVRAVWTGDEWELHFVCKVEIEVSESPGEKTVGIDLGISNFAALAYEDGHAELYPLNCLKQDDYYFSKRLARCDDSDSEQATRLNHKKSARRTHYFHTLSKHIVDRCVEEGVGTIVVGDLSGIREDEENGESKNWGKHGNLNLHSWAFDRFTNLLTYKAEMEGIEVEQVSERDTSKSCSYCGQKCDANRIERGLYVCDSCGTVANADVNGAENIRQKVSPSLACDGGDRSNGWLAQPSTYLFDKETGAVAPQEHVTS

SEQ ID NO: 31266 - protein, 385 aa, unknown
  TnpB Polypeptide
MFKRYQFRIYPTKSQEKHLRSVLLSCCNLYNYFLKQRIKTYKETGKGTTKFKQQKELTQLKKKSNNLKSINAQVLQEVTVRLDKAYQNFFRRVKEGLEKPGFPRFRNVKRYNSLTYPQNNGSWKSAGTNKIKLSGLGIIKIINSRSLQGLPKTCTVKRNKLGQWFVSISCVDVPKNPLPKTNKKVGIDLGITHYMTLSNDTKIEKENFLKKEENHLKNLQRKFSKEKKGTLLRRKFGKWICKIHNDVGNKKKDFFFKTANQLVKNYDVIYMEDLNIKNMLKKEKKDGKRSLRRNIQIASWNQFQSILSYKAEEADKRLVLIDPRNTSKECSSCGNVKISLPLKTRIYFCTKCGLKLDRDFNASLNIKRLGSQSSSVLMNAPNAPH

SEQ ID NO: 31267 - protein, 362 aa, unknown
  TnpB Polypeptide
MKRTLKFSLGLANTNKIEALKELSNEYKKAVNYFLQILSSENKHILRESEVKSFNSSLSYRYKQCAKRQAMKIWKSWRRNKKKGQIPEFDGALILDHRFIKVEKAKNSSFDYWVRIAILKKGYPILIPIKSYDYANNYFDNWKLVNGGRLSREDDNWFLLLTFEKETPPKKKEGKIIGIDIGIKKLMATSEKEFYGKDIERLMDKIQKKQQGSKAFKRAIKERDYYVNKTAKALSLNNLKAIVMENIKNIKRNTKKERRLRKEFRSKFQKWTYPLLFSRINQLCEINGVHFFTIDPAWTSQTCNKCGFVHELNRCGEIFLCRNCGYTQDADYNASKNILKTYLAQQSMVAGNIKANNGIFVH

SEQ ID NO: 31268 - protein, 306 aa, Streptomyces sp.
  misc_feature (306)..(306): Xaa can be any naturally occurring amino acid
LNIVRVHRRWGMANLPKIGRVRFRWTKDLPVGKQAGKENRITGARLVKDTLGWHIAFRVQTLEKAPKTHQGPEVGIDVGITVPLALSDGETYEHGQWLTSREQARLLGLEQRAAQRKKHRKPGERTSRRLHHTYDQIAGLRAKAKRRALDWQHKTTTDIARTYSVAVVEALQITSMVKSAKGTIEEPGKNVAQKSGLNRSISGQAWGRTVTMLTYKLARQGGTLAKVPAPGTSRRCSACGLTTPGSRETQALFVCKNSDCGWSGNADHNAARNVLHLYRMGHALIPAAGRAVAGAHRASSPPPKGX

SEQ ID NO: 31269 - protein, 291 aa, unknown
  TnpB Polypeptide
LNFRSVERTRPNFPVRCAISANGKRPSRIYLKDNGKLQIPSIGDVRFGSVRDGFDLSGAKQNAKISFDGKYWYLAYSEDVEAKPLDLPEYTDGVGVDLGVTVLATVSDGTTVPNIKTFRRMRILNKRLKRLQRKVSRKYHINQCNRHNKTKNIIKLERQMKLIYRSIRNIRINHIRKFVSELVKKQPRYIAIEDLNVIGMMKNKYLVKDIVNCSFYTIRKQIIRKATERHIPVRLVDRFYPSSKTCSNCGSYKADLTFGQRVFNCNHCHVRIDRDFNASLNIAKTDQYILA

SEQ ID NO: 31270 - protein, 287 aa, unknown
  TnpB Polypeptide
VLVKFDLGITPFSIASRKLLVAALICPVVDKEVSNRVVNFATLSKISRAIVGEMKNVTVSRKCGKWYISVQTEFEQKTPQPKGGEIGIDMGIVRFATLSNGEHFEPINAFKNLKGKLVKLQKQFKHKTKFSKNWQKLKAKIAKLHHKISNIRKNYLHQISSQISQSHAIVYVEDLQVTNMSKSAKGDVEQHGKNVKQKSGLNRMILDQSWFEFRQQLDYKLLWNGGHLVAVPPQNTSRTCPCCGYTAKENRQTQADFECVECGYTENADVAGAINILRRGHEILAAQ

SEQ ID NO: 31271 - protein, 390 aa, unknown
  TnpB Polypeptide
MVRTYKFRLYPTKPQEERLLWTLEQCCFTYNKLLEGLQQQDRHNPNELQRSLLALKEQYPMLKDVYSKVLQHENYRLFSNLRSLAQRKKDGKKAGRLRFKNGRSFKTFTYNQSGFKIIKNELRYDKLHLAKMDDIPFIMHRNIDGVIKQVTIKHYPSGKWFALIAAETKKELVKTQNTKSVGIDLGLMNYVADSDGHRVGHPKRFERSLLKLKKAQRKLSRKKKGSKNRRKQKIKAARVHEKIVSQRNDFLHKLSRCYVNNYGLIAVEDLNIHDLVKLSYNARNMMDASWSKFVQMLCFKAESAGCTVVKVEPRGTTQQCSQCGTIVPKKLWDRMHSCACGFQADRDYNAALNILKRALGQELPEVTPVEIEPLPSSKASLVVEAGRSGL

SEQ ID NO: 31272 - protein, 413 aa, Deltaproteobacteria sp.
MIKTYKFRLRPTKKQIEKLDWTLETCRTLYNSCLVDRNRHYKETCKGLSRIDQQRILVQDKKNITYLTDIHSQVLQDVLFRVEKAYKNFFRRLKDKSGKAGFPRFKLVGRYDSITYTQSGFEIIDGKLILSKIGTVKLKQNRSIKGIVKTCNIKKENNKWYVCLSVKYTKYTVYNSIVKEKIIINNHIGVDMGIKSLAVLSNGKVISNPKYLAKSEDKLIKKQKQLSKKKKGSNNRKKEVKKVAKFHKRIVNQRKDFQHKESRKIVDNYDAIGAEDLKIKNVVKNHHLAKSIHDSGWGQFLSYLKYKAEEAGKLFMKVNPRNTSKTCYKCGYIYKEMTLDIREWICPVCHTMHDRDVNAANIIDKRMLEKIRLEWPKYTLAETGSMDDIVDSNIYALKSIPSLKQEASSVRAR

SEQ ID NO: 31273 - protein, 381 aa, unknown
  TnpB Polypeptide
MPTFQKSVRVRLYPNGWQEVLINKTCGCCRFVYNQTLTDCKQTYEQTQHFPSKNERIKNLVPLKEENEFLKEVDSTALQQSVRDLNSGLDNFFKNRNHFGFPRFKSKHGLKQSYRTPYNNGAADVLDNKHIKLPKLGIVKTKYFNMPEVYKIFNITVEKTSTGKYYASICIETEIQPLPKTGKQVGFDLGLIDLLIGSDGTRVERPKFAYVYKDKLAREQRKLSKMRTKLERANLNLDECKNYQKQKRKVAKLHEHIANCSKDFNHKLSRKLVNGYDFIAMENLNVRGLIKNHNLAYSIADVRWSQLLNFIRYKCVWYGKNFIQVDRFYASSKICSCCGTYHKDIVNSLKVREWVCPDCGTHHDRDVNAARNILNQALSVA

SEQ ID NO: 31274 - protein, 325 aa, unknown
  TnpB Polypeptide
MAKDYGMFSQTQQEVAHRIHASVMKVLTMRKLGKNCGFPRFKSLELMKSMHYPQNGVGFRLDDRLYVNPFGKIRIKKHREINGSIKTLTLKREPSGKWFAMFCVDELIRSQKETRGGRIGIDLGLMNFATLSNGEVIGNPRHIRKYEDKLAFAQRDLSKKKKWSKNRQRARLKVAGIYEKLANTRRDFLHKLSSELVQNHSIIALEKLASKEMAQQNFGKSINDAGWSTFANMVAYKAESAGCKVVFVDPKDTTKECSVCGIKTEMALSERTHKCAVCGFSIDRDINAARVILKRATVGMTGSNASGDEGKFSSLKEETTPTKVW

SEQ ID NO: 31275 - protein, 325 aa, unknown; identical to SEQ ID NO: 31274
  TnpB Polypeptide

SEQ ID NO: 31276 - protein, 415 aa, Deltaproteobacteria sp.
MLKTYKYRLYPTKKQTEKLDWTLETCRILYNSCLVDRNRHYEETGKGLSRIDQQKILVKDKKNIEYLKNIHSQVLQDVLFRVEKAYQNFFRRLRAKNGTTAGGSGAHAGYPRFKNQGRYVSITYTQSGFAIIDNKLKLSKIGHIRLKLHRNIDGTIKTCNIKKEIDRWYICLSVEYDIKVVKNTIITKHVGIDAGIKSFAVLSNGKTIDNPKHLRKSEEKLIKIQKRLSNKKKGSNNRKKAKVILAKIHKKISNQRNDFQHKESRKIINTYNAIGVEDLQIKNMVKNHKLSKSISDAGWGQFLSYIKYKAEEAGKLFMKVNPRNTSKECHICGYIYKDMTLSVRNWTCPICNTEHDRDVNAACNVDKIMLEKIRQELPEYTLAETGSMDDIVDSNIYALKSIPSLKQEASSVRAR

SEQ ID NO: 31277 - protein, 398 aa, unknown
  TnpB Polypeptide
MKKGLEVRLYPSKEQRVLIDRTLGCSRFVYNRVLALKKELWEDYKLSFNPNLKSFKEEWKFLTKVPSQALANSYVDCMTAYNNWFNSLKGKSKAKQSYPKFHKKGQKDSFRIAATKTSKGYDVRIEDYEHIKVPKLGAVKFRNYNGIDWSKVHIYNITIKKTPTNKYFASLCCELPEPEYVEPKFNACGFDLGIKDFAIFDYGEVIENPKYYRKTEYKIKKTQRVLSKCVKFSKNYKKVKLKLAKLHEKIRNQKKNFQHKWSRKIVNENQVIVSEDLNVKGMLKNHKLAKSIQDASFSSFFNMIAYKSNEQHRQYVKIGTFYPSSKLCHCCGFKYKGLKLEERFWTCPQCGTYLDRDENAAINILNEGLRILSRNTVGSTGNDKSFKPVDTDLSTNLE

SEQ ID NO: 31278 - protein, 555 aa, unknown
  TnpB Polypeptide
MEAVRSEDTKAKIKASMAETHARRKTQICRVFELKVSIRHNPKETFQKLSQCFKEAKWVINDMLSLSKDNPDNSIFDYKYTEHKDVVHYDKGKNPITDTVTLPSVLHRATVAQKKTDIVNLAKAKAKGMKVGALKFKSEVNCIPIITGFTRILDASHITIPGFRKLKVNGLHQIEFEEYEIADAKLIRKASGYYVKLTTMLPKEQRNRTRKNVGLDFGIKNTITTSDNKTYDCKVQETEYLKYLSKMLNRHKKEKDSKRRWNCRKQLAREHEHVANIRKDICNKIYHDLVSNYDVIYIQDEQIKNWSQTWFGKQVQHSCMGALKQKIKMLVKTDRAFVLSKWLPTTKMCPVCGAVNTIGLDERTYHCDCGYTKPRDWHSACNVLLFGTTKRAECVEHASAEVAASMPPGFTGLAQVAPLKRKLEAHSLKAVNSSHKEGIMTYEEAKQTALDAMTDYPDQIKVTNYVGGKEEFTAIAYSKLNDEEQRIRANGGFRWDMIINSTTIEYRQYYEDIRMKLVKAAPKEVSIKSVERGELYEFLGQQVEYANLVRDKRKR

SEQ ID NO: 31279 - protein, 425 aa, Leptospirillum sp.
MRRLSCFFGYVSEDVWESKTSAEHDAIFLTKKAPYILSIHGGDIRRALASSMFYAYNHLMRKTFKYRLYPTRKQETLLHQQLEEGRWLYNHFLEHRKNAWEWYGVSLSHYGQQNTLPDLKKERPSLDKVYSQTLQNVAVRVDLAFKAFFRRVKHGENPGYPRFKGKGQYSSITYPQWNSGCDLTGKGLRLSKIGTVPIVLHRPVEGKIKTCTVLWSSTGKWWVTFSCENVQALVLPDNPLPVGIDVGVKTFATLSDGTAIGNPKFLKRSAKRIAQAQRKLDLQKKGSSERARIKKVVAKVHERVAFKRTDFAHQESMKIVNSSGRIFVEDITVNEMNSHRCLNRSIRDVAWSQFFSFLSYKAESAGREFRKVNPAYTSQTCSSCGHRQKMPLSDRTYSCPCCGMEKDRDHNASLNILRLGLESRG

SEQ ID NO: 31280 - protein, 446 aa, Crocosphaera sp.
MTLTLNYSYRIYPDSKQEAMLDQWLEICRRSYNYALRELKDWIASRKCPVDRCSLESEYIMSAEYPFPSYHPQQNQLPKAKKVFPELAKVSSQVLQTNVRRLHDAWDFFRNRGFGFPRFKKYGQMKSLLFPQFRGNPLTGASPVLGVSPRRNWRGWHIKRPKVGKVQINLHRPIPNGFVIKQVRVIKKAKGWFAVISIQSDITLPKIETPFGHPLGLDVGLNSYLATSDSYLEKGRKFFKTEHRRLKVLQRRLSRKQKLSNNYEKARKKVEKQHNHIAFKRKDYQFKLAHKVCDMGDSIFMEDIDFRTMAKGFLGKHTLDAGFGQFRDILKYVCKVRGKYFGLVDHRGTSQTCPNCRAEVRKSLTDRFHVCQECGYGVDYFVDRDVASAQEICNRGIETTTLGLRGKETVCQVEVSGVMSLDNWRRGIPLWAEISRRESGSPRYTA

SEQ ID NO: 31281 - protein, 368 aa, Nonomuraea sp.
MAQIVKRAYKYRFHPTPGQAEELARTFGCVRLVYNKALQERTRAYALEGRRVSYVESSARLTQWKKTEELAFLNEVSSVPLQQALRHLQAGFANFFAKRAKYPTFKSRKKSRASAEYTRSAFKWRDGTLTLAKMDEPLAIVWSRPLPEGAEPSTVTVSRDSAGRWFVSILVEEKIRPLAPVERNVGLDAGITALATLSTGEKITNPGHERRDRRKLAKAHKAYARTEPGSKNRDKARIRIARVYARITDCRRDHLHKLSTRLVRENQVIAVEDLTVRNMVKNHSLARAISDASWRELRSMLEYKCAWYGRTLVAVDRWFPSSKLCSECGTLQEKMPLNVRTWACSCGAVHDRDMNAAKNVLAAGLAES

SEQ ID NO: 31282 - protein, 406 aa, Ammonifex sp.
MLAANRIWNSCVWHSRETFRQENRWPTEAELKAKFKAFAAWKELHSQSAQAVAEEYFEAVSAYRKHRENGHLEMSPPGFKPKNHLRTVTWKRQGFDVEDDTLVLKLSRKKEPIKVALPGGWNVVTLPDGTEVKGVPVEVKVKAVVRRRKVENLVLHVTLDLGVVSVNQTGAVSAYDYNSAMFARAVSSGRLDLFVCRELLSLVQYRNKTIAEFQEKVSRLKEGSRRWRRCLSAKVRVLKRLDHRIRQMEHSLTKLFAELDGAEGVAFAVVGDLTDLRRFARTWMKGKKATQKINQMAYDRLRQEQRYKNLMWGIETDAWTERNTSSTCCLCGTRDPAWRRHRGLWVCGRCGLVLQADLNGAVNLLKQYLFGSCTGRVELPFAPRGVRVWRWDGRHNRFVQVSSRAA

SEQ ID NO: 31283 - protein, 402 aa, Actinomadura sp.
MAQQVKRAFKYRFYPTDEQAAELSRTFGCVRLVYNKALEERTRAWYGEQRRVSYVQSSAALTEWKKTEELAFLAEVSSVPLQQALRHLQTAFGNFFARRAKYPRFKSRKKSRLSAEYTRSAFKWRDGKLTLAKMTEPLDIRWSRPLPGGAEPTTATVSRDSAGRWFVSLLCEDGIAPAPATTNAVGIDAGLTSLVTLSTGEKITNPKHERRDRARLTRAQRALSRKEKGSANREKARRKAARTHARITDRRRDFLHKLTTRLVRENQTVVIEDLAVRNMVKNHSLARAISDASWTELRSMLEYKCAWYGRELVVIDRFFPSSKLCGACGTVAAKMPLHVREWTCDCGAVHDRDVNAARNILAAGLAASACGDGVRPQRESSRTGRSSMKQETQRATAGIPRL

SEQ ID NO: 31284 - protein, 366 aa, unknown
  TnpB Polypeptide
LWRNRNHLDETGMTEQQWRARWDGARMFLTADGESGKAGGNETIRVDEAGRMRIKVPAALAAQYGTHLDVGASVSFGHRGREWAARMAARRAVRYDIIFDPANGRWYLDASWKPDEVTAPRSIDELRTGPVLGVDLNADHLACAVLDGSGNPVGDPITIAVETAGLPATRRDGRVRAAITALLDLAQQRNCTAVVIEHLDFADARAVGRDTLGRGKRGKRFRRTVAGIPTARFRTRLTSMAARCGIAVIGVDAAYTSKWGAQHWAKPLQQQTSDLVTGHHGAATAIGRRGLGLPIRRRPAGPRNGQRTVAGTPPVRPDRQPCHSGRHGSSGPPMRTRCAPVHRRTPAASGQHRSGRNRTALTAAHS

SEQ ID NO: 31285 - protein, 418 aa, unknown
  TnpB Polypeptide
MLKALKIRLYPNKTQEVQINKLLGCYRFVYNKCLDKKINSYKESGITENRTTLGYYIHQDLLKDDEFIWLREQNSKVLKQSVIDMLSAYEHFFKQHGGFPKFKSKHDNKQSCRFEIGAISKRNIYTDYKISLANIRNMKFKCSDKYAEYLDKNKEKVKSATLSKLPCGQYYLSILVDGDLLKQAQQSQNTVGIDLGIKDFVITSNGEVFENQHFKKSLSNRLKKLQRQLSRKQKGSKNRNKVRIKLAKLNKRINDKKLNYLHEVSNALINENQVICMEDLNVKGMVKNHNLAESISEMNFGEFRRMLEYKANWYGRIIVKVDRFYPSSKTCNHCGYIKKDLKLSDRQWTCPICGELIDRDYNAACNIKNEGIRILVGGSTAELTLVENPTMDDRLGNKTLKSSDSLKQENHNEQFVQV

SEQ ID NO: 31286 - protein, 383 aa, unknown
  TnpB Polypeptide
MPLSRVTKCVWQHHNRKTELQPVFDYFRSIANEAIRTGIEKNITSQFGLHYELYYRLRSEFYSQYIYGALRCAASKLKFYRKMKRKNPQIKIPHISKNHLILEGGAYKISDGQIRIPIRPRQHCRIKLNHYVLEQIRCAKIGSITITEDKLIISYSKQITGQNPVSFVAIDRNLDNATTYDTQDKFTIYDLQKANQIKQTYRQLKSKFKRNDVRIRERIFAKYGKKERNRVHHILHCTSKQIVDQNMGIILEDIKGIRKLYRRGNGQGSKFRARMNSWSFYELQRQIEYKARWLGLPVKYVKASGTSSKCAACGSKMVPEEHRMLSCPHCNIVVDRDINAARNILARGTRVVPVGIAGEAMVEESKKNILKVDAVQLPYQLTR

SEQ ID NO: 31287 - protein, 587 aa, Chloroflexi sp.
MRTGHTHQPLTYDVRLLDEAQADALRLLDASRSVVNIALTLLWPHLDDFQADRVGPAWKQVGKYMGSPQYHGDRQWRCESEVVGRILRAQAERKQAFDLVVPILTDGFIRPKTEQRPAGKKRVAIKEAIATLQKSLEEEETSFVALQNVVEQCCNFFFAHDRFPSTYEELQPLPLLKVGMLTYAGDDGSEKGQTYRLVLDLDGGVARFRFRYPDEAGVWHWRKVDTIIPLPEIVKERCACGKLMAPTLREEHRADVERFAVLDFIVEVEKADLPTWESVERVLGVDWGVHTLLTATAVDEHNKQVGRPIFLNTGGFDGRQARTRRQIDELKKKVATYEHERDALPPDHSKRLWFNQKLALLRREIDRCWRKYERRNRALAHLASNVLLLLCQVHGCSLLSMESLKTLKSTGRGKGIRGRWRNYRNNSTIRGEIWRLLRYKCHLIGLRFHTEQPRGTSHTCPRCGHPAKTYREPSDRKEAVKWGWWMYCDDCHYHGDRDYCASVNIARLGVAYLIQMKNTSKARSCSIADPLVKPVSYTGTGAVLLLPPTGNYPARTIRGKICYYPGWLGSAFLQSSQEKSVFLRLCG

SEQ ID NO: 31288 - protein, 605 aa, unknown
  TnpB Polypeptide
MQLSEQLHIPEQYHDACDRLHHLVQKHSRRLLSEQYWSEHHLQNIQHHVGHAYTYIREDDYDAFKDTDECLYSRFERCVYQRVTSILNSQTEKYNVFQFVLTTLRDTVHDEQKIRSVAWALLRHELSNYDEYIEWSILEIVVKQLNNYYDTHGQFPDTYTELITTPKPNGTLPYAPDKGDYTIHHVKIENNKVVFTMNAPDSLSPDGHDDWSEHTIKFPIHTRLETMLDHGEIKASTLHQSEHGYTLDLPVKIDNLETDSVDNRVLAIDLGVKKQATATVVEANNNDDTANTDDEYTQIEAPMFFDHPDKQKLFRLKNDAEGINNKLTTLRENGEAHTEQFEQLLAEYKYTRRKERRLRDQIQHDLANQLVWIALQYDCETIVFESLGQLTSADASGQTAWSISSWARGKLFNNVEYKCDLVGLDTDTVNPWGTSRHCPRCGEHGETLKAPDERDECRHGGHFHCSSCGYECDRDVVGSLNVARVFFDDYEQIETANPVAYMETGNHASFLSLVDSSARSTGVQSTTRTGTARSRQTLVSQHCSSPLNSHHENTKWCGTQGGLPINHSSNTGLQWPSSSILRHALARATGQSRILPNTTENQNGS

SEQ ID NO: 31289 - protein, 372 aa, unknown
  TnpB Polypeptide
VSEKAYKYRIYPNKKQQELIQKTFGCTRFVYNYYLNKRKEAYENSKTMFTFNMCSKDLTKLKKELEWLREPDKDSLQKTLKDLDMAYQKFFKEHTGYPKFKSKKNRYKSYRTSYTKTSAGGNIMFINKRIKLPKLGLVKTRDKQVPQGRILNATISQEPNGHYYCSLCCTDVKHEQLPKTNQNVGIDLGLVDFAIMSDGTKIENPQFYEKSEQKLVKLQRELSRKTIGSNRWNKARIKVTNLQKHISNQRKDFLQKLTTNIVKTYDVISVENLDVKSMKETDSTIRNKRVGDVSWSEFRRMLTYKSQWYGKQLSIVDRYYPSSQICHCCGYQDGKKLEDIREWICPNCNSELDRDINAAINILNEGLRIISI

SEQ ID NO: 31290 - protein, 384 aa, Tepidibacter sp.
MLDNFCFMSKNLYNFANYQIRQQFCKNGEFINYTKLDKLLKQDGMDYDYRNMPVAQSAQQCLRLLEKNWKSFFESIKKWNKNKDKYTGRPKLPKYLKKNGRNILILTNNNCKIKDGVIKFPKSFNGFTLKTKLNKLQQVRILPRNKHFIIEVVYRIDIKEPKVDNRRYIGIDIGIDNLATICNNVGAKPIIVDGKSLKSINQYYNKKLSHFKKVAKRMNGIDLTNRMNKLTIKRNNKVIDYLHKASKMVIDYTLSLNCNTIVIGTNKDWKRESKLSKKVNQSFVGIPHQRFIEMIQYKAENVGINVILTEESYTSGTSFLDNELPIKENYNKKRRIKRGLFKSNKGILINADLNGAYQIVKKVFPKAFAEGIEGVGLHPVRVDV

SEQ ID NO: 31291 - protein, 601 aa, Microvirga sp.
MAYGKGTRTNDDKRMIPLGTMAVDARWLHLRSEWIAAANLIAERIRPTVLEDLPSGKALDAAMLAAQAELKGRLNSVWAEKARITAKSAVIERHKRARANLFGRFRHIDTVGDRPCADGTRRLVNLPEEWSQRLSDTDVAALKTLAEALDFQGTMAFLQKVQDGRANIPSLQAEALRALVATVEQKFRHPSWQESDDTVVQLHLDYRCVPASDAGTNKTTWRALTQRLTEAVPAVLVEGKPARVPVLVAAPVARQAPLVVRAVLRREGLRRLLGDKDPTAFAIGSLCLEISKTRVAIKGVVSKTPRVKPLAEVTHLVGRDFGYRNTVALAVVAKDGTIDPGLLTEARTWGKQRAKQHLSDNIHAGAPVAATVLDGADFLKAIAGHCERIDALRSEIDRTYNRIQALKANINRLLGHAADALVDLEQQTSDAKLAAWLKRLRRLLAYVGRLKEQRRRAYRAIEGIKKSWFGYVSSQELELARTWNAAVVREDLTVVAEEKESPTYKGRTFNKMIAHGAKGQYIRRASDKLRWNGIPEVVVPSFWTSCTDVRFGVVDTRQRRGAVFTARADGACWDADLHAAQTLALWPVLRPKSDHPVALAA

SEQ ID NO: 31292 - protein, 485 aa, Dactylosporangium sp.
VRPALRSPRCREPCPPRGGGRDWRFGVKTMQAYRFALDLTAGQECDVLAHAGAARVAHNWALAKVKAIMDQRAAERSYGLPDELLTPSLSWSLAGLRKAWNAAKPDVAPWWAEVSKEAFNTGLDALARGLKNWADSRKGTRAGRPVGFPRFKSRRRTTPSVRFTTGAIRVEPDRMHVVLPRLGRLKLHESARKLARRLDNGTARIMSATVRRDGGRWHVSFTVEVERAERVPARPDTVVGVDVGIKHLAVLSTAELVDNPRHLVAAQQRMRALGRALSRKIGPDRRTGRRASKRWQRAAARIGRAHARVANLRRDGLHKLTTRLATTYGTVVVEDLNVTGMLANRRLARHIADAGFAEIRRQLAYKTGWNGGRLLTADRWYPSSKTCSGCGAVKTKLALHERQFVCEVCGLVLDRDRNAALNLAALAAEFDTAGSGPAAARGADRKTRVRGQVAEKREPGTTPVGQTGTVLPQGRTIDRVLTKAH

SEQ ID NO: 31293 - protein, 414 aa, unknown
  TnpB Polypeptide
MIVYKAFKTELDLTPAQEELCRKHAGARRFVYNWMLAQCIFARENKEKKPSAYDLVKRFRTEVKPNLEWYSEISSRVEEGAARDLDQAYKHFFRRIKSGKKGKSSGFPKFQKKRDGLGSFATFGTIKITGFTVQIGKIGVLRVKERGYIPMDSRVTSASVSTRGGRWFISCLCEVEVQNDREQSGIIGIDLGIKSALVTSDGKTFDAPKPLKRYARKLRKLGKSLSRKTIGSNRRKTAVKKLAKLHYKISNIRNDFIHKATTELAKTKRVIVIENLNVSGMVKNHHLARAISDIGFYEIRRQLEYKCGWYGSELIIADRFYPSSKLCHVCGYKNVDLKLSDRFWMCPQCGTVLDRDVNAAMNLAALAPKIEDSLNGRGDGSSAHDSNIVAQPVCETSTYTHIGSHDEQTSVYDG

SEQ ID NO: 31294 - protein, 356 aa, Natronomonas sp.
MKNQQCWKDLNAQSSQAIVEELAGAFQSWFEQNDPDANPPGYRKDGDERPRSTVTFKEDGFKLDTKHQQVRLSKGKNLKDDWSDFILCEYDTGPDTDLTDVEDVQQVRTVWNGDQWELHFVCKVSIDAADSSGEKTAGVDLGICNTAAVSVGDETLLYPGNALKEDARYFRQKEYDTEGENGPSNHAEWARRKKSQRQAHFLHALSKDIVEQCAERSVVTIAVGHPKDIREDEDWGRHGNKRLHDWAFETLLSHIEYKAEQHGIDVERVDEAGLKTSKTCCVCGMKADSNRVERGLYVCENCDLVANSDLNAAENMRKTVTPSPSQDRSNGCLAQPWVRLFDKQTGSVAPQEQVRP

SEQ ID NO: 31295 - protein, 393 aa, unknown
  TnpB Polypeptide
MKQKKAFKYRFYPSDEQKRILAHTFGCCRYVYNWALRQRTDAYYQRGERLYYEDTAQRLVLLKKQEETVWLNEVSSVPLQQALRHLDKAFRNFFEGRADYPTFKKKRNQQSATYASNAFTWDGHHLTLAKMDAPLDIVWHRPLPDGCKPSSVTITKDEAERSFVSILVEEDIKPLEVTPKMVGLDLGLKSMVITSDGHTSGNPKFFSQDEKKLAKAQRRHAHKKKGSKNRNTARLKVARIHKKIADRRRDYQHQLSTRIIRENQVVCVESLHVKNMVQNHCLAKAISDVGWSEFVRQLEYKATWYGRTLVKIDKWYPSSKRCFDCGHILDSLPLDVRRWTCPECGVVHDRDINAAKNILAAGLAVAACGEAVRPGAVKTKSGKSQRSRKASQR

SEQ ID NO: 31296 - protein, 345 aa, Microcoleus sp.
MIVLEFKLKGKLQQYRIVDEMIRTAQFVRNKALRYWIDNQGVKLSDLYKQCAIMAKEFEWARKLNSMARQASAERAIFAIQRFFSNGKAKNPGKKGYPQFKKHTHSVEYKTSGWALSTDKKCLTFTDGFAAGTFRLLGSRDLHFYAPKEIKRVRVIRRADGYYAQFCINVERTAEIVPTGKTIGIDVGLNHFLTDSTGATVPNPRHLPKSEKALKRLQKRVSRKKKGSSNRKKAINKLGRKHLKVSRQRKEFAIKTALCVVKSNDFVAYENLQVRNMVKTINLLNQLAMPHGRSLLNGCNILGKCTVKQWLLLLLNTLPKIVRVVAIAFPNRYRSELIFAFAVRC

SEQ ID NO: 31297 - protein, 411 aa, unknown
  TnpB Polypeptide
MPAVGFRFRAYAGQQTLGALKAQLRLACEIYNSLRRADIDFHRRNGRGLTLTELRQLALDLRKRNESYQQLHSQVVQEIADRFHNAKRRFLEGSARRFPREKKPHRYYSLTYLQKGWRILSTREIRIGSRGNRKKLITLRLSHLGTFRVIAHRGFPMDKVRRVAVKLARSGRVYISFLVEDYEFPRLPETGRIVAIDVGVEKLLVTSDGEYFPNPRPYRRALGRLRRLQRELSRKVFLSHNWLKTKVRLARAYERLANLRRDVYMKLGRYFAGHYDVVVMEDIDVKQLIGESNRALRRGLQDAALGMMRSIIKYQVGKYGKAFILVDPRDSSRTCARCGFVNRDLTLGDRVFECPACGWRADRDYNASLNILRRVGWEPPAAPVELRPLLVALGYGQGGVVKQEAPPFRAG

SEQ ID NO: 31298 - protein, 404 aa, unknown
  TnpB Polypeptide
VWEELAEIPDAKRRFNAAEHLVHTTKKNPARFDFDLRFPKMPSYLRRAAIQHALGSVSSYEIRMELWEKSGEKAGKPRLAYENHAMPVFYRDVMYREEKEGKDEAYLKLYDGHDWKWFCVRLNHTDMEYLRRNWWGKKASAPTLEKRHHKYFLRFSYTEEVTLTKTPVKEQIICSVDLGINTDAVCTIMRADGTVLGRKFINHPSEKDRMYRTLGRIRRFQREHSSAQSRGRWAYTKRLNIELGRKIAGAIVKNAEKNHADVIVFEYLEMQGKISGKKKQKLHLWRKRDIQKRCEHQAHRKGMRVSRVCAWNTSRLAYDGSGSVSRDPKNHSLCVFQTGKRYNCDLSASYNIGARYFIRELLKPLPVTERSLLEAKVPPVKRRTSCVYADLRKLHSEMELLKAA

SEQ ID NO: 31299 - protein, 309 aa, unknown
  TnpB Polypeptide
MAIDLGLGALTYATEDGTIAKVQIAPSADTDHRAVRKLQRAMERSRQATNPDNYETVEVVRHGKKHKSLKVKSGRLQWRFSKRYESLRAELAEIFRLSAATRKREHGEVCNWLLGHAGHIIVEDNSYKAFQRGRFGKTIGRHAPAALYAQLTNKAESAGLLVEVVSPKKLKPTQHNLLTGQFVKHELWERRVRLGNDDDDRWIDRDAAACLNLLYADLEKQTYAPERICEAVLAGVTAWLDAGVVVIQAREGITEREFGRFRRRGIPSLTVQGLRQQGFRGRSDSKSGATPRRKASTVSKPSHFSGEVV

SEQ ID NO: 31300 - protein, 383 aa, unknown
  TnpB Polypeptide
VQLRYNFRLYPTAGQRQALAKAFGCARVVFNDGLRARQEAHANGLPYISDGELSKRIITEAKKTPQRAWLSEVSAVVLQQALADLNTAYRNFFNSITGKRKGPKVAPPRFRSKRDNRQAIRFTRNARFAVTAGGKLRLPKIGDVKVRWSRRLPSEPSSVTVVKDAAGRYFASFVVEIDAEPLPEATGEVGIDLGLTHFAVLSDGRKIANPRFLRRAERRLKKAQQALSRKAKGSNNRKKAIVKVARAHARVADARRDFAHKLSTTLIRENQAVYVEDLALKGLARTRLGKSMHDAGWGQFVAMLEYKAARYGRTLVKIDRWFPSSKLCSACGALAESMPLNVREWTCPCGAVHDRDVNAARNILAAGRAERLNACGGTVRPAA

SEQ ID NO: 31301 - protein, 394 aa, unknown
  TnpB Polypeptide
MRKSFQFRIYPNKKQEVALERTLSTCRHLYNDALAERKRNAELNRLQKSFDLFLWGYPEWINYYDQANQLPLTKTAFQKEVHSQVLQNTLKRVERSFQNFFNGAGYPRFQGRNRYNSFTYPGSGLKLNLNEGKLILSKIGGLKIILHREIEGKIKTCTIKRDVDQWYVSFSCEIDIPIIPIEVKTKTGIDVGLKSLVTFSNGEQIQPPKFLRKSEKRLAREQNHLSKKKKGSSNRNKQKNKVAIVHRRIRYQRKDFNHKLSTNLVNNYDNVVFEKLQIQNMLKNHCLAKSIVDASWSQLINLTIYKAEYAGKIVELVNPNGTSQTCICGYHVPKTLAVRVHSCPSCGLVLNRDHVSAMVIESRSSTAGIAGIQARQSNPNREAMKREAPCESKG

SEQ ID NO: 31302 - protein, 522 aa, Anoxybacillus sp.
MKTVRVIKIVSNDESQLRSLDELLRVFCSAKRYAFNRLLEGRNAKEIIKHLPHQFPLNKRYAEDAVLLAQSLITSQRELLPMRIEDVQAKIEKTEKKIDEYQHGRKTPKNVDLLTCLGGLRQRLEKLKAKEAELTHHLEQGTIPSVIFGGKPNFYKRLKGKITNEEWKDLRSNQLYARGDKSKKGNLNIRLVYDDNTYECYVEIANPFGQQESKPAPRLRFPVSVPEKYEQEVIDVVMGEQAGVNSKGKPIIDYQPYTVEIKRKNGEYYLHLIYEEEVYGRELTYDELIQGEQIAGIDINIDRIAVTIISRQGNFIKSKVFYCHELEYVKANKRNNIVGETVRNVYDWLLQENVGAVVIENIQLRQQHDTDKRFNRLTHHFKKKKLTEAILRRGLRLGFHIKKVNPAYTSVIGRFKYMKKYGLSVHESAALVIGRRGLGYHERLPKELIDTIKTNVKRHLIAMLGSMEESYKQSKSGTKQRQYLGMMLKKIENFKEEHEWSLWNILHKCCWLNQYQIQLKEV

SEQ ID NO: 31303 - protein, 396 aa, Tatlockia sp.
MIILEFKVKAKLAQYNAIDEAIRTVQFIRNKCLRFWMDNLKVSKYDLNKYSAVLANEFSFADKLNSTARQASAERAWSAISRFFENCKRKVAGLKGYPTFQKNNRSVEYKHSGWKLARDRKSITITDKNGIGRLKMMGTRDLNFYSPEQIKRVRLVKRADGYYCQFAISFERNIDLLPTHKTIGLDVGLESFYTDSSGNKVENPRFYRTGERKLKRNQRLVSRKVKGSSNRNRAKTVLGKVYLKISRQRKDHAVKLARCVITSNDVVAYEDLRIKNLVKNHCLAKSINDAGWYQFRVWLEYFGKIFKRITIAVNPAYTSQECSDCGVIVKKSLSTRTHICQCGCVLDRDVNAALNILNKGLSTVGHTGTFALDASNASGEMTSTLAGEILLEQVIS

SEQ ID NO: 31304 - protein, 446 aa, unknown
  TnpB Polypeptide
LKSFKTFSTVLEEDNAKEIIEYFEETAGNYGFLKRCALHILRNCPEISRNELNKLLQERFSVTARTANSVIHEVEEILSSVLALIPLNIEKLEARIDSKMKLIEKKRKEMAKIHASRKTGTKRLGKLKLHIYNIHNSINRIRQKIENLEKQLEDRKPNICMGTKKLARNDIKSFKEHRNSQINYIGRACEKQGNINFQMQYVKKGNFFAMKVRRDFGKWKDDRSSERFVYGKCHFKYGGRQLRDAMRNNASPVTVSVIRRNDRYYLFVTIVISYESSAIVTRKEHGVIGIDFNKGFINICETDEKGNIVSIEKMRFPFGKAGITDAGLADVISKVSNKATKTGKSIVAEALSFERKKRKAKKAVTPTEKERMRMLHSLPYSRYAKILENITFNRKIELIKVNPAYTSRTAEQKFCNQIKLNIHNGAAYVIARKGMGIKDKYLRKTG

SEQ ID NO: 31305 - protein, 424 aa, Propionibacteriaceae sp.
MAREATRTSASLMVWRRRCPMLRVHKVALDVTNVQATHLSRACGTARFAYNWGLAHWQEQYEAWKTDPALPKPSQLSLRRDLNAIKREQFPWMTEVTKCAVQESIIDLGRAFTNFFAGRARYPRFHKKGQSDSFRVSSGFFRVDGKRLRLPAVGWVRMREVLRWPDTKLVSVTISKHRGRWMAAIACEVPEPVPAPQQGKSVVGVDVGVREYVTSDGEHIGVPRAYRTAERQLRRAQQALARKQKGSHNREKAKAKVARLHGRVGDVRADWLHQTTRRLVDNFAVIGIEDLNVKGMARNHHLATSVADASFYEFRRQLEYKAPEAGATVIAADRWFPSSKTCSSCGVKTKRLTSLDVREWVCETCGTSHHRDVNAAINLRNHAASSAVSACGEFLSSVPDGLAPCGSSRLCEPGTRHQTADRHV

SEQ ID NO: 31306 - protein, 457 aa, Streptomyces sp.
  misc_feature (350)..(425): Xaa can be any naturally occurring amino acid
VKRAFKYRFYPTDEQAAELSRTFGCVRKVYNLALAARTQAWARQERVNYNQTSSMLTVWKKTEELAYLSEVSSVPLQQTLRHLQGAFTNFFAKRARYPRFKSKKKSRASAEYTRSAFKYRDGKITLAKMSQPLDIVWSRPLPAAVEPTTVTVSRDPAGRWFVSMLCDDPGVRPLPAADTAVGIDVGLDHLLTLSTGEKIANPRHERRDRARLAKAQRVLAKKAKGNGANRAKARRKVAKIYARIGDRRRDHLHKLTTRLVRENQTLVIEDLAVRNMVKNRSLARAISDAAWAEFRSLLEYKAAWYGRNVVAVDRFFPSSRLCSHCGALAERMPLHVRTWTCDGCGTTHDXXXXXXXXXXXXXXXXXXXXXXXXXXXXXXXXXXXXXXXXXXXXXXXXXXXXXXXXXXXXXXXXXXXXXXXXXXXXVGIPLLQEGEEVNGQPWRARAGARRTRLFNAS

SEQ ID NO: 31307 - protein, 384 aa, Streptomyces sp.
VIGVKLRYSFRVYPSAPQRQELAKAFGCARVVWNDALRIRQDAYKQGQHVPSIVELAKQVITEAKKTPERSWLGEVSAVALQSSLRDLQTAYANFFTSRNGTRQGSKMGPPRFKKKTSRQAVRFTKAARFSITDDRKLRLPKIGDVEVRWSRELPSEPSSVTVIKDAAGRFFASFVVEAEDKPLPELDWEETDTGIDLGLSSYAVLRGRKITSPKFFRRAQRKLRRAQRKLSRAEKGSGNRRKAKLAVAKVHARIADQRRDFIEQETTKITRESQAVYLEDLNVKGMAAHFGKSVHDQSLGMFARTLEAKCTRYGRTFVKVDRWFPSTQLCSRCGSLSGPKGLEGLRIRTWTCDCGAVHDRDQNAEYNLRLEGRSIVAEGRPDT

SEQ ID NO: 31308 - protein, 473 aa, Halomonas sp.
MLTGIRYRAYPTPEQAQRLAQWVGCARVIYNGKCDDAFYQYRFAKAYLPAGHYPAHDKTYRQYKTELTPWLKDCPSQILRNSATIWHRSYQRFLKGLSRPPKRKSRATGNYIWLTQELFDIRKEGGVYRLFICEGKKKFDLGELKLGWYRNPPAKPKSIWIKVKNGIWTVSFSYEDPVTRNQPVPLELPEHIEWLKGASIEELYAMVDAIDIGVEVPIQSTRATFFFSEREKQKKKNRTKKIKRKQRKMARQALGSKQRVKTKRQIGRLKKKETDCREDFIQKSTHALANNCHVLAMEALKTKNMTRRAKAKQCPKTGKWLRNNRSAKAALNRSMLDISPGRIRTVLANKMYRHNKPLLLIPPEYTSQTCAACGHTHAESRLSRSEFKCKGCGHEAHADVNAAFVIKQHAIDLLLHSGTELLDNGSLRNPVLGAPGAFGQLATEIRRCWENPACASVDTSTKIGSDLLRSSVA

SEQ ID NO: 31309 - protein, 401 aa, unknown
  TnpB Polypeptide
MERTYTYKFRLYPNKEQEIYLVNVFGCCRLVYNHFLNEKKTQYNESKTSDSYNVQSGKLTELRKTNEFEFLNAVPLQVLQCSLRNMHNAYDNFYKHKSSYPKFKNRRNKQSFKLPQEQCFRIKDNKLYIPKLKSGIDIVMERKIIGKICFATISKNKAGKYHIAITVKQDYIPYGKTNRSVGLDLGIKDFVITSDGVKYKNHRSIIRTLKRKLKHNQRHLSRKVYGSKRYENQVLKCNRIYQKITDAKTDYIHKITTELVRHYDVIKVEDLNIKGMMKNHKLAEAISECNWYQFIQTLEYKCLWNEKELIKIDRFYPSSQMCSECGYVEKKVRNLNVREWTCCNCGCHHDRDVNAARNILKYNSARNVENSRGVVCKLNERTKSVGDCSDNCEAIIELLQD

SEQ ID NO: 31310 - protein, 478 aa, Moorea sp.
MPRKVGAAKRISTQIVPVVGITKSVELELQQVMKKLGIVRAESYNKLGSINHWGIDWKKAVPEVKSFRTPDTLGLPAKLMDWTVNDVAKAITASQAACTDVVIKKIYKRFPGRDGQKITKELCKQLKTRAFIDNPLLHRLVRKEFQRGHSWVKNQIVYQQVGYKCKRLSRNTYQLELAGLNRGKRNKITVRSNRKIKGQIRLVYNQLLERFEIHFLVDHGTVDIPGNRRAIGIDKGYTEAFYDSDGQAHGKDLGKVATKKSDRICSKNRNRGKLWALHRKLEKLDPAKSARILENNLTRKTENRRYRKNQSELTAIIGAASKSLFNGESLKVFAEDLTQPIKNKRQSKIMSRRLNSWMKGVMRDSLQKWANWTGSVVTEVQPSYTSQVDSVTGTLLGKRSGDSFTRFDGVVLQADYNAAKNILARGADKEISRYMNKTEVQAVLLRRTARFLKGMGLSLADAVELGWLDPKHELCSGF

SEQ ID NO: 31311 - protein, 366 aa, unknown
  TnpB Polypeptide
MKAYKVRCYPTEEQKVLIRKTFGCCRWYWNQALSDNIKYYEEHKKKKINRPAFYKMEYEWLKEVDSMALCFTQMNLQSAFSGFFKQPNKGFPKYKSKKHPKNSYKTMQSSGYVVTENDIKITKLGKVKIINHRHKTGIAKSCVVSMTPTNEFYISILWKEADEDETLPKVTKEVGIDLGLSDFAICSDGVKFPALQSLRKNLSKLKKEQRKLSKMTKGSNNYNKQKLRVAKLHQHIANQRKDYLHKISYKITNENQVISLEDLNVKSMLKNHHLALSITDAGWSMFVNMLKYKAENKGRTVVQIDRWFPSSQICSCCGCVTGKKPLYIRKWTCPECDVVHDRDVNAAKNILAEGKRILGASTCPDR

SEQ ID NO: 31312 - protein, 413 aa, unknown
  TnpB Polypeptide
MAATTTKTLEATLAPPTTHKERKLFDLLDTYLAGLHEAFEAGCETMTATSDVVTPYDLPYQAKAALCNYVPQLHGTYDAQELDDDHPVRLTNQAAEFDHSSERDYEFTWWVPQPGRGTNFWIPLRINPAQEELWHDLVDGEASAGQLRLQRHRTSWTLHVTVEFPVEEPDYEPTDDDVTSVGFDIGEAHLLAGCACEQGTPTDPLLIDGGRARHLRKEMFTTLKRLQERDAAQWRIDERFGHYQNALTDIIEKASRQAVEYASSFENPVIVLEDLSYIREHLDYGKWMNRRLHNWAFARLTGRIEDKARDAGIPVRFVNPAYTSQTCHACGHLGSRNSQAAFRCTNAECWVTEYQADINAAANIAGRLNPWGESLLLKTTGDDSPRDGSTLDSATAHSGPSAKLAQTTLGEWG

SEQ ID NO: 31313 - protein, 504 aa, Scytonema sp.
MASHNKKPKNEIHKLSTQIVNVVLIDDSVKTELLDLMERLGIVRSEAYNKLGSVKHWGMDWHKAYPLVRAFRTPESLGLPSKLMEWTVNDVAKAILAQQAATIANLSGKIWARYSGSENEAQRKEAYRKLKSTEFLSDSFLSRIVRDEFQRGHTSVEHQIVYQPVAYTVQQINRFVYRLSVSGLTKGKRVEFNMRSNRKPSGQIRVIYNSELDRFEVHFLVDFGHYNKSSDSERTPIGIDKGYTEAFIDSSEKVHGAGLGELLTKKSNRIINKNRLRGKLFAIFRKLELHDPVKAARILKNNLSRKTENKRYRKDQTAISSLLGQTSKSLFATGLLKVFAEDLTQPIKNKRYSKSLSRKLNSWVKGCMRDSLQKWADWSDSVITEVNAAYTSQTDSVTLTLLGKRVGDSFTRHTGVVVHSDCNAAKAVLHRGTDKEITRYMGASEVQAVLLRRTAMFLKLEGKSLDDAVELGWLDPKHRKNPEFQKLVSGSLPTSRKKSGRSKP

SEQ ID NO: 31314 - protein, 299 aa, Scytonema sp.
LLTEIALPLPEFIDSDWVKEVTVRPCYGQLWIDWVIEDGKQIVEINPHLDYTQAWSFDHGGNNWLTGVSTLGQSLIIDGRKLRSMNQDYCRIVAKYKQGKSDFYWDSNLDRIQRKRNNQMRDAINKAARFIINRCLADGVGNIIIGWNEGQKNGSDMGKRGNQNFVPIPTGRLIERLKQLVCEYGIVLTITEEAYTSCASFLDGDLLPKYGEKPEGYKPSGNRITRGTYKTKNGKIIQADCNAAANIMKKVATQLGLVLVKVGRAVLSLPHRYDLFRDLKNSFRNKLRSAALAHRVTTM

SEQ ID NO: 31315 - protein, 570 aa, unknown
  TnpB Polypeptide
LTKLKKLKEGITESGLMSQPPSSYTQVKYKAKNLSGKSNCSKTNIHKQRLSLTLPPDLTKIDEVIEPFWNPLSTAIHSMLWQPHQIESPELGSRSLNGIEDKVFADQKLYPRLSNYQEAKSNFWKNQIIPSNLASLTLGLASLTFGWTPKFLSLSLPASSTPIMENEVQEDVITSKKIRIYPQNEVLWFDSLNIYRRAYNLTIEFMAKGRKPSSEFRTQICDWCKIECFYNDVTFNSNLIQAAYRKACDTRTAVIKKRVKGEKSEFSFMSRMASQQYFVTPRLSAKKQIYPNILKGCTWSEKVPEEAIGKTVVVIYTNGQWFANVRFVQPISQVVTKELSLVALDPGVRTFQTAFSGEDAISYGDQFVNAKLVPLMSELDRLLSERDKLHNEDRSLQWVKDRLKNLNRKIHKVRARHQNFVADLHRRVAYDLVRNHDVILLPIFETKQMAQKTNETRKRFLRRQTVRGMLGLAHYKFKQTLKWMATKYGKTVVDVNESYTSKTLWDGSILKNLGGKASILFQGKRVNRDIHGARNILIRFLTKVIEVLSPQGAYPLDITQTEFCGFGVFQ

SEQ ID NO: 31316 - protein, 396 aa, unknown
  TnpB Polypeptide
MTMRKVSQHIQFTPSKTQAALLEQCFGARRFVYNQQVEAFNTYDNETNPNPKYPNVTDMKNANEWLRDSPIPSNSMSNAIMDFRKAQSAYFRKAQYGKNRPRFALKSNNIQSFRNTAPMRRMEGNRYPLSRKLGSVRIRKRDRLRYPIYSLSSWTVKRENLTYYLVLLFNVDIQPMPKVEGRIGIDLGVKNLLTLSTGEKIDYPNQLRRLEADVKREQRKLSRRTKGSNNYRKQKAIVAKAYAKLRHYRDDFQHQISHKLIEENQFIGMESLAVRNMTRKAKKRLDADGKPMRNGQSRKRAMNHSIFREGWSALVGKLSYKAEWYGRTLVQVDRFYPSSKLCHDCGHKYKELRLSERKWTCENCHIRHDRDVNAALNIRDEALRLDRENKKAKQNS

SEQ ID NO: 31317 - protein, 394 aa, Lyngbya sp.
MFFKANHFLSKYDLDKRLKNNPHFKALRSACAQQTLHGVVESFNSYKKLIRMYKRGELTNKPKLPKYRKKGGLAVVSYPKRWVKLTDGHLQFSLGKQVKAWFGIDSFTLPMPTNLSFNAIKEFRFIPRNNSFYLEFVYEQSEVKQVEQSEHILGIDPGLNNWLTCVSTTGKSFIIDGKKVKSQNQWYNKQVAQLKTGKEQGYWDEHLASITEKRNRQMRDNVNKAARFIINWCLKNKVSTIVFGWNQRHKDSINMGKKNNQSFVQIPTAKLKSTAQLCEQHGIEFIETEESYTSKASFLDSDILPTFGEKPIGWTSSGKRVQRGLFRGSRGQLINADCNGAANIIRKSKVSTQHLAKVVRGVLSLPHRYFLGSLSRSYRKQYCEADFNLSSNSA

SEQ ID NO: 31318 - protein, 507 aa, Streptomyces sp.
LRALCVGCGEGIFEPGGGCRVGGKFRARPGCVVQAHRFALDPNAGQERALRSHCGAARAAYNWAVSWVTASWWQRKAEATYGIGEEELTPWRPWSLPALRKEFNRVKTTEARFADWWQENSKEAYNTGLANAAAAFDNYAKARQGKRKGCRVGVPRRKPKRKARLACRFTTGTIRVEADGRHVTLPRLGTIRTHEPTVRLLDRIQAGTARILSATVRHERGRWFVSLQTETAREITRVARPDAAVGIDLGVKHLAVLADSSGEIRYEPNPKHLDGTFKLLRFHSRRVSRRQGPDRRTGQKPSKRWEKANRERNKLHDRVVNLRTDALHKLTTRVRAEYGTVVVEDLNVAGMLRNKRLARRVADAGFGEIRRQLTYKGRRNACPTIVADRWYPSSKTCSNCGATKAKLPLHVRVFDCDECPLVMDRDENAARNLVALAAACTTGTGVAGDQGADTAPKPRGADRKTRCQRPGRNTGRGGRAGGASLPHQRRKETGDRRQDTEAPLALW

SEQ ID NO: 31319 - protein, 185 aa, Microcystis sp.
LTIIVDAQIPGKKGFPRFKKHSRSVEYKLTGYQLSDHRRKIRFTDGFKAGEFDLWCSQKTLVYYSEQQIRRVRVVRRADGYYCQFLIDVELQEYHKPTGQITGIDLGLKEFYTDAQGNTVENPRYLSKSEKRLKKAQRRLSKRFRQGKKQSNNYHKQRIKVARLHLKVSRQRKDKAIKDALALVQ

SEQ ID NO: 31320 - protein, 410 aa, unknown
  TnpB Polypeptide
MLVKAVSFRLEDELPIHARFLLEDFRLAVNRAIRAGLQTRATSKYALCKLAYKDFRTEHPGMYSQHLVSVFEVAASLLKNHRRKARKGKADRIPYVRRLFMKTENQAYKLDRTSGVVDLPVRAGCHVELRLVLSEYHRSFLDNPSYSLGSLTLFPDRAVIVFRKAKPRPYVPESVVSLDTNERSLDGVFVRDGKGVPVKASFPQVAAIQQRHHDRRKRLQTKKSHDRRTSRRLCRREGRREHDRVEYRMHQVANAVLDFAEERKAAVVLEDLRGVFKPRANKALNRRLSMWPRRTLHRFIEYKAKWRGVTVLKVDPRNSSRKCPACGRIQHSRKGTEFACECGWHLDRHINASLNLLQTAVSKEMAGGLRFDPGALQRDVMMILYDPEKGARSEPNGASREGAAAIHAAA

SEQ ID NO: 31321 - protein, 348 aa, unknown
  TnpB Polypeptide
MKARFKYRIYPTLGQKQRLARLFGCVRVVWNDSLACCQEKYKLGKKKPTNSELQKQFITLAKKTEKKKWLSEVSAIPLQQSLNNLNQAYQNFFKSTQGNREGQPIRPPKFKSRKSKQTARFTKGGFKVGRHKVYLAKIGKLKVVWSRELPAIPSSVTVIRDSANRYFLIFVVEVLPEVLSKTYNSVGIDLGIKTFATIGMSHTTSLHGKKIDTPKPLKKRVKKYRKLSKSLSKKTKGSKRYEKARLKIAKFHAKLKDTRIDFLHKLSTKIIRENQTIVLEDLNISGMVKNRKLSRAISDLGWRKFRTFLEGKAEKYGRVLRVINRRDPTSQTYYCCGFEGGKLDLSIS

SEQ ID NO: 31322 - protein, 366 aa, unknown
  TnpB Polypeptide
MKIIRSTKCSLKFSSSKKMNELSIILAEYSKVVNLFINHFWNNPKNCSKAKLLKPIVDLPETWLSARLRKVAAREAIDMVTASKKRWGDKAKLPVHKGNKMYVSCTIADLISSKQAHEFDGWLHLASIGNKMILDLPIKFHKHFNKYNNIGKRLNSYIITDKYVQFSFEIITEEKRTGVKAIGIDTGINALASTSTGVQYGTNMKDWIERVKRCEHGSNGQKKARRALKQRIDEVVKELFNKENPDLIVVEQLKNMGHKSKAKRLLAKNIRRSIGIWNWKYWLRRLQEHTELNRVSFRSVSPYYTSQTCPKCGHVDRGNRKGEIFTCLKCGHTDNADLNAGVNILFRFAMGKYGSHYKQDVIRSFT

SEQ ID NO: 31323 - protein, 426 aa, Ktedonobacteraceae sp.
MQLVEQHVIDRSDPRYCVIDEAAFASKNLYNAALYLVRQSFIHKKKYLGYQEVQKQMQSYEAYKALPAKVSQQVLMQLDRNWKAFFEAMQAYKEDPSGFQGRPRLPKYKHKTDGRNLLVYTIQAISRKGLKRGRIQPSQLPITVQTRQTEVCQVRIVPRNGFYIVEVVYEQEPVRTAVDSVWYAGIDIGIDNLAALTSNQPGYVPVLVNGRPMKSVNQFYNKRKAELQSKLGHPGTTRRMERLTNKRNRRIDHYMHTASRWIVDDLVAYGIGTLVIGKNDGWKQDATLGKRTNQHFVQIPHARFIAMLTYKAERVGIRVILTEESYTSQASFLDRDSLPVWKGDDQTTYTFSGKRVKRGLYRAADGTFINADCNGSYNITRKVAPEAFGFEGVEDGKGHKPVVHPVRLSFPHKSAHVKIPAPVRIR

SEQ ID NO: 31324 - protein, 389 aa, Serratia sp.
MLRATKVRIYPTPEQAAFINAQFGAVRFAYNKALHIKKQAYKRHGVNLSPRKDLKPLLAVAKKSRKYLWLKEYDSIALQQAVINLDAAFAHFFNPKLKARFPVFKRKHGRQSSYHCVGVKVLDGAIKIPKIPPIAARLHRETAGTLKSMTLSRSATGKFYASILCDDGTKVPAKLTRISCVTGLDMGLTHYVIKSDGKKITNPRYLINGGLNLRRKQKALSRKQKGSANRRKSRVQLAAVHERVASARADFQHKLSRVMVDENQAIIVETLKTANMMKNRRLARAIGDAGWNGFITKLEYKAAEKGVHLVKLDPWFASSKTCHCCGHKMSEMPLHKRIWQCPECGIEHDRDVNAAINIQRQGIMELQAAGLVVSAHGGQRKSVVQTVAA

SEQ ID NO: 31325 - protein, 201 aa, Chloroflexi sp.
VRQHGQIKATRFVSDQGLDQHRFRHLKRVAKKQWQTGRCVQGERSNRQLWAHIRRQNLDTAHQTARAIVEVCEQYPGCVLVFERLRTIKAKSGSKSRRLNRKQANQLKGKINQLAKEKAYAIGVVSVEVNPHGTSQYCARCGGKGVRFTSQAGQRVRGPGGKLFFCPVCHYECHADFNASVNVHHSFFGELHWQPRAHKSG

SEQ ID NO: 31326 - protein, 361 aa, Clostridioides sp.
MYPNKKQQELINKTFGCCRFVYNKYLAKRIDVYKSDKETFTYKQCSSDLTNLKKELKWLKEPDKFSLQNALKDLDNAYEKFFKKKAGFPKFKSKKINRFSYKTNFTNGNIMYFSQHIKLPKLGMVKVRDKQVPKGRILNATISKEPSGRYYVSLCCTDVDIEAFENTNNQIGLDLGIKEFCISSCGEFIENPKYLKKSLNKLAKLQRELSRKTIGSLNRNKARLKVARLQEHIANQRKDFLQKLSTKLIKENDIICIEDLQVKNMIKNRKLSSLISDVSWSEFIRQLEYKANWYGRQIVKVGKFFASSQICNKCGYKNDEVKNLNIREWICPSCNETHDRDINASINILKEGLRLITIQNK

SEQ ID NO: 31327 - protein, 336 aa, unknown
  TnpB Polypeptide
VDGLALCNVQLQVEKAFRDHFRNRKQFKLPKFKKKRDKQSYTTNNTHNSIRVDFKRGLLYLPKLREGVKVELHRRFDGKVKSVTVSKTKDGKYYASILVKTENPRNKVVEPRSKACGVDLGLEHFVTVTNDFGSYKVEHPKYLLKAEKQLRRLQRSFSRKQKGSKNSEKARLRLARQHAYISHARNDFLHKLSKAIIDENQVVVVEDINVKSLLRTRLAKSITDSGWSKFLTYLKYKTEWYGRTFIQVSRFFPSSKLCHRCGYKNEDLALNDRTWCCPACGEKHDRDVNASINLYFVGLGRSERGTVEQALVDDRSPNGLPKKPSCDETGSSTAKG

SEQ ID NO: 31328 - protein, 227 aa, Geobacillus sp.
VAFDGVHWYISVGFEVNSQTTALTQNSLGIDVGVKHLAVCSNGKIYPNINQTKRVKKLEKRLRRLQRKCSRKYEMNKIQEKGGKFRYVKTRNITKLEKQIQKLRVRITNIREDYEHKVSNELVRTKPARIVMEDLNIKGMMKNRHLSKAIQDQRLYAFKQKIKYKCEMYGIEFIEADPWYPSSKTCSACGHVKKTLTLSERIFVCDACGISIDRDLNASINLSKYTA

SEQ ID NO: 31329 - protein, 349 aa, Deinococcus sp.
LCRQLYNCALEERIGAYKKEKKTISGYDQMKALPEIKEALPEYKGVYSQVLQDVLKRLDKTYQNFFRRVRQGAKKVGFPRFKGAGWYDSLTYPQLGFSVAGETAYFSKIGNIRLRLSRSLEGKLKTATITRDCGEWYVSYVCEVEPQPLPKTGSSVGVDVGITWFAITSDGEFVENPRHFKTAMKKLRVVQRSLSRKKRGSGQRKKVKAQLAKLRRKVSRQRLDFHHKTATKLVKENDLIAHEDLNVGGLGRGNLAQSIHDVGWSQFFSLLSQKAASAARTVIRVDPRYTSQACHKCGHTCKANRISQSRFVCVNCGHQDNADVNAARNILARAEPLSQNVAAVSASVV

SEQ ID NO: 31330 - protein, 186 aa, unknown
  TnpB Polypeptide
VATRNLKRKQQSLSRKKKGSKSRDKARKLVARAHERVACVRKDFLHKLSRRIVNENQVICVENLNVKGIMANHTLAKATGDAGWATLTNFLEYKAARAGKAFVKCDRWYPSSKACSACGFVCESMPLDVRAWTCAKCDARHDRDVNAAMNIRAEGLRVLAGGQPVAAGGGNVSRGAVRKSRRLAVA

SEQ ID NO: 31331 - protein, 186 aa, unknown; identical to SEQ ID NO: 31330
  TnpB Polypeptide

SEQ ID NO: 31332 - protein, 384 aa, unknown
  TnpB Polypeptide
MEQRKAYKYRICPTDSQKQVLARTFGCCRFVYNWALRQKTDAFYNKQQRLYYKDLSAMLPPLKQHYQWLGEVASVPLQQVLRHLDKAFINFFEGRGEYPKFKKRRNQQSATYVGTAFQWNGKHLTLAKMDGPLDIVWSRPLPEGAKPRSVTITKDCADRYFISILVEENIPHLPQTDVSIGVDLGLKSFVVLSNGEDIGNPKFFRKDEKKLAKAQRRHAKKKKGSKNRAKARKKVAKIHARITDRRRDFSHKLSTRLIRENQTICVEDLAVKNMVKNHTLSKAISDVGWSEFVSQLDYKAKWYGRHLVKIDKWYPSSKRCFECGHMLDSLTLDIREWTCPECGVHHDRDINAARNIHAVGLTVFEACGEAVRPGAVKANPGTPR

SEQ ID NO: 31333 - protein, 443 aa, Nonomuraea sp.
VSRYRLQPTPAQERVLLEHCGHARFVWNLAVEQHAHWKPGCKGAPGFAEQCRQLTEAWAEFAWLRAGSIVVQQQALKDFAQAMANFFGKTHRRPTWRKRGRGEGFRIVAVKAGVVRRLSRNVGEVKIPKVGWVRLRWSRAVPEGVKSYRVTRDRAGRWHVAFAAIPEPIPAPGTGEVVGVDRGVAVSAALSTGELLKAPGLRDTEKARLSRLLRRLARAQRGSSRRAKVKAAVARLKARETDHRKDWVEKTSTHLARRFDVIAVEDLKIAGMTRSAKGTLDAPGRNVRQKAGLNRGVLAAGWGRLVERLEHKAPGRVRTIDPCFTSQTCNACGHRAAESRQSQSRFRCLACGHQDNADVNAAQNIRDTAAGHAVAARGGCQLLPSCTVLRIRTPRNSADGHPWLTGATCPGCPLPQLNAPPSTYVCGPPTASIDCQKSVVVAW

SEQ ID NO: 31334 - protein, 371 aa, unknown
  TnpB Polypeptide
MKTYNYPLGKQSNTIRIGNLLDDMWQVHDYFHRWQDQRYKDGLPYANYPAMSAPVKELKKTTHPHWNALPSQAIQQELKRIDEAYVRFFKKLGGKPRRKPRRKFKSITFTQAGYALNDNRITITFREWNARKQIWSFRRIPFTFHKHREFHGTIARITLKRDNCGGYWICIVTDHTDTKELSATGQRVGTDFGMKDAYLTLSTGEKIQHPQPLKHSLKKLRSLNKALSRKVKGSNGWWRCVRTIARLYRKISNQRKDFHWQLASKLCKRFDTIVLETLNLDGMKRLWGRKVSDLAFYQFVEILKYKCQKHKRQFLQVGQWTATTKPCSECGFHNETLTLSDRQWTCPACGSHHDRDINAAINILRAGIATL

SEQ ID NO: 31335 - protein, 376 aa, unknown
  TnpB Polypeptide
MRKSYKFRAYPTKAQAATMETMVETHRHLYNRALAERKDAWEQEQRGVSYGDQSATLKAQRATNPYITLTNFSSCQATLRRLDTAFQAFFRRVKAGEKAGYPRFRGRGRYDTVVFPSYGDGCKLRDGRAYFQHIGAVKVKVHRPIEGRIKTMAFKHEADGWYVVFSCDLGDVAVEPSTNPAVGIDLGLKAFLTTSEGESVPPPKFYRAAHRKLRRAQRHLSRCQKGSTRRQKARERVAKLHQHIGNQRRDWHHKTAHGLVGRYGTIAHETLNIRGIARTRLAKSTLDAGWRQFLSILHHKAECAGVDVIGVDARNTTQACSDCGCLPAVPLTLRDRVYHCASCGYTADRDLNAALNIRNRLGWSRQTLTGTVVPVV

SEQ ID NO: 31336 - protein, 260 aa, Thiotrichales sp.
MQEGIQPHHHHRTKDAVVGLDVGPSTLAVVGEHSASLVRFCATVLQPWKETRRLQRAMDRSKRATNPHCFHENGTWKRGQRFTPSKRYTKIRAEYAEVERKLAAERKRSHGELANQILALGNSIQAEKVSYISFQRNYGKSIKVRAPGMFIEQLRRKAESAGGGLVELNTSVLKMSQYDHITQVYTKKPLSQRWHTLGDGSGVVQRDIYSAFLARCVMGNAHHPSHIEEMWAAQKPALLQTGWLRHEPAKIEPSGTITVQ

SEQ ID NO: 31337 - protein, 429 aa, unknown
  TnpB Polypeptide
MRLAYQAEIRPTPRQIGALFQHAGNARWAYNWGLHQHREAYEKWVAEGKPKKWKGWPNAISLHRALNVLKKAAPEDGGVPWMYEASKAAPQEALRDLDKAFRNFLSGRTKYPRFKSRSKGIGGFRLSGKITADTHTIQLPRIGKVKFQPGERNYLPWGKHAQVSVTEQAGRWFVSVVGPEVAEAAPNGGPAVGLDLGVARLATLSDGTIIENPKALQRSQKKLKRLQQEVSRKRKGSANRTKARAKLAKAHARVRNVRCDALHKATTTIAKSHGKVVIEDLKVQNMTRGGGARKRGLNRVVLDASFGEFRRLLEYKGKLYGCEVVAVPPHYTSQRCSMCGHVEKGNRTSQAEFRCLSCGHEANADLNAAINILEAASLTDSLNACGEDVRPGQAPSGDLIRQTSLKQEPGISPRGESDRGPSRQRAASP

SEQ ID NO: 31338 - protein, 421 aa, Neosynechococcus sp.
MLTMNYTYRIYPDVTQQTELLEWLETCRGVYNYALRELKDWIASRKCPVDRCSLEKEYIILADKPVPSYHRQQNNLPKAKKLIPRLGEVHSQVLQTTIRRLHDTWEAFQKRGLGFPRFKKFGQFKSFVFPQFKNNPINGLTIKLPKIGEVPINLHRPIPDGFQVKQVRVLSKVRGTQWYVVVTIESDVSVPDAPVHGRAIGIDLGLERFLTAADGSFQERPKFFRSMQRKLKLLQRKAAKKKKRSKNWEKAQVAVARMHHRIANRRKDFHLKTAHKLCDQAQTIFAEDLNGKGLTRGMLRKDCVDAAFGQFLSLTEWVCWKRGVYFAKVNPNGTSQTCPSCLATVSKGLEIREHQCPECGYRTHRDHAAAEMVLHRGLENVVAQGLWGKETACQVGLSGVYDLDKWRGAGISKSDLGKPAP

SEQ ID NO: 31339 - protein, 466 aa, Rhodococcus sp.
VCAPVRPSLRLSEGGGGGACSASRARGVDVIRAYLFALDPTEAQADAMASHCGATRVAYNWCLARVKANWSQRAAEQTYGLTGDQLTPWVATSAYSLRKAWNAAKDEVAPWWKQNSKEAYASGCANLAAALANRTAGRAKMPRFKSKRTARMSCKFTTGRFGLVRDRRHVQLPVIGVVRTGESTRKLARKIDAGTARIRSATLSYQRGRWHVSFSVDLPDAAPEERTGGGVVGVDLGISHLATLSTGEQVPNQRRLDAELSNLRRAERACARRRGPDRRTGVAPSNRWKKARARADRIHTRVANLRRDDTHQFTTRLVREFDTIVIEDLHVAGMLRNRRLARHIAGVSWAEIRRQLTYKTERAGVRLVVADRWFASSKTCSECGTAKAKLPLNERVFACLACGIILDRDENAARNLAAAAVDTGELRRELPDGSDVRRTCSHASQSHRHGKSPHRTQRHHRKVVAR

SEQ ID NO: 31340 - protein, 468 aa, Actinobacteria sp.
MAAADCGGRGREAGRSAAGFSGGGSLPTCQVIRRRSSPQETGGLFQPITRPRYDSYAEVPAVRVGEAQPARLPRFYVRIWFHVRMRTAYRCRAYPDPAQQSMLARTFGCVRIVWNRTLAERSRLYNAEGKSLSYAASDAALTQMKKDAELAFLNEVSSVPLQQALRHQHSAFQAFFARRARYPRFKSRCGRQSATYTRNAFCLRGGELRLAKMSEPLRFVWTWPGVDVTGLDPTSVTVARDPAGRWFVTFHADVPHPAPLPPAGRRAGVDVGLAHFATLSTGEKIPHPKHWERHERRLKRWQRRLARTKRGSANRTRRAIKVARAHARVADARRDFLHKASTSLVRRFDVIAVEDLNVAGMIRNRRLARAISCSGWGEFRSMLEYKARRRGRHVAVADRWYPSSKTCSACGHLLASLSLGTRRWTCPACGTRHDRDINAARNILAAGLVYQGGEESQQYPPSISQRPS

SEQ ID NO: 31341 - protein, 227 aa, unknown
  TnpB Polypeptide
VGVDLGVHDFAVTSDGDRVASPRHLERKARNLARYQRRLARCQKGSANRAKAKAKVARAHRKVRNARRDFLHRTTTGLVRGNDLIAIEDLAVKNMVRNRRLARAISDCGWGEFRRQLTYKCQRAGRRLIVTGRWYPSTKTYSACGFVLAELSLSTRTWRCPSCRARHDRDLNAAKNILAAGLAAARDSPGDACGADVRHRETTPVQSAVKQEPQLARAGIPALNDGE

SEQ ID NO: 31342 - protein, 283 aa, Tenuibacillus sp.
MPDEVHVKGKTMEFYQAYTVQIKRKNGDYYAHFIYDETEYGEVLVSRTDILKDVVAGIDINIDHISVSLATKQGNFIESKNFYCHELEYVGSNKRDNIIGETVKAFFEWLLSKNVGAIIIENMTLSQQHDTNRKFNRLTHNFKKKKLIECIIRRGLRYGFLIKKINPAYTSVIGRFKYSKKYGISVHEAASFVIARRGLGFKEKMPKALIHELKKKVKPHLIAKLGSMEETEKQSEQGKRRRKYLGMLLHKINNFKDIHLWSLWNIVRKTLWLDQHQMKLKEV

SEQ ID NO: 31343 - protein, 418 aa, unknown
  TnpB Polypeptide
MKAYRFQIRTRPAVDVRLRRFAGMCRSVWNMALAEQRARHARGEKYAGHAQMCKWLTAWRNAPATAWLADGPIHPQQQVLRRLDVAYGRFFSRAGGFPSFKRYGDEPGIRFPDPKQFTLDAANSRLKLPKLGWLRLRMSRPVCGLLRNVSITREGVKWFASIQVEISETVPALDVSPTLGIDLGLTVFAAASDGTLVAPLKALAQQQARLKRYQRSVSRKKKGSANRKKAVQRLGALHRRIAYQRSDWLHKLTTELADAHAVIALEDLHIKNMSASAAGTAKAPGKNIRQKAGLNRGILDAAWGEFARQLTYKVQWRGGQVILVNPAYTSRTCRICSHESAQNRKTQSVFSCVACGHTENADIHAAKNILAAGHAVWAKASEDTSLDACGGEVSRAAPARTTRAAPVKQEPTEAKVFL

SEQ ID NO: 31344 - protein, 384 aa, Absicoccus sp.
MLLMQITTIAKIQVQATPEQREMLNATMSTYRSACNFVSNYIFQTHDLKQFSLNKALYYDLRKRYGLKSQMAQSVFKTVIARYKTILENQHEWIKPNFSKPQYDLVWNRDYSLTQNLFSVNTLSGRVKLPYYSDGMEKYFDHDTYSFGTAKFVKKHGKYFLHIPVTRDILEALDCDVCNVVGVDRGINFVVATYDSKHKSDFVSGKAIKQKRAKYKQLRKELQQRQTPSARRRLKAIGQRENRWMQDVNHQVSKALVESNPKHTLFVLEDLSGIRSVTERVRRKDRYVSVSWSFYDLEQKLKYKAALNESSVITVDPRYTSQTCPVCGHTEKSNRDKKRHVFCCKSCGYTSNDDRIGAMNLYRMGISYLAKDSQVPDTVSPQHV

SEQ ID NO: 31345 - protein, 257 aa, Endozoicomonas sp.
VTRRKQFKKARLNWRKSRGVRRSLGWIPINTGQAKWKNGQVFHNGHYFSVWDSFGLSDYKFRSASFNEDSRGRWYFNVVVDLEPETSEGTQSVGIDLGFKESATDSNGNGVTGLEYRMLEQKLGIAQRANNKKRAKAIHAKIKNRRQDALHKYSRKLVNENAVIFVGNVSSQAMVKTKKAKSALDAGWGLLKTMLSCKCDHAGVVFEIVNEAYSTQTCSCCGVIPDSSPKGRPGLGIRGGRLGNGSVQSAELNISVT

SEQ ID NO: 31346 - protein, 508 aa, unknown
  TnpB Polypeptide
MSRRSRRRSRLETPFRLFTRPETGTLGGYSTSRWTWSSSPSISTRRASKSRQTAPKISRSRSMAGPSNTWRRYLATKTKCTCRLKTQCRPCRISLSAVIGQAYRALMRLLKAYCFRLEPTPTMAREMGRVAGCCRFIFNRGLALEHERFERQEKHLGYAELCKELTSWRHAPGTEFLAAAPIHPLQQALKDLDRAYRNFFEGRADLPRFKKKGRHDAFRYPDPKQFAVDDRHGRVRLPKLGWVRCRKSRSVSGTPKQLTISRQGGHWFVSIQTEQEVAAPVHPANSAVGLDVGVAKFAALSTGDTFAPVSSFRKYEKKLAREQRKLARKVKYSQNWRKQKTRIAKLHEKIARIRTDFLHKTSTTISKTHAMIVLEDLSVRSLSRSARGTVNDPGRNVRAKAGLNKSILDQGWAEFRRQLEYKQTWLGGMVVAVDPRNTSRTCPCCGHVSAENRKSQAVFRCVRCDHAADADVNAARNILAAGHAVIACGERAQSGPSMKQEPSVSEAA

SEQ ID NO: 31347 - protein, 234 aa, unknown
  TnpB Polypeptide
MLHPVRFTNEGLRLDHKPENAIEWYVKIPHHEDYHLWMPAQPNPEQRDWLEALNAGDATMGESRLFERDGTWYLHVTATRDAEGGSEVSDEERTPIGVDIGEASLVTVCHRDDHGCPTAPELWADEGKTVRRLRKTYFTATRRLQTRGSERIAESFGDDLWNQIDDVFHRVTREVVDYAESVKNPVLVLEDLTYIRESMDYGEYMNRRLHGWGFAKPTRRYDTKPSRRVSPSRR

SEQ ID NO: 31348 - protein, 424 aa, Streptomyces sp.
MLVGRKYRLAFTPGQVEMAEEFGNICRAVWNTGLEQRREYRRRGAWVGYVQQAREVAEAKVEHSWLKAAPSHILQQTLRDLDKACRRHGTFRVRWKSKQRWQPSFRFPDPRHLSIERLGRKRARVRLPKFGWVTFRWSRSLGGAVKSATVTRDGKHWYVSFLVEDGVKAPAVSLERGRRGVDRGVVTLAATSDGQFLDRSFVSPGEAARYRRLQQQLARTRKGSERRRACRAKMRVIMRRVRDRRQDFHAQSARQIVDGNALVVLEDLNTAAMTAATRGSVAEPGVRVRQKSGLNRAILDKGWHSFELAVRNRARRTGATVRTVNPAHTSTTCPVCGHVHPDNRKSQARFVCTACGHKEHADTVGAKNTLARGHAGHRAWRPRRQPVREAPTSVKPQGINAPTAQVGIPLTSVGGGSPSPSVET

SEQ ID NO: 31349 - protein, 365 aa, unknown
  TnpB Polypeptide
MQKGIKFRIYPNREQENLINQTLGCCRLIYNKGLAMRKEAYANGEKVGYTQTSAMLTALKKCEDFSFLKQADSVALQQSLRDLDRGFVNFFQKRAAYPVFKSKHNYRQSYRTLNRKNNIRIVGKYIKLPKLGYVKICQSMEVGKINHVTVEHTPAGKYFAVLNVEFEPQPRTNNGDCIGINVGIKEFYSDSNGKTVANPQYLENSMRKLAREQRRLSRKQKDSNNREKQRIRLARVHEKITNQRNDFLQKQSTMLIRENQTICIKDLNVKDMMRNHKLAQHIGSAAWGKFFTMLLYKSVWYGNKIVKVPTMYSSSQTCSCCGYQNPLVKNLAVRVWECPNCHAEHNRGINAGINILKKGLQMQSA

SEQ ID NO: 31350 - protein, 368 aa, unknown
  TnpB Polypeptide
MANIAYQYRLYPNSEQAALFIRTFGCCRKAWNLMLADKIEYYKSEKKMLSTTPAQYKKDYPYLKEVDSLALANVQMHLQSAFRKFFSEPNIGFPKFKSRKNGRASYTTNYVNGNIQIGDYGIRLPKAGSIRAKIHRKAPAGYRLKSVTVFMDKTGRFYVSVLYEYADETPAFVPSGSMTHLGLDYKSDGLYVDSEGKVCGMPHYYRKSEKRLSRAQRKLSRKQKGSANCEKQRRRIAKIQQRTANRRKDFLHKTSSAITKRYDVISVESLNLKAMSKSLRLGKATMDNGYGMFCSMLAYKQARNGHVLVRVEKYFASSQLCSCCGYKNPSTKNLSIRKIRCPKCGVGYDRDINAAVNIDREGVRLLTA

SEQ ID NO: 31351 - protein, 337 aa, unknown
  TnpB Polypeptide
MSSNKFRVWLNNEYLPQHPEYSWIKEAYSKAVTQAVNNGQTAFTRFFNHESAFPNFKKKGRSDVKMYFVKNNPKDCRCERHRVNIPSLGWVRIKEKGYIPTTKEGYIIKSGHVSMKAGRYYVSALIEIPDNKTADLSNEGIGIDLGLKDFAIVSNGKTYKNINKSARLKKLEKRLVREQRCLSRKYENLKKGESTQRANIQKQKLKVQKLHHKIDNIRTDYINKTIAEIVKTKPSYITIEDLNVSGMMKNKHLSRAVASQKFYEFRIKLKAKSRENGIELRVADRWYPSSKICHCCGTIKKDLKLSDRTFRCHCGYVEDRDFNAALNLRGVKTYKIA

SEQ ID NO: 31352 - protein, 370 aa, unknown
  TnpB Polypeptide
MMQILKAYKYRIYPTEDQEVLLNKTFGCCRVVWNACTEAFNSPVAMKIEFPKSSTEIKKKFDWMSEVSASALQSVYQNFFEFKKQFFSKTRKKKVGRPKFKSKGLRQSYSLSSVRFNLGNNFIRLEKIGRVKVVIAGHRPPKDCNYRSVTVSKDVTGKFFVSVLVKELKPKPLPVTDSVVGIDVGIKTFAVLSDGIEISNPKFFGESQAELRKAQKSLSRKKKGSSRRRKARLKVALIHEKIRNQRKHFHHEVSRMVVNAYSIIGLEDLTVSGMVKNRKLSKAISDAGWSQFVSFLSYKAEWTDRTVQKVGKFFPSSKLCSCCGSIKKDLTLKDREWVCDCGVRISRDLNAAVNIKNEAVRLLVQGVACA

SEQ ID NO: 31353 - protein, 631 aa, Hormoscilla sp.
MKHEYYSQPKQLTFWGYIGESLRRWEREGKIQSYRTPGGQPRCPRELSISPPERQPHYPGDIELAQKGGHRRFLKREIVHIRWNRTANYNCFMRRVSSYSQHDDARADNLNTCASTIQKRNLFLKLEEGLILDGGNLKPFWNELSSRISNGLLLPTVTDSAVRDGNWLSGIAYTMQSNSWFSTRAVSVQNKSLYRICCPSEVASVLGSTVCESTENKSPRKYGKNPFKRSQNITPNSVMKIPLFPEPELSKIWKRWLAAYRWVYNQCVEFYNNKQTLPKEQSLDQYIQQLQNLPENEWTKCLGNTRQEAVCEAQNASRQSRKANGGKCLLRFRSCRNKSQAIQFKNNAYKNGTWFRSKIGDLQFTVAKGYELPINCVYGTELLYQRGQWFACFPQYVREVTTGSDRVIALDPGNRTFLTGYDGENILEIGKGDIGRLTRLCLHLDKLIGRKMKATGKVNKRLRYKLNKAIERLRFKIRSLVDDLHRKAASLLVNSYKLIFLPTYQTSQMVIKANRKINRKSVRNMLTWSMGRFASHLKQAAKRKGVLVVRCNEAYTSKTCPLCGHVHKKLGGSKVHFCPACGHKAPRDWVGALNKMLRALQAVAFDVRNGVITISDADVILAQSQYELCEG

SEQ ID NO: 31354 - protein, 279 aa, unknown
  TnpB Polypeptide
MIPQHFTIKKNQIKLPKIGWVSCVTHRKLEGKVKSITISKDVDAWFVSILCEQEAKEVHYDPNNVVGIDLGIKTFAVTSDGECIEAPDLDKELKKLQRRHAKKAKGGKNREKAGKKLARQHRKIRRINKNFVETTSNLIAKDYDVVSVENLNIQGMKANRKLAPSIQKLCWGSFVVALKRKVPIVHRVSRWFPSSKTCSCCGWIKKDLTLDDRTFHCDNCGFELDRDANAAINLLNEWKRTAESAGIACGEDVRPEGNLVSGRQTSVKQECGIAGFQVA

SEQ ID NO: 31355 - protein, 389 aa, unknown
  TnpB Polypeptide
MIRSYQFRLQMSERIGRSFEAAMAASNQIYNAALEERISAWRKTGKSITKYDQFKSLTQVRADEPAMAAYAATMLRTPLVQIDEAFQGFYARMKIGLGKAGFPRFRSCKRLRSFGFTEASGWALKDNVLRMKGLPAVRLKMHRLLEGEPLRLTVKRDGRGRWFAVIVVRLPDVFGPTMQGALGLDLGVESVATDSDGTRYGRVAPDRSADRESIELALARQKPGSRRHRKTRQRIARQRSREAVARKTRQHQIANRIAKSGPQIICVEDLQLRNMTRSAKGTVKQPGKNVKAKSGLNRSLLDAGLAQFIKILTDTAESAGRLVVMVDPRGTSQECSDCGATVVKPLRQRWHSCPCGAEYHRDHNAARNVLHRGLEGSRRGVVVPLRQAA

SEQ ID NO: 31356 - protein, 209 aa, Natronorubrum sp.
MPYWRRLSLNSERIPPFHGVDESKALARKKLADRETHFYHVLTDTIITECVERGVGTLAVSWPEDVRESDWGKTGNKKLHKWAFDRIYQYLEYKGEIRGVEVLKENEWNTSKTCSRCGDDTKSNRVERGLYVCLSCEMVANADCNGAENMRQKITPSPHGEDRSNGCVVVRETTSLVITKIEDFRTTQPSVHLFDRESGTFTTREQVVS

SEQ ID NO: 31357 - protein, 405 aa, unknown
  TnpB Polypeptide
MAELVKNIELSLLEPTKCKLEQLDKLYSEYLACAKETFAFWQSNKGITQNILHHSTYKQFRLKYKLPAQLIIRARGIVWNRRKICDEIRRVPIDFDLRCFKYGKTERQTPFFAFSGIVKSKRIILPIAKNRLFHRFESHTSNGWIFKSCRLIKKDKWVLQVCVKKEFVCRENRSIIGIDINAGCFALTITDRNKKVLRQLYLGQDILHKRRKINIRKDKLKSIYDRTFSNRALRSLRNIRSFEYNFVRTRMFQISNQIIKLAIQFNVSDIIIEDLKFLRTGRKLGNSKGRKINGIINKIPYFKFRNALNIIAIQQQINIVAINPYRTSKTCSRCGHVNQIGTKRELKCKSCGFTINRDFNASRNLINNFLLGRDTTNSAKISSFQIPDRQVSVNRPLLLCDFVIK

SEQ ID NO: 31358 - protein, 475 aa, unknown
  TnpB Polypeptide
MSAGYAITTYKIQLNYKHLDWFRQTQSLFDAVLAFYYELLEKQPEALSLSNQNLLRHLELQTIKQRDGTPPESPLPFEKIPLYFRRAAINAAISMYRSYMGKLKAWQESQEKQIKNGKLKMENSGTESQSDSELNQIGKADLHQNLPPFTFNFPPESAKKGRPSPPKHLHMAMLYYKGMYKDFADGSILLKLYTGKAWAWVKHRTTGRPFPKNAELMSPTIVIKKKKVMLHIPVKEIVKDSRTAKERVQQNEKFVAVALTGSDSLAVCTTIEADGRATAPYFIKGGKELAHRRKLLLGYTKRGIAGNDMTHTVGNAALSVPQEHRPNAKYYEKITRVTDHYAHEVSRKIVDYAIKQGAKLIVLPELKESFYQAKKPYLGKTPYDFIGRRIARYVQYKAWQQGLVAMTSKPYYASTRCYHCDAPIAKHNTEYQNPSPNFYGGKNFICKEGHRGSTALNSARNLGKGFYNKFYLSVA

SEQ ID NO: 31359 - protein, 402 aa, Streptomyces sp.
VIRAYKFLLRPTARQVTALGEMLRDHCSLYNGALQERRDAYRHSSKSSIKYGNQSAQLKDIRAFDPDRQGRWSFSSQQATLRRLDKAFQAFFRRAKSGQTPGYPRFKGAGHFDTVTFPRDGDGCRWDSTPHDAQTRVRLQGVGHVRVHMHRPVQGRVKTISVKREGSRWYVVLACDDVPAEEMPPTGGNVGIDLGIAHFLTTSEGEHVANPRFLQAMADELAEAQRNLARFPKRARQRTKRHRAAARKVAKLHCKIRRQRADFHHKTARTLITDYDVIAHERLNTVGMTKSPAPKTAPRQPGSFLPNGSAAKAGLNRSIFDAGWAQFLGILANKAESAGRLTVPVDARNTSRTCPECGHVAKENRVTQERFQCTACGFAANADHVGATNVLNRAGLVLCAEA

SEQ ID NO: 31360 - protein, 425 aa, unknown
  TnpB Polypeptide
MTNITLVAESKLYPKDNIPLYDYFDYYSRMFNFLVRRCIHHLSHKLNGESESRYRTNLMLEFNITNRMAKAVIRTAKNQLKLLKESARYQYNNLYKRRRSLYTKIAKFKVILSSSSATLKQRKLAKLRLFWTQMKLNKVNQLIDNGLKLHLTFGTKHLLKTNKQKFLAKRDNQVVYIGDKNETCGNQQFQVSFNPKYNRFEYKLRLENRWVSSTDKYIYGSFALKNKEAKVHILKILSEKKSNPLTYRLIKRDDNLYLQIMYRRETTDVTRYNHGVLGVDFNKGFISVSEINSEGKLQSLTRYNYLHQGKATKAKTSMLDLVSKLVYQAVKVGKDIVIEDLVSLDSNKKQEKTTSTDYNRMINSLKFGLFKRCLLSKATKEGVSVQIVNPYNTSKIARASYTDRMKLNVHDAASYVIARRFYQYD

SEQ ID NO: 31361 - protein, 522 aa, Bacillus sp.
MKITKICLIDDKNTVELEKLNRLMAVFCTAFRYSFNRLIEGEQSGKLIKMVNALFRLNKRYAEDAVMQAQAILSSQKELLPSRIEGVQGKIKKTCKKIEDYQTGKKRPKKVSLEVCLIGLNARLEKLQLKESCLLKHQEDQTIPTVIFGGKKNFYERLKGTISNDEWKDLRSNTLYSRGDKSKKGNLNTRIVFDEKEQQLFIEVANPLQVEGRKKSPRLRFKLHVSDKYFNEMVEVVLPNEVGKTSKSNPFEEYKPYSIELKRKNGKVYVHITYDEEAHGSVLNWNEKIQSDIVAGVDVNVDRVAISILTKQGNLLDSKTFYCHEIEYVKSNRSSNISGELAKDIVQYLLSWNVGAMVLEDIKLKQDHDTNKLFNRRVHSFAKTKLQKAIISRGLRNGFKIKKVNPAYTSVIGRFKYSKKYGLSVHEAASFVIGRRGLDFDEKIPQELLNHLRTIVKPKLISLLGSMEESETKSNNGKQRRKFMGMMVTNIETFKVNHRWKLWNVIHKTLMMKNQEIQFKVV

SEQ ID NO: 31362 - protein, 274 aa, Oligella sp.
VFLPKLGWLRYRNSRKVLGTVRNVTVSQSCGKWFVSIQTEREVEQPVPQATTAVGIDMGVPRFATLSDGTFYAPLNSFKRHETALRKAQQAMSRKTKFSNNWKKAKARVQRIHSRIGNARRDYLHKCSTTISQNHAMVCIENLQVRNMSKSAAGTADAPGRNVRAKSGLNKSILDQGWFEFRRQLDYKLAWNGGYLIAVPPQNTSRSCPCCGHVSAENRQTQARFECVECGFEENADLVGAINVLRAGHARFACEVSGAVMPPAAGTHRSHAPL

SEQ ID NO: 31363 - protein, 438 aa, unknown
  TnpB Polypeptide
MEEIVNVLNRGAPGLKHTEKTEIVPLNVWTEGKLEAEVARADIVRIEAEGEMAKVLAQLAKICRDFVNEEFQRRSKIYEETGEIDVSIMPAYRNPSYFSFRRILGSRNFDEALRFVSEQYRNFSKLLEMKRRGELPEYIDPKPPRDFKPLALFVRFDNYEIDSEQRTIKLGYYGEVLSYKGNLRWFARGRQGRLMIKYNEAKKRWYAHIASYVTLRRDNVVGYKCGVDLGQRFLAVVATENGYVLMYKGSKLAWDYLYFKEKISQSDRLYSIGEIDLDFNVERKRIHNYKMKVHREEAFKNLASHLIRTLKQLGIAEIYVGYPHNITKDKPYEYNVSFWSYWKLMERIAITAENYGIAVYALDESGTSKHCAYHGIEGQRSPRGLLHCPMGHTIHSDVNAALNILKKAGGKLPTMFKTQSFIVTPRGIKPVESRAGGC

SEQ ID NO: 31364 - protein, 355 aa, unknown
  TnpB Polypeptide
MEASLTIQCGITSLTKRKQQFLNSEYDNLQYFLQTKEDRGLHSANKQQARRFYKVVKPFQEYPLSIRNDLLKIKRVGNRVSEYWVKIPNKNTRQLWVAITPHRPFPEEFKICESKLYRRKGKFYLNIAVKTEVKENLAFKRILAVDLGERTIASTVLLNNGVISHPHFYGRKVRGLRRHYAWLRKRLGEKKALATIRKIKDTERRKVNAILHKISRDIVDEAERENAVIVLGDLTGIQQRAQKKGKRMRRLVGAMPFYRLTQMITYKATLKGILVVTTSEAYTSRNCHVCGCEGERKTQGLFVCRHCGEYNADLNGAINIGLKLERNLGYMPLFGAVCEPARTPTALRLEKPPYL

SEQ ID NO: 31365 - protein, 420 aa, Moorea sp.
MIITYCYRIKPEPQQIAKMEHWLELLRRHWNYGLGQRLDWLNRTRCQIDRCSIISEPIGEIPEKPDYYFQQSALKETKQLFPEYKEIYSEVQQINLQRLDQAWKRWLVPDKTGKRGGRPRFKSKGKLRSIGFSRVNHPKAALKFDGKNIIISRLGVIPVVRHRPIPFGFVIKTATLIKKADGWYVCLVIQDESIPKLIPVETIKTGVGVDVGIKEFAVTSEGEFFPIKQFYRKGQARLARAQRCLSRKQKRSNNYLKQLNRVQRIHQKIQRQRKEQHYRVAQSLSRRFDLIAVEDLNIRGLAKTRLAKSILDAGWGGFMTILEAVAVKRGCHVVKVSPHGTSQNCSGCGALVPKTLSVRTHQCPDCGLEIDRDENAAINILNRALSEVGIILPACGGLVNRQPMKQETSEVESYVQLSLF

SEQ ID NO: 31366 - protein, 448 aa, Moorea sp.
MKTPTKVIRTDKWTLNPTTEQRVLLGETVEVYRRACRYLVGIIYTHWGELGGLTADQLTPAVEKLMHKTAKRPNIKYPQFNEAFYKFPSYLRRAAIAFSAGQVSSFVTRYRDWQSGSRKRKDAKPPRLNANTGCYPSLYKGQCYKLHGFNTVEIKVFNGSDWVWTDVQITRLRERHLVTSNKMMSPSIVMNNRGYYLSVPFTCKPEKRKPEANVTAVDLGINTTATIAVVTHSGTVIHREFIHPGRDIDRRDKRLKSVSMRASKTMGKGGKLHKGFCSKTYKKCRRINHQIGHIVSRRIVEIAKQFNSEAIVFENLKGWKPKGGKKRSNLRQRFHGWLKAKIRDFTEMKWSELGGKVIEVVAAYTSKLAYDGSGKVRRDSTNYSLATFPSCKRFNADLNGAYNIGARGVLKLVRRNSNEGRSSKRSRRPPRSWACLCDLWARGSSRLA

SEQ ID NO: 31367 - protein, 397 aa, Moorea sp.
MEFKAVTNKAQKLAIDEAIRTSRFVRNKVLRYWMDNKGVGKKELYRYNTDLRAEFKFVEDLNSHACQASVENVERAIHSFYDNCKKKIPGNKGYPRFKKSSRSVEYKTSGWKLCPDKKSVNFTDKKGIGKLKLKGTWDLWRFDVKLIKRVRIVSRADGYYVQFCVKVDNSETVETTGKIIGLDVGLKDFYTDSNGYREPSPRFYRKGEKRLKFYQRRVSRKKKGSANRKKAINRLGRTHLKVSRQRQEHAKRLARCVIRSNDLVAYEDLRIKNLIKNHCLAKSINDAGWYQFREWLEYFGQKFGRITVAVNPAYTSQNCSNCGEVVKKSLSTRTHSCKCGCQLDRDHNAAKNILTKALSTVGHTGTILNAWGEDTSTLLGSGLEEQVTSLNQESPDF

SEQ ID NO: 31368 - protein, 385 aa, Desulfobacterales sp.
MVRKAFKYRIYPNKAQRKKIAQFFGTYRFVYNWALNKKIKAYETEGKSLRCFDLINELPKLKEEYVWLKDVYSQSLQMAIRNLDNAFTRFFREKKGFPKFKSKKNPVQSCHYPQGVKINFKNGKVYLPKLGWVKAVLHRKFEGNIKTGILSKTSTEKYYVSVLVETPDEIPDKPEIKEETTVGIDLGISHFAILSTGEKIANPKHLRKSLERLKFLQRRVSGKKKGSQNRGKAIRRLANQHEKVRNQRQDFLHKVTSRLVSDSQAETFALETLNISGMLKNHHLAQAISDVSWSEFNRQLEYKAEWYGKNIVRIGQFEASSKPCSVCGYVNKALNLSDRFWVCPECKTKHDRDINAAINIKKFAVQRQNLIGLERPESTPVELGQ

SEQ ID NO: 31369 - protein, 344 aa, unknown
  TnpB Polypeptide
MLRSSKLNINYANKGKLETLDTLMDEMTCVVNLFIDVLWAKQEFRTKYPDFKVDTWLSARLQQCLGKQALEIVKSQRKKKKKVKPVFKGKSFNLDARFVDFHFEENTFDVWVRLSSLGNKLQLRLPSRRHAQFNKFEGWRQKGSIRLNRTKDKSFSVTVFFEKKTPATKKKGKTVGVDVGYKKLLVASTGKVIGDGLEAVYEKIARKKQGSKAFKRALIERDNLINQSLNKLRFYGVREVVCEKLKDVKKGSNGRIRKKFNNKLQRWSYPKVLAKLSRLTDGAGVLLTAVNPAYTSQKCSLCGVTRKGNRNGETYKCACGNAMDADLNAAINLSHMGVYSPHAL

SEQ ID NO: 31370 - protein, 408 aa, Veillonellaceae sp.
LDKFLFLFYGRRCAAWNRQAVYREPKDIAKEVRKMETYTLGYKFRIYPNRTQENLINRTLGCVRFVFNHFLAVRRDEWKANHNSLTYVKTSKLLTDLKKREETAWLSKADSMALQESLRNLDRAFQNFFAKRARYPRFKSKHSHSQSYRTRNQTNGIRIIDKRIKLPKIGLVRIKQSRDFDGRILSATVSRAASGKYYVSLCVEAEKGSLSCPNDGKQIGIDVGLKVFYSDSNGDTVENPHPLKKLQRKLRREQRRLSRKMSRSVNRERARVRVARVHERIANIRRDFLHKISTRLARENQTVAVEHLNIKGMLRHHKLAKSISDVSWSEFFRQLSYKTERHGGELLQVDTFYPSSQTCSVCGCQNPLTKDLSVREWDCPACGTHHDRDVNAAKNILRKALEDKSKVA

SEQ ID NO: 31371 - protein, 542 aa, Streptomyces sp.
VGGLREVTAPFLVSGPSGVAIRTRLKNMSAGDEKVLRLVGDHLGSLASRDLKARCAAGLEHDSEQWAQRKRALTEKSSSRWAGSITKATHDQWALARRGRLAHIHSLQAGMQTIRHRLSLPVSEKGSKRAPGGYRSKREWFAKTRRLHVLEDRLATERADWEAGVVHVVRGGKRLLTTRHHLEHAELTEAGWRARWAAQRRFLQADGESGKRYGNETIRVTPDGEVSLKLPAPLAHLANAPHGRYLLAARASFAHRGEQWADRVTANRAVAYRIHEDVGRGRWYLTASWTHPPVQTVPLEAARANGVLGVDTNADHLAAWRLDRHGNPVGEPLRFGYDLTGTTQHRDAQIRHALIRLLHWARRHGLAIAIEDLDFTAETTREKHGRKKRFRKLISGLPTSRLRTRLVSMAAELGIPVIAVDPAYTSRWGAQHWQKPLTSNNRKTTRHDAAAVAIGRRALGHPIRRRTAPPPAHRSDEHGHRTVQARPGVPGGEGNRPRISGPRIRSARTGNGANAVDQNAQHRWGRSAEHESWQQDSLPLSL

SEQ ID NO: 31372 - protein, 326 aa, unknown
  TnpB Polypeptide
MKRDIRKGKNVKSPFVKKSYLVNCYGFKINNSLMSIPFEPRQPINILLNNHTVKFLSDPVLKVHSFTLTAFNISICISKEIDMIECTKIVGIDRNLRNVTVGNGELVTFYKTNKLLSIKQNTVYARSGFHRNDHRKKRQYYKSLQQRLQNRTKQYLHKISKNIMDNAVETKSIIVFEDLKGIRKLYRKGNGQGNKYRGKLNGWQFYELQRQIEYKAKWVGIPVVFIDPKRTSKLCPICGDRIQEDKQNRRKLLCINCGKSMDRDVVASMNIAHKAWSRFNHARGDTCEGQSDVFESAMSEPKLSDYDDVVIRILDVSKSVTGFGSR

SEQ ID NO: 31373 - protein, 326 aa, unknown; identical to SEQ ID NO: 31372
  TnpB Polypeptide

SEQ ID NO: 31374 - protein, 324 aa, unknown
  TnpB Polypeptide
LLKDFPEHLIDQALKEAFTRFGICLTQCIETGKLFEFKYKNGKLPIQSINLEKEMIHRSNSLFMNWKIDDKYMFRNLKTSEKFSKFKFKGSSITYHKILNKFTLNLNYVYQTQKYNNSNRIGAIDPGQRVFATIFSTDKIIEIGNDACEKLFKICREIDIIQSRLNRKEYYIKENNEKKVFKMNHNRRRNLKRALHNKIKYIKSLRNELHNKCIKYICNNYSTIILPPYEIQNMVGKLHSKIARGMYSLAYYLFREKLIKKAKEYSIYVLIKPEYYTTKTCGRCGHLNHEIGNKKVFKCPSCNLEILRDHNAGRNILLRNIRFA

SEQ ID NO: 31375 - protein, 325 aa, Helicobacter sp.
LWNNQGFSIKESDDERFKTFTLMKMPLLMRMHRDFPPNFKVKQISISCSHRKYFVSFSVEYEQDITPIKNTKNGVGLDLNILDIACSCGINNHEKLTDFKQYQTDMKELLGIEIDEELDTKRLIPTYSKLYSLKKYSEKFKRLQRKQSRRVLKSKQNKTKLGGNFYKTQKKLNQAFDKSSHQKTDRYHKITSELSKQFELIVVEDLQVKNMAKRAKLKNVKQKSGLNQSILNASFYQIISFLDYKQQHNGKLLVKVPPQYTSKTCHCCGNINHKLKLNNRQYWCLECGYREHRDINAANNILSKGLSLFGVGNIHADFKEQSLSC

SEQ ID NO: 31376 - protein, 416 aa, Pyrinomonas sp.
MPILTIKAQIHTDVETERILRDAMFCATKVYNGLMWHLRHQQEETGRIDVRRSNLNRILSTLPRARGYYSMSVQLTRDEVRQAWRSFFALRRNGRTDRSAPGFRPKSMLSPIKYVQSGFRVKGDRLTLSLGMGREDGVRSVTVRLSHRPGVEYERVREVSITYDTLTGRLEARLVVEVRARENHGTSRLTVDLGETVLLAAAFEDGTALLYSGRLIKAIRRYWQKVRSYVRPPSRERPHKSRRFLQIAHQERRQLEHLLHIVTSHFIRECVRRGVGEIAIGDLVGIRHGMDYGARMNQRLHAWPYRKIINMIRYKAALVGIAVRDDVNERGTSCTCHACGRTRRASRVHRGLYRCPCEWTAQADVNGALNIYQRAFHVSPVKGSSGRVARPVVLSFLPGWHTVHEPKRRPILRPST

SEQ ID NO: 31377 - protein, 400 aa, Pyrinomonas sp.
MAVHRKVYRFRMEPTQTQAEALLRMAGARRFVWNWGLARRKEAYAATGKGLTYNQQATELTALKKQPEMAWLREADSQLLQQALKDLDRAFRAFFSKRASFPRFKSKKRDEPRFRIPQRVKVEDSKVYVPKVGWVRLRQSQPVDCPIKGATFKRDGAGHWYVSLTAEFEMPDVPLPSANPERVVGIDLGLKDFAVLSDGTRIAPPRFYRKGLAKLRRAQRALSRKQKGSRNREKARKRLSKLHARVRHQRQDWLHKLTTGLVTRYDGLCIEDLNLKGMAKTKLSLSVLDAALGEFRRQLTYKAVWYGKHLVVIDRFFPSSKLCREGGAINQNLALSERVWTCECGAVHDRDLNAAQNIRAEGMRHIPVAVGHTETLNAWEEGVRPAHGGQSSLNQESHRL

SEQ ID NO: 31378 - protein, 509 aa, Richelia sp.
MARSTTPSFITELPLKVDSKINKQLSARFQAGRQLYNACLKEALIRMELVRNSEPYKQAKKLNREKDKKQRKELFKTAREQARFSEYELQSFATLTAKSSKWIANKVDSNSQQKLATRAFKATERILLGMAKQVRFKVPTRFKSIEGKSNKQGLRWLKNQVVWCGLRIEPIIDWDNPVLTHGLNSPVKYCRILWRILNGKRRWFVQLINEGLPYQKPQNYVTDGTVGLDLNVSNIAFVADYHAGLLPFAQNVPTFDREIKALQRKMQRSQRMHNPDNFHPDFDQKVGNKIVRKKGKVKQGLEFRREKMRQASNKTSSFEHPTNQLTKPAPFFKEYVRKKQWIKTRNYRRTQAKKAELERRKSAYTKSQNRKLVNEILRHGNRIKTENVSVKAWQKRYGKAISAKSPGFFQSELARKAESAGGQFIKFPTKTTALSQTHLDGTRIKKKLSERVHYDVTGVAPMHRDLFSAYLARCVYGDVLSLRDAQSEYPDTEPYLLGAWQRYKQAARK

SEQ ID NO: 31379 - protein, 336 aa, Okeania sp.
LKARYKYRIYPNHIQITRINQLFGCCRYVWNQSLAHCNQLYADGQKKPSYVDLTKQFITQAKRELVWLKEVASTPLQQSLKDLDQAYKNFFNSCTGKRKGIKVKLPKFKSRKSRQTARFVGKNYQVGQDKIYLPKVGKIKIVWSRPLASKPSSVTIIKDSAGRYFASFVVETCAENLPKLGKSIGIDLGISTFATLSNGDKINAPKPLKNNLKKLAKFQRKFAKTESGSKRREKCRLKIGKLHGKIKDIRTDFLHKLSTDLVRKYDVIVLEDLNVSGMVKNRKLAKAISDLGWRQFRTLTEAKCEKYGREFKVISRWEPTSQKWCDSFSRNLEIGG

SEQ ID NO: 31380 - protein, 519 aa, unknown
  TnpB Polypeptide
LKDKGNTQTIIFRLHPTPSQERKLHEIFTIYNRVRRIGYKMLFEKREVFFSKNKHAKDGLDSKIHAKLMEICRNNPYVNTIKRDNQTRLKQQATWLKKRKNYMKNQIKEIKNKIDFIKSINKRDRRLRGLYARLSSIQNTFNNLKLKPVIFGTKQWFRERIKGNISKEEFKLKRDASFSCEGKKQYGVVNLNIKVLSNHTVRIKTFHKEKEKKYLYVPFTVNISQEKWYREILTAEKYMGTIKRKVIKGELRYFAHISYDIPEAELRYNFEKGAIGLDFNYNFVSLSNIDKKGNLKSYHEISFRNLHTLRKNARENYISYKMEKVIDYCINKNKGLVIEDLAFDQEFSYNKKHNRKLSNLKTTALDLLERKCIKRGIAIRKVHPHYTSLIGKYKYSRSYNLSTHVLASYVIARRGLGFKESIPAIYKRLLSQVGEMIEPRLKKGSPYYEWSQIHDLLKHSGITSFKTSEIMKISLLVKDVLNLVTSEQPDNLTVGLSSEGKIENYYKFWNFIEITNLYK

SEQ ID NO: 31381 - protein, 291 aa, unknown
  TnpB Polypeptide
MRSCAYSITYPQSGFKIGDSTVSFSMFGKPVQIKAKLHRPVIGIVKTCTVRRYGSKWFVCFSIEQEDDFLPPCNDAVGLDAGLNSFLALSNGESVDNPRFFRRDEKALAKAGRKQSKTKKRSKERRKANTVLSRIHERIRNRRHDFVHQTARKIVNRFGVIAVEKLNVKGMVTPINPKNHCLAKSISDASWSMFRTVLTSKAGSADRDANGTALREVIAVNPAHTSQDCHACGYRAKKKLSERWHNCPMCTVSLDRDTNAAINILNLAIGTSHAGITACQVAPVEVPAFNL

SEQ ID NO: 31382 - protein, 529 aa, unknown
  TnpB Polypeptide
MAAQGPGSQTRARHDRCAQLECGRVLRRVRPPDRHSRGARQRSPGCCVGSRRLLGRPGRAGVLMAGFEVPEGWTVQAFQFALDCTPEQAACVRRQFGGRRYARNWAVRTLKEDLARYRETGEQSDFPSLAGLRKRWNQVKDVECVDAGTGQVWWPQISKEAFADGIKAAVDAYWNWQASRAGNRRGLRVGFPRFAKKGRDRDRVTFTTGAIRVEADRRHVTLPRIGTVRVHENTRRLQRLIAKGRARILAATVSRRGTRLVACFRVLLRRPIQPRVARPGSRVGVDVGVRLLATIASQDGQVIERVPNPRPLQAALTELRRLSRQRSRRTRNSRRYTQTQQKITRLQRRVASIRGHHFHHLTARLAKTHGEIVVEGLYAAGMLRQKGLPGARARRRGLSDSALGEARRQLAYKTAWYGSRLVIADRWYPSSKTCHACGHVQEIGWDEHWTCTRCQTSHQRDDNAAINLARYEPLPTRSDSALGPVRAAVKRGADRKTRPRRAGGEETRKGPSRQAGKQPRDGVLMGGYL

SEQ ID NO: 31383 - protein, 962 aa, unknown
  TnpB Polypeptide
MDWNSLFHSKYLRGGLCAVLIAAILLGLWLPGTGLKEAQPDDPLQGEGVREITVLKLGENLEQLNTISVPSGGQTKSTEPNDKASETRPEETQPDSSTDDGSDGQEDGNQGADGGEITPSELSLVLTWHPENGNARSVSCGADNTQAFAVSSYELDEGVFTFSVNLTGTLAQDAKIVNGISITESTQTARELKWPSDSLIMNPAAGTDKEVYNFSFTVRTAERDVFFRYKITYQKLPDVQLAFSWMEGGRTRHELQPCKPERTVSAKIKNNQLSGGALPYKLELTGKDAANARIWSVSYTSDANDGNLRYPVDSLPMKMPEGETSNTYRIAVNVIANSQNYHYEVVLYFGNDVTLQMRYTLLDGTQPVILCENGKTKAADTVYDDQLAGNMLPYEMSIVGSDADSVTITSVRCTRTGDDNKTQKLHESGEVQLFLNSGKQGQNNFTVEAADNSGNQYTFKINVPYKHSGNNNIQIETNLDTVEELINETKTNLTVKAWGEDANGNVTGYIPANGTDTILRVVFDGMEVGYISTSPTEKTSEYDLYPANPEIGDTNEHTLYIYAEDAYGNNGDKTLTFTGKRREPGQKIGDATILVDMTVLGIGVVGPIHYDVLADEPISYVVAKAIMGMDTGEPFGEASNTLGWRGSYAGTLDTGFYLQWLDTGYSADALEDSTWPGSTEEEVLAAIDARFGARTGLATLWRCLYRNGLNKSTGSGSRIGEFDYTSGSGWMYSLRGTYYPGQSMSAVYLKDGDVLTLRYTLAYGWDVGGGSDNYGNVVGYCVEAVNGYFNINHVMETVENPDGSIHYVCHCCGLIEDCTHEHTTYKDLEDGTHILFCEDCKTAIGDPQLHNWTYAAGDTEDNHVCAECGATEQHFWKEVEGTSICFGVKLRGKYFRRVSRWFPSSQTCRCCGYKNTEVKDLKVREWTCPQCGTWHDRDENAQKNIHAEGLSILKSEGIQIIM

SEQ ID NO: 31384 - protein, 358 aa, unknown
  TnpB Polypeptide
MIQYQRKLKLTKVQEAQLNTWLFHLTSVWNWAIRKIELDARDKVYYSRKTFQNLLTGHSGKLGIPSHTIQGMLDQTWLSWQRCFKKISRKPRFKGRRNKLNSIPFPDPIKPPLNNRVRMPLLGLVKFHKQDIPEGKINSGRIIKRASGWYLCLNINAQPNVIPHVSDDQVGIDPGYVTLLTLSTGEKIEHPKELQNNLIRLGQAQRGINRKQVARLHERIKNQRKDRNHKISRELVSKNQVIAISKDNLGGLARSGFGKSVGAAAHGQLRSMLSYKCRAGGREYIEVPSKFSTMTCSTCGARSGPTGKSGLKVRYWECNVCGTVHDRDVNAAINTLIAGLGISHESYREVASEIREVA

SEQ ID NO: 31385 - protein, 456 aa, Escherichia sp.
  misc_feature (205)..(275): Xaa can be any naturally occurring amino acid
MHQENTMLPRRISVSLFIDQSIIWPVKRLQAFKFQLRPGGQQEREMRRFAGACRFVFNHALALQNENHEAGNKYIPYGKMASWLVEWKNATETQWLKDSPSQPLQQSLKDLERAYKNFFRKRAAFPRFKKRGQNDAFRYPQGVKLDQENSRIFLPKLGWMRYRNSRQVTGVVKNVTVSQSCGKWYISIQTESEVSTPVHPSASMXXXXXXXXXXXXXXXXXXXXXXXXXXXXXXXXXXXXXXXXXXXXXXXXXXXXXXXXXXXXXXXXXXXXXXXVKFSNNWQKQKRKIQRLHSRIAYIRRDYLHKVTTTVSKNHAMIVIEDLKVSNMSKSAAGTVSQPGRNVRAKSGLNRSILDQGWYEMRRQLAYKQLWRGGQVLAVPPAYTSQRCACCGHTAKENRLSQSKFRCQVCGYTANADVNGARNILAAGHAVLACGGMVQSGRPLKQEPTEMIQATA

SEQ ID NO: 31386 - protein, 530 aa, Verrucomicrobia sp.
MRISTGKPKRALFARMRVGIPMGDLKCEFLRRFGITARQFNAIRVGLEGKIASIRERLPEWIAEAESRIQRAERAIRILSAREPGSEKLHQKKRRLGNLRARLAALIADRDSGRVRFCFGSRRLFRKQFHLKENGYASHAEWKKDWQSARSAQFFVIGSKDETAGNQSCQASVEEDGSVTLRLRLPDALASDGKLLVIPGVRFAYGQEEILQALAASRVVLSQTKGGKPARRRDGVAVSYRFVRDRKGWRVFSSVPARPVPIATSRLAGAVGIDINHDHLAVAETDRFGNLRRALRVDLNLYGKTEDQAKAIIGDAARMIVEMARERGLTLVLERLDLKKRRAELEVASPSAARKISSFCYSKTISLLKAGCFRAGVEGIEVDPAYTSVMGAMNHARRHGISSHQSAAYAVARRGLGLSQASDRAGGRPRRPAQWRPPHLCPTREESGEACVVVLVGGSEEAQSGVCIACPVGRLARAARAFAPGNAGIGRNLGIAGGIPAREPSAEVFGRRRRRPPLVVGWLSMVLGTV

SEQ ID NO: 31387 - protein, 265 aa, Verrucomicrobia sp.
VKNVTVSQSCGKWYVSIQTEREVEQPIPKGGAVGIDMGVARFATLSDGTFYAPLNSFKRHETALCKAQQAMSRKIKFSNNWKKAKARIQKIHSRIGNARRDSLHTVTTTISKNHAMVCIEELQVRNMSQSASGAADAPGRNVRAKPGLNKSILDQGWFEFRRQLEYKMEWRGGWLLVVPPQNTSRTCPCCGHGSADNRRTQAQFMCVECGFEENADLVGAINVLRAGHARIACEVSGIKSPAAGTRRSGSFRFKPGLSAVGISGI

SEQ ID NO: 31388 - protein, 364 aa, Synechococcales sp.
LQSEYIIPADAPYPNYYAQKKALTAAKTDFPLIKAVHSQVLQNVIAKVDSAFAFMKERGFGFSRFKKFGQFKTLHFPQLQADPIRGTQIKTPKVGLMPIVLHRPIPEGFEIKSLRMVCKHSGWYVTLCLQADVSIPDVPPHGHAIGIDVGLSYFLSTSDGEQIARPRFFDKLHRKLELLQRCLKRKQKRSNTRSKLIQKIGRVHEQIAACRLDWQFKLAHHLCDRAGMIFVEDLDFRIMAKGMLGKHTLDAGLGQFVNQVLPWVCFKRGVYYGKIDPKGTSQTCPDCGARVKKDWSVRIHECHECGSIKPRDVAAGQVICARGLSGVESSRGTFPAPWGEVLELQCGATHREQISFDTPLLAAG

SEQ ID NO: 31389 - protein, 320 aa, unknown
  TnpB Polypeptide
MKIVSSYGIEIKKQHMFDTTIKIYREAVSFLINCLNNEWPYIQAIDKAKARFNFAEKLVHTTKNNAAKYDFDAKFYKFPSYLRRAAIQAALGSISSYHSNYKNWETNGKVGKEPKLQCDRFCFPAFYKTIMYEESNKPNQCYLKLYKNSDWVWVSIKMRATDVKYISKYWSHCEKSAPTLEKKYGKYFLRFAFVEKVELSETEIQDRRICAVDLGLNTDAVCSIMTADGTVLARKFINFPSEKDHLYHVLNRIKRKQREHGPNSAAAMWRYAKALNNDKCKKAVLKLFIIHTFFLYKLVKSPLSFYYNKSILSCNILKLI

SEQ ID NO: 31390 - protein, 411 aa, unknown
  TnpB Polypeptide
VSIIEPNETFKFQLKTNEAEAAQLRRFAGCCRLVWNKALAMQKERLDSKQSILNYPKMAAELIKWKYAPETSFLSEAPAQPLQQTLKNLDRALRDAFNKKSPKRFPRFKKKGTGDSFRYPQGFKIDEANSRVFLPEIGWVSYRNSRAIEGTAKNITLSESGGAWFVSIQTEQETEQALHESGSIIGLDMGVAKFATLSDGTVFQPVNSYRKHEKKLKRLQRQLSRKVKFSNNWKKQKGKIQKLHAKIANIRRDYLHKTSTTISKNHAIVVIEDLQVANMSATAKGTAEQRGKNVKAKAGLNKSILDQGWHEFRRQLEYKQAWRGGIVIAINPRNTSRACACCGHIAAENRTTQSRFECVSCGYAENADINAAQNILAAGHAVLACGEAVRPRATVAASLKHEPSERAAQAA

SEQ ID NO: 31391 - protein, 405 aa, unknown
  TnpB Polypeptide
MRTAYRCRAYPDEAQQQMLSRTFGCIRVVWNRMLAARHTRYQVEGKGISYAESDRVLTVMKKDPDLAFLSEVSSVPLQQALRHQHAAFQAFFAKRARYPRFKSRYARQCATYTRSAFRMKDGALRLAKTSAPLSFTWTWPDIDVTGLDPTSVTMTRDPAGRWFVTFHMDVPDPAPLPATGESVGVDVGLRDFAALSTGGKIGHPKDWERHERRLKRYQRRLARCQRGSANRGKAKRKVARAHARITDARRDFLHKASTDLMRRFDVIAVEDLNVSGMVRNRKLARAISCTGWAEFRAMLEYKARRHGRIVVAVDRWYPSSKTCSACGYLLASLSLGTRHWTCPGCGTRHDRDCNAAKNILAAGLTAGADNGADACGGGVRRAGATRVRSPVKQEPQPVRAGIPVL

SEQ ID NO: 31392 - protein, 375 aa, Proteobacteria sp.
MKLTLQLRLVPTTDQAAALRATMAAFNAAATYAAQAGFAAGLFGQISIHHLVYYEIRTRFGLSSQLAVRAMAKAVECFQRDKTVCPTFKPDGAICYDQRVLSFHGLSAASLWTLRGRVEVPFVCGPYQRARQGRIKGQADLVWRGGTFYLLCTIEMPEDPPLAPQDVMGVDLGVINLATTSDGTTYSGVGIEACRTRYAKRRQRLQRAAALAQMDGKRPKKMRQALQRMAHKEAGFRRDVNHRISKTLVASAKGTQRGIALEDLTHIRARSRFRQPQRARMTGWAFAQLRRFVEYKAQRAGVPVGLVNPRHTSQGCNRCGHVERANRQSQARFSCHSCGYTTHADLNAAHNIRDRGRVKVPLVAVPLRQLRLPLA

SEQ ID NO: 31393 - protein, 380 aa, Proteobacteria sp.
MDLALQGRLAIVTGSSVGMGRTIAQVLASEGAQTVVARRETLLNTLKDEIVARLHYLAYYPVKAAHPTLVSDLINQARVKAAEALRSAFALRKDVARTVSQPQSDACPPRYNTHTYRVDWSSRTVRLSTTDGRQTLRFSVPAYAEKYAGFPTDTADLLSKRGRCYLHIVVTLPTPWLLSSDAVMGVDVGLAQPAVTSTPAFLGERRWKDIEGQRFTLKRQLQRQGTPSAQRHLRHLRGKQARCRRDCDHVLSKHIVQAWEPGATIVIENLTDIRRRTKSKRKTETARRVHSWSFAQVCSFLEYKAEERGCTVVAVDPRHTRRRAPAAGIPLVTTVVLAVALCVGCVTLRCMPTSMRPGILRPSTMPASVHLGLTRRRQSA

SEQ ID NO: 31394 - protein, 392 aa, Proteobacteria sp.
MELTLQLKLLPTDDQSTALRATMARFHEACNWLAARAFAQQCANKLTLQRLYDYELRTMFALPVQMVVRCLARVAGTYRRDKTICPTCRSEAAMPYDQRMMRGDGLDHVSLSTLTGRVLVSFVLGPYRRPRFDAYEPRQCQLVVRSEGQWFLLVVVQVPEGTPCPPTDFLGVDLGVVNLAATSDGTTHSGAGVEACRTRYARRRQRLQWAAHRAQRAGKRPKNMRRALQRTARRASRFRQDTNHRIRKTLVAAATGNGYGIALEDLKAIRRRTRFRKPQRAWMTGWGFAQLRFFVEYKAQLAGVQVVLVDPKYTSQQCSVCGHIAKANRRSQALFSCQACGYPAHADGNAALNIRYMALVNAPLVAGRVPQLWLLGDVGASDKLRHFSASSH

SEQ ID NO: 31395 - protein, 351 aa, Proteobacteria sp.
MSNSILTYRYRLKDATSGKHLLRMAWACNTVWNFCNEVSLLAWRRHKHFLSAFDLINLCAGAGHALGLHTDTLSEICQEYARRKRQCHKIRLQWRSRKRSLGWVPFKGRCIRLRDGEIAYKGRRLRFWSSRPLGGTVKTGSFSQDACGHWYVNLQCAVETPGVPLGAAEIGIDLGLKNQLACSDRPEPYSRENLTRKHEDALGMAQRAHKNKRVKAIHARIANTRKDWAHKTTTQIARRATLIVVGNVSSTKLSKTRMAKSVHDAGWGQLRMLLEYKASKLGVTYCEVNEFGSSVTCSACLSKTGPSGLSALGVRVWTCTHCGSLHNRDLNASRNILRVGRDTLPGIPLCQ

SEQ ID NO: 31396 - protein, 280 aa, Proteobacteria sp.
VGPPSFRKVRSAKSFTLKQAGWKLLEGHRLKIGQTVYKFAKSREMDGTVKTVTIKRDPLGDLYVYFSCVVEPQPITRVMTGHSAGFDFGLTTYLTGSDGTMHHAPQPLQSSLKAIAQANRHLSQKKKGSCNRRQAQRHLDRVHKRVANQRQAFHWQLAHQLCAAYDSLTLETLNLQGMKALWGRKVSDLGFATFVETLHAVASKTGTLIQHIDTWFPSTKLCSACGWINQQITLRDRVWTCGDCGTTHQRNVNAAVNIFREGASSPGGIHVSQASACRGC

SEQ ID NO: 31397 - protein, 387 aa, Proteobacteria sp.
MAQRQTFMDKRYRGKRSKRLHRQINVGGAMHNHCIALHRRYDRRYTKHLSLYTLHAHLAKVKRLPKYAWGRPLGSQAIQEIARRLDTGYQRFFQHVKERKAGKATRRVGPPTFRKIRKAKSFTLTQAGWKLLGGNRWQIGTTIYKFAKSREPLGTIKTVTIKRDALGDLFVYFSCLVDVQPMDRVMTGHSAGFACGLTTYLTGSDGTESHAPQPFTQSLQAIATANRKVAHKVQGSCNRHQARRHLARVHRRVAHVRQAFHWDLAHELCAQYDIIRLETLNLQGMQALWGRTVSDLGFATFVETLHHVASKTGVLVQHIDRWFPSTTLCSACQNVNEPITLRDRVWTCTFCGVTHQRDHNAAINIDQEGASSCGGHPVSLAPASVDG

SEQ ID NO: 31398 - protein, 397 aa, Proteobacteria sp.
MKLTLQLQLLPDTAQADALQSIVERFNEAATWLAGVAFAQQCANKVARQKLAYYALRERFALPADTAIRCIAQVVEAYKRDKTRAPTFRPHAAIPFSMRKNLGFKGPDRVSIQTLPGRVVVRYLMGAYHTQRFGFAHGQADLVLRRDGVWLLLVTVDVPDGTCMPVTDFIGVALGVVNLATTSDGAVHSGEKMDACRTRYAQRRQRLQRAATVAQMDGKRPKNIRRALQRTAMRAARFRRDTNHCISKTRVAEATGTGRGLALEDLTPSRARTQFRPPQRAKMAGWSFAQLRRFVEYKAQLTGIPVVLVAPRNTSKGWSQCGHGAQANRPTPARFSCTQCAYTASADCSATRNIRHRAPVNAPQVAGRVPQQLWLLAGADASDKLSPDRCAAVGGSR

SEQ ID NO: 31399 - protein, 427 aa, Proteobacteria sp.
VKRALCGERNSVALAVRASYTSTMSYRTIEIHRMPRTATEWHTFTASRKEAARLWSDLVERHHRLRRLHLKWPSKSRWARWCKGRYPGLSAQSTQQIIGEFCEAVNSTRQLRKNGHKEARYPWKRLRYRDVVYTNQDARLRDGKLILPHGASGTLRISMPVALPGRLMEVRISMAAVRLICEIPDAPRPQKIVIGVDLGVNTLIAATDGEKAILVSGRGAKATVQYRNKRLASCSHAQSAKTKGSRQWKRLQKRKARMLAKTHCRMRDLTHKATRKVVEAFPDATCFVGKPFNDAAHTIGRRQAQQVSSACNRQIIGQLDYKTAGAIEVDEHYTSQTCPVCGERNKGRRIYRCRRCGQTAPRDVIGSVNILAVGQHHSLIPGRSVPNAVICVHPVKYPGLSPGSSGGHPASSLGLSQEAPPRSLLSD

SEQ ID NO: 31400 - protein, 370 aa, Proteobacteria sp.
MARFHEACNWLAERAFAQQCTNKLTLQRLYDYELRTRFALPSQMVGRCLARVAGTYRRDKTVCPTLRPDAAMPYDQRMMRCDGLDHVSLTTLQGRVVGAFLIGPYHRQRFDTYAPRQCHLVVRADGQWFLLVVVQVPDGTPIPPTDFLGVDLGVVHRATTSDGTMYSGEGIEACRARSLHYRRRLQRAAHVAPMDGKRPTNIRRALKRTAQREAGFRREPNHCIRKQLVAAATGNGHGIALEDWTYIRARTRFRKPQRATMSGWAFAQLRFFVEYKAALAGVPVVLVDPRNTSRECRACGHSAKANRHTQARFSCKQCGSTTNADLNAALNIRSRARVNAPLVAVRPPQQRWLLAGAASDKLRHFSASSH

SEQ ID NO: 31401 - protein, 367 aa, unknown
  TnpB Polypeptide
MLKAYKYRIYPNNEQKIQIAKTFGCCRFVYNQTLAYRKEVYEKEKKSVSKTDCNNYCNRQLKKEYEWLKEVDKFALTNAIYNMDAAYQKFFKEHAGYPKFKSKHDNHKSYTTNFTNGNITVDFGCNRVKLPKLKGIKAKLHRNFIGQIKSATISQVPSGKYYVSILVETEHVELPHINQNTGIDLGIKELCITSAGKKYENPKIIRKYEKKLVKLQRQLAHKEKRSQNYYKTKKKIALCHEKITNTRKDYLHKMSHEIISENQVIVSEDLQIKNMVKNHRLAKSISDVSWYELTRQLEYKAKWNGRKYVKIDTFYASSQLCSACGYQNTETKNLSVREWTCPVCGTNHDRDINAAKNILEEGLRQIA

SEQ ID NO: 31402 - protein, 372 aa, unknown
  TnpB Polypeptide
MFGYRIFPTKKQETRLNETLHECRWLYNHLLEMRKKAYEQEGKSLSCYGQQATYPMLKQERPSLSTVHSQVLQNVAVRIDLAFKAFFRRCKAGEKPGFPRFRRADRYDSFTFPQSGFQIDGQGKLSASGIGHIKMVLHRPMRGKIKTLTIRRSATGKWYASFSVECEPERLPQCPETVGIDVGLKTFASLSTGEEIANPRFFRKEEKALAKVQRKHSKLTKGTPERRKHRKAVARVHERIAFRRDNFTHQESRKIVNHFGVIAVEDLMVNRMVHNHCLAKSISDAAWSAFFSQLSAKAEEAGRQCIKVNPAYTSQDCSRCHHRQYMPLSERTYHCPCCLLSIDRDLNAARNILRLGLQSRVIPEAPVIHAGE

SEQ ID NO: 31403 - protein, 537 aa, unknown
  TnpB Polypeptide
MISDEEYKKLLKQFHKLSDRHILVAETDMSSSDIQKVVALSNRIRKAGNELIGLVKKNYDQLMRTKKYRKLLQLYGSIEDKNKRKDLANQLNEMQKQYNVTWDYCRTSMIPIGKKYSVDAVFALAKAEDIWRGIEKCLYGNGNTIHLFKYEDLPCIRAKQINRGIPMSVKNNKLQFKLGKSTFGIKVNDRFQTDEVNAVLDYLAEPEITDNNAIQTLLDEAHCIDTYRPCYVTLVPKFIRGKYRVYLHLTIEGKAKPKYDRFDNPRHKFGKGIIGADIGTQTVAYTSDTEIGLKNLSERGNSIQKSERLERLYYRAMDRSRRTTNPQNYNDDGTIKKGRKHWKYSKHYKKLKAKHHELCRINAINRQLAINEDANHLRSLGDTFITEPKNASKLMKRAKETTVNSKGKFNKKKRFGKSIKNRCPSGFQTVIEKKFKVTGGTYIEVPYSYKASQYDHTANEYIKKKLSDRMYKLTDGTLVQRDWYSSFLLYCYDYKTKGIDRDKCVTRFNKCYNKEKALIEWIKANKIKVLNSGIKIA

SEQ ID NO: 31404 - protein, 365 aa, Clostridiales sp.
LQIVYRFEIRPTQEQEQKMFRTLRLCRHLYNRSLEERRATYKATGKSVTYSIQQNSLPAFKKENPEYRTVHSQVLQDVLRRVDRAYQNFFEGRAGYPRFRNRDNYRSFTYPQVDVVRETFQRDGCIYLSKIGFVKVIAHRLFEPERVFQINIIRKHNKWYANLTVELPDPGQTPGDLERGIGVDMGLLHFYALSDGTTVDTPRYLSKSEQKLAKLQRRLSRKKKGSKNRRKAKIKVAQCHEKIANQRKDFLHKKSYNLVTSNNVIVMEDLQIRNMAQNRHLAKSIHDASWSAFQKYVEYKCRKYGKQFVKVDPKDTSQTCTCGHPVAKDLSVRMHKCPRCGLEEDRDVVSAKLILERGLKKLTAA

SEQ ID NO: 31405 - protein, 383 aa, unknown
  TnpB Polypeptide
MFKAFKYRLYPSPRQKHQLNGILETCRRWYNDCLEERKTAWEERHESVGKYSQLHKVKDLKKTNAYAAYIHSHILQVVVQDLDKAFTAFFRRVKTGEKPGYPRFKGYHRFQSFGLKEYGNGFKLDGRRLKVSGVGRIAVHWHRPIEGEIKTVRLVRQAGNWYAAFGCEVVEHPLAPTGRDVGVDVGLHHLAATSDGEITDNPEWYRAEQARLRVLQRRVARRKLRGRNRNKAVLALQRQHERIANRRQDFLNKFAHRLVHDYDRIAIEDLQVKNMVRNRHLSKSILDAGWGYLKQRLAHKAAEAGRVVYLVNPAYTSKTCSHCGTVFETLSLSDRWVSCSCGLSLDRDVNAALNILDRAGQARWGITWPVPTTACVPQETATL

SEQ ID NO: 31406 - protein, 435 aa, Psychrobacter sp.
MKINKAYKFRLEPNIEQEIILNNLVGSARFVWNQMLAISFEMFAKNEFINATNLVNKIVDLKNNPEFSFLKTSSNAVSLQQKIRDLASAWSRFFDPKAHARLKENKKKPRKPKCFKLADGTEIQLRPLMPQFKRKADGCDSVRLVQFDKYCRVEGNRVKLPNGIGLVKFRKSQAIIGTIKNVTISKKSGHWYISFGTERELTENPRHPATSAIGLDMGITKLLTTSNGTHIKPKNSFKANQIKLAKLQRGLAKKKLFSENWKKHNRKIQKLHHHIANIRHDYLHKITTNISKNHAMIVVEDLKVVNMSKSAGGSAAQHGRNVKAKSGLNKSILDQGWGMMVNMLEYKQQWRGGLLIKINPRYTSQTCSKCKHVATENRRTQAKFECVQCSYVANADFNAARNILAAGHAVLSVEGGCGKGRPLKQKTCDGREKVA

SEQ ID NO: 31407 - protein, 485 aa, Kutzneria sp.
VARFEVPDGWTAQAYRFALDTTPAQVGVLVSHAGAARFAHNHMLALTKAVLDQRAAERTYGLPEDELTPSTGWSLPALRKTWNQRKDTAAPWWRENSKEAYNTGLDALARGLDAWSKSRTGERAGKAVGFPRFKSRRVERSVRFTTGVIRVETDRRHITLPRVGTIKAHESTRKLVRRLEAGTARILSATVVEDSSGRWFCSFQALVMSKARPAHALRSAHRVVGVDVGVRDLLVVAAPDGTEIRRVAAPKSLTAAQPRLRQLQRKAARQHGPRATATRAKRRPSKRWRKTQTRIGRIHARAADVRRDILHKVTTALAQQHNVVVVETLNVAGMGKAGGARKRGFNRALADAALAEFRRMLGYKTRWYGIQLVEADRYYPSSKTCSVCGGRKPNLTLADRTYTCDHCGARIDRDLNAATNLARLGETHTLGAQSPADSGSVAGRGATRETDPARAGEAGGREASTLHNPIRVGQAGTAVSQGTAA

SEQ ID NO: 31408 - protein, 353 aa, Oscillatoriales sp.
MFAVKRALKLNNQEATLMAKHAGFRRVVFNMGLSLRVQMYGAGEFSDSKVINEIKKVLTNYVKKQPECTWMNQLSSRVYQNALIDLSHAFGRYRLGKAGHPKFVSRRDGQSFTVDSSNGKVLLSAGRTIKIPTLGTFRLHEPLSCSFVSQTFTLSKEGNRWFVSFCVDAQRLPMRQRESSVGIDIGVKSFATLSNNQVFDAPKPLKQAKTKLARLQRQASRQVKGSNNQRKTYDKISQIHAKIACIRKDFLHKLTTYLAQTFLRIKIEDLNVSGMLANHKLAGAISDLGFYEFRRQLVDRWFPSSKICANCGHKKDMPLSVRTYDCPACGLSVDRDLNASLNILNWEPKAIGG

SEQ ID NO: 31409 - protein, 373 aa, unknown
  TnpB Polypeptide
MVLKSFKLRLYPNLEQSSKLNKTLGCTRLVYNYFLDYKINLYKNTGTSINYKDCSKLLTQLKLERPFLKEVDKFSMQNALKGLHSAYDHFFKDGFGFPKFKSKRNPKNSYTTNFTNNNIKIENHHIQLPKVGKVKYKGYKNKNISEYKIVRATISKNNLNQYFCFVTCEVEVQSMPKLATSVGIDFGIKTFATLSNSGSIFNPRTLFVYEHKLKQEQRKLSKKQKGSKNNEKQRLKLAKIHNKVANIREDFLQKETTKIIKENQIINIEKLSVKMMMTSKEYKNIAKELANVSINKAIQMLKYKADWYKRTLVEIGEYYPSSQLCHCCGYQNKELKLSDREWICPSCNTHLDRDYNASINILKEGQRILATRK

SEQ ID NO: 31410 - protein, 402 aa, unknown
  TnpB Polypeptide
MSYRTVEFRWLPDSKSQWEVLTHSRLEAARLWADLVVRHARIRRLQWNWPPKGRWEQWAKKRYRHLHSQSVQQIIGEFLEAVDSTRQKRKNGDEKAHYPWRQAHYRDVIYTNQAAKRDGNKLILPNGKAGKLVVHIPDNITLRGRIMEVRLAFNRVLIVCELPVVKIEEESPVAPPLPTPVIGVDLGVNTLIAATDGMTAVLVSGRELKATVQWRNKRLASLQKRQSTHKKRSHRHKRLQRRKYKMLEKARNRIRDATHKATRIIADAFPKAQVVVGKPFNDAAQKMGSRQAQQVSSACNRKIIQQLSYKLSGATEVSEAYTSQTCPVCGTRHKCRRTYRCTLCSHTIPRDVVGALNIRRIGMTGAMMNSPDLPTTIKYQRPVKVFPKRTAVSSGGHPASSS

SEQ ID NO: 31411 - protein, 590 aa, unknown
  TnpB Polypeptide
MGKRRKKKKGVGEFSFQARIKDPKACLGLDSLGPFYSSLTRHLFADLNKETLTTKPLYCASLEILARQFNGCKVEADARYKNALENYKFQLDNLPIRIQAIEEDLEKLEDKFTIHQKKRRWYHLSKQQEALEKKIKEENISCVFGSKKLWLAQFNLEANNYKSHEAWRKDWIAHRDYNFQVVGSYDETMGNGMCQLIQKENRFWNLQLRLPKNSPEKYLIIPGIKFNSDNEESYQTLLKVYLQNKNKELRQSIAFRFHKDKKGWIVTLTTRVSPVEVKTNINNGVIGVDTNPDHLAYMEIDRFGNPLPNGQAGKGQIFFNLKGDADFDLNAIQHSAIELVDLALRTGKSLVIEKLDFKKKLAQLEAMHGPAYAKMLSSFAYSAIVEAILSRAYKMGVEVRQVNSAYSSLIGNFKYTKKYGLTSHLAAALVIGRRCFRLSERLPQLASDYHQISVGRYQVTLEKPVDSSKHVWSSWAKVQRQMQKQLRELRGQSKLEFRRKLKQKSRRTLKLELKSKRRAMSKDIDPQKLVPSDLTITGEQGNEKNLQSCGDDASPLQLRSASNPEKAVPFRVSTSRDDTLGQRVKYGHQH

SEQ ID NO: 31412 - protein, 353 aa, unknown
  TnpB Polypeptide
VDLSRCLLARIGRWSKRAAYNYFIAHVRQPWMAELTSRAPRNAIDDLHNAFHHFFRRCKAGEKPGFPRFHKKGVHDSFAIREKPKFDVCGRRLRIEKAPGRIKMQQALRWSGELCAVTVSARAGKFFAAILVDTQDYDRRGGDGTVGIDLGIKALATLSTGDVIPANQKLKANLRRLCRRSRNLSRKQRGSNRRARTKLALAKLHRRIADQRTAMLHEVSNLLTRRFDTIVIEDLAVKNMVKNHSLACAIMDAGFGCLRRMIEYKAAFRGGTVIVAPRFYPSSKTCSACGVIKETLTLVERIFRCDDCGHECDRDLNAALNLLRLDTLRPDVKRTQEPRQPIGLAPTAAALMA

SEQ ID NO: 31413 - protein, 292 aa, unknown
  TnpB Polypeptide
MKTEKYEFYHQSNLMQVGNLIDDLHRVHVHLLKLQRRYYRIYGKYASFARICNHITKLKARTQPHWNQLPSQVIQQVAKRIHLGYEKFFENIEDRKVGKTKRKVGRPRIKPTHKYNSLTFTQAGFKIEENRLTINCLKKSFTFWKHREWTGTIKTVTIKRDTVGDYYLYLTCEDCEPSEKLPLTGNVAGADLGMKTFLTLSDGTKIESPEFYKQGLNALRSANKALSRKQKGSHAWYRAKRHLARVHKKIASRRRDYFFKVALRPLYPPTQSIPKMVGAVSLGKHPSKNTAP

SEQ ID NO: 31414 - protein, 324 aa, Escherichia sp.
LQQSLKDLERAYKNFFRKRAAFPRFKKRGQNDAFRYPQGVKLDQENSRIFLPKLGWMRYRNSRQVTGVVKNVTVSQSCGKWYISIQTESEVSTPVHPSASMVGLDAGVAKLATLSDGTVFEPVNSFQKNQKTLARLQRQLSRKVKFSNNWQKQKRKIQRLHSRIANIRRDYLHKVTTTVSKNHAMIVIEDLKVSNMSKSAAGTVSQPGRNVRAKSGLNRSILDQGWYEMRRQLEYKQLWRGGQVLAVPPAYTSQRCACCGHTAKENRLSQSQFRCQVCGYTANADVNGARNILAAGHAVLACGEMVQSGRSLKQEPTEMIQATA

SEQ ID NO: 31415 - protein, 294 aa, unknown
  TnpB Polypeptide
VALDEAAGTVAIPKVEHVRLHLSRPAQGVVKSATIRGDRCGDWFVSLRLEAPALVDAPVPETQALGNAIGIDLGLATYAMLSTGEAIANPRYLRTSLRALKRAQRALARKRRGSANRDKARQRVARLHRQVARQRADCQHKLSTDLVRRFDLLCVETLSLTGLARTKLARSFADAAFGEFLRQVRYKAAWHGRHVAPVGRWFPSSTTCGACGWVYPGLTLKERVWTCGACGVTHDRDANAARNIAVEGKRLFALCQAGPVAASAGTGVATAGKRATGRRVPTSTSGVAAGPPAT

SEQ ID NO: 31416 - protein, 567 aa, Desulfocapsa sp.
MSELRTTTVRKYGCLPPLDWDEGSSNQLWLQNRFWNRLVEIEREHKETFFAITAEDSEVDRLDKEISALKARKVELISQKKKLKQKARQRVKTPEIDADIKVLTAKIKELVPQVKTARKAARERLKPKLQELEVNRKAAVKSARQEYAAAGLFWGNYNEIVNRYQRARQRAIKSGGELHFKRFDGTGMITQQLQGGRTAEQIFDTDDSQFAIILTDPTDYQEGDVCGRRHAGHRFALRIKTYGRGKSYKIVTLPLIMHRPLPDDCIVKEVRLNKRRVADQEQWTVVLTCSIPKPDLPEPTGAVTSVNFGWRQEEDGSLRVATIMRPGQPHFHIYCPAEIKQKIERVYEVRSIRDHSLNAVVSILKNMDWTEAPEDMKDVVARFRRTPKPSPASVVRVINAWDEHPKWNATTYNALHNWRERDRRYWREERHLHDRMTNRRQDLYRNEALKIVAGASAIIFENFDMSQTARLEDENGEKTQIPEAARHNRVIAAPSMIREAIRLQAGKRQIPIKTHRGKSTHKCSACGADMDAEDNHGQLYLTCKSCRTTMDQDKNACLTMLKSVAAE

SEQ ID NO: 31417 - protein, 542 aa, Proteobacteria sp.
MGRSSTKSFIQEFEITSAVDSFSTLRKSESFSKKLYNAVLGSLLKSFNCMKTSEPYRSALLLPKASKERNASFSAVRIEFGLTEFAAISLASKLRTGSKDFDIYVPSKVAQEIGKRVFKAVERKMYGKAKRCRFKSKSEAFSIRGSSNAESPQIKVDIAESTAKLIYRKKVYPLKVDANNAFHAHALSSRTKFSTILKREINGKTRFFVQVCCEGLAYRDQYKELKHKNLLKEEFGDDIRAESVSVDFGPSKIAVSNGNISFERIIVKDSLDEKIRDSQRLQKRMSRSIRLNNPVAYKDGRLKKGVKLKKSKNYLKLSRNKKDLERKISSHRKSIHGNLSQKIMQLGSTLKLENISYKALQKRYGKSVGKSAPSSLKASLFRTAEKLGGCGELINTYQTRLSQTCLCGETKKKSLSERIHACGVCGLTVQRDILSAFLGCFTVNTSEKKGRRQTISSSLDLASARSAACKQGNKTFSFSGMPFSENYPKENFEDQSFCFEREEVASTEKSENRPSRVLQESRSSHLENVNASKGRESPSIAE

SEQ ID NO: 31418 - protein, 387 aa, unknown
  TnpB Polypeptide
MRKAYKFRLYPTKKQEQKLFWTLTRCRELYNAALAERKEAYRMAGKSISYYEQKRDLVEIKAVLRPEYQGIHSQVAQDVLLRLKRAFDTFFRRVKNGEEPGYPRFQGRNRYNSFTYPQGGYSLTHDNRVCLSKIGSIKITLHRKMEGTVKTCTIKYEAGQWYAVFSCEGKQPEPLPVVEREVGIDLGVTHFAALSDGTFIESPRYYRTAQKRLEKLQQALSRKKRGSHRREKARKAVAKAHRKIAHQRRDFHHKQAKQLVSEHQTIVFEELEITNISKRAKPKQDEETGQYLPNGAAAKSGLNKSILDAGWGQFQQIVSHKAACAGRDVLKVNPRYTSQVCSQCGTVRKKTLEERWHSCECGAELDRDTNAAKVRRFGAYQISPSGR

SEQ ID NO: 31419 - protein, 412 aa, unknown
  TnpB Polypeptide
MIKLTRTVVVPSVVLTKRKWGILKELESVYEEVVRELVTYGFENDVRSFTRLKKCKYHELRRKYPQMPSHYIHTACQDASTRIKSFLKLKRKKLAKSDKPLVNKTTIWLDDHLWKPLGYAAIKVATHRGWITIELQPHKLYWKYINGGWKLRTQPKLKIKQRRVYVYFTFEKEIEVETDGNVISVDVNEGNVTVKVLDKVYLLQIDIKRLTLGYANYREITQSIKSNKHIKRVIHGRERNRKRDRRYKVANIIANIAKQLNAVVVLEDLPKRCPRNMISNVKDRKLRHRIYQAGFRSLVKVIEEKCLEKGAHVVKVNPRGTSSTCPFCNSKLMRGDAPRQLKCPKCNVEMGRDVVAVLNLEKRYLTLEGHLPFAPMPDESALEVAVLPMKEWMRRKSLPQIQYATVLNKMKR

SEQ ID NO: 31420 - protein, 399 aa, Streptomyces sp.
LIRTYKFLMRPTVGQQQALSEMLRDHCSLYNGALQERRDAYRHASRTTVRYGEQSAQLKEIRAFDPERQGRWSFSSQQATLRRLDKAFAAFFRRVKSGEKPGYPRFRGVHRFDTVDFPRNGDGCRWDSTPHDPVTRVRFQGVGHVKVNQHRAVIGSVRTVSVKREGKRWYVVLTAEHSGPVPLPATGSAVGIDMGIVNFLADSDGGFVSNPRHGRKAAAKLEAAQQALARCKRRGNRRRKAVEAVARLHRKVRRQRLDHAHKTALGLVRAHDLIAHEDLRIHNMVKAPVPKPDPERAAVFLPNGAAAKAGLNRSISDAGWGVFLAILRAKAESAGREVIAVDPHNTSRRCPECGHSTVENRPTRENFRCVSCGHAAHADTVGAVNVLRAGLARRDARPG

SEQ ID NO: 31421 - protein, 420 aa, Streptomyces sp.
MSQSATVGIVQLRYAFRVYPSAGQRSSLARSFGCARVVFNDALRVREDARAAGLPFVTSAELSKRLTASKKTPGRAWLGEVSSVILQQSLRDLDTAYRNFFDGIRGKRPKAGPPRFKSRRDSRQAIRFTANAGWRITDGGKLRLPKIGDVRVKWSRALPSVPSTVTVVQDAAGRYFASFVVETDPAADRERMPAADATVGIDLGLAHFAVLSDGTKIDSPKFLRRAEKKLKKAQRVLSRKVKGSKNRDKARVGVARAHARVADARREFHHRLSTRLIRENQAVAVEDLAVKGLARTRLAKSVHDAGWSAFVTMLEYKAVRYGRAFHRTGRFEPTSQVCSDCGVKDGPKPLGVREWTCGACGAVLDRDVNAAVNVAKAAGLAVSACGAQVRPVFVPAQRGEAGTHPKPYRATVRQTGITRL

SEQ ID NO: 31422 - protein, 405 aa, unknown
  TnpB Polypeptide
MPRRPTLKAYKYRIYPTDAQVVFFAKTFGCCRFIWNRMLDEKLQAYKKKERIPGVTPAEYKKEFPFLKEVDSFALCNVQLQLEKAFKDHFRNRKQFKLPKFKKKRDKQSYTTNNTHNLIRVDFEKELLYLPKIRDGIKIELHRKFDGKIKSVTVSKTSDGKYYASILVETENRRNKVVEPKSKACGIDLGLEHFATITNDFGSYKIEHPQYLRQGEERLKRLQKSFSRKQKGSKNSEKARLRLARQHAYISSARNDFLHKLSKAIIDENQVVVVEDINVKGLLKTRLAKSIGDSGWSKFLTYLRYKAEWYGRTFIQVDRFFPSSKLCHRCGYKNEDLALHDRTWCCPACGETHDRDVNASINLYFVGLGRPEVTPVEQALVDDRSPYGLPKKPSCDETGSSTTYG

SEQ ID NO: 31423 - protein, 348 aa, Escherichia sp.
MASWLVEWKNATETQWLKDSPSQPLQQSLKDLERAYKNFFRKRAAFPRFKKRGQNDAFRYPQGVKLDQENSRIFLPKLGWMRYRNSRQVTGVVKNVTVSQSCGKWYISIQTESEVSTPVHPSASMVGLDAGVAKLATLSDGTVFEPVNSFQKNQKTLARLQRQLSRKVKFSNNWQKQKRKIQRLHSRIANIRRDYLHKVTTTVSKNHAMIVIEDLKVSNMSKSAAGTVSQPGRNVRAKSGLNRSILDQGWYEMRRQLEYKQLWRGGQVLAVPPAYTSQRCACCGHTAKENRLSQSQFRCQVCGYTANADVNGARNILAAGHAVLACGEMVQSGRSLKQEPTEMIQATA

SEQ ID NO: 31424 - protein, 353 aa, unknown
  TnpB Polypeptide
MIVRTLKLRPTKKQEQMLDGWLNNLTAVYNFGLKKIELNAKDNIYFSEKTFHNLLADHGKKLGIPSHTIQGTLSQVYDAWQRCFKKQAKKPHLKGQHNKFNSIAFPDPIKLPKGNKIGIPGLKKVRFIKQELPDANIKCGRIVKRASGWYLCLWLDTEHSFRVDETDKAVGIDPGFETLLTLSDGTKIENPRELHEGAKRLAQAQRGHKKQLTARLQERQANRRTDRNHKISRWLVENYKTICYSDDNFKGMSAGIFGKSVTEAGLGQLAKFITYKGSICGRNIISVNSRKTTMTCSNCWALTGPTGLGGLKVRQWKCSACGADHGRDHNSSKVVLIVGLGISHEGKAALRVA

SEQ ID NO: 31425 - protein, 474 aa, unknown
  TnpB Polypeptide
MRALKTKIKGLKKPQFERLKELTHHAKNLYNQTLWTLLEAFEATGKYFSYFQMDKAMKKVENLEGKINYRLLKSAVAQQTLRRLDKNFKSFFMCHQDFKKHPGKYKGKPKPPKYKQGKHDNLIYNTCAFQVKNRIYATKDPKIAFFETSNGTVFPMGQFVFFEQVVVLEKGMELIVPKQLWDKQIKQVEIIPKHRSFHAVFVYEENPADFVQINHNEQVMSIDLGVNNLATCVTNGVVSPFIIDGRKLKSVNAYYNKRKAKMQSKLSKRGKKWSRRLQGLTDKRNAVVNDYMHKATSIVVKTCLKHGISKVVVGDVVKSLNRINLGKRTNQNFVNLSLGQFVDLLSYKLGSHGIELVVTDESYTSKASFLDGDKMPKQYNPKAKKKHTFSGRRVKRGLYKSSNGTLLNADANAAYNILRKTDSDFSFSKLAKKVGARVKEWLHPTKRVRPLPTKKEQFWLNLNRLKLKSNLSSH

SEQ ID NO: 31426 - protein, 430 aa, Brasilonema sp.
VLHKAIQVRLYPSKQQQIQLAQTFGSARWWWNYALNKSIEVYKKTGKGLGQVALNALLPKLKKEKDTEWLADCYSQVLQATTLNLTTAYKNFFDGRARFPRVKSKHGKQSIQYPQNVKIVNGNVKLPGNIGIVKAKIHRPVEGKIKTVTISKTPSGKYFASILTHLSPGKGASPITSSTRLVSQINKTRAGSFSYVEDPVTEVEGENSSTTEGKIYGVDLGLKHFAVVTDGEKVSKYDNPKHLAKHEKNLKRKQQKLARKQKGSSSRFKYRKLVAKVYERVSNSRQDFLHKLSYKLVSDSQAVIVENLHVKGMVRNHNLAKAISDCGWGTFTNFLAYKLERKGARLIEIDRWFPSSKLCSNCFYQMGKMPLDVREWTCPNCGAHHDRDGNAAINIRAEGIRMLKVSQCGRHMPVVGKPSRSSGSSWGLPK

SEQ ID NO: 31427 - protein, 325 aa, Synechococcus sp.
VAKQKKRPVKEFKSGFVTYDTRIFSFRQKDWTVSLTTVEGRERFELAIGNYQRGMLAGSNPKSATLVQRKDGSYSIQICVEAEPPKQQNTDKVIGVDLGRRDIAHTSEGDNWNGQQLSKVRDHYCRLRASLQRKASKGTRSCRRRCRQLLQRLSGKERRFQAWVNHSIAKRIVKAAQSLSACIAIEDLSGIRERTNQHPRSREERRRSNSWAFYQLRRFIEYKAVRAGVKVVVVPAAYTSQICHKCLHIHPDSAQSYRKGKQFKCGHCGWEGDADFNGAKVIALLGAAVNQPRGSWLACQLQGYRSRQRAGGLKPALYCEAVRVG

SEQ ID NO: 31428 - protein, 414 aa, Synechococcus sp.
MTQTLTISCKLKVSEAQAAKLDATLDAFAQALNWVNQSTPEKVVNAVKLHSLCYYEIRARFGLSSNLAGQVCRRVAGSRKVAKQKNRPVKAFKAGFVTYDARIFSFREKDWTVSLTTVEGQERFELAMGNYQRGMLAGTHPKAATLVKRQDGSYYIQICVEHDLPEPQNTPKAIGVDLGRTDIAHTSEGDNWSGQQLSRVRDHYSRLRAVLQRKASKGTRSSRRRCRQLLQRLSGRERRFQTWVNHCISKAIVSRVQATHSFIALEDLTGIRERVNQQPRSKTERRRSNSWAFYQLRQFVQYKAARAGIRVVLVPPACSSQTCHQCLWIGQRERKRFRCVNPACGWEGDADYNGANVIALLGAAVNQPPSIPPPPCPPYTGGVGGRGLEGGRSEPGSLLMSEPGDLPAGSLSDC

SEQ ID NO: 31429 - protein, 443 aa, Synechococcus sp.
  misc_feature (172)..(175): Xaa can be any naturally occurring amino acid
MRTAYQYRLRPTASQVALMGEWLELLRKQYNYRLAERFRWWEQNRCDIHACSLTVCHLPELKDKPDFYSQKRDLVNTKALFPEYQAIHSQVLQDCVERVQRAFDRWLKGDCNGKRAGRPRFKGVGRYRSFTFPQMKQDCIRGQFIHLPKIGPVKLVQHRPLPEGFVIKTATXXXXRGQFIHLPKIGPVKLVQHRPLPEGFVIKTATITRKVDGWYVTLSLQDSSVPEWSPDTPTWENTMGIDLGLSSFLVTDEGEAVEVPQHYRRAQKPLKRLQRSVSRKQKRPNRYQKAVKRLSKAHQKVANQRRDFHHKTARKLLQTRKHIAHEALDIKGLARTRLAKSVHDAGWGQFLQILAAKAERAGLLTIAGDPRGSSQGCSGCGREVPKKLHERWHDCPSCGLRLSRDHNSARVIKSRAVGRPVLQAQEMSCHWAGVTVGEAWRKP

SEQ ID NO: 31430 - protein, 192 aa, Synechococcus sp.
MAAKSSPLTSGTTRSWLGSRLTSCGGFGCKSLVELRKPENAVHKAVGKVIDFCLHHSIGRILFGWNKEQKQECGFNQNFVFVPTGRFKERIAQLCRHYGVEFIEVEEAYSSQASFLDGDELPNYGEKPDGWRPSGKRVKRGLYQTAKGWLVKAEANAAANLLKKVSRTLGLCVKELSRGALTTPLRVLLWAA

SEQ ID NO: 31431 - protein, 440 aa, unknown
  TnpB Polypeptide
MKETINELGLTKSGLEKYAGVMQRRYKKNISSHQVQAEVAHILKGLEKVLYGDGRDVHYKKERDFTTIPGKSCSNGVILHFDQDDEKHEVNCYITWNGITIPVRYDLSKADLPGGRNYVNESLSSGKICYCEIKRIWFRSGYKYYVDIYMKGEAPKKVEPGKSVMGIDEGTSTVAAVSGDAVFLEELAPRCVDYNKEIAKLQRQIDVSTRKTNPDKFKEDGTCRKRSGWKEKHWTFSKNCLRKKAKLRELYRRKSAYAKCRHENLLNRMIQSASSFVNEPMEFSALAKRSKKTERQDKLSEVKKKDGSVKIVRKYKRKKRFGKSVNDRSPALFQTRLKQKCVQYGLAHMETDKWKYRASQYDHDLDAYIKVELSRRFKTVAGQVVQRDLYSAFLQSCMGTPEKPDREKCLQLFGQFVRMQAELIMKMKASGQSRPACFGF

SEQ ID NO: 31432 - protein, 381 aa, Okeania sp.
MRRVGVESPMRVVDRHIIRQAHQYCQLCDDLAFKSKNLYNLANYYCRQHFFCTGKSLSLTKLYHATKDSDAYRALPTKVSKQIIKCLVATWRSYFQAIKEWSKHPCKFLGKPKIPKYKDKTQGRNVVIYSKESVYKANLKNGICHLSMSEIKIPVVVETVIEVRIVPATGCYIIEVVYEKTSEPWMESTYVAGIDLGIDRLVALATNKPGVKPLLVNGKPLKSVNQLYNKRKAKYQSHLKDNRKTSRKIEALGYHRNRFVENYLHNTSKLVVNYLVTNHIGTVVIGKNDNWKQGVNIGKINNQKFIQIPHSKLIEQITYKCELAGIKVIETEESYTSKTSALDLELPRRHENYVGKRVKRGLFRSATGKVINADINGSLQI

SEQ ID NO: 31433 - protein, 392 aa, unknown
  TnpB Polypeptide
MKARWTFRCYPTPEQAQHLARTFGCVRFVWNWGLRLRSDGYRAGERIGYPETDKRLTVLKRQPETVWLNEVSSVCLQQSLRDLQVAYSNFFDKRTGYPTFKRKDGAQSANYTERGFSFEPKTKTLKLAKIGAIKVKWSRRAIPAPSSIRLIRKPSGRYFVSLVVDTTPADLPKTGESVGVDFGINRLATLSTGEKIANPKHGAKWQRRLAFYQKRLARCQKGSKRRAHVKQHVARLHEKIGNSRTDTMHKFSTSMVQRFDVIYIEDLNLRGMLKNHSLARALSDASIGQAARMLEEKAERYGKRVERIDRWYPSSKTCSACGHIQESMPLSVRDWTCPSCDTRHDRDMNAAVNIMAVGQTVSAHGGTVRRSRATASERKSPRSANRQAATSG

SEQ ID NO: 31434 - protein, 280 aa, Escherichia sp.
  misc_feature (139)..(139): Xaa can be any naturally occurring amino acid
VKRLQAFKFQLRPGGQQECEMRRFAGACRFVFNRALARQNENHEAGNKYIPYGKMASWLVEWKNATETQWLKDSPSQPLQQSLKDLERAYKNFFRKRAAFPRFKKRGQNDAFRYPQGVKLDQENSRIFLPKLGWMRYRXAMIVIEDLKVSNMSKSAAGTVSQPGRNVRAKSGLNRSILDQGWYEMHRQLEYKQLWRGGQVLAVPPAYTSQRCAYCGHTAKENRLSQSKFRCQVCGYTANADVNGARNILAAGHAVLACGEMVQSGRPLKQEPTEMIQATA

SEQ ID NO: 31435 - protein, 421 aa, unknown
  TnpB Polypeptide
MFFPDRLYPNEQQEVLMNKTFGCCRQIYNLHLNERNEYWKKYSEVLKEERPILKPTTEKQWKEKFEYMKEVSSTALQQARKDCDTAFDNWFKSSKGMIGGKFKHPRFKSRKSNDFSYREVMISKNCFDFDHRTLNIPKLKKVKFKLRSLPKNFIIRSVRNITVKKTPSGKYFASLCCEVEYIESRYRHESQMSAIGLDWSPKTLFVADDGKTGRDYNYVAFKQESSKKLHRLQKKMMKKQKDSKNRNKARIKVARLEEHIANQRKDFQEKLALQLVKQYQVIGIEDLDLKGIAKFLRNAKNINDTSWNSFVSKIERKAARFNSVVIKAERWFASSKTCSKCGYVKHDLKLNDRMWTCPTCRANHVRDMNAAVNLKKNALSTLGSRGINACGESCHCLCSNQTTSMKQECQVVKPDQNSNHL

SEQ ID NO: 31436 - protein, 418 aa, unknown
  TnpB Polypeptide
VLLLFGCQQILIKSDKDTQAILEYLCSESNDLYNCAVYYARQIWFKTGKIVSGFDLTAEMKTNRHFQAGYASSMQQTCINVGEAFKSFKQLLSKAKKGELEQKPKPPRYRKSGGLFTVTYPKRWLKLNEGMIRFPLGNQVKAWFGINEFFLPMPSNLDWQVIREIRILPRNGTFYAEFVYSMQAESYQIDSSKALGLDPGLNNWLTGVSTTGDSFIVDGKELKALNQWYNKQTSTMKDGKPQGFWSRTLAQITEKRNRQMRDAVNKAARIVIDYCLASGIGLIVFGWNKGQKNSANMGAKTNQKFVSVPTAKLKDRIGWMCEQYGIRFEETEESYTSKASFLDKDELPKYGEKPNEWKSSGKRVKRGLFRTATFGYINADCNGAANILRKVKGKLGLDLSRLTRGVLTAPIRIRLWSI

SEQ ID NO: 31437 - protein, 414 aa, unknown
  TnpB Polypeptide
MEKRRTVPVRLTVNSDDAALLRDTVDEFLWAANYVTRHAFEGEYVTTSKTTLHDDTYDDVRDETCLHSNHVQAARNKAAEACKSVVEKWKQDKKASMPHFTSPHVVYDHRTATFHDEYVSLATVDGRVEADYVLPNEERDTPHAEYFFSDEYETSGAELHYTNGNWMLHVHCKRDVKLNTSEQATPENGTVLGIDLGVNNLAVASTGTFWTGDEFDHWRREYEKRRGDLQQCGTRWAHENMQAVGRKEEGRFKITLHRISNEVVAEAREHGCSVIAFEDLTEIRERTGASWGHKWAFNRLYEYVEYKAAEYDITVEQVNPENTSRRCSHCGFTHPDNRESESFECLKCGCENHVDYNAAKNIGLRYLRRNQTGSGGGAPVGVRLNSGTLNVNGEYEPPAEESARTGVHAESPRL

SEQ ID NO: 31438 - protein, 371 aa, Escherichia sp.
  misc_feature (153)..(156): Xaa can be any naturally occurring amino acid
VKRLQAFKFQLRPGGQQEREMRRFAGACRFVFNRALARQNENHEAGNKYIPYGKMASWLVEWKNATETQWLKDAPSQPLQQSLKDLERAYKNFFQKRAAFPRFKKRGQNDAFRYPQGVKLDQENSRIFLPKLGWMRYRNSRQVTGVVKNVTVXXXXKLATLSDGTVFEPVNSFQKNQKKLARLQRQLSRKVKFSNNWQKQERKIQRLHSRIANIRRDYLHKVTTTVSKNHAMIVIEDLKVSNMSKSAAGTVSQPGRNVRAKSGLNRTILDQGWYEMRRQLEYKQLWRGGQVLAVPPAYTSQRCACCGHTAKENRLSQSKFRCQACGYTANADVNGARNILAAGHAVLACGEMVQSGRSLKQEPTEMIQATA

SEQ ID NO: 31439 - protein, 348 aa, Methanosaeta sp.
MTETLELCRWTYNETLAFRRNAYEQEGKSVSYYETKKLLPQWKEDKPELKRVHSQVLQEVVKRVDLAYQAFFRRVKEGQIPGYPRFKGYGRYDSFTYTQTGFSLKPGKLWLSKIGDIKIKLHRPVDGEIKRLNIRRMPTGKWFVSFLVEVESDELISKIGSSVGVDVGLKSFMTLSNGDRVDNPRFFVQEEKALAKAQRKLSKVPNDSPERRSALKVVHRVHERIANKREDFVQKLSLSLVKSYDLIVFEDLNIKIMVKNHCLAKHIADAAWNKLVITTSYKAEWAGKRVELVNPSNTSKICSGCGQIVLKSLSERVHKCPFCGLTLDRDHNAAINILRLGLQSVAKA

SEQ ID NO: 31440 - protein, 373 aa, unknown
  TnpB Polypeptide
MKTYKFRLYPTKSQAEKLADTLKSCRVLYNCALEQRKVCYKQFGVSVRRLDQQTELLEIKNHFPEYKRIHSQVLQEVILRVERSFQNFFRRVKSGNNPGYPRFKGRGWYDSFTYPQSGFSLSDNSKGNQRLKLSKIGNIRVKLHRAVKGQIKTCIIKREVDKWHVCFACEIEPEYLPKTNKSVGIDVGLEKFAALSDGCIIENPRFLRQSEAKLKREQRKLSRKKNGSNSRKKQKIKLTKIHRKIKNQRNDFLHKESRKLVETYDTIVFEDLKIKNMIKNHHLAKSISDASWSRFIEYTSYKAESAGRKVIFVNPRNTSQDCSGCGNTVKKNLSERTHKCPFCGLVLDRDVNAAINILRRGTRPGGATAVAGL

SEQ ID NO: 31441 - protein, 505 aa, unknown
  TnpB Polypeptide
MNTASTLSSTTWSGVPSAVKPCLVAVSPRTAKPSSSRSVLRRAGKSWSWRFNPIIYISLCACGRPTLPPMSSRSARDSRRIISARSTPCCVVCLLSGHAATLPQRLATSPKKSFSATLLLRKGCSAMLKAIVYRLYLAKTQQRSLDRTLETCRRWYNRCLAERKDAYEQEKRTIGKYEQLRQVKTYKATNPYAGAVHSHVLQTVVQDLDKAFQAFFRRVKAGEEPGYPRFKGKHRFKSFGFKEYGNGFKVDGRRLKIAGIGRVAVRWHRNVPGTIKTLRLTRKAGKWYAVLACEVDAEPLPATGVDVGIDVGLISLITTSAGEHVEHPAWYRKAQKRLRVAQRRVSRRKKGGANRRKAVIALQREHERIANQRRDFLYKLSHRLLTAYDHVAVEDLRIRNMVQNHHLSTSILDAGWGLFAAHLTSKAANAGREVVFVNPAYTSRTCYACGQLVLHLPLSQRVFRCACGYVADHDENAARNILRLGQSRWASTSTLVGVAQEAAAL

SEQ ID NO: 31442 - protein, 441 aa, unknown
  TnpB Polypeptide
MQVTSSYGAEIRKQNISILHTLRIYRSAVSYLIRVYAEAWEELSGITDTKKRFNEAEHLVHTTKKNQARYDFDRYFPKLPSYLRRSAIQHALGSIASYETRLELWKNGTLSGKPKLTLENHAMPVFYRNVMYREAGETENAAYLKLYDGHDWKWFRVRLLHTDMEYLRKHWMGKKASAPTLEKRHHKYFLRFTYTEETKLSRTAVKDQTICSVDMGINTDAVCTIMRADGTVLGRRFLNFPSEKDRLYRVLGRIRRFQRQHGSGQSGSRWAYAKRLNMELARKVSGAITAYAWEQGAEVIVFEYLEMQGKKQGGKKQRLHMWRKRDIQKQCEHQAHRRGIRVSRVSARNTSRQAFDGSGKVARNPENHSLCTFTTGKQYNCDLSAAYNIGARYFIRELLKPLPETERSSLEAKVPAVKRRTSCVYADLRRLSQELGSCQAA

SEQ ID NO: 31443 - protein, 371 aa, Synechococcales sp.
MLLGFKTELKANQKQKTLLAKHCGVARHAWNIGLSALKFVLDHNKNNPEQKLKIPTAIDLHKWLVAVIKPDYPWYYEVSKCPPQQALRNLCSSLKDFFNKKKVSGKVVSFPNYKKKGKHDSFYLDGSIKTDHFAIKLPRIGWVKTYERLPQGLRPKNVTISRKADKWFVSFKVEVTEENTPKLKEVIGVDLGVKNLATLSTGEVIEGAKSYKRLEKKISRLQYLLRKKQKFSNNWKKAQLQIAKLHLKIANIRKDTLHKLTTYLAKNHGTVVIEDLNVSGMMANHKLAKAIADMGFYEFRRQLEYKTKLYGSKLVIVDRFFPSSKTCSNCGCKKTDLTLSDRIFKCDDCSFELDRDLNAAINLSKVTSFVI

SEQ ID NO: 31444 - protein, 284 aa, unknown
  TnpB Polypeptide
MLLHQGSRYRIKEGYVEIVGGIRMKIIGWDRRYDEYENREARLVYRGGEMILWISKRIPKPEPYQPRDVIAVDVNERMIVYGGDRINRDIDTAIDRAYRWKVLAESLQGRYSSSRYPAWMRRIGMLNRVRSYHRKARNILEHWARKSSLKIVRQAMRLQYALAREDLTEHVEALRKLPKNHRTKLIIMGYSRLERWIDWQAMKHGAPLAAVDPRGTSSECPQCDSKLDENGYRRLKCSRCGFEADREVIGKLNIRRKALKTLGIKINPGGVLAPLTPQMTDANE

SEQ ID NO: 31445 - protein, 387 aa, unknown
  TnpB Polypeptide
MAAKMLWGIILTAQGIAANIPLSLTDANCEGSATNMAETILTQRAFKYRIYPSHAQQTRLEQTLGFCCELYNAGLQERRDAWRIARRSIGYKDQQNQLPDIKRIRPELGMVHSQVLQDVLRRLDKAFEAFFRRAKAGEKPGFPRFRARARYDSFTYSQSGFAIEHGKLRLSKIGKVKIKLHRPIAGMIKTLTVTRTFTGKWFACFSVECEPEPLPKSADAVGIDMGLKSFAMLSTGEVVPNPKFFRPDEKRLAHAQKKLSAATKGSPERRKRRKVAARVHERIANQRRNFAHQLSRYLVDKFGIIIFEKLAWSQTIQFSAYKAASAGRIEVEVNPRNTSNTTNCCGERVAMTLRDREIHCPKCHSITDRDWNASLNILALGLQSIGR

SEQ ID NO: 31446 - protein, 374 aa, unknown
  TnpB Polypeptide
MKGGSRMLRNKAFKYHIYPTGEQEVLINKMFGCCRLVYNTFLDVRSKAYAEEGKSVSYKETSSMLTALKKTEERSFLREADAMALQESLRDLDNAFQHFFQKHTRYPKFKSRKFPKHSYRTRNQNNGIRISGNTVILPKLGAVKIKLHRPIEGRILNATVSRNASGKYYVSFSCETDIEPLKEVSSVVGVDMGIHELCALSDGTVIENPAYLRNTLKRLKRQQQSLSRKTKGSANYNKQRLKAARLHEKVTRQRNDLIHKATSKLIHENQVICIEDLNIKGMLKNHRLALSVSDAAWGEIKRQLEYKALWYGRTIQKVGRFYASSQLCHVCGYQNPEVKDLTIRHWICPNCGTAHDRDINAAINILNEGLKAIS

SEQ ID NO: 31447 - protein, 364 aa, unknown
  TnpB Polypeptide
LNKAYKFRIYPTSEQQVMLAKTFGCVRFIYNRMLADKIKYYEETKQKLNNTPAQYKNEFEWLKEADSLALANAQMNLQTAYNRFFRSPKAGFPKFKAKKSNHRRYTTNYVNGNIKLANGYLALPKVGRIKVKQHRNIPYDYKLKSVTVSQIPSGKYYASILFAYKSQVQQIEPQTFVGLDFSMHELYKDSNGSEPKYPHYYRETEKRLRKEQRKLSLMQKGSKNREKQRVKVAKIHEKVANQRKDFLHKQSRQIANAYDCVCIEDLGMKAMSQVLNFGKSVSDNGWGMFVTFLKYKLEDMGKQLVKVDKFFASSQICSACGYKNPETKNLSVRSWTCPQCGTRHDRDVNAAINIRNEGMRLVTA

SEQ ID NO: 31448 - protein, 396 aa, unknown
  TnpB Polypeptide
MKTNQAFRYELKPNNHQKGLLLGLDRREKLYRTQTGKDRFVSAIDQHKELIALKQNEFSWMQEVSKCIPQQSLRDLDKAYMNFRRGRKIHENIGRPKFKKKGIHDSFWLEHHIKVSDKDIRLPRLGKIRTKEFTNKLVGDVSSATISREADRWYCSLCVEVNKKETKPSTDEIVGIDLGITDFAVIFNGSEYSHEQSPRPLKSKLQKLKRLNRQQSRKKLKSNNRKKANLRLARLYRRIKNSRKDYINKLTTKLTKTKSVIVIEDLQIKKMKEKKGKKHLARSISDAGWGEFRRQMEYKSIWYGSRLIKVPKSYPSSKMCSVCGYVKNDLQLSDRVWICSACGTEHQRDENSSTNMRNYGLKILSTESCSESYACGETIRPVGASLVEAGSEQIQR

SEQ ID NO: 31449 - protein, 395 aa, Spirulina sp.
MLNITYEYKLQPTLEQEAVIEDWLAICRKVYNYALAERKDWARSRKSPVNACSIDREYIIPADVKAPTFASQCKSLAVAKKVIPELKRPHTHVLQQTLRTLDAAFVAMWERGHGFPRFKKRMRSFVFPQLNKGVVERNRVNLPKIGLVKMRLSRPVPEGFEAKQIRVVKRASGYYALIVFQSDVDVPEVQPHGEPLGVDVGIESYLATSAGELIANPRFFVKGQRKLKSLQRQLKRRKKGSSRWLKLQKKIARHHEKLANARKDFQFKLAHHLCEQAGMVFVEKLNLKGLARGMLGKHCLDAAWGSYLSIQEWVCWKRGVYFAKVEAAGTSQECPQCSAVVKKDLSVRVHKCPECGYTTNRDVAAAQVVKNRGLAAVGHTVKKLKEGKVNGLPTN

SEQ ID NO: 31450 - protein, 395 aa, Fischerella sp.
MGNKAYKFRLYPNKEQSAFLAKCFGCSRFVYNHFLRLTTDVYAESKKSVRYKEWAKLLTNLKSEFEWLKEVNSQSLQQTLKDLESAFVGFFKKLGEFPNFKKKSNRQSFRVPQHFLIDNAGFLRLPKMTPIKMVIHRQILGTPKNVTISKTPSGKYYASIVTEQDILIAPLNGNKIGLDLGLKEFAITSSGEKFENPKYFRASLRRLKIRQRRLSRKQKASNNRNQARLTVAKIHEKVANQRQDYQHKISLKLTSENQRISAESLMIKGMIKNRKLAKHISDIAWGNFLIMLEYKGDIYGCEIHYVDRFFPSSKRCSKCGYIKQDLTLAIREWQCPECKSFWDRDINAALNLILFSESKIPLEEGKSTPDQLVERLGMNRDTGSGQEAPCVAQRN

SEQ ID NO: 31451 - protein, 293 aa, Crenarchaeota sp.
VRQQLVSCYSFKTKNGQLEIPIARGKRLSIPLTKHTIDIISQPGVEVCSFTLTHNRLCLSIAHDIATIECPSTVGVDRNLRNLTVGNDQETRHHDLSETVSIASTTMRIVASFKRDDARIRRVIASKYGLRRTARTGHLLHTTTKTIVSLAVQQRQAIVLEDIRGIRCLYRKGSGQGRRYRGRMNGWSFSQAQRQLEYKARWIGLPIIHLSRRETRGSSMTCPRCGERLQSDKHRDRVAAVNLSRGGRLRFARSRPPVILEAQGGVAEAVKGNPTPTVIPGVDAPKLTQPTKS

SEQ ID NO: 31452 - protein, 160 aa, Crenarchaeota sp.
VTKRIVGLAVEQRTAIVLENITGIRSLYRRGNGQGRKYRGRMNSWNFGEVQRQIEYKARWSGLPIIRLSKRDTRGSSVACPRCGERLQTDKWLRRKLWCSNCRIVMDRDVAAAVNLSRRGRLRFDRSQPKSWAQGPPGEAMVEESEPVRETVILKVEGAR

SEQ ID NO: 31453 - protein, 415 aa, Lactobacillus sp.
VKTISELIQTRVYKLHPNKVMRQALDEACDYRRYCFNQGLALWNEMYEARQIAKATKQKDLLKSYPSPTERRVRDELVANKADWQYQYSAHLLQLAITDLANAWSNFFNKAQPNWGKPKFKSKKAPRQGFKSDQSRIKDGVLYLERAKESTIPKDQWRGFKLSEEPLSEKFGVVSYFKEKGRYYAAIPFQVENVKQPAKTGKATAVDVNVGHFDYTEGRINVLPKRLNRIYKRIKHYQRQLARKRAENGQASYNSKNYLKTKAKLQACYRKVGNIQNDLIQKFTTRLVKDYDKIVIENLSVKGMLMSHVASKGVHRSMFGKFKQILTYKCDWYGKDLILANKLYPSTQRCAACSNVKKGDDKITLYGNKKHGTKHNEYVCYNEKCPNYNKVVDRDKNAMLSLLALAEHPELNHAL

SEQ ID NO: 31454 - protein, 593 aa, unknown
  TnpB Polypeptide
MQDIINNLFEKANAIGGNVLIADKEGIKEQFTYGFQSKEKNIPTSKDTIYRIASISKVVVATTVMTLVDDGLVDIKEDISKYLGYQVRNPYYPEDIITIEMLMTQTSSICDGEDETLGYDGVNGPRFFVDLQRLLTDPPYEYYTTKTYLKHKPGSFFCYSNFGCGILACIVEKVTGKYFTDYVRENLLLPMGLDASFRIDDIKNLDNLQKKSYAEKLIHSTKNNTAKYNFDSMFYKMPTYMRRAAINAALGYLNSYHSLVKLWQDNGCIGKKPSLQINHNSFPTFYRDNMYVSNSDGTVQLKLYINNDWKWINVSLKHTDLQYIYKHLQNASMSAPTLEKKNKKWFLRFAFEENVTLKKTDNTIMAIDLGINTDATCSIMKKDGTILARKFINFASDKDQINHTLNKIKGISQKYGSHNTTKLWRTVSFKNEELARKIAKSITDYAIEQNVDTIVFEYLDTKGKKRGSKKQKLHMWKKNTIQNIVTHKAHRNGIKVSHVCAWNTSKLAYDGSGEVLRSKKANLCTYELCKFSNDKIYNCDLSASYNIGARYFIRELEKSISAKKWSLIQAKVPECVKRTQCTYHTLIEILNAM

SEQ ID NO: 31455 - protein, 298 aa, Saccharothrix sp.
MSSEVVVKRAFRYRLYPSAAQEVELLRTFGCVRLVYNRALEARTQAWYGEHRRVNYLQTSALLTEWKRSEGLGFLNEVSSVPLQQSLRHLQSAFTAYWEKRSRYPRFKSRKRGKASAEYTRSAFRWRDGRLTLAKMVEPLEIVWSRPLPEGAEPSTVTVSRDPAGRWHVSILVETTVDQAPRTDRVVGVDAGITSLLTLSTGEKITNPRHERRDRERLARAQRTLARKQKGSANRAKARLRVARVHARIADRRRDLLWSWSTGGCPARRPARTAATCSTLAAGQAVTACGAGVRPTRR

SEQ ID NO: 31456 - protein, 351 aa, unknown
  TnpB Polypeptide
MRRVGITYGTQSAQLQGIRRADPQGQGRHSFTAQQQTLRRLDTVFAAFYGRAKKGKAGYPRFKPYGRFHQVHFVAGDGAKWTAAPPGGWARTAFQGVGSVKVRQHRPVPGTVKTLQLKREHRRWYVIVTADTSPVPLPPAGRSVGVDLGIARFLATSDGEIIPNPKFLAAAAETIADLQRRKEHTRCGSGNRQRLRRALAKEWRKVRSRRRDFHHKTARALVERCDVIALEGLNTAAMTRRPRPKPDPGQAGAFLPNMAAAKAGLNKSILDAGWAQFANILAAKAESAGRRTLFVNPAGTSIECHQCGQKCTRPRRDAVICPTHGTMDADINAARNIATRAGLGSGQAPAA

SEQ ID NO: 31457 - protein, 276 aa, Erysipelotrichaceae sp.
LRREASVQTYRTRNQSGGIRIEENRIVLPKLGAVKAKISRCLKGRILSATVSCTATGKYFVSLCCEEEMIGIDLGIKELYVDSNNCHEPNHKYLSKYERKLHREQRSLSRMIEVNIAGYTKERKPIWKRPLLECSNLQKQKQKIARIHEKIYNCRNDHLHKVSSKLVNENQVIALETLNVKAMVRNHHLAKAISDASWSRFVTMLKYKAFEHGCEILKVPILFPSSQTCSCCGYKNPYVKNLSVRSWVCPECGSVHDRDENAAKNILARALSMQTA

SEQ ID NO: 31458 - protein, 425 aa, unknown
  TnpB Polypeptide
MKILKAWKCNLKKLSAVEYQILRDMCHASKNVYNAAMYNVRQHFFQQGEYLNYEANYHLMVGTDVYNYLGNVAQQSMKAVDSAFKAFFALKKKVKQGTYPADAVQIPHYRDKDSFYKVEFNSPRDQQKHIEQGFYILPMSRFLSSKYPGTKIKVTIPNHIRNKHIRQIHIIPKNNGKHFVLVILFDDEIAEQLILDSTRALGIDLGVDNFATCATSDGDSFIVDGKNIKSINQWYNKENARLSSIKDKQKLSKKATKLQAAKSAKRDRQIQDYIYKVSKYIVEYCVDHNIGNIVVGYNDGFQDNPHLGRVNNQTFCMLPYGKFKERLEYLCNLVGIKYSKQEESYTSQASFWEQDSIPVWNPDNPVKKEFSGKRIYRGYYRRFNRTWINADVNGALNILRKSNVVDLSVLYSRGVVRTPMRIRLA

SEQ ID NO: 31459 - protein, 404 aa, Pseudonocardia sp.
MDVSVVLVSRFRLLPDPAQEAALLTHCAHARFVWNLAVEQYAHWRQGRTAAPGYNDQCRQLTEARAAFDWLAAGSVTVQQQALRDFAQAMRNFFSATHRRPTWRKAGVHEGFRQVGVMPEHIRKLNRKLSAVSVPKIGWVRSRRSRAVPGGVRSYRVTRDRTGRWHVAFAAVPEPIPAPGTGETVGVDRGVAVSAALSTGELLRCPDLSVKEAERLVRLQRRLVRAKRGSNRRKRLKRAAARLRARAADRRKDWAEKTSTDLARRFDRVYVEKLNIRAMSKSARGTVTAPGRNVRQKASLNRRILASGWGLLAVRLRHKAPGRVDGVNAAYSSQECSVCGHIAAESRESQARFRCVACGHEVHADINAAININNRGRTTLAARGALQPPGGAVNREPQPESPAA

SEQ ID NO: 31460 - protein, 401 aa, unknown
  TnpB Polypeptide
MKILAYQYRLYPNKAQAVLIEKHFGCNRWIYNYFLQRKIEHYKETKKTIGWCELANELPKLKEEKEWLNEVSSHSLQQTILHLDRAYTNFFRSNMGFPKFKSKKNNRHSYTIPDFLSIRPDFENNRLYLPKFVQTKKKDNRLKCIFGRKFEGNIRQCTVSRKCDKYYVSILVEQNVELPSKPEAKQDTSVGIDFGVKTFLTLSNGEKIESPKYFKQSQDKLAKHQQDLAQLEKEGFKDSTKYKSKKEQITKLHVKIARQRKDFLDKLSYKLTHDNQVETICIEDLSIKNMQNQNEAPANRIIGDLGWFNLTRMIQYKSDWYGKNFLKIGRFEPSSKTCNVCGNVYHELKRDEREWECSKCSSRHDRDINAAKNIKDFALNKMGFQKGRNYPIETQTSLVFG

SEQ ID NO: 31461 - protein, 502 aa, Cyanothece sp.
MLDLIVVNSITTKIKGLKLLLGYVYKLRPNLEQSAKIDSWLDKLRATYNWSLADRINTYQQRFIQGEYCDLRTRSVACPLTCCVLNNSATGEPWRKNGEKRTAKEIQITALPQLKKARPWYREIDSTVLQQNLERLNKAYENFFAGRGFPKFKNRSNFKSFTYATGVQLKGNKIYLPKLGWMRYYNSRPIPDGFKVKSVTVRKKADGYYVSIRIENSSIPSFPILPIDEVKTVIGVDAGVTKLLHCSDKSVIENPRFGTNPKTKRQLKIRQRRLSRCKKGSKNSKKKATQLAKLHHKIKQKREAYAWKVAHKIVKKADCIVVEDLNIQGLLKRCKPIKCEQTGRFLPNDQSAKKALHRSIIDASWHSLFQKSEYLAAKLGKVFLKVDPKKTSQTCPKCGYADKENRNKEKFVCLDCGHFSDSDWNASINLKNRAISQFNLKIKQPRKVRQDLSEPKQLSLFETPSPELTEVQRRQHSARNSKRDVPGNPPTQLSLWDIQDLA

SEQ ID NO: 31462 - protein, 447 aa, Moorea sp.
VKHKAVKVRIYPTKEQVQVLAQHFGCARWWWNYALNQCIETYKETGKGLKQSALNSMLPKLKKQKETEWLKDCYSQVLQSVSLNLSRAYQNFFVRVAWPIGQGRAKYPRFKSYHHRQSIHFPQNVKQVGDFLKFPGKLGVVKAVIHRPLDGEIKTVTVSKTPSGKYYASVLIEYENPRGAARKALGAKSSTTTGKVIGIDLGIKDFAITYDGEKTSKFGNPKHLAKYEKKLAKKQRIAARKKKGSSGRRNARKIVAKVYERIGNVRQDYLHKLSRKIVDHNQVVVVENLNVKGMVSATRTLRERNHKLAKAISDLGWGTFVNFLSYKCEKEGKVLVEINRWFPSSKTCSNCHYQIKELPLDVRAWTCPSCGTHHDRDGNAAKNIRAEGIRMLSSSGTGEVNANGEKVRPRRGRPSKLRHSSVKLEAPTSGEVGRSSSLTPKNLKPVK

SEQ ID NO: 31463 - protein, 144 aa, Salmonella sp.
VENRAKARLKVVRLHAKIADCRTEALHKATRKLINENQVVCVESLKVKNMIRKPSLSKAIADASWSELVRQLQYKGEWAGRSVVAIDQFFPSSKRCSCCGFTMKKMPPDVRNRTCPECGEAHERDINAARSRAGSVCPRRACKS

SEQ ID NO: 31464 - protein, 315 aa, unknown
  TnpB Polypeptide
MKKLLKSFKTEINPTPEQKIRIHKTIGTCRYVYNFYLCHNKALYDKGEKFMTGKGFSVWLNNEYIPNNPDKAWIKEAYSKAVKRSIEDGCTAFTRFFKHQSDFPKFKKKGKSDVKMYFVRNNPKDCVCERHRLKIPTLGWVRIKEKGYIPTTKDGYVIKSGTVSIKADRYYVSVLVELPDNKTADNSNEGIGIDLGLKDFATVSNGKTYKNINRSARLKKLEKQLIREQRSLSRKYENLKKGESTQKTNIQKQKFKVQKLHHRIDNIRTDYINKTIAEIVKTKPSYITVEDLNVKGMMKKQTSFKSCCFTEVLWI

SEQ ID NO: 31465 - protein, 436 aa, unknown
  TnpB Polypeptide
MRLPIVKSDNKTTIFELPKREIIRAYKLPLKDERLKPFIDFYLTLVRKALQEIWENTRIEKLNKNGKKRVRVKITIPKDKEFKKKLRDKLEEINNKYASHWVDSAIRTAYSIMKIWRKRAIKGKAKIRMPRITRRFVRVKSTLMRVDGEKIRITLVANKEYLHVDFSKSWFYKKDMKVSEPILKEDSVILVFKKDLPLTTPLYAIGLDTNLYTLDGVTVDGKEVHESIKDIFTLKVSMSNKKAKIQSLSSKKQKNMKKVKEKYSHREKNKVKDLVYKKVHEFLNDHRNSIIAIERLNKVKMFNDVSRSLSRKISRTSWRLFHTVLKEKAGEYNSFVIEVDPYLTSKSCSRCGWVDPNLGASKVFICRCGLRIDRQINAGINILLRMCGFPHIPGVFDKVFRIMGGVIPLRGRIVMMSFGSERDEAQGFYGHDNKCP

SEQ ID NO: 31466 - protein, 324 aa, unknown
  TnpB Polypeptide
VLRKDQYKIDEEKQEIELHHLGKFKDLAIKYNGEIYYRGEQGRLEIIYNPVLHKWYAHITLKASERLDRKTGKWMKVPLTPKGNLIAGIDIGINNLLAVYVSDGTQVLVKTRVLKSISYYFMKLISMKQKLLSLFNQPFSNKIRRLYFKWKRKLTTIIDAAVRKVVKFLYSKGVSLIKVGYPKNISLRNGNFLVANVWSYKQVMDKLRNVAEEHGITVEFVNESYTSITCPIHGNGCGKRVYRGLFKCTTLNKVYNADLVGAFNISIIPSPNDGSVEGTTTRGIGISWDKTVPLVYTWTRGAGLVLRAPASYDSMRMKRIDQNL

SEQ ID NO: 31467 - protein, 557 aa, Sulfurihydrogenibium sp.
MITLQCQLEFQNKQEKEIVLDLMRRFSSAMRYAYQRLLEGEKRKDLKKNLSELFDINTRYSDDAILLAHSTIASCEERGQNPKKLIFGSRKLFEQLKKNHLTGKRRKELKTRWKESRQGNLYSRGDKSKQGNLNLRFEWIDNQLYLRINTGNRQYIYAKVIRSVKRKNDKWIEFMFMLENAYRYEAWFPYSVRLKVKNGNVYAFISIEEKLPPITIKKDNGIIGIDVNAYPFHLALAFISKDGNLEKYERINLNELLEVNSEKRQYLEWQIAHKIIEIAKRENKAISIENLQKLPKGKRGDGFAKLRRRLQKWSYKRLLEKIEVLARRSGIEIIKVNPAYTSVIGKLKYSPQYNIDKDIAGAYVIARRGLGFKEKLPKNYKELLNDTDFLSYTIAKIEDNIKKLKQKLKEEKNEYKRNKLKSTLAKLRKNLKILQQHVSLLTSHVSRLESGKSESSSQQPVNQWKEQVRGLLTGRHKSWQVLSIALAFCCFERSYRDLSPLKRVIVSKDWTVVANRLAPVLGTGTMTLPKYRLLGSEVSEMAEYKYPNPSCSFIQFG

SEQ ID NO: 31468 - protein, 406 aa, Nocardia sp.
MSTAVVKRGFRFRFYPTPTQEAELARTFGCVRKVYNLALEIRSQAWQQDRQRVTFNDTSAMLTLWKQTEELAFLNDVAAVPMQQALRHLQSAFTAFWEKRARFPRFKTRKNSRASAEYTRSGFRWRSGQLTLMKITGPLDIVWSRPLPEGMEPSTVTVSKDRAGRWFVSMRCDDPGIRFLPQVDSAIGIDAGLNSLVTLSTGEKIANPRYEERDRARLAKAQRTLHRKAVGSNNRNKARGKVARIHARIADRRRDFLHKLTTRLVRENQTLAIEDLRVSNMVKNHNVARAISDASWREFRTMLEYKASWYGRTVVVVDRWYPSSKLCSNCGNTAESIPLQIRTWTCGSCGSKHDRDVNAARNILAAGSAVTVCGDGVRPLRRIPDGQSSMKQKTLARKAQDFLSIR

SEQ ID NO: 31469 - protein, 399 aa, Streptomyces sp.
VKTTHVKRAFKYRFRPTDAQAAELSRTFGCVRKVYNLALAARTEAWTRQERVNYNQTSAMLTAWKKTGELAYLNEVSSVPLQQALRHLQTAFANFFGKRAMYPRFKSRKKSRKSAEYTTSAFRFRDGKLTLAKMAEPLDIVWSRPLPEGASPSTVTVSQDAAGRWYVSLLCEDPSVKPLPATSAAVGIDVGIGHLLTLSTGEKISNPRHERRDRARLARAQRELARKARGDGANRRKARRKAARVYARIADRRRDHLHKLTTRLVRENQTIVIEDLSVRNMAKNRSLARAISDAAWAEFRSMLEYKARWYGREVIAVDRWFPSSKLCSACGTLRGGMPLNVRIWTCGSCGTVHDRDVNAAKNLLAAGLAVSVCGAGVRPQRSSPGGQSATKQKTPRREP

SEQ ID NO: 31470 - protein, 379 aa, unknown
  TnpB Polypeptide
MESGNQFARLRKRPDERFDLELRLPKALGHMATRTEKAGGAIILCVDIQGLSFNHGDDVIVDATARSQPVTVKFLRDDKSWKVMVSVDHKLDWKTPNFTGGALGVDLNAGHVSAALVDDAGNPVEVYNFPCVTYGKSSDQAQDAVRKIAAKIAVLAKQLGVPVVSELLDFSEKKKTLKDRADARYARMLSSFAYSAFGKALSSACLRQGVALRRVNPPYTSIIGRVKFARRYGLSVHESASVTIARRAMGYSEKLPRSSTGTVKVPTNGSDHVTLGLPVRKEASEHAPKSRHVWSEWNRLNKEYHQKALAALGSSRRKSRPKQGSPRTTGSPNCLEVAVGTLRAERRTVPWSHGIRGMFPPKTASVTPPGVGGVPGINS

SEQ ID NO: 31471 - protein, 524 aa, unknown
  TnpB Polypeptide
MRNSNFRSFVLDLGDVPFGCARFSPAFDGDYVLEVSWRYWLDHVSLQTISIPYRCSYDDRQFLDELRRVQSAAIRTAYANALHADGSKRSEKDVREIVKSRFTKLGRLDSWAMHCATRVGVLKRKLRPEGNAVFGGRAGLERRRKGLISNDEWKRMRLHPFVSFGDSQKIRGNQNIHLIDETTIIVKIGRKEYGGRSGRTVTQTARIDLARMKGAPGTIMGQLADICAQPEKAHRINVSYSIGDTHVSITFDPSDLPDHPQRRRPVVSKKGRTLGIDLNPNWIGLAVASNVGDAAQNEDTELLEYALVKLGMAVDASPELVRETLAAVCDRAISMARKHRCGTIILEKGLGKLRSSGKSRSLNRLLNYWARTVFVQMLTRRARLAGIEVLEVWAGYSSTIGNLAFDAPDACASATEIARRGIALLAGSKNVLPALEEGCVSRLWKNGKVPAELGSWQDVHRTIKAAKIGYRRPHPDVPIGARGSDVHGTKMFCGHAVVRLGRRHRPGLLFRMATGRPDAAVRIL

SEQ ID NO: 31472 - protein, 306 aa, Moorea sp.
LVKNKLRFPLGRQVKAWFGLSEFYVEFSSNLDWESIKEVRILPRNGQFYVEFVYKIESKGVNIDSSRMLGIDHGIDNWLTCVDTLGNGFIIDGKHVKSLNQWYNKRVSFLKEGHGKDYWTKQLANITEKRNRQMRDGVNKAARLVINHCLINGIGTIVFGWNKGQKNGLNIGRKNHQKFTQIPTARLKYRISQMCQVFGIEFIEAEESYTSKASSLDNDSLPVFGEKPSDWKPSGKRVKRGLYRTASNLYVNADGNGALNIIRKVAGTIRQSRRFANGSDLIELSRGALTTPVRVRLWNKHESPSF

SEQ ID NO: 31473 - protein, 499 aa, unknown
  TnpB Polypeptide
MDGELLDSESILGHLASEVRDISSYATYVVRNDEALGDELARATAISPANAGRQAGVTMPDFLVSGKSGRSRKAKLVQYNVVAAYRSYEERVKAANGESSKYVSQGWKRTVNASPPSYGKDYVNLGTVDRAYAYIENDPFTDGEIVLKMVVQGAWYRLIFNFDDKRFTEGKVTLPVIKVQDGEPVFIFTVVTDNPVVQFSGDYTIGVDVGINNYATVVVRDTKTGRIVYETTLSQRVHSLWSSVRASEAQVRDLKKKAATLLHDRQARMAALDEAQFHREAASRKKRELAILAAQEIAYLSHVWGNAVVAVEDLGWISNTMQNGRWNRGALVQWLAHYVSQNGGWVVAVNPSNTSQQCHKCGARVSHPTHELSVCAEHGTMDRDVNAAANIAARAAPRVEKARKTRAKNRKLRPQAALKTPVARRSLKYPGRDRIKSAPTPKRKNRPRVVREVILPFSPARVTVTRVLADCGAQGATGTCQAAIKQGNMTDEWRLCSLI

SEQ ID NO: 31474 - protein, 398 aa, unknown
  TnpB Polypeptide
MSRYRLRPTPVQQAMLRGHCAHARYVWNLAVEQHSHWHPGRAGAPDYLEQCRQLTQARAENSWLAHGSQTVQQQALRDFARAMAAFFDQRNPAGRPSWRKSGRDEGFRIVGRRGSQWDVRRLSRHVGEVWVPKAGWVRFRWSRPVPPGVKSYRVTMDRAGRWHVAFAAIPDPIPAPGNGDVVGIDRGVAVGAALSTGELLRVADLTARERRRLRHLERKLARARRGSSRRGKVRLAIARIRAREADRRKDWAEKTSTYIARRFDVIRIEDLKVSKMTRSARGTAANPGRNVRAKAGLNRGILRSGWGLLARRLEEKAPGRVDKINPAFTSQRCSACGYVDAKSRESQARFACTACGFADHADVNAARNIAAGHAVTARGGDGVTRPVNREPQLLLQSA

SEQ ID NO: 31475 - protein, 483 aa, Bifidobacterium sp.
VSQKYRIRAVKFDGAAVYLGLSPSGNPMWTRNPMRVMEHFASCWQAVFNGMRAYREEWEFKDGVKVGSHPLGSHTDQPMASTVGQMRERMPWLASCPTLLLHSAIRHENIDWYAGLKRKKKLGGPVPGLRRRNRCEPMFMMFARNGKDIAVRYRVVNRRSGCVEFNGMTPKDQRKPGDKAHWRIRIFIRLSEPVREFTKIIVHPSRNTIVFVNPVIARHGIPDQRDTIGADRGCKVTMALSDGRMLKIPQPSKRERRRLVHLQRRMSRMDLQNKANGMRSVRDSRRREKLRAEKNRLETHIRNRKHDWIEQQTTSLVLTSNRIALEALDVKRMTRRAKPKPDPNHPGQYLHNGRKAKSGLNQSILSNNWGEIRQRLTQKASLYDTIVKEVNPAYTSQTCSQCHYKDRNNRKSQALFHCLNCGYTDNADHNAGANIRDEAFNTPDEGSRRGGIHRTQPGRMSPPSPEEPMKRRSQATSNGPKTR

SEQ ID NO: 31476 - protein, 480 aa, Coleofasciculus sp.
VFASFVYKLKPSPRQAATMERWLDMLRGQYNFRLKERIEAYEQVRSPILGNYCDIKSQAECCPLTCSVSKSTLYGSPWKTDKKTGAGKRRSAWEIQSADLVRLKQERPWYKEMSCVVLQQMLRQLDTAFQNFFEQGRGYPRFKPRNCFKSFTYSPGAVKFKGNAAYLPGIGWMKFFQSRSFPDGFAQRSVTVRKKADGWYISVRLQDDTVPETPLPNQVKTAVGVDLGIKKLMSLSTGETVPNPEFYRQQERRRRIRQRRASRKAKGSNKQVKAYQRLAKLEQKISNQREDYQWKSAHKLVKNFDLIVFEDLNIQGMKRRCKPKQCEATGKYLRNNQAAKSALNRAISDAAWGNLKQKVKILAEKSGVLFCEVNPRHSSQECSECGYVSPTNRDKEKFVCESCGHHADADVDAAIVILNRGLEELGIETSQLPGGTRKVTLKEPVGRQGTSLGLPGEPGNPHQFQPYQGVQLKLFEWMGA

SEQ ID NO: 31477 - protein, 393 aa, unknown
  TnpB Polypeptide
VKKILKSYKTEIKPTSEQKQKINNTIGVCRYVYNFYLAHNREIYKTEKRFISGMDFSKWINNSFIPNNPDFSWIKKVSSKSVKQSIMNAERAFKNFFKGKTHFPKFKKKSKSDVKMYFVKTDAKTIIHCERHRIKIPTLGWVRLKEKGYIPTNPNTHIIKSGTVSCKAGRYYVSVLMEQKEPEKLSLNTFGLGVDLGLKDFAICSNGKIYKNINKTSRIRKIEKKLKREQRSFSRKYENYKKINKLKGGATRQNIQKQKLRIQKLYHKLDNMRIDYINKVISNLVKTKPKWITIEDLNVSGVMKNRHLSKAIAQQKFFEFRIKLLAKCKEYRIELRLANRFYPSSKTCHNCGNIKTDLKLSDRIYHCSKCGYIEDRDYNASLNLRDCLTYITA

SEQ ID NO: 31478 - protein, 367 aa, unknown
  TnpB Polypeptide
MNKIFEYKIYPNPHQLKRLEHILEQARLLYNSALEQRIKEWKENQKSITYYHQAKSFKGKYDIPASLAQAVLRKLDIAYQSFFRRKHGFPRFKPVQRYNCIELRQWKTDGYLKDNKLRLWRMVIKIKGGRDIQGIPKQARLIKRIDDWYWQIICELPDVKPKKRIKTAIGLDMGLISFLTDSDGNQIKPPKFFRKSEKKLVKEQRILSRRKRGGYRKNQARRQVAKTHLKIKRQRLDWLHKFSKKYSDFDLIVVEKLNIRGMLKNHHLAKSIQDASWNLFLQLLRYKAECAGSHFVAINPQWTSQICSRCGAVVQKSLSQRTHICPECSLVIDRDINASKVILKQGRAYLSGSKNISFCVEPRISRL

SEQ ID NO: 31479 - protein, 311 aa, unknown
  TnpB Polypeptide
MKVSRIEQIAIKDKRLDNLCHLTKNLYNYANYIIRQEFIKTSKEKEQKLREHAIWLRYQDIYKIVKDSNDYRYLPSQTAQQTLKLLDKNWKSFFKTCKEYKKNPNKFKGRPKLPKYKSKNGKTIAIFTNQQCKIKDGYIQFPKFMQGFKIQTTVDNFKQIRIIPQATNYVIEIIYEKEIIKEEVDENRIAGIDIGLRNIVTMVNNTGLRPVVIKGCVLKSINQFYNKRMAELQQIYDKQNIKTGRKKQLLIEKRNRKIKDGLHKISRFIIDYAIKNKIGKIVIGYNPNWKQKINIGNRTTNLLCKYLLTLW

SEQ ID NO: 31480 - protein, 379 aa, unknown
  TnpB Polypeptide
MLTGFKIRIHPTDEQIKKFYQYAGTSRFMYNWALQAMQEAYEAGIKFKDLKLANQLTIIQKEVEELQWLNTIPRRVKCLAIADAEDALKRFFKKTAKYPRFKSKKKSKISFSLESTDNKPANGFITIPLCGKVKLNLKDRLTSEIQNSHLTTRLTVSFDGKYWYLSGAYEKDFEVSETNNSSMGVDLGLKDLAITNEGKKFKNINKTKVVKKLKKRLKRVQRKLSRKYENNKDGNKFIETKNISKLLIDLRLIYRKLTNIRQNHIEQITSELVKSKPSRIVMEDLNVKGMMKNRSLANAIGEASWYYFIECMRWKCKKYGIEFILADRFYASSKTCSKCHEKHPNLTLRDRVFDCPHCDLVIDRDVNAAINLANYEIVE

SEQ ID NO: 31481 - protein, 437 aa, Halococcus sp.
MRRSNTFDVAPRSELDGELLRRLLDASAALWNELTYERRQRFFDGESVWDTDDYRKRYVGVLGSATAQQVIRKNREAWRSFFSLKEKGEAAGPSGYWGNEDDGRVLRTYVRNDQYTLETGERSRLEIPVGSDLKDEYGLGHTERLRLEVRGEPKWSGKQGRLELYYDELDDRFRAIQPVSDCSPRDTPLADETAALDIGANNIVAATTSTGQQFLYGGRDLFDRFRETTREIARLQSLLAEGRYTSERIRRLYRRRTRRRDHAMDALARDLIERLHAEGVSAVYVGALTDVLSASWSVRANAKTHNFWAFRAFIDRLTCTAEEFGITVEVRSEAWTSRECPNCGSTGRTTRHRDTLTCECGFEGHADLTASETFLRRHSDTTVPRPMARPVCLKWDDHRWSASPCARRPNEEHTNPQDASVEVGQRDRPRSRGFPGL

SEQ ID NO: 31482 - protein, 369 aa, Escherichia sp.
MHQENTMLPRRISVSLFIDQSIIWPVKRLQAFKFQLRPGGQQEREMRRFAGACRFVFNHALALQNENHEAGNKYIPYGKMASWLVEWKNATETQWLKDSPSQPLQQSLKDLERAYKNFFRKRAAFPRFKKRGQNDAFRYPQGVKLDQENSRIFLPKLGWMRYRNSRQVTGVVKNVTVSQSCGKWYISIQTESEVSTPVHPSASMVGLDAGVAKLATLSDGTVFEPVNSFQKNQKTLARLQRQLSRKVKFSNNWQKQKRKIQRLHSRIAYIRRDYLHKVTTTVSKNHAMIVIEDLKVSNMSKSAAGTVSQPGRNVRAKSGLNRSILDQGWYEMRRQLAYKQLWRGGQVLAVPPALRVLWSYSERKSSVTK

SEQ ID NO: 31483 - protein, 309 aa, Euryarchaeota sp.
MFVEELIRVLRIFSDTLKTMKSLDIHDLKAILDITVLLTHKQDLELSKIGEVNIKLHRDLIGKIKTCTIKRDIDIWYASFSVEINDSLPEKTVIKSAVGIDVGINPLVALSNGEKKKPPKYLLQSEHKLAKEQRKLSRKQIGSHNRNKQRIKVAKVHRHIRQQRADFHQNLSKKLVEKYDFIAFEDLKIKNMMRNHHLAKSISDVSWNMLQSFTTYKAEWAGKVVTFVNPKNTSQECSSCGKIVRKILNIKIHQCPYCGLVLDRHVNAAINILNRGMKKVGLGYTDLMPVRGLAQDKPMTQEAHDFSRG

SEQ ID NO: 31484 - protein, 281 aa, unknown
  TnpB Polypeptide
VEWPKDGDGARWLPDRRRVYLHGIGQVKVHVHREARGRVKTLQVKRQGRRWVLVLSCDDVPTNPLPATGARAGVDVGVVTYATLSDGTTVANPRWARQEAGWLEVAQQRLARAKRGSRNCAGRRETVAARHRKIANRRKDFHHKQARALASRYDLLVVEDLTIANMLRRAKPVPDPDNPRGFLPNGARAKSGLNRSISDAGWGQFVSILRAKAEEAGRTWIEINPRHTSNRCECCGHAAPENRVTQAEFSCTRCSHRAPADEHAARNILRAGLALHAATAA

SEQ ID NO: 31485 - protein, 525 aa, unknown
  TnpB Polypeptide
MKARNSRMKKSKTPTFLLELPLAVDAGQAKRLRAHFEAARCLYNALLGEELRRLKLMRADPSWQAARALPQSQKQVRAAAFSRLRKEYSFSEYDLHTFAREANCTWIAEHIDAVTAQTLATRSYQAVNRLCLGKAKKVRFKSKGRGLNSIEGKRNDTGLRFVLQSPEEGNQGWLVWGKDRLPALIDWHDPVLHHGLRHRIKYARLVRRKASSPNAQGADVQGYRFYVQLVLEGMPYQKPKNMPGDEIIGLDLGPSTIAIVSRENEARLIPLCEELKPDARKKRRLMRKLDRQRRANNPQNYDDKGRIKKQGKRPLTWKNSKGYLATRRRLAHQERKLASHRKSLHGRLVNEIIHIGNDIRIEKISYIGWQKQFGKSVGMRAPGMLIDHLRRTVARTGGTLQEFATRTTKLSQYCHGCMTYEKKLLSQRWHKCACGIGPIQRDLYSALLAAYLNPTDIIPSIAHEEWEGAELRLQAAMERLYQRAKEGQILPRSVGITRAGARLPKSLRSLQQGLVYRRGRLEELK

SEQ ID NO: 31486 - protein, 305 aa, unknown
  TnpB Polypeptide
LNEVSNNVAKQSVKDACNAYKTFFKGLVDKPRFKKKGKCKESFYNDDYKLKIKEESILIEKVGWIKIKPNQIKEGKHYTNPRISYDGKYWFISLGYEVEKVKEELSDEVIGIDVGIKALATLSTGYTIKNINKTSTMKKLEKRKKRFQRQISRKFEKNKKGKENTKTKNIEKLIVKQKLIERRMKNIRMNQIHQETSIIVKQKPKRIVMEELDIQKMKKDKHLSHLLQGTSMYEFKRVLKYKCELHSIDFKTVDKHYASSKICSCCGNRKTILSLSTRKYVCEQCGLVIDRDLNAALNLKNYKFE

SEQ ID NO: 31487 - protein, 391 aa, unknown
  TnpB Polypeptide
MILTYRYQLRTTAKQRSELQMILDQQRWLYNEALGWRQFAYEVYGASVTYMDQCRWITYRRSRDERLSSFPVNIQRATLKRLDVAFSGFFSRVRRGENPGYPRFRGSDRFDSFGFVEFVGIRLTGKQLRFKGVSGGLKINLHRPLPDYEKILSCSLKRKANGKWEVALVLRISTPEKKLVETMIGIDVGLTSLATLSTGEKVQNVRPTTQSERELRVAQRALSRCRRGSNRRAKAKVVVSRIHETIRNTRETYLHQVSADLVRRFDLIAVEDLNIKGLAQSRLAKSIHDAAWGRFRSMLTYKAEGAGGQLVAVDARYTSQDCSGCGERVPKPLSERVHSCPSCGLVLDRDHNAALNILHRAVVRPALPNVAQCGVRATDLTCLRGANWDTT

SEQ ID NO: 31488 - protein, 406 aa, Coleofasciculus sp.
MKLIEKHVVRQGTRKWKEIDDLAFKSKNLYNRANYEIRQHFFKTHQILSYNEMASRMRLEESYCALPRKVSQQVLRCLDRNWKAWKEANKAYKKNPVLFKGKPKLPKYKDKEKGRNLLVYTIQAISLKELKKGWIKPSGTNLMISSHKQDINEVRIVPRLNYYVIEVIYEQPIQQLVNGEAVAGVDIGLNNLAAVTSNQKGFKPFLINGRPVKAINNYYNKKKAEGQSQLKGNRKTSKRIQRLSAKRGFKIDDYLHKSSRFIINQLVENNISTLVIGKNENWKQGICIGKVNNQNFTSVPHARLIKMLTYKAERVGIKVIITEESYTSVASFLDGDCIPVHGSPEAKTAKFSGRRVKRGLYQSKIGVKFNADINGSYNIIRQVVPDAFGNGIEGVVVHPVKITLAN

SEQ ID NO: 31489 - protein, 527 aa, Rhizobiales sp.
MVHRQLLARLKSAEAVSKLHRDQLERRLWQECLRLEIKKKRISQTDQHIVRNRKRLAEAASILDSRPKQLTAGQLRKIKNALDRKFRCEKRLKILAARKSHLLRSIHFAKRKIQKIASRLKRVECEIQEPSIHFAPSKLFCAQHHLQASGFSSHEEWRAAWQEALSNNFLLEGDKSIPSGNRYARLHGRGGFHDLELRLPAVLAAGADRSEVVKGRSIYMLDVKGLSFHHGRDIIKRALAQGSPVTVRFHKDDVSWMVSVTVYEETKVPPVSWHDGAVGLDWNAGKIVAAMVDSGGNLIKTNTFACLTTGGTANQTKDKIRKVCSQIASFAKTLNVPLVIEKLDFAQVRSSRRAFGDKRYARRVAQYPYAKFTQAMTSASARQGIPLSVVASAHTTRVGRYKFARRYGLSTHEAAAFVIARRGMKFSERPNEPTLQHERWQSRPMRPTVTHEERKARKSGGKLQPVGDREGGSHTEAVPTMDVETTTRPRRRLWRSVQPLHSLSVFSGRSLGNRFSRGSEGWEPRRE

SEQ ID NO: 31490 - protein, 362 aa, unknown
  TnpB Polypeptide
MQLTYVLELLKPTKRKENIFFENIAEVVKNRQSIANKLKAGKTKLSSADFKEINLPSAVKNQNIREVKALYKRFLKSNSDKENLEFKDNQPICYNNQNYKIDNHIISIPLYTSKCQRFAFPVKETNRLKELQNHIKNSCKLGKASLFYKRGKWYFAVTIKIDNKKSTNSNVMGIDIGLRQLAVASIKTTKGKEINRQFYDGKEAGFIRKKYRSLRRKLGKSKKIKAIKNINDKEQRWMRDLNHKISKQLINLAVQEQVGTIIMENLENIRNTAQSLNRADRNLHSWTFYQLQQFIEYKAKLTGIKVEYINPKYTSQSCSKCGEVKKSNRKANLYSCVCGNNIHADLNASRNIANKYLEQQSA

SEQ ID NO: 31491 - protein, 438 aa, unknown
  TnpB Polypeptide
MKVVSSYAIEIKNIQKIFRQTIKIYNDAITFCVRCLENEWDSLQYLDKFGRYSLADSYIHNTRNNSAKYDFDTKFPKMPTYLRMSVINTALGVLSSYHTNLEIWESNPSSGNPPRLQSKVHKLPTFYRGNMFKDDCEGDYCRLKLFVNNDWNWVKVKLKHTDIMYIARHCQNAKMSCPTLERRNKKYYLRFAFEETVSLDCTSLTEQRILAVDMGINTDAVCSVMNIDGAILGRKFINFPSDKDHLHHTLNKIKGIQQKYNNHNSDRLWREATHTNTELSRKIAKSIVDYAVNQGVSVIVLEHLDFRGKIRGSKKQKLALWRKKYIQQLVEHKAHKSGIRISTVNPCNTSKLAFDGSGVAVRGEDAGFNNNKLCRFSNGKTYNCDLSASYNIGARYFIREFRKSISEMRWSDIVAKVPECQSGLQYTYSTLIKINQVV

SEQ ID NO: 31492 - protein, 530 aa, unknown
  TnpB Polypeptide
MQIKESLKQQDCHTEEDGYMTLSHLTSTKRVKKQMKVKSSVFAECPLVNKKMTSLDKSHICDNNSNIPKSYKMSEVDLTTKEKVCKTFYDDPCKDISSHLLSHTEIDCAVSDLNYLNTSSSAMAVKSWFSTKQVAVHNKNSQKTYWQSLMFSRVECMVSDAIVTKSRRIRIYPTPQQKQLFKQWFGVGRKVYNTCINHFNEKDIIFKGWMNMSTIVLAELTEDYIKAVPYQIKKIAVKDAYTSRKTNCKETKKNGKAFKLRYKTRKNPVQSCYIPKSAVSESGVYHTISGKLNFSEREFLKNDICDCRLINDHGRWYLSVPQKITIMPSENQGGVVALDPGVRNFLTYFSEDGRFGWLGIHAFDRILTLNLKRDKLLSRLALTKDKKKKGKLKRTLNRMYHRIQDLVDELHWQCINYLVHNFSVIVFPPFEVKSMTKKGRKLRKSVVRSMLSLRFYEFKERLKQKCKECGVMYVEQNESYTSKTNSFTGELMINLGSKEWFMYDGIKVHRDLNGARNILIRAMRDSSAVG

SEQ ID NO: 31493 - protein, 449 aa, Blautia sp.
MASKQGYSITTRRLRLCCRHPEWLKQTEEFYNQIVQFYYNLLLENPGLWELGSQKALRELEVLSIPGRDKRPVAFPLPWEKVPLYFRRAAANAGIAAAKSYLARREAFPGRRAQAFHSSAVFYKGMYRGFTSTEITLRVWDGDCWKWMRCRLYGKEFPDDAQLLSPSVVFEEKFIMLHVPVKEFGSDTATVKQRMVENRNLCSLQFTNTDVFAVGSVLDAQGQELAVKFWGGGKEYSHRCREILEKIEKSERSLGYEQCGSSSKRERLSQPDKPNQGRYLDQDDKPEQGGHLDQHEKPNQSADLNQSDRPNQKYWMHLKHLADFYAHQVSAEIVRFCQEQKVGVIVLPKFNENYTRYVMKSTGNWGPLHLSTRIRQYVAYKAWKVGIITIEVHAAGISSICAVCGKPVTSIDKKANEFICADGHRGNRYLNSARNLGRKCLIQFGKHVG

SEQ ID NO: 31494 - protein, 399 aa, unknown
  TnpB Polypeptide
MSIHQKAYRYRLLPTPEQEGQFWQFAGARRWTYNWALARRLTHYKTTGKSLSVSELCGELTQLKHQPETAWLREMDSQLLQQAIRDLDKAFGAFFARRTKFPCFRSKKRETPRFRIPQRVVLVGDRLSVPKVGLVRLVLHRPLEGTVKSATFKRDATGAWYVTLVVHFELSDTPLPPPDAEQVVGVDVGLKDLAVLSNGQRVPAPRHYRRAERKLRRLQRHLSRCERGSKNREKARMKVARQHRRVANQRADHLHKLTSRLVREHDAVVLEDLNVKGLGRTNLAKSVHDAGWSMLRFQLAYKARWQRKHLVVIGRFFPSSRLCAACGCINSDLTLADREWTCRCGVVHDRDLNAARNIRDEGLRLLLAEGCPESIINASRALVTPATRRLDATTEEAQR

SEQ ID NO: 31495 - protein, 428 aa, unknown
  TnpB Polypeptide
LNLRSYYTAYESSSCIQIPFLSHRRTGQSACSGVWLCALRLQLFSERTNCCVVRAAGKGWVQRYSKDANHIQAATGNAMVAGGFKRLPSVVFAQSGHSFKNFFQGRSKYITFKKKHSRQSARYTTSGFSFCYGQIKLAKHKEPLNIRWSREFSGKPSSATVSKDAAGRYHISILVEEAVKPMPFVKKEVGIDLGLTHAVITNDGMKVNNQQVYKKLEKRLVKAQSSLSRKKKGCKNKEKARLKVARVHTKITDQRTDYAHKLTTQLVSENQVIAAESLRVKNMLKNYRLAKAIQDVGWFQITRMLEYKAQWHGRSFVQIDKFYPSSKRCNVCGQHLRHYATTSSILGLPLLWHSTRQGHQRCNEHTQGGHGHIGRGRSIYGSRKEYGGAHRNLSLWIPCKPEVAISGGCGMKQKGVHVIHGGEDVNRL

SEQ ID NO: 31496 - protein, 413 aa, unknown
  TnpB Polypeptide
MFSLVDTTVKGGTTLIKEFQTTNLKKNQKNENLKNAKENKKNGTNNKANKVNYNSLFIPSSKTIKINPTKKQRKIINDWIASTRKVWNVCLHEINTNKTTKEFTLRDKFVIRKQMDEETIQKMEWTFRTPKRIREYAVKDIISCFKGGETRLKKKQIKKFKINYKEKNSNKQTISLPQEGSKIENNKLKVCSLFLHLEEKIENQDIKSNMRLTRIGLNYYVHIPSFISEKNKKESNEGLVGIDPGINIPFTYYSPQGEYGFIGMKLRKILEKKYKKIESIRKRTNNKAIIKKHENQIVNIIDDFHWKTIHWLLKKYNKIVIPSLYVRNCNSQIKKLQGDMRHCEFVNRLIYKSIEYKNVEIHHCKEHYTSMTCTNCGSLKTVKDKVVKCLDCKFQIHRDLSGARNMIIKHLTI

SEQ ID NO: 31497 - protein, 485 aa, Streptomyces sp.
VKKFQPQPGFVVQAFRFALDPNAAQEHALRSHCGAARTAYNWAVGWVGASWWQRRAEESYGIAEEQLTQWRPWSLPSLRKAFNEAKHTDWRFAAWWEENSKEAYSTGLANAAAAFDNYAKSKRGQRKGKRVGMPRFKSKRKARLSCRFTTGTIRVEAGGRHVTLPRLGTIRVHEPTVKLLDRVQAGTARILSATVRHERGRWFVSFQAEVKRDPEGVARPDVAVGIDLGVKTLAVMADSTGEIRTVANTGHYDAARKRLRRASRTVSRRQGPDRRTGQQPSKRWEKANAARNKVHHRVANLREDALHKLTTAVAAEYGTVVVEDLNVAGMLRNRRLARRIADAGFGEIRRQLDYKTSQRHATRIIVADRWYPSSKTCSGCGAVKAKLPLHIRTYECDACHLVIDRDDNAALNLAALAAAAVTGTGVAGDQDTAPAVSKPRGADQKTRATRFRRTAEAGRAGGATLPHQRQTETRDRTQAEALLLW

SEQ ID NO: 31498 - protein, 371 aa, unknown
  TnpB Polypeptide
MSTVTAKIQVYVSSLQAENLKATTDAYREACNWLSKHVFETKDLNQASLNKRYYADLRRLFELKSQMAQSVMKTVIARYKSAQSNGHHWSFIVFKLPEYDLVWNRDYSLTQNQFSVNTLAGRLKLNYERTAMKKYFNGTWKFGTAKLVYKYQKWFLHIPMTKEFPELNDTDVKNIVGIDLGINFLATTYDSQGKTTFYNGNVVKHKRGQFKAVRKQLQLRQTPSARKKLKQIGSRENRYVADVNHQITKALVDKYPKGTLFVLEDLTGVRSATEKVRVKNRYVSVSWAFYQFRQCLEYKAKLNGQKVIAVDPRYTSQTCPKCGHIEKANRNKKQHLFKCKNCQYESNDDRIAAMNLHRKGIEHVGVVTTRV

SEQ ID NO: 31499 - protein, 469 aa, unknown
  TnpB Polypeptide
MGKVARSTMLELDLSPRARGGANTEKRAALEKTTAILTEARAFFLDFLLAHNEKLTEKVVYFSEKHQELRERLLTAEELRSWLEQCTVSTKAHPSVPSAWDFKARFPGMPTHARRATMKEAIGKARGYLTARSTWQKSGKKKGKPGLPGAADHPTFYQGVFELELEDAKIHDRFVRLKVYDGTKWDWMNYPVKCSRHFQGRMKEKDWKRQSPTLVLRGRGAALHFPQAKEVQAARVVERKLEPHLVTVGVDLNVKNLAVVTVRRDEQILETVFIRDHGLDQARYRHLKKIAKKQWQTGKPIKGECSNQDLWRHVRRTNEDAAHKVACQIAAICAKYPGCILLFERLRKIKPKGGSKSRRMNRRQANQLRGKIRQYAGEKAYARCSVVTVEINPHGTSQYCSRCGAKGKRFFFQSGKRIFVKWGNLFWCEKCHYEANADHNASVNTHHSFYHELHWEWRDKKRSKPASPG

SEQ ID NO: 31500 - protein, 406 aa, Planktothrix sp.
MFVFEFKCQGKPEQYAAIESGIRTSQFIRNKCLRYWMDNKGVNGYDLNKYTAKLAKEFPFANKLNSTARQASAERCWSAIAKFFENCKKKIPGKKGFPRFKKNQRSVEYKKSGWSLSEDRKKIAFTDKNKIGTLKLIGTHDLHFYQLEQIQRVRLIKRADGFYCQFCIASDLANEEVKPTGKCIGIDMGLTYFYTDSNGEKVDNSRHLRKSEKALKRLQRRVDKKVKGSNNRRKAINRLGRKHLKVSRQRKDFAVKLARCVMKYNDFVAFEDLKVRNMVKNHRLAKSINDAGWFLFREWLKYFAIKFGKVAVPVASHYTSQECSNCGDKVKKSLSIRTHICKCGTVLDRDENAAINILLKALKLMGYISNTVGHTEINACGETTLYLNLETVLRQGCSVIQESLSL

SEQ ID NO: 31501 - protein, 252 aa, Escherichia sp.
LGWVPFKIGSAVWKNGAVRFAGRIFNVWDSYGLGGFKFRAGSFSEDSRGRWYFNVCVEVETVPSTATSAVGIDLGLKDYATPSEGDPLIAGRFYRDLEPALGKAQRANKKARVRAIHAKIKNRRKDALHKYSTALVNSHAAIFVGDASSKKLVKTKMAKSILDAGWFMLKTQLEYKAIARSVVFEVVNESYSTQACSCCGAISANSPKGRAGLRIREWTCCECGTTHDRDVNAAKNILAAGHRRLAVGIPFL

SEQ ID NO: 31502 - protein, 266 aa, unknown
  TnpB Polypeptide
MRTVSSYGVELRKQNIPIRQTLDIYRSAVSCLIEIYAQAWDELAVITEPKKRFNTAEHLVHTTKKNQARFDFDLRFPKMPSYLRRAAIQHALGSVSSYKTRLKLWEKMDQKGGTPKLVCGNHAMPVFYRDVMYREDTEEKDGAYLKLYDGHDWKWFRVSLSHTDMEYLRKYWAGKRAAAPVLEKRHRKYFLRFSYTEEVPLTKAPVKEQIICSVDLGINTDAVCTIMRSDGTVLGRKFIDFPSEKDRMYVCWDGYAGSSGNMVLYR

SEQ ID NO: 31503 - protein, 1398 aa, unknown
  TnpB Polypeptide
LSRALRLRARGFGRGRRGGLRRPRRRSGRRLGRRNDRGGAHDGGGLLPADDPLARLRGDGLLRAFGRGRLGGRCGRSLRALRGRRAAPPLRGGRRRHKLGARHRGRSLRRGGGDRRRRRGCRSRAGWLGQRGGAGQGGRDGQRGDLGKRGRWRARFGDPRATARGSTGGDRRRRQRRLACLHAGRRGRGGRRGFWSRGRGGRGRHLRDRRGRRGSGETRRHRRSRRRDRDRGRGRRRRGDDLEEAGELAGEGVERRQLRRRLPLADPVGAGAQPLERERGRRTRRLRGRWSGERGQGDRHRRDPRKSSGHLLEPRGPHGGERRLDLSTQRSDVDPEGDEVGERGRERLRRRHHGDDGGDRRLRLWGLLAQGDGDHRFDDLPRVSRDRLRELDVDPAGPDAVRMQADVVRAPPHLLDADGANGDPLELPAEEPYLAAGEHPLRGLDVLERRLDGQQRRRTQVGEEPQERLRAEDRVEPLHAEVLQRGQRVDDEAGVAPLLDLAAQHLLEGRAGDLDARELGGLSDRVRDPAERQDLPDRRDVLERRPLVAHHVGDRVEDVDRVERRPERAVVPDHLVRGVLDRHVEAFLSPANPLAEELEREGRLAGAGRSHDQVGTVRHEPAVEHLVELGHPERDARLARGSTDSGLRHLASDAGRHQGAGHVSMVRGASRTFPNTALWGFILNEDRSTRLSSFTSRQLAVPFLPPPRTPAVEPRRALVLPLQPRFVPSPAPVGTSTESPSSPPPLPGEPLPPAVTSLLSDFRLLVNLCLRHALATKTTSRGQLSRFGRTQAAELHVLGAFGITASEIALGLARAHRKRLRHGRPSRLPCVRTPFLRTPASAFHFDPETGKVRLSLRRAEWASFVLPVSAHARAVLADPRHRVTQLHLTDRRAVLLYARASPPPYAPTSVVALDTNERSLDGVELRPEGPTYVRVLFPELRTIQAIHVGRRRYLGRKKARDRRVQRRLLAREGWRERHRIRSRLHALTRSLVRELARSRSALVLEDLSALPSPRRRPGSWYRSRAVRRRLSNWPRGELHRQLAYKAQDAGVPVLWVDPFRSSITCPVCGELSEPRRRVGPRFRCERCGWETDRQLNAGVNLARTALRTVAELGGLRLDPDALSEDAVKLLYPVGGSRSGTGGAEGEGGTSSGAAGWPTPWTTSRSPNSVPTARPVRPAPATLAPSSRSHQRLFQPHGAAEASGRVVRPERCRCQGWVRGAVVSLPEPTSLSSSMRSRRPATAWSARRSGTARSSTATSARKATSPSAGPTDRRPGPTGSSDARTTPSSATISDRTAGRSTSTRPTSGSGRRRRRTARSPSRPNRSPVRRSPSSGCGPASSRPSRSRTRSSTASSMTAATTPAGSPPSASPCSAARRRPPASASRWGPARPSRPATTSP

SEQ ID NO: 31504 - protein, 411 aa, Bacteriodetes sp.
VQYKAYKYRIYPTKEQKELLSKTFGCVRYVYNRGLAFKMALYQTKEKGVSVFNLMKEMAKWKGCEETKWLKEVNSLALQASLVNLDRAYTNFFKKRTRFPKFKSKHDNNQSFCNPQNTTVFWENGKVCFPKFKEGIKAVLHRDFEGKIKSSTVSRTPSGKYYISVLVEEDVKNPAPTRPNENKTLGIDLGIKDFATFSDGTILANPKHLSKKLKSLSRQQRKLSRKNKGGKNRNKQREKVARLHEKVANCRKDFLHKITHGLAEKQGYTSLAIENLGVKEMLKNDKKTKLSRSITDAGWGMFKQFLTYKCERTGKNLLVIGRFEPSSKLCTCGYLNQNLLLKDREWDCPECKKHHKRDELAAQNIKRFAFCKQNTKKDKISLPLEWREFTPLESNVSCSLKKESSTALAQI

SEQ ID NO: 31505 - protein, 425 aa, unknown
  TnpB Polypeptide
MAWEVTRTVRVRLEVPDNRKSDLHATNDKFQYCANRTADWAWRYPEEDCVTSKSEAENAIYDDLREETDYLHANLVQKAIKRATKDVGNCVDRLADSDNTSKPEYDTFSIVYDKRAATYYRDKVSLATVNGRVECDYDLPANPEGTPHGKYLLNEDYSFSTSTVHYDSEDDEFYLHAAMERDIDASSPEKAEDSRVLGVDCNVDDHIAVTSTGKFVGNADFLNHQRREFEKRRASLQQTGTEEAHWTFQRIGDKFGRWCEDYLHQYSKELVAEAQRHGCTHIAFEDLEQIRERISDGKKFQQWAFNELQTQTGYKAESVGIVVEKVEPKYTSQQCSKCGCTLEENRDGQDFECLDCGYSVNADYNAAKNIARKLAVKLRQGQKSPAGGAFCQYALKLGVMTVNATEVASDAPVRQNESPPASPPL

SEQ ID NO: 31506 - protein, 465 aa, unknown
  TnpB Polypeptide
VKRTNTFAVRALTDNDEQVLRNLLDASAALWNEVNYQRLMRYNDEDGFEGDVWDADTGRLEGKYKAVLGTSTAQQVIGKNTEAWESFFTLKDQYHDESNTSVTEHPEPPGFRGNEDDGRVLKGVIRKDAYSVEWGDRSRIEIVVGKELRGRHDSPKSRLRLEIVGDPNWPDYEDQSRLELWYDETDSTFRASQPVTVSDETRDTPLADEKAALDIGANNLVTCTTTTGEQYLYEGRELFQRFRNTTREIARLQSKLEDGRYSSKRIRRLYRKRTRRRDHAQEALYRDLLERLYAEGVDTVYIGGLTDVLETHWSVETNAKTHNFWAFKQFTERLVCTAEEYGISVKVRSEAWTSQECPQCGSTDRTTRHQDTLTCPCGFEGHADLTASETFLRRHQNSESSDWRTRRGASRQRHTEQAVRPMARPVRFEWDDHEWSESPRSHRPKEQRTDPSTVHHSENVASGES

SEQ ID NO: 31507 - protein, 369 aa, unknown
  TnpB Polypeptide
VVYETIMRKAYRYRLYPSKSQVTLLEQTLEVCRWVYNDTLALRKTAWEQEQHSISLYETNKILTQWKKERPDLNRVYSQVLQNVQMRVDLAFKSYFRRVKAGENPGYPRFKGKGRYDSFTYPQSGFKLDGDRLHLSKIGDVKIVFHRPVEGRIKTLTVQRSSTGKWYACFSVEYEPSPLPQKETTVGIYVGLESFATLSTGEKIENPRFFRTDEKALAKAQRRLSKAEKGTPERKKARKIVAHVHERIANRRLNFAHQTSRQLVDRFGIIVFEDLNITNMQKNPHLAKSIADVAWNQFITITKSKAEEAGSRVILVNPGNTSQMCSRCGMIVAKTLSDRVHSCPHCGLMMDRDQNAAINIMRLGLQSLG

SEQ ID NO: 31508 - protein, 459 aa, Sulfurovum sp.
LRGEKCRSGDPQPRRGHDIRGGLGEGCAGNHHGVQCTAVRQPFAQEPEAARRREASRGGGAGMIVAHKIALDLNNAQATYFARAAGTARFAYNWALAEWQRQYEAWKQDNNLPKPSQAALRRQLNAAKRERFPWMLEVTKNAPQMAIIQLGDAFKNFFAGRAKYPKFSKKGVHDRFSITNDQFSVEGSRIRIPNLGWVRMRESLRFAGKIMSATVSRVADRWFVSIAVDTEDPPERKAENQGVVGVDLGVSALATLSTGETINGPKPHKALLGRLRRLSRNLSRKVKGSENRKKAKDKLSRLHARIANIRQDALHKLTSDMTRRFHTIGIEDLNVRGMMANRHLARSIADMSFHEFRRQMEYKSERRGGIVVVADRWYPSSKTCSDCGHKLEILPLSLRQWICPDCGASHDRDVNAARNLATYAVSSTVSACGEEGSGSGRKTGAKPASVKQEISAEPV

SEQ ID NO: 31509 - protein, 370 aa, Intestinibacillus sp.
MEYSYRFRIYPTKEQEAQIAKTLGCCRYVYNHYLAMRTQIHKDKKESMNYNACSKDMTELKKSLDWLKEVDSTALQSALKFLDTAYQNFFRRLKTGEKPGYPRFKRKHDPRQSYTSKCVGKSIQVLEHAVKLPKLGKVKCCISKQVQGRILSATVSRNPSGKYFVSLCCTDVSIDALPSKGKSVGIDLGIKAFAVSSDGFTYQNHKHLTSNQKKLAKLQRQLSRKTKGSKRRDKAKQKVAQLHERIADQRKDMLHKLSTKLIRENDIICMEDLAVKNMVKNHKLAKSIADASWGEFRRQLTYKAEWYGRKLVVIDRFYPSSQMCSACGTLWSGTKDLAVRKWTCPDCGTVHDRDVNAAKNILAEGLRMLA

SEQ ID NO: 31510 - protein, 433 aa, Pseudomonas sp.
MQRRKVTFRLYPNVSQQERLDGWVRLHAELYNAALQERIEAYRKAGISISYYDQQNTLPVIKQFRPELVELGSHALQETLRRLDRAFQAFFRRVKAGQSPGFPRFKSSARYSGFSYPDPAGWKLQQLGQRGGTLRLGSGKGAMMIRLRGRHRFADFTPNDLTLSRRRNHATGQDQWYASITLRVPESACRRERTGDDAIGIDLGVSHWANFDDGSQIENPRWLREALPQLANLQRQRARRKRGSHRYRLLSQEIIRLHQRIADGRRDFLHKQTTSLVQRCALIATEELQPQNMSRSAKGTVEKPGRRVRQKAGLNREILSAGFSMAHQMLTYKAHEAGSVLHLSDTRRLKPSQRCSACWAIVPKLLSERMHRCACGCVLPRDQNSARVVLLDAWILQDTPGTGVTARLKPLSAQAVKPKSTTREIPTTTAHAV

SEQ ID NO: 31511 - protein, 268 aa, unknown
  TnpB Polypeptide
MVKAIKVMLIPNNVQKTKMFQYAGASRFAYNWALAREIENYEKGGKFLSDAELRKEFTKFRHSDEYAWLLNISNNVTKQAIKDACTAYKNFFRGLQKFPRFKSKKRSMPKFYQDNVKIRFSNTHVKFEGFSSSRKANKQKMNWVRLAEHGRIPTDAKYMNPRISFDGLNWWISVCVEFPDCRETLNDDGVGIDLGIKDLAICSDGTKYKNINKSQKVKKLEKQKRRLQRSISRSYEKNKKGESYCKTNNVIKKEKSFIKTKSQINKYP

SEQ ID NO: 31512 - protein, 488 aa, unknown
  TnpB Polypeptide
MKSARILRADRLQQSMNIGKEQRLLQFIRDYRRVAVQIGPRHWRLFFEVGQIDKNMPATDLNHVCGAAPVQMATRQVAEQIKSWISNRANEFGNIVRGCKLPPELRKQLYAINRSRAWFSSAPLKGIDDAMRVLARRIMRHVMAQHRRPDLSRLSPRLDDRIALSVAPSRKAKHSALWATLRLPSRGRIEIPLHPTKYFKKRGGELCPVVQLCTERNGAVGVRLISDITEKCEGNRAAYTPKIDNLGIDFGLVTLLATSEGDLHGRGLLADLQPIDREITGIARHRQRTGGKPRDSKRYCQLVARVRGMLRTRINRAFNRIIETRAPAELTIERLNFQSPDLSKRMNRILQNCGRAVFQAKLKDFEERFGLVMSEAPSPYTSQECSSCGYVDRRNRRSQSKFLCRFCGMQKHADVNGACTVKGRRSAGLGDKFLTKGAVLAALVRQFCERHPRSQGAAADPRFSNPYFKAWAGAARNALETQGLASCA

SEQ ID NO: 31513 - protein, 339 aa, Trichococcus sp.
MKTVQIKLKPTKTQALELKRLSLEYIWQANVLVQQAISEEGFPKVTSKDIEADIPSVLKNELIRYAKSKLKQFGKCVFKKPMLSYNNQNFSVDEKAIRFPLMVEGKAKKTAIKAIIPEEVFALLSGSKLGALRITKKGFHWMAQISVHTEAEEFLGDGILGVDLGILCPAVGVVASNGKTQFFGNGRQNKCLRRKYKELRRQLGKKKKLNAIRNINDKESRIMRDINHKLSRQIVTFAVEKNCGTIHLEKLSGIRRTSRLRGKNKANLHSWTFHELSSFIEYKARELGIKVVYINPEYTSQICPMCGERNKVKDRNYNCGCGYHSHRDRVGALNIARTI

SEQ ID NO: 31514 - protein, 536 aa, Streptomyces sp.
MAAPFVAPGPAGVSIRTSLKGLTGQDEKVLRLVGDVLGSLASRDLKARCAAGPAHDSDHWARRKRALTGQCSSRWAGSITKATHDQWALARRGQLAHIQCLEAGVRTIAQRLALPVGAKGARGLPGGYRSRREWFAKSRRLRLLQERLERERADREAGRARVVRGGGKLLRNRHNLQAARLSEAQWRARWEAERWFLAADGESGKRYGNETIRVGPGGEVNIKLPAPLAGLANAPHGRYVLACRVGFRHRGEQWADRIAANRAVAYRIHYGIDRGRWYLTASWQVPPLWTVPLEAVRSSGLIGVDTNADHLAAWRLDAHGNPVGEPRRFDYDLTGSAPHRDAQVRHALTRLLHWAQRHGAAIAIEDLDFAAEKTREKHRHRKRFRQLISGMPTAKLRARLLSMAAELGIPVVAVDPAYTSRWGAQHWQKPLTSDNRKTTRHHAAAVAIGRRALGHTIRRRTPPPPQHRSDAVGHRSVQAASGVPGREGTRPRVPGPRTRSVGAGRGAKAGDQGAHNRSGHPAEHQSWNQDSLPLSH

SEQ ID NO: 31515 - protein, 683 aa, Streptomyces sp.
VWRRAKDAPVSVIRLPLVVGDADVRRRVEQLFSAVWQVKRALQRDARDVVDAYWAGDMRREKDVKAWRAELGLSRTGLERRAYRHLERSRWLSDHVSKALVMHQADEVWAGVARHLHPDASGQRAGRPRTGTWWEYTRIPGRARSHTTHRKWETFRLHGTLAGHLDTFRHPALPPSVTTPAQAAQLPPGVRVLAQPRRMPAPARPAERIRTGTLDAAGRPRARAATWFDHTGPLTVVFAGGPTGRGDIVLPVRLAQGAGRWPYLLHYLDDPSRWHKIDLVRLRDPAAPGGWAYEAHLMVLAPGYASTATRTRRRQAAALERVGGVDGNVSNLAVVSFPATGDPGDGPVRSARIILTGQEQRTWAAARKKARGRQRALDRSRRATNPQQYRPSRRQQTRGERRRAAGLPAKAMTVPAGPRHTAATGKPQQAYRRDTLSTGYRNLRARHSAAAASAAAASHHRARKIAAALVAAHGPNLTIEDCDIRTWFRLWGRACSATTPGRLISALAAECTATGGRLLRASTFTTALSQHCLCGRRLPKSLRQRTHHCDPAEGGCGLKGDRDLVSAALAAFTTLTAPDVPTTARLDHTRARTAQILFTQGLQEALTESTAPKSAPSGRTRAAAEPPGTTLPRQRTASARRNAGPRTVATPDETRPAPQRPKAHAGTTRPHTGRSRTHIRDKS

SEQ ID NO: 31516 - protein, 648 aa, unknown
  TnpB Polypeptide
MGDYGMGTRGKSKQPNWRRDPTQGTSVIRLELDVTHPRTRTQLEQHYQTVFRLRRAVQRDARDRVDAYHAAKHERARLGAKQVRERLGLTRKGLEAAAKQHVEASQWMHDHVTKATGLHVADEVWNTVDRHLFVDVSGKRHGRPRVGSWWDFTRIPGRAKSHTKPATWETYRLVGSLGGHLSAYRHPTLTTPVGDADPGTPILHQPQHLPTPTKPAGSWWTYHGPLAVVYTGMMGGDLVLPVRLPSGAGEWAHLTHFLGRPGLWHKIDLVRVRDRRAPGGWRYYAHLHILGAGYVSESTRIRRGDTPTDRVACVDGNVRNLAVVSVPTNPDQPVTSTYVTITRDQQTAADRAAVTARRRMKVLDRSRRTANPTQYGLSARQAKRAARRKAAGLSEKHTTPGGARDANTAGVPKQAYRKDTLSDTYRRTRADHAAASRSQTQAKHARATQTAAQLVHDHGANWITEHTNIRTWAQQWGRGIRLFSPGMLLAALTREATQVGGLVRRASTYHTALSQYCLCGARVPKTLATRVHACPTCGLTGDRDLVSAALGTRVVFTLPTDPRSARVDQNLADALRCRLAAQQEALNRSNSTAVNTPDGVDGRAVSILRVPLPVASGIPRPTPEQDPTRERRRTRREKIPHGPFRTNS

SEQ ID NO: 31517 - protein, 224 aa, unknown
  TnpB Polypeptide
MVYVDSDRARGGGTSGNRKTLGIDVGIVRFATLSNGSVIEPLNSFRKHEAALKKARALVQRIHARTANVRKDFLHRQSTTICKRQAIVCVEKLQVGNMSRSAAGSVEEPGKNVRAKSGLNKSILDQGWYEFRRQLEYKLTWKGGLLVTVPPQNTSRTCPACSCVAAENRLSQTEFRCKDCGFEENADKVGAINILRAGLAQLACQANEDTRRQQEPSVSAVLTA

SEQ ID NO: 31518 - protein, 224 aa, unknown; identical to SEQ ID NO: 31517
  TnpB Polypeptide

SEQ ID NO: 31519 - protein, 200 aa, unknown
  TnpB Polypeptide
LKDIAVTSDEDRLPAGRWTQEYAVKLASAQRRGHKRQAKRIHSRIARSRADALHKFSREMVDRYQKIVVGDVSSLKLVKTRMAKSVLDSGWGMLKGFLEYKRQQAARTFEVTSERNTSVTCFPCRALTGPRGINGLIVRSWVCRNCGALNDRDVNAARNTLIGSRCRTSVCGNEPTSWPIPPSSAYCVREVGIESARTAA

SEQ ID NO: 31520 - protein, 200 aa, unknown; identical to SEQ ID NO: 31519
  TnpB Polypeptide

SEQ ID NO: 31521 - protein, 448 aa, Butyrivibrio sp.
MILTENHRIKRTKHKDLFKKIDAYCYCAKNLSNSVQYLICQCYRIHRKLRNEEMLEPWEKKMLDEANNAITAYNTGRTEKKKLKLIDAENGFVADAYFLSWHMKTHDVYKAMPYATCSQICIQEKCRQWKSFYKAKTEYSKNPDKFLGAPKKPGYLDPVKGRGALVITSQNFSVAENGLIAMPGFLKGIKIKAKHRSVRQIRVRTDKNSIRIMLMYEQETAKTKEGGNIMGIDLGVDNLLTAALSTADSPFIINGRPLKSINRYYNKKKAYLQAIAKKSNRLDITNRMERLTERRNNKVKDYLHKASRKVITLAKKCSVNHIIIGNNKGWKQNAELGKRTNQTFVSIPFRMLIDMICYKAQLSGIKVSVVKESYTSGTSYLDDEIPDKDFYDSSRRVKRGMFKSNRGILINADVNAAYQIMKVGGYKDLSVKEKEKVEKEKVIRLNVA

SEQ ID NO: 31522 - protein, 362 aa, Bacillus sp.
MKGMSQTLTVKVKLIPTREQIRLLEQSSHEYIKVINTLVSEMVEAKKSTKKSTKDIEANIPSAVKNQAIKDAKSLFATKVKKSKYKLIPVLKRPVCVWNNQNYSFDATHISIPFKINGKSTRLKVRALLIDKNNRNLNLLKHKLGTLRITKKSNKWIAQISIKLTTNEKAGTKILGVDLGLKVPAVAITDDDKVRFFGNGRQNKYRKRKFRSVRNKLGKDKKVNAIRRLDDKEKRWMQDKDHKISREIIDFAIDNHISVIRLEQLTNIRQTARTSRKNEKNLHTWSFYRLSRFIAYKAMLAGIQVEYVNPAYTSQSCPKCAEKNRAQDRKYKCPCGFKTHRDIVGAMNIRYATVIDGNSQSA

SEQ ID NO: 31523 - protein, 395 aa, Frankia sp.
MSRFRLYPSAEQVGGLVEHCGHARFIWNLAVEQQAWWTPYRGRAPNHLERCRQLTEARAEFDWLRAGSQTVQRQALRDFDQAVRNFFGGSHRRPTYRKKGEAEGFQIVGKNARVENLNRKWSRCWVPKVGWVRFRRTRRIGEARSYRVTRDRAGRWHVGFAVAPVPIPAPGTGEVVGVDRGVAVSAALSTGELLRCPGLRPREAARLVRLQRRLAKARRGGNRRARLRSRLARIRAREADRRKDWVEKTSTDLARRFDVIRVEDLKVRSMIRSARGTVENPGRNVGQKAGLNRGILGNGWGLLVRRLEQKAPGRVERVPAAYTSRRCSACGHTAPGNRESQAVFRCVACGHESNADVNAARNIAAGRAVNARGGGPVGLPVNRESQRTTPPLVSV

SEQ ID NO: 31524 - protein, 382 aa, Nocardia sp.
VQLRYNFRVYPTPSQQSALARAFGCARVVYNDGLRLRQQAREAGLPYIKDSALQTLVITEAKKTPERAWLAEVSSVALVQALGDLHTAYRNFFQSATGTRKGARVAPPRLRSRKDNRHSIRLTRNGFSLRPNGRLYVAKVGELAVRWSRELPSEPSSVTLIKDVAGRYFASFVVRADDQPLPEVDIGVGIDLGLSTFAVLSGGKTIDSPKFLRQAERRLRKAHKALSRREKGSNNRAKARVRVAKAHARVADTRRDWAHRQSTMIIRENQAVFVEDLCVNGLARTRLAKSVHDAGWGMFTRMLEEKAARYGRTFAKVNRFFPSTQLCSVCGELGGKKPLHVREWTCTCGAIHDRDLNAANNILAAGRAERLNACGGTVSLSA

SEQ ID NO: 31525 - protein, 407 aa, unknown
  TnpB Polypeptide
MLVRGVAFRLRGELPPEAKFLLEDFRLAVNNAVRAGLQAGVTSRNALAKIAYKDFRKEHPRMYAQHLVSAFEVAGSVIKNYRRRIRRSGAGGVPYVRHLMMKTENQAYKLDRKNGVVDLPIRAGRHVMLKLEVSKYHRRYLDDRSLTLGSLTLLPDRAIVAFRKNAPRPYVPESALSLDTNEGSLDGVFFKKDEAKAVTADFPDVAIIQQRHHDRRRRLQKKKAHDRRTSRRLCRREGARERHRIEHRLHQIANSVLCFAENNRSVVVIEDLRGFRPKRNKELNRRLNLWPRKELHRIIDYKAQWRGIPVVKIDPRYSSRTCPICGRIQDSRMGAEFRCDCGWRLDRHTNASLNLLQTAISKGLEMAGGLRFNPGAFQHDVMMILYDPVAGARSEPNGTSCVGEVTS

SEQ ID NO: 31526 - protein, 345 aa, Anaerolineales sp.
VKLTAKVKLEPSQAQHESLKLTLETANHACNYIGKQAWKHKVFRRVPLHNLVYYDVRAKFNISAQMTVRCIGKVKDAYILDRKRERVFKLTASFPYDDRILSWRIDKQTVSIWTVGGRQTIPFVCGQRQWELLQTRHGETDLAYVDGVFYLFATCDIETPDKMDVSEYIGVDLGVVNVASDSDGEQYSGSQVLSIRNRRFRQRRRLQKKGTKSANRVRKRLARKEKRFATWFNHTISKQIVEKAQRTGRGIALENLNGIRKRIRARRKQRRNLHNWSFYQLLQFISYKAELAGVPIIMLNPAYSSQMCSVCDHVSKSNRKSQSAFLCQSCGYADHADTNAARNLS

SEQ ID NO: 31527 - protein, 456 aa, Anaerolineales sp.
MGIGEPIRILKASGESHPLEFAWRGRRHYVRIIEGYRSDVERRGSKVRERKQYQLITADGLHEIIAAETPLLAVGRSRLPPFVAKFNIVKLTAKVKLEPSQAQHESLKLTLETANHACNYIGKQAWKHKVFRRVPLHNLVYYDVRAKFNISAQMTVRCIGKVKDAYILDRKRERVFKLTASFPYDDRILSWRIDKQTVSIWTVGGRQTIPFVCGQRQWELLQTRHGETDLAYVDGVFYLFATCDIETPDKMDVSEYIGVDLGVVNVASDSDGEQYSGSQVLSIRNRRFRQRRRLQKKGTKSANRVRKRLARKEKRFATWFNHTISKQIVEKAQRTGRGIALENLNGIRKRIRARRKQRRNLHNWSFYQLLQFISYKAELAGVPIIMLNPAYSSQMCSVCDHVSKSNRKSQSAFLCQSCGYADHADTNAARNLSRWAVCKPAKRLVLSGKAPSLAAG

SEQ ID NO: 31528 - protein, 402 aa, Escherichia sp.
VKRLQAFKFQLRPGGQQECEMRRFAGACRFVFNRALARQNENHEAGNKYIPYGKMASWLVEWKNATETQWLKDAPSQPLQQSLKDLERAYKNFFQNRAAFPRFKKRGQNDAFRYPQGVKLDQENSRIFLPKLGWMRYRNSRQVTGVVKNVTVSQSCGKWYISIQTESEVSTPVHPSASMIGLDAGVAKLATLSDGTVFEPVNSFQKNQKTLARLQRQLSRKVKFSNNWQKQKRKIQRLHSCIANIRRDYLHKVTTTVSKNHAMIVIEDLKVSNMSKSAAGTVSLPGRNVRAKSGLNRSILGQGWYEMSRQLAYKQLWRGGQVLAVPPAYTSQRCAYCGHTAKENRLSQSKFRCQVCGYTANADVNGARNILAAGHAVLACGEMVQSGRPLKQEPTEMIQATA

SEQ ID NO: 31529 - protein, 370 aa, unknown
  TnpB Polypeptide
MKLTLKIKLVPTDEQHRLLLETLKEANAACNQISDIAWRNKTFNQFRLHHLCYNDIRERFNLSAQIVVHCISKVTDAYKLDRKTQRTFKEYGSINYDSRVLSYSGTYVSIWTVGKRQKIPFVCHNTDYIPYIKGEADLVFKKGKFYLFQTVEVPEEDVEDVEEFIGCDFGITDIVCTSEGKSYSSQSLNRYRDRQRKIRSSIQSKGMKGRTHECKRGCAKLLKRLKGKERTTATIINHTISKQIVMEAQTKGLGIAIEDLSYIRSTTEHRNRTFRRELNSWCFRQLRSCLEYKAKRAGVPLIVVDKAYTSETCSKCHHIGTRKNKYFKCIYCGNDMDADINAAKNIALLGAAINKPEKSGMWSCCLHVTA

SEQ ID NO: 31530 - protein, 394 aa, unknown
  TnpB Polypeptide
MKTILYTYKFRLQPTDNQKDILNKYFGSVRFVFNYFLNQRKDEYLNNKKSITYNQQSSFLTQLKKDEKFDWLKEINSQTLQYSLNCLDIAYQSFFKKRSKFPKFKSRKSKNTFTVPQFVKVVDNHLVIPKFKDGIGIIKHRKIEGTIKKCSISRTPTGKYFVTILVEKVYNPVQKTNKSIGIDLGLKDFLVLSDGSKTKNHRYTKKYERKLKTNQQHLSRKVRGSNRYEKQRIKVCRIHEKISNSRSDLIHKTTSNLIKNFDVIYLEDLNIKGMIKNRKLSKSISDVSWGKFIETLEYKAKWNDKLVIKVDRFFPSSKTCNSCGYINQNLKLSDRTWVCKGCNGMIDRDLNASKNILNEGLRLNISDGTSDHDRGAEIRPDFLGTSFEAIKETS

SEQ ID NO: 31531 - protein, 414 aa, Natronococcus sp.
MDLTLRFRAYPDDDTASEAWRHINIHRQIRNHAVRDYYRAPRNDRPSAYDQHRKLTEWKRKWSMFKDVSAHAAQQTVSQIHKDLKVLKEHRKNGRKTGQLKWQGEGEVRSVAYQSEGFNVNHTTDHDDFGTLTLSKIGEIPIRAHRDLPATETVKRAILKKERTGEWFACLVIEVETPDKPNPDEIDPADCVGVDLGIQSYIHTSDDLSVECLDLSGEYDHYAKEQRSLDRKQRGSANWENQRRKVAKAKRRIRWKVLDFQHKLSTWLVREYDVVAVEDLDVKPMLETSQSAKNKQDAAWSRFLDLLEYKGELHGTHVVRVDARGTTKECNECGVETSKPLWVREHSCPACGHTEDRDLNAAKNILDRGLNKLSLHVGPGRSESTPVQTVLPAFTRHSGRVDAKHVVEAGSPAA

SEQ ID NO: 31532 - protein, 537 aa, Acidimicrobiaceae sp.
  misc_feature (533)..(535): Xaa can be any naturally occurring amino acid
VDTNDPDCFSVLRCRLMIDENTRRRLDVAFVAAGHLEQALTRWALTNLESMRHTTRWRDACALPTGLSASGEVIDTAARRTRNVALNAVRKEFSLSEYDFTKRILELRRDSRWIGEHVPSSSALVHATQVWKSFAAHLFRGAGRPRVPRLWDKRVLLGYFRYVGRAEPTPEEMREAAVKGRTPPRARSAGWSGLSLRTSEDGGFAIHLHPSRDRARHLVIPVVTQGGSDQREGWYLEDPTSWRQVKIVRREIRNHFVYEAHVLCAKEPYRDPSRYGCAPDGVVGVDLGVSSLAAVGIGPDGELTDALLVRASAQELEQRQLVARKRRRTQRALERSRRATNPDAYGPDRRSRAGRGSQRPGIRLATSKAYRATRRALRDERRRERESRVITTNRTASAVLQRCGTNIVTEDVTVKAWQRTWGRSISYFAPSELSSALERETRFAGGSFTKVPCRLGLTQTCHCGAVKKKSLAERWHRCQICGSGFKSAPVDRDLHSAFLAAFVTSTSSPIASTLDTDRALAAWSRAEAPLVAXXXSG

SEQ ID NO: 31533 - protein, 393 aa, Spirochaetes sp.
MSRNVKRAYKFRFYPTPEQEHLLRRTFGCVRVVYNHALETRTRSWRMDKKSVGFAETSRNLTQLKKNPDYTWLGDVSSVPLQQALRHLNDGFTRFFSKQNGYPRFKTRKDRQSATFVNTGFTYTDGKLTLAKMREPLDVRWSRNLPEGCTVSSVTVSLDRAGRWFVSLLTDTVVEPLPTVYSSVGVDMGLEHFATLSDGTKIDNPRFSRSDHARIERAQRNLSRKQKGSKNRAKARMKVARAHARVTDRRTDFLHKLSTQLVHENQVIVVEDLNVKGMSAKGRGSRKKGLNRSIHDAGWAQFREMLTYKAHWYGRELVVVNRWFPSSQLCSECHVNSGKKPLHVREWTCTNCGTLHDRDINAAKNILAAGLAVSVCGDGVRLTDTPVLVSNCR

SEQ ID NO: 31534 - protein, 375 aa, Nitrincola sp.
MISATRVRIYPTPEQAVFLNQQFGAVRFCYNKALLIIRNQYQHHGVSLRAKRDIKPLLAVAKKSRKYHWLKSFDAIALQQSIIHLDTAFAKFFKKTARFPRFKSKRSKQSSYHCTSVSVGDDWIKIPKIAAIKARIHRDLEGSIRSITVSRTATGKYYASILTDDGLNAPIPIQTLDQVVGIDMGLTDVCITSEGVKTPNPRFLKNAASNLRRKQKALSRCQKGSRGRAKARLLVAKAHERLANTRADFQHKLSRQLVDDNQAVVVETLKITNLLKNHRLAKHIADVSWDGLIKKLTYKAMRAGKHLVKINPWFASTKTCACCGYKIASLPLAVRTWDCPACGTTDIDRDINAAINIRQQGLIHLRAEGLFVPAN

SEQ ID NO: 31535 - protein, 373 aa, Oscillochloris sp.
MRKAFKYRIYLTKGQQRILEQQLEECRWVYNKLLAERKRAYEERGESLRKYDTLNLLPIWKLTRPSMKLVHSQVLQNIGIRVDLAFQAFFRRVKEGAAEVGFPRFKGFGRYDSVTYPQYGNGVRLEGARLILSKMVGAVAIVLHRPVEGTPKTVTLTRSRTGKWFACFSCETEAEPLPLTTARVGVDVGLASFATFSDDTPPIPNPRFYRRDEADLKRVQQRKDAAKLAQDWPENAKQKGILAKIHERIANRRSDFAHKESRKLINAYGLIVCEDLAPQEMGAKSSRGMRKSILDVAWSMFICMTVAKAEEAGRQVILVNPRNTTKMCSHCGKLVVKTLRDRTHSCPYCGLVMDRDKNAAINILQRGLQTLRP

SEQ ID NO: 31536 - protein, 487 aa, unknown
  TnpB Polypeptide
MSQKVRIDGVKHTGASVFLGVDHCGNPCWTRNPERVMVWLCDGWRTRFNQRREQRPHNVPVKDETGEIIGWIKEPLGGPDVPGLLSDREARLQCSWMTAVPSSILATTNRVEGTEWFTGLKRKKTAGGRVPGFKSRHRGLGFVCWYHPSGNSYNAVFHKTGRRSGVVVITGMNPTRWVKPGEKAHWRIAIHVRVGQSIRPYTSVHVDWTHKSLVFTNMPLPLPRVGNGMVGLDRGCAHTLASSDGVFMDMPKPTKKEMARLRYLQRRLSRQDRTNEARGGKAAKFASKRRQRTLTEFNALQGRIVRRRNDWIEKTTTKLAEENILVAMEDLDVQAMTKRPKPRPNPDNPGHWLHNGAKAKAGLDRSILSNCWGRVMTRLQDKMAANGGRLVIVPAAYTSQACHKCGHVAKGNRESQAVFHCVKCGYEANADVNAAENILDRALSQTGGDTASDVEEPQWRTDEASTPSFPQAGSSSGVRSAKGIPWL

SEQ ID NO: 31537 - protein, 142 aa, unknown
  TnpB Polypeptide
VEIDPLPSTGAVIGLDMGLKSFAVTSDGTEYPNHKFLTKSDRKLARLQRQLSRKSKGSKRREKARVKVARLQEHISNQRGDMLHKLSTSLVRDYDLISIEDLAPKNMVKNHKLARSISDASWGEFRRQLEYKAQCTGKWLSV

SEQ ID NO: 31538 - protein, 536 aa, Oribacterium sp.
MTNQEYNKLLKQYHKLSDRHILVAETDMPYSDVQKVVALSDKVRKAGNELVGLMRKNHDQLIRTKKYRKLLNLYGNTENKVHRKSLAKQLNEMQKVYNVTWDFCRASMIPIGKKYGIDAVFALTKAEDVWRGMEKCLYSNGEMLHFSKYGELPCIRAKQINRGIPVSIKDNKVQFKLGRIMFGLQIKDRFQTDEINAVMSYLANPEIMDTKAVDTFIEGARCIDTYRPCYATLVPKFIRGKYRVYLHLTIEGKAKPKYDKFGNPRHKYGKGIIGADIGTQTVAYTSDTEVGLKNLSERGNSIQDSERLERLYYRAMDRSRRATNPQNYNDNGTVKKGRKSWKYSNHYKKLRAKHSELCRINAVNRQLAINEDANHLRSLGDTFITEPKNASKLMRQVKKTTKNAKGKFNKKKRFGKSIKNRCPDGFQTTVKNKFKVSGGTYIEVPNNYRASQYDHTADDYIKKKLSDRIYKLRDGTMVQRDWYSSFLLYCYDWKTKNVDKDKCIATFDKCHTKEKALIAWIKANKIKILNSGIKVA

SEQ ID NO: 31539 - protein, 357 aa, unknown
  TnpB Polypeptide
VQRSVKISLTLATVAKRRRLAALLREIKSCTQRYINYLWSNPGRLDAATLNRIAGGSLSYRHRSNCLKVALETLSSTRKAARATGVTASCPHVNGAIRLSSLVCKVEPGKGTFDYVLKVSSLVKGEPIVIPFRSHKRLNYWLEKPGAKLLQGCTLGDGWAALWIEVADQQPKMGDVLGVDIGINKLLVDSNGNRYGVEVKAVCARVRRCKPKSKGRLRASRARKDYINREVKRLPWATLGSLGVENLKNMKLGKKPGRGKTFRKAIAPWTYRQVIARIEMLAQENRVLLVAVDPRNTSRTCPLCKTVAKESRVGEHFCCVSCGFAADADHAGAVNVLVRAHPNSGQSMVARCFAKKS

SEQ ID NO: 31540 - protein, 372 aa, Nitrosococcus sp.
MKTTLQIKLLPDGTQHSALKETMRVFNDACNAIAEVAFREQCASKFELQKLVYADVRKQFGLSAQLTIRAIAKVVEAYKRDKSKQCFFKPTGAVVYDQRILSFKGLDRASLVTMQGRVSIPIQMGQYQRVQWHRAKGQADLVLVKGAFFLLVVIDTPEAPPIDPSGFIGIDLGITKVATDSDGGSFCGSTVERVRQRYHRLRRRLQSKGTRSAKRHLKKIRRKEAQFRRSQNHIISKRLVEKAKDTGRGIALEELKHIRSRTTVRKSDRAKHSGWSFFQLQSFIEYKAKLAGVFVQYIDPWYTSRTCSACGHADKANRKTQSHFQCVSCGYTDNADINAAINIAARADVMQPMVMRATTAKDSPSTATSLPL

SEQ ID NO: 31541 - protein, 333 aa, Spirochaetales sp.
LDKRKTAYEKDKSSLTYNMCCKDLTSLKREFEWLREPDKDSLQKALKDLDSAYQKFFKEHTGYPKFKSKKNRYRSYRTSCTNNNIAFHGKYIKLPKLGLVKIRGSIVPQGRILNATISQEPDGRYYCSLCCTDIEPEQYAKTNEVVGIDLGLIDFATFSNGIKIDNPRFYENSEKKLAKLQRELSRKTIGSNRWNKARIRVAKLNKYITNQRKDFLQKLTTELVKQYDVICIEDLDIKSMKETENKIRNKRVGDVSLSEFRRMLTYKNQWYGKTLSVINRWFPSSQICNCCGHNGGKKPENIRQWVCPSCGITQDRDINAAVNILNEGLRIIA

SEQ ID NO: 31542 - protein, 366 aa, Methylobacterium sp.
MPYASSVSTATDQLVLKAFSFRVKDATSSKRLTALANAVNTVWNYVNEISARSADRGTLWATKKQFRDLTKGSGKLLGLPSQVVQEVIDEYVLKRRAAHRPKLRWRASRGPKRALGWVPFTNQDVALDGETVLLRGQRFRLWQHRAVEGRIKSGNFSQDARGRWYCNLVCEMPRSLGKGRDEVGVDLGLKSVAKCSDGQELEQARFYRDLEPKLAEAQRKGRKRQVKSIHAKIANRRKDTLHKFSRALVDRAQRITVGDVSASAMTKTRMAKSVLDAGWSMLRGMLRYKCDHAGVAYAEVDEANTTRACSSCGCLTGPRGLAGLGIRRWTCGDCGAEHDRDQNAARNIARLGCETPCPSGHGSPAF

SEQ ID NO: 31543 - protein, 399 aa, unknown
  TnpB Polypeptide
MLTATKIRIYPNSTQADKLAKAFGCARWYWNNSLAETQKVYMATGKGLGQFQLNARLPQLKSEITWLGETHSQVLQSVSLHLSRAFVNFFERRAKYPQFKHKHRKQSIQYPQGVKIVDECKVFLPKIGHIKAVVHRKLAGVIKTVTVSRDPGGKYFASILTENGIDTPAVVLEGKVLGIDVGLTDLAVTSDGSKFDNPKHLRKAQKNLARKQQHLSRKVKGSNTRNKARLLVAKAHERVGNARKDYLHKLSARLVNENQVIAVEDLHVKGMMKNHNLARAIGDAGWGAFTNMLKYKTARAGKGYIEVNRFFASSKTCSCCLHARAKMPLDIRMWTCDQCGVRHDRDVNAAVNIRNEAQRMITAGIVVTANGGTVSRGAGRKSSIALVPLKLEAPSFTAG

SEQ ID NO: 31544 - protein, 402 aa, Escherichia sp.
VKRLQAFKFQLRPGGQQEREMRRFAGACRFVFNRALARQNENHEAGNKYIPYGKMASWLVEWKNATETQWLKDAPSQPLQQSLKDLERAYKNFFQNRAAFPRFKKRGQNDVFRYPQGVKLDQENSRIFLPKLGWMRYRNSRQVTGVVKNVTVSQSCGKWYISIQTESEVSTPVHPSASMVGLDAGVAKLATLSDGTVFEPVNSFQKNQKKLARLQRQLSRKVKFSNNWQKQKRKIQRLHSCIANIRRDYLHKVRTTVSKNHAMIVIEDLKVSNMSKSAAGTVSQLGRNVRAKSGLNRSILDQGWYEMRRQLEYKQLWRGGQVLAVPPAYTSQRCACCGHTAKENRLSQSKFRCQVCGYTANADVNGARNILAAGHAVLACGEMVQSGRPLKQEPTEMIQATA

SEQ ID NO: 31545 - protein, 402 aa, unknown
  TnpB Polypeptide
VKRLQAFKFQLRPGDQQECEMRRFAGACRFVFNRALALQNENHEAGNKYIPYGKMASWLVEWKNATETQWLKDSPSQPLQQSLKDLERAYKNFFRKRAAFPRFKKRGQNDAFRYPQGVKLDQENSRIFLPKLGWMRYRNSRQVTGVVKNVTVSQSCGKWYISIQTESEVSTPVHPSASMVGLDAGVAKLATLSDGTVFEPVNSFQKNQKTLARLQRQLSRKVKFSNNWQKQKRKIQRLHSRIANIRRDYLHKVTTTVSKNHAMIVIEDLKVSNMSKSAAGTVSQPGRNVRAKSGLNRSILDQGWYEMRRQLEYKQLWSGGQVLAVPPAYTSQRCACCGHTAKENRLSQSKFRCQVCGYTANADVNGARNILAAGHAVLACGEMVQSGRPLKQEPTEMIQATA

SEQ ID NO: 31546 - protein, 476 aa, Clostridium sp.
MKAILVNETNDQKQIIDNMMLVFCTAIRFSFKRLLENNITINELEKIVSKKYNLNIRQSKDAVEPARQTILSQKELIKMNHEDYSNKCKAIEKILNGKKKISEKRKNALLKKLDKRQRRANYFKNFIYTNTIPSVTFGTKEMFIRRCKGLISKEEWSDCRNNRFYSRGDKSKNGNPNLRIIIKNNMSFLEISTLEKTLTNRAIKVQVSIYLPQKLSKKTNKVNGINYREMFLSHLASGEPYQVEILKRNDKYYCHITFDLQKQKPVYTGHNGIIGIDTNPDGFALTMIDNKGNYKWHTYLKQHELLYARSNRRENLCGELVKRVILIAKTYSCGVAIEDLKFKNDKDVNSKFARIKHQFIYSKLLAMFESACVREGIELVKVKPQFTSKIGLYKYCHQYGMVVHNSAGMVIARRSYNFKEKVPKILKDKLVKDLDRFNKKNEWSKWIEINKNIKGKVGENPDLWLVNRKKILGLVS

SEQ ID NO: 31547 - protein, 396 aa, Clostridium sp.
MKKLLRAYKVEIKPTLEQKMKINQSIGIYRYLYNFYLAKNKELYQQFEDGLLDKQHSFMSANDFDKYINNEIKTLEEYQWINKCGSKARKKAICNAELAYKSFFKGESKFPKFKKKNKSDVKLYFPKNNKGDWKVYRHKIMIPSLKNVRLKEYGYIPINANIKSGTISKSADRYYVSVLVETDIANPNIPTNDGVGIDLGLKEFAVISNGTFKKNINKTVTIKKLEKKLKREQRKLSRKYERLKLRDKNKKEEATRQNIQKQIAKVHRLHQRLSNVRTDYINKVISDIVKQNPSFITIEDLNVRGMMKNKHLSKAVAGRKFFEFRTKLTNKCNWMGIELRIVDKFYPSSKLCHECGCIKKDLKLSDRIYKCECGYEEDRDLNASFNLRDAKIYKIA

SEQ ID NO: 31548 - protein, 433 aa, Escherichia sp.
  misc_feature (379)..(382): Xaa can be any naturally occurring amino acid
VKRLQAFKFQLRPGDQQECEMRRFAGACRFVFNRALALQNENHEAGNKYIPYGKMASWLVEWKNATETQWLKDSPSQPLQQSLKDLERAYKNFFRKRAAFPRFKKRGQNDAFRYPQGVKLDQENSRIFLPKLGWMRYRNSRQVTGVVKNVTVSQSCGKWYISIQTESEVSTPVHPSASMVGLDAGVAKLATLSDGTVFEPVNSFQKNQKTPARLQRQLSRKVKFSNNWQKQKRKIQRLHSCIANIRRDYLHKVTTTVSKNHAMIVIEDLKVSNMSKSAAGTVSQPGRNVRAKSGLNRSILDQGWYEMRRQLEYKQLWSGGQVLAVPPAYTSQRCACCGHTAKENRLSQSKFRCQVCGYTANADVNGARNILAAGHAVLXXXXTSSSGVAVRCLLFRQRTQASVARAVVIQRKKIACHKVNSDARYVDIQRTPM

SEQ ID NO: 31549 - protein, 346 aa, unknown
  TnpB Polypeptide
VILTYRYRIKDATTAKRLRAHARAVNYVWNYCGEIQEAARRQEKRWPSAFDLIKLTTGSSALLGLHSDTVQAVCKQFVVSRNAARRRPHWRGKKSLGWIPFAAARAVKLDGDAVIYLKRRYRLWRSRPVDGKIKTGCFAQDARGRWYLGLQVKIAESQTCGAGEIGVDLGLSTLATLSDGRKIENPRHFKKYKGRLAKAQRARNKKRVRAIHAKIANARRHYLHVQSTKLVRENRLIVIGNVIARSLPYRSQRKSAVDASWSEFRSQLRYKASRHGARYIEAEETGSSASCSACGARSGPEGQKGLRVRAWVCDCCGTRHDRDINAAVNLLLGAERRPPAVEIHAL

SEQ ID NO: 31550 - protein, 424 aa, Sutterella sp.
MMQTKSKIKHMIRHKSFVFKLKPDGATRRSLAKACGCVRFVYNKALDWNKEQQTFQVSYPKLCALLPEWKREFPWLGECHSQVLQQGMKDLMTAMVNFFEGRAKFPRFHKKFKDEDSIRFPQGFKVDEARRQIYLPKIGWVGYRRSRFINGKLRSVTVMRKADGWYVSILTEREIEAPVHPKAGREIGLDAGVKKTAALSNGKIYLPVDAFRSSKDKLAKMQRRLKRMVPHSENWKKQQQKIAVLHKEIADTRRDHLQKLANDICKNHAVVYREDLKIKNMTASAKGTLEEPGKNVRQKSGLNAAILDQGWGILFGLLDQKMKELGGEVFAVPPANTSRTCPKCEDVSPLNRLTQARFCCRKCGFEGNADVVAANNILRRGQRLRACGELQSTAAVQVNRPSRKRRAGQQQEPIRRDPQAPENA

SEQ ID NO: 31551 - protein, 467 aa, Streptomyces sp.
MIRAYTFLMRPTARQAIALGEMLRDHCSLYNGALQERRDAYRHVSKTAITYGTQSAQLKAIRAFDLDRQGRWSFSSQQATLRRLDRAFRAFFRRVRSGDTPGYPRFRGTSWFDTVEFPRDGDGCRWDSTPHVPGTRIRLQGVGHIKVNQHRAVTGKIRTVSVKREGRRWFVVLTAEQARPEPLPVTGSAVGIDLGIVHFLADSQGGFLDNPRHGRRTADKLTTARRKLSRFPRVRRDKRTRNHQRAVEKVAALHGKVRRRRLDHAHKTALALVREHDVIAHEDLAISNMIKTPAPRPHPHRAGDFLPNGAAAKGALNRSIADAGWGVFLTILTSKAESAGREVIAVDPRNTSGTAPGAGTPRRRTGPPGTPLSASPAATVRTPTRWEPSTSYGPGWSVAKPNRHSEKPCRFRRGGVTTLPVSDRRGRDSGPADAVLVRGQPISSSVFPFVSFTKISTNGMESTAKQV

SEQ ID NO: 31552 - protein, 310 aa, unknown
  TnpB Polypeptide
MLIRKAYKFKLMPNGEQRHKLSSFVGCKRFVFNMALEKQIALHGENSTFLTNYFQMTNWLIAWKKEFPWLRDCHSQVLQQGLKDLHQACQNFLAKRACFPKFKCKGNGDGACFPQGGKVDEANSRVYLPKIDWVRYRKSREIEGTIKNITVSKAGDDWFVSIQTEFEVDNPVPTGGELGIDVGIARIVTCSDGTFFAPLDPYKHCMDRLARLQQELEKKVRFSKNWQRVREQINKLYTKIANIRKNYASNQQRNQQEPRDCVCRGLEDKESDKVCQGNRRGTWEECEGEIGFKSCDFRSGMGNVFPLLEL

SEQ ID NO: 31553 - protein, 395 aa, Frankia sp.
MSRYRLDPAPEQVAGLDEHCGHARFVWNLAVEQQSWWTPYRGRAPNRLERCRQLTAARAEFDWLRAGSQTVQQQALRDFDQAMCNFFNGSHRRPAYRKRGQSEGFQIVGKNARVEKLNRKWSRCWVPKVGWVKFRVSRKVPDFRSYRITRDRAGRWHIAFAVAPEPIDAPGTGKIVGVDRGVAVSAALSTGELLVCPGLRPKEAERLRRMQRRMARARRGSNRRTRLREQIARVMAREADRRKDWAEKTSTDLARRYDLIRVEDLNIRGMTRSAHGTVAEPGKNVRQKAGLNRGILANGWGLLVQRLKQKAPGRIERIPAAYTSQRCSACGHVAAASRESQARFRCVACGHTANADTNAACNIAAGRAVTARGGTGLPEPRNREPQHSTPPLVGV

SEQ ID NO: 31554 - protein, 400 aa, Frankia sp.
VPPVRRSYKFLLRPTVRQATALTTMLDDHRVLYNAGLEERRAAYRHPSKTTVRYGDQSAQLKEIRAADPDQARWSFSSQQATLRRLDRAFAAFFRRVKAGQTPGYPRFRGMGWFHTVTWPKDGDGCRWDSQPDHPTQTRVRLQGIGHVRVHQHRLVRGTVKTISVTREGRRWYVALSCDDVPAQPLPGTGVAVGVDLGVASLVALSDGRHAGNPRYLAAAAGRLTRAQRQLARKKRGSARRRKAVARVAAVHARVRRQRLDFAHKTALGLIRGHDLIVVEALRVGNMTRRARPIPDRPGVFLPNGQAAKSGLNRSILDAGWGVFLAVLHAKAESAGRVVVEVNPARTSRTCAVCGYCHADNRRTQAVFACTACGHAAHADVNAAVNILRAGLALQAAQAA

SEQ ID NO: 31555 - protein, 484 aa, Beggiatoa sp.
MRAQKVKIRGLTKPQFKRLKDLTGSAKNLYNQSLWTLREAFEATGKYFSYPQMDKAMKQVENLEGEINYKLLKANIAQQTLRKLDKNFKGFFRAIQDFKKNPSKYKGRPKPPKFKQKQHDNLVYDYQAFQIKNRITITEKPFCTSLKMPDGKVFHQAQFILFEQVAVLEKGLEIKVPNLLFHEEIKQVEIIPKPRYFHAVFVYEEDLNHFKQVPQNDKVMSIDLGLNNLATCVTNGVVKPFIIDGKQLKSVNAYYNKRKAKMQAKLEKQRGKKWSKKLQSLTNWRNAVINDYMHRASHVVAKTCVDNGISKVVVGDVAKSLNRINLGKKTNQNFVNLSLGQFIDKLGYKLGSHGIELFFPNESYTSKASFVDSDKMPKQYNPNAKLSYTFSGKRIKRGLYKSSDGTLLNADANGAYNILRKTDSDFSFSTLAKKVGSKVKEWLHPTKRFRFLKSITHQKSNFKRRKKVEENSPSSVLGQQLSLF

SEQ ID NO: 31556 - protein, 560 aa, Sulfurihydrogenibium sp.
MITLHCKLTFENEKDKQTLINLMRKFSSCFKYSYNRLLEGHSRKDLKKDLQKMFNINSRYVDDAIFKAKWLINNCIEREQNPKKVIFGGKRLFQLLKNKHINGKYREKLKQKWQDRRKHCLYSRGDKSKKGNLNTRIEFEKDKIILRINTGERNWIKANIKRTVYRQNDKWTNFIADLIQANQTNQYFPYSVEIRKINNDFYAFINYEEIKTEEPIITKDNGVIGIDINANPFHIAMAFVKKDGNLESIEKISLHNLLNKTKNQREYISWQIAHQITDIAKERNKAIAIENLKDIPKGSKGDGSKKLRKIKQQWIYKGLLDKIKILAKRKRIQVIQVNPAYTSIVGSLKYAPQYSLDKDIAGAFVIGRKALGFKEKLPKNYEKLITDREYLNFAQDRLQEEKQKTQKKLKTENNQYKRKPIEKKLKELNKNLKIIQSLYSEPQTQEAVNQRKEQMRGLYWTSYKLWQVVKVALTIPILGKSISRDLSPLKPILVDGDWDRVVNKSCFKTKEAIEDLKHDLGIVPTSWGRGYDASEIPPAGDSLHLNKAEYKYPSPECMNL

SEQ ID NO: 31557 - protein, 507 aa, Sulfurihydrogenibium sp.
MKPQEKIKRVFTIRVGGKERKRKVRTLLLDLAHFRNILTILITKYYTLYKEHLLNQSILYGLVAKNYTGKYKEEFEKVLKNIESNPELADLLIKLKNQKEKVDNPHYIQYIIRQTIKDFKSFFKSLESFKTNPEKFKEIPRPPKAKKLKYLMNFSVEGNVNTFKQEGDKIIIRLKNNKYLKVKLPKDFPYKISSLRIKLFGDDLYVDAVYEYPLKVEQPEGEYKAGIDIGLNELLSVVSENPELKSFIVSGKEIKAFNQWFNKEMSKLRAEIDNLKNSVKKGFIENQVATKKIYELELKMKSLSSHRKRWLDNNFHKIARKLVDLLHETGHKTIYIGKNAIESKNGIDLGKKTNQEFVSIPFRRLIKLIEYKAYEYGMEVIEVDESYTSKTSPLANIFEVKETKNKEVCQGKRDGDIFKDKVLNKVFHADLVGAVNIIRVGAKLLRLRFYENLKTFFIKLCNPVKLKLIDLFYKVSPESLWIGSSRWGASFPAGWMEKSGYLNTFGT

SEQ ID NO: 31558 - protein, 479 aa, Sulfurihydrogenibium sp.
MSKDMIVGAYEYRCFANKGKILRVIEVLKEYRKLAKIISNLQWEAFFKTGKFNKYLKLKSIHSNLSERWKQTCQWQVVSVLESFIGNIQNKFKEIVLNSNLNEETKQYLLAINKNKDWFNSDIKYDNEIKKLARKIFKHILSRWNLPSFKHINLHLDSKVAVVEENEKSRAFDRWIKLSTLEKGKPIFLPLQNNTYAEQLEGELLNFCQISVEKDTLIVKLIKKLKDKKKEYIPKTEKIALDVGLNPLFAVNTGDLFGRNFIDYLKKLDEKITKRISSLQKKGIKPSQDMKYVKLVKRLSNFLQNEINRYINRIVELYKPREIVIEKLDFRSPDLSKRMNRLLSNFGKRFINEKLNRLKEIYGIQIVEINPAYTSQTCSSCGYVDIKNRKNTQEFECKACGKKINAQVNGARNILARRSCKDVKIYYSKKQILQILIKRYLERLKGCNSAPLDIVRSNPYFKDYLDDFLNPAVVENKRL

SEQ ID NO: 31559 - protein, 534 aa, Sulfurihydrogenibium sp.
MSNTYTLSFELTLPQWVYPYLDRLFNVFKWQVRKTINSIWNEEYFQKLKEKTSAMSVLKKDIPKPPHIPSRVHRNILELSGQIVRSNIQRKQIYDFIIEKPCRVIWSEYKIAEELQTSPLFVENIQRQVIRVLKKYKQKKDYLEVINPIFNGNVVITFADDSIEKGQFRRLKLTSNFLEFEIKIPSGNSWQWVKLKKLIPDRLKKSLLKAKRVASPLIKKVNLKSGYSIYRLVISLEFETKDLKENNLRTFSVDLSPSENRLGVGVIAYPEGYSKPVFFSAEKIIKKLERILKEISKLESKIDNISNQIHITTSKSHREKLKDRLRHLYTEQNLRWRKFKALRKQVLEVFTNLVIQHAKAYNCSFIAVERLKFSDFPQWKDSKMRRHFSQWFYSRFNERLKQKAIIFGIKVLSVNPYKTSRICHKCGKEKKPEMLQFSCECGVYDRDYNAAVNIGKRALQILVRGTKSKPYMGKDTPGRVPFPLVPAHQVLPYKFKAFLSLISLTKLISYLRIVETSYLRLKNLNRWTGSDKYG

SEQ ID NO: 31560 - protein, 521 aa, unknown
  TnpB Polypeptide
MLGFQDMTKFEAFNFFNPTFNTRLSGHYLKKVIEDVWRAYQLRFDAIRKKMEFAMVEKLVPSFYKINAHGHHKGDLKSIEVHTKKTKLTKVLTWLARYGKDETVYWLESVIPTAQEPKQKFYRAILEKIRKFGFGRLMRLAISRRTTVFTEYEKRGKITFETLTFSGRSRIKRPIADARRNESGKFDYFIEVSWDWFDKGYRGDSKNTLCIPFKYNRAYHRSLNRYCNGTDTSYTMVVRGKDIHVVLARDGYRYKNTDEITEENTVGIDVNSKHNMFALSTGEFIPNDDALIADLETELLKIDHKQKNYNARFEKDKNHDAFNISRKDKARIEAITTKLNESNKRTIVSLCKSFSAKGIKHIAMENLDGYQGSRLHADDSKGLNLGRLHLRTGLSSLKNEFIHIAPHYGLLVSLVQPEYTSKMCGECGCIDDRNRQTQEEFCCVECHHSENADIHSAKNIKFRLTSTVLRGNLLEMAGDSGYRYFQSKSLFMWQVRKCLEKCRCDGLFKRAIGNHERLAIK

SEQ ID NO: 31561 - protein, 579 aa, unknown
  TnpB Polypeptide
MSKHCWTLKDRFESQFPAAFYPILLSDTKRAELIHRAEEIRAVRNDISEIFFSDMLGFQDMTKFDAFNFFNPTFTTRLSSHYLKKAIEDVWKAYQLRYDAIRKKIEFEQVTELIPAFYKRRTKEHQVGDLKSIERHAKKTELTKVLTWLARYGKDDTVYWLESKISTVEESKQTFYRAILRCIRKFGFDRLMRLALSRRTAVFGEYVSRGKITFESLTFSGRSRIKRPIVDARRNESGKFDYFIEISWDWFDDGYRGNSTNTMCIPFKYNRAYHRALNRYCNGTDTSYTVVIRGNDIHFVLARDGYRYKHNEEITEENTIGIDVNSKHNMFALSNGEFIPHDEALIADLESELLKVDAKQKAYNARFKKDEEHDAFKISKKDKARIEAITTKLNESNKRTIANLCKQLAELGIKHIAMENLDGFQGSKLHSEDSKGFNLGRLHLRTGLSSLKDEFIHIAPKYGLLVSLVQAEYTSKMCGHCGCIDDRNRQTQEEFCCVECGHSENADTHSSKNIKFRLTSTVLRGNLLVRAGDSEYRYFIPKGLLPRWKVKKCLEKCRCDGLFKQTTENHSNLMMSKFE

SEQ ID NO: 31562 - protein, 622 aa, unknown
  TnpB Polypeptide
MLEVHRTHQATICNHSQVADSLDRHGWSASKLWNVANYHARQVWDETGEIPDHKDLKRELKDHTKYNGLHSQSSQRVLEELAESFYSWFQSDDDRDNPPGYRKRNYYDQQGRRVHEEHPRSTVTWKQNGFKHDAKHTKIRLSKGANHKEHPRAREYMLVEYETRPDVPVENVQQVRAVYDTSNGRWELHIVCKDEIEPPEAPGEETAGIDLGICNFAAVAYSTDDATLYPGNRLKQDGYYVPKEIAKCDDAGSERATRLHAKWSDRRTHFFHSLAKHIVEQCVEKAVGSINIGDLDGVREDEDGEAKNWGRHGNLDLHGWAFDRFTSILEYKAKVEGIEVSEVDEQGTSKTCCVCGREDDNQRVERGLYVCDEHGDAFNADVNGAENIRLDINDESNSESAPTLGGDRSTGWLAQPGVYLHDLSRGFLSAMLAGRLGDRQLQQESERRHSQRGTMSESDGPTDADDSDGKTDADDGKDAAEPADSAPTDADDGSPEMRATRRANAVTEEDLEEIRRELDSFEDEIEDRTVHREELESDLRKYVRSRVRRGHAHGWGPYLVLLYGTAMTLGAFYFLSGGWAVLAMLVIWLSTLGLYTLMVLVGITVTAVGVPGRLLDKLRNIR

SEQ ID NO: 31563 - protein, 367 aa, Selenomonas sp.
VRTYRFKLYNSKRNRKLHRQINVAGLVYNHCIALHKRYYRLFGKSLNMYQLQKHLTKLKKISRFAYIKEIGSQAVQDITQRIDRAYKLFFRNLKHKIRTAPPAFKKIRKYKSFTLKQAGWKLNEADSSIVIGKQRYRYAKSREIDGRVKVLTVKRDALGDIYLYFVCETSENKVLTRTGKSVGFDFGLKMFLNASDGKDIASPLFFKQNANSIKRASRNLSRKAKGSNNRKKAKLAIARLHRKIANQRDNFHWQAANKLVGEYALICLEDLNLKAMQKRFGRKISDLGFADFVNKLKYMAQRTGTSVVEIDRFFPSSQLCSECGYQNTETKNLKIREWICPKCGSMHDRDRNASINIEREGNRKFFA

SEQ ID NO: 31564 - protein, 367 aa, unknown
  TnpB Polypeptide
MKKYKGIKYRIYPNKEQQSLILKTFGCSRFVYNYMLEKSIKDYKSGDSFCTRSSFSYSLTSLKKEFLWLKEVDSLALTSANDNLAAAFSNFFKKNANFPKFHKKKLLGSYKTRCVHGNIVLLDKGIKLPKLGKVRASLHRMPKKGWKLKSATVSQSSDGKFYASVLFEYESDINYQVNFNNSIGLDYASNGLFVDSNGRRGTNHKFYREAQKKLAKEQRRLSRKTKGSKNYHKQLLVTNRLHRYIANQRNDNLHKISTEIANQYDVVCVENLNMAAIGNKGFKNGKATYDNGYGMFLNMLEYKLSDRGKYFVKVDRFYPSSQICSCCGNRKKLELSERKYICKCGLEIDRDLNAAINIKNEGLRLLA

SEQ ID NO: 31565 - protein, 363 aa, unknown
  TnpB Polypeptide
MNKGVKFRIYPNKEQRDLINQTLGCCRLVYNMGLDIHNKAFENGEKINYSKTCAMLTEIKRSDEFSFLRNTDSVALQQSLRDLDQGFVNFFQKRARRPRFKSKHNNHQSYRTINRSNNIRIVGKCIRLPKLGYIKIRQSMEVEHVKSVTIKKTPTGKYFVILNVEFEPEAKQNNGGSIGIDVGIKEFYSDSNGDIVSNPKFLEKSLKKLRREQRRLSHKKKDSNNRNKQRIRVAKVHEKITNQRNDFLQKISTMLISENQVICIEDLKIKNMVRNRRLARCISSVSWGKFFNMLEYKANWYGNKIIKVPTMYPSSQTCSCCGYKNPLVKNLAIRKWECPNCHTKHDRDTNASINILNKGLSIA

SEQ ID NO: 31566 - protein, 423 aa, unknown
  TnpB Polypeptide
MELELPMSTAAQSTRTQHLDTLIKGHRIALDPTNRQDSLFRQHCGYARVAANWALDTFRDAWFTSAGEPNEWLTDMELRKRFNAVKKELYPWSADLCQRVGKNAIIHTGKGLKTWGESCRQRKAGWATRRVGFPQHHKKGRHMAFTFTNGRHTARLDGKQVYIPAVGWVRMREELRFEGDILSATVKLIADRWFISFQVDTGGSRPALRPGPTVGIDMGIQTLATLSDETEIENPRALEAALRDLRATDKAIARSIHTHGKHNHSNRREALYAKRRQQYARVSRIRSDHHHHATTAIAKHGGTVKVETLNIDGMRRNRRLGRSLGDAGMGTFVRQLEYKCAWYGTEFVKVGWFPSSKTCSACGAVKQSLLLSERTYRCVACGFECDRDLNAARNIQAFTPAARSAVADAETRKTDRATGTHGQ

SEQ ID NO: 31567 - protein, 432 aa, unknown
  TnpB Polypeptide
MKVSRVEQHRIKKSKKNNKDDKLFKIIDDLCWKSKNLYNYGNYIIRQEFIESSKQKEQGLIEDARWIQYNELFQLCKESDCYKCIGSNVGQATLRKLDKNWKSFFTAIKDYSKNPSKYLGRPKLPKYLPKEDGRFELGLDNIKFKIVDGYIYFSWTPLKIMNNIFRTKIPNDSKLIQLRFVPKGNEYIMEVVYQIEVPETKDIESQSIAAIDLGVDNLMTITTNCGVKPIIINGKPLKSINQYYNKKISEMRSALKLRNDSDWSNEMQRFTTKRNNQVDDYIQKSTKMVVNFCKANNIDTLVCGYNSGWKQETDMGKKVNQKFVSIPYLSIVQRLEYKCENEGIKFIKTNESYTSGTSFLDGEEPIEKNYNKDRRIYRGLFQSEKGEYINADVNGSYQIMKKVFPKAFTNGIVDAGSHPVVVNIPLQTANVM

SEQ ID NO: 31568 - protein, 451 aa, unknown
  TnpB Polypeptide
MQQIITAKLKLLTTAEQLVALRTTQLAYRDALNAVSSYAFEQGKTSNLTRLHKGMYVELRTRYHLPSQLACSVERQVAATYKGLWTKVKKNAEHRRAKITKKRFKGLDKPPKYSSPTVQYTYKRDYTFQRESQISVGTVNGRISIPYQGYDKHLALIRRGASIGDAKLWYEKARKTFYLLVALEIEVPEPTEEQLNEVVGVDAGIRYLAVTSTSTGKASFHPGKRTRHTANHYARLRKRLQQKGTRGAKRRLRRIEQRERRLKAQANHTIAKQIIKQHPHVLIGLENLTDIRERTKRKKRKRKKNGKGTEPVSPKARTANRVYSQWSFAELQSLISYKATLAGSLAVKVDADYTSKACPLCGHTEDANRPRKGLLFVCQHCHYTLHADLVGARNVTMRTLLLRQDWGKTGCLSLIPDASDKEAKAARLSRYAELRWSPEVNPSLRDLPGGS

SEQ ID NO: 31569 - protein, 432 aa, Lachnospiraceae sp.
MKVTSSCGVEIRKQNICFRKTMDIYRRAVMYLTEQLDTVWEELSGIENVRRRFNAAEHMVHTTKNNRARFDFDRQFPKMPSYLRRSAIQAALGTVTSCRSRRKPGKPYLPKETHAMPVFYREAMYREGEKGSDLAYLKLYDGHDWIWREVRLLHTDMEYLRKNWSHEKASAPRLEKKHRKYYLRFSFEEQVELTQTPAGKQKICAVDLGINTDAVCSIMTGDGTVLARRFISFPGDKDQISHVLGRIRRKQREHGSSCRGLWKYAVRLNEEVAKKTAGEIVRFAKENQADVIVFEHLEMKGKIRGSRKQRIHLWRKRDVQKRCEHLAHRNGMRISRVCAWNTSALAFDGSGKVERDPGNRRLCVFPNGKRYNCDLSASYNIGARYFIRELLKPLPETARSLLEAKVPAAMRRTSCVYADLLAMKDTISRMTA

SEQ ID NO: 31570 - protein, 452 aa, unknown
  TnpB Polypeptide
VKNSFQKGDYTMKLVSSYAVEIKHINKMFRDTIKIYNDAISFCIKAFEEHWEVLETLDTGNKERFAYADALIHSTRSNQALYTEFDIKFHKMPSYLRFAVINTALGYLSSYHSNLDNWECSNTDTKPPTLQTRLNKLPAFYKGNMYLDDCDGDAVRLKLFANNDWNWVTIQLKHTDVVSIQKHMQNAKMSVPTLEKKNKKWFLRFAFEEQVQLNKTPLDEQKILAVDLGINTDATCSVMNMDGAILAREFINFASDKDQLYHTLNKIKKVQQKYGFNNTQKLWRYAKFHNEELAKRIANSIVNLAVKLKCSVIVFEYLDTNGKKHGSKKQILQMWKKNTIQKIVEHKAHINSIRVSRICAWNTSKLAFDGSGVVLRGREANLGTYELCKFSNGKIYNCDLSASYNIGARYFIREIQKILPVKVWSDIVAKVPECQKRTQCTYNTLLAINDAV

SEQ ID NO: 31571 - protein, 316 aa, Mycobacterium sp.
MRVEPDRRHLMLPVIGTVRTHENTRRIERLIAKGRARVLAISVRRNGTRLDARVRVLVQHPSWPNVWLPDSRVGVDVGVRRLATVADADGVVIEQVANPQPLAAALRELRHVSRARSRCTNGSRRYRERTTEMSRLHRRVNDVRTHHLHVLTTRLAQTHGRIVVEGLDAAGMLRQKGLPGARARRRGLSDSALGTPRRHLSYKTGWYGSELVVADRWFPSSKTCHGCGHVHDIGWDEKWICDPTDGGCRVTHQRDDCAAINLARYEEPVSVVGPVGAAVKRAADPKTRPGRAGGDQARKATGHPAGEQPRDGVRVA

SEQ ID NO: 31572 - protein, 536 aa, Streptomyces sp.
MAAPFVAPGPAGVAIRAGLKGLTGQDEKVLRLVGDWLGSLVSRDWKARCAAGLDHDSDQWAQRKRALTGQSSSRWAGSITKATHDQWALARRGQLAFIQSLEAGVHTIARRLSLPVAAKGSRGLPGGYRSRQEWFAKSRRLHLLQDRLERERADRETGRVRVVRGGKKLLRNRHHLQAAQLTEAKWRVRWEAERWFLQADGESGKRYGNETIRVSLGGEVSIKLPEPLAGLANASHGRYVLACRVGFRHRGEQWADRITAHRPVAYRIHFDVDRDRWYLTASWQLPAVTTVPLEAVRSGGLIGVDMNADHLAAWRLDVHGNPVGEPRRFDYDLSGCASHRDAQVRHALIRLLHWAKRHRLAIAIEDLDFASEKTREKHGRRKRFRKLISGMPTAKLRARLVSMAAEFGILVVAVDPAYTSRWGAQHWQKPLTSKNRKTTRHHAAAVAIARRALGHPIRRRTAPPPHDQRDRAGHRTVQATSVAPGREETRPRIPGPWTRSAGAERGAKAGDQGAHNRSGHPAEHESWHQDSLPLSH

SEQ ID NO: 31573 - protein, 366 aa, Chloroflexi sp.
MKQTTLLKLAPTSEQAQALLDTLYAFNAACDYVASQAFEAKVANKFELQKMTYGELRTTYHLPAQLAIRAISKTSEAYKRDKSIQSTFRPEGAIVYDQRVMSFKGITHVSLLTLSGRVLVPFLMGVYQQARMDAIKGQADLLYRYGTFYLAVTLEVPTPEPDTPDSTLGVDLGIVNLATDSEGETFSGDAVEGNRQRNQALRQRLQKCGTKSAKRHLKKLSGREARFKRDTNHVISKRIVAKAKAHGQGIAIEELRHIRSRTEARLRHSQRSRHSSWAFGQLRFFLQYKAALAGIPLHTVDPRNTSKTCHVCGHCAKENRKSQASFVCQQCGYADNADRNAALNISRAAVMQPLASGRAQVQAAGL

SEQ ID NO: 31574 - protein, 477 aa, unknown
  TnpB Polypeptide
MQIGNKFRCYPTPAQEQTLLQWIGCQRNIYNAKVREDQYFRRFARTSLQHTGQYAPIDQQYSQFKTDLTPWLSEVPGVVLRNGAVRWKQAYSRYFSKLGGRPVMHTKHGKQSVWLTSELFKFVPVVDAGTGEITGHQLHIGIKKFAVGVLAFKAHKEYKLPASLHISIHAGRWHVSFNYDDDIPEPSDKDITAWLMQFEEAELRTMTVGLDRGVAIPVATSDGQSFDFSPVQKVRLEQNTLAKKRWQRRQARRTKGSKGWIKAKRRVARYSRYGADVRRDVAHKTSHALANNPQHKMFVFEALKVKNMTASAKGTVAEAGKNVRQKAGLNRSILASAWGQTKVFLQYKARRQGKLCLDVPPHYSSQECAVCGRIHKDNRRSQAEFVCQRCGHSDNADSNASKVIAQRGVTLLLSGQSGRKEKKKCGITKSKTIGAESSESAAVMPPTLGETTISRLGGNTLAPWSLNRETPSTSQRL

SEQ ID NO: 31575 - protein, 370 aa, unknown
  TnpB Polypeptide
MEYSYKFRIYPNTAQIQQIQRTFGCCRFVWNHYLALRKAIYERDGKTMNYNACSGDMTQLKKALSWLKEVDATALQSTLRDLDIAYQNFFQRVKQGGKPGYPRHKSKRNHRQSYKSKCVGTNIKVLDRSVQLPKLGLVKCRISKEVKGRILSATVSQNPSGKYFISLCCTDVEINPLPSTGAVIGLDMGLKAFAITSDGVEYPNHKHLTKNQKKLAKLQRQLSRKSKDSKRREKARIQVAQLHERVSNQRNDTLHKLSTELVQNYDLIAIEDLAPSNMVKNHSLARSISDASWGKFRRQLEYKATWYNKRVIAVDRFFPSSQICSACGAQWPGTKDLSVREWTCPACGAVHDRDVNAAKNILDEGLRLLA

SEQ ID NO: 31576 - protein, 404 aa, unknown
  TnpB Polypeptide
MKRTFKYRVYPTLDQQRWLYAEFKHQKRLYNYMLQMRSQMWEYGSKSVSMYDQIHHLSKLRENNTYYSDHPQDMQVETIKRLDQGYAHFFRRCKNPKEKKKGAPRFKRSVRSVSWLLRKHKLKTGERVRQSPIRETGRRLNRLKVPKLGEVKIRMHRPFIGDPKEVTLKKTARGWYCFIVCEVSDTLKCVPKSACGVDVGTYDFLTTSDGEKEGNPRFYRQVERKLGKLQRDLSRKTYRSRRWYKAKDALAKQADIVACQRLDFIAKTVYNLFHHKGVDAIVAEKLRSSNMVKNRYLAKSISDAAWSLFFEWCGWVAKRDGKHFHQVPPHHTSQTCSECCQQSPVKLKLSDRVFHCRYCGFELDRDHNAALNILYRAACALRGEVWDTILTETRNPLLQQACWG

SEQ ID NO: 31577 - protein, 374 aa, unknown
  TnpB Polypeptide
MKRYKAYKFKLLPNQKQAEYFDRAFGAVRFVFNKMLEERIEMEELYFDDPEIYRQHEFKTYTQIKHENPWLYEIDNQALANAKLNLTNAYVRFRDQPNNGYPKFKSKKRCMSYTTNNNTFGKIRIDGKYIQLPKIKWVKLIQHRELPADGRIFKCTVSKSATNKYYVSILIERDVEEIQYKVDKEKSIGLDMGLKTFYTDSQGVKVNSPIDYSYIDQKLSRVNRQISKCEVGSKNRDKLQLKANKLHEKLTNQRKDFLHKKARQIADEYDVACIEGLSVKEMGQHYGYGKMVQNNSWGVFVEILGHKLEERGKKLIKADKYYPSSQTCHKCGRINKDLKLKDRIWICPCGETLDRDINAAINIRNEGLRLLATS

SEQ ID NO: 31578 - protein, 450 aa, unknown
  TnpB Polypeptide
MLLAHRIRIDATPDQRAYFARAAGTARRVWNWALAEWQRQVDAGGKPNAMALKKQFNRIKYADPAWLDENGLPWIRTIHRDAHSQPFAHLARAWTRYFEARRTGQAAHLPRFKKKGRCTDSFYIANDKFRIEGKQAVLPKIGRVGLAEKLRWTGRIMGAAVSCNAGHWFLAVQVEVPDEVAYRRRTSNGVVGVDLGITSVATLSTGEKIAAPRPLRAALRRLRILGRRLSRKLEAAKASAGIADAIPTKARWPVSKNRTKGSLALARLHARIAQVRQDFTHKLTTRLCRENQAVAIEDLNVRGMLANARLSRAIADVGFYEIRRQLLYKAARYGTLLVLADRWYPSSKLCAGCGARNGALALGERTWDCGPCGTHHDRDVNAALNLQRLATSALVARSALPVASQAATPGTAAGDVPAGDGEVTPVRHELGQQDGSGQEENAARFRARFC

SEQ ID NO: 31579 - protein, 408 aa, unknown
  TnpB Polypeptide
MIIRKAFKFRLNTSPDIEIKMSQYAGNCRFLWNKALAVNLFKLENKQKLCYYQEFDFFSKLWKKSEEYGFLTLSPAQTLQQTLKQLERAFKDAFDKNQPLKRMPTFKKRHSSSSFSFPQGFKIDNKGKRVFLPKIGWVNIRKSQEIVGKAKNITVSKKGKHWFVSIQVEQTVKTPTHQSKSIVGGDLGVKCLITLSDNTVIKAINTDKQAQKIKVLQRKLAKKIKFSNNWQKLKEKITHQHSKTANIRHDQLHKISTSLSKNHAIIVLEDLKVKNMTKSSKGTVEQQGKMVKQKSGLNRVILNQGWGMFREMLKYKQAWCGGEVIFVDPKYTSQTCPICAHKSKENRLTQADFECVSCGYQDNADYVGALNILARGHRVLACGEHGISQLNEAGTCFVGDHKAPLVLN

SEQ ID NO: 31580 - protein, 388 aa, unknown
  TnpB Polypeptide
MAAGDEGMLTLSIGVRVSPEPVVIELLQRYRDALNYAINKILDNNLKTLKQIHGFLYRDLVERFNLPSRIALDCYRDALTNANAWRNNPKRGKRPIVKKLSMLLHPGSGYRIKDGYVEIISGIRLKIIGWDRRYDDYKNREARLIYRRDMMILWISKRIPKPKKYVPIDVIGVDINEKKIVYGDEIINIEKDTAINRAYRYIRLAEDLQRRYSSSRYLAWRRRKRILNRIRSYHEKARNILNDWTRKISLEIIRLAKELRYGVSREDLTNLIKSLRKLPKDHKTKLIIMGYSKIERWIDWQAEKNGVPYVKIDPNGTSSECPKCDYKELEEVGYRRLRCPRCGFEADRDVIGKLNVRKKGLRKLGIKFSGGALTPLTAPQMTDVAPNR

SEQ ID NO: 31581 - protein, 358 aa, unknown
  TnpB Polypeptide
MADFTKTLKVRVRDKHAKELRRQAAEVNQVWNYLNELSHRSIRERSQFLSAYDLQKYTNGSGKLMGLHSQTVQCVSEEYVVRRKQFRKTKLAWRKTHGVRRSLGWVPIKTGAAKWKNGQVAFNGQHFKVWDSYGLAQYQFRSGCFTEDARGRWYFCVAIRVKPEKRCGTGSVGVDLGLKTTATPSKGKPLEAGNFYRGMEHKLAIAQRARNKKRVQAIHAKIRNRRHDALHKFSRKLVDQNGLIVVGNVSSGGLAKTNMAKSVLDAGWSTLKTLLSFKCEHAGGVFIEVNEAYTTQACSCCWAIGSNSPKGRAGLGIREWTCECGVAHDRDINAAKNILALGHQGLAGGILACGRKAA

SEQ ID NO: 31582 - protein, 402 aa, Escherichia sp.
VKRLQAFKFQLRPAGQQEREMRRFAGACRFVFNRALARQNEDHEAGNKYIPYGKMASWLVEWKNATETQWLKDSPSQPLQQSLKDLERAYKNFFRKRAAFPRFKKRGQNDAFRYPQGVKLDQENSRIFLPKLGWMRYRNSRQVTGVVKNVTVSQSCGKWYISIQTESEVSTPVHPSASMVGLDAGVAKLATLSDGTVFEPVNSFQKNQKKLARLQRQLSRKVKFSNNWQKQKRKIQRLHSCIANIRRDYLHKVTTTVSKNHAMIVIEDLKVSNMSKSAAGTVSQPGRNVRAKSGLNRSILDQGWYEMRRQLEYKQLWRGGQVLAVPPAYTSQRCVCCGHTAKENRLSQSKFRCQVCGYTANADVNGARNILAAGHAVLACGEMVQSGRSLKQEPTEMIQATA

SEQ ID NO: 31583 - protein, 391 aa, Clostridium sp.
MIKTFKVKLLPNNKQQTRLFQFCGTKRFAYNWALKKQQENYKNGGNFISDSELRKQFTILKQEEEYKWLNTISNNVTKQAIKDCCIAYKNFFHHRADFPKFKSKKKDTPSFYVDTDKIKFTDTHVKLEKISLSTKKNKAKMNFIKLAEKDKIPTDCKYINPHVVYDGVNWYICIGIETEKELKPISLNEGVGIDLGIKYLAICSDGNKYKNVNNTSRVKKLEKKKRRLQRSISIKYERNKEGESYKKTSNIIKSERELRKICNRLSNIRNDYLHKTTTEMIKREPSYIVLEDLNVSGMMKNKHLSKAVQEQKFYEFRKQIEYKASWSNIEVIFADRFYPSSKRCYCCGNIKKNLKLSDRVYVCDKCGIKIDRDFNASLNLKNYYCNLQNNT

SEQ ID NO: 31584 - protein, 472 aa, unknown
  TnpB Polypeptide
MIVIIVSSAFSERRYAMKISSSYGARLNGNSWRIFTPTVKIFRNAVKFLIIPCLEHYDDCIKGFNPNEAQLNIDHLIHSGGRRVKHAASYPSFDRKFYKMPNAMRRAAIDKAIAIVKSYKELYALWEEKGSNGKPPRLNYNQLAMPCLFNRDEFKNLGSNRCSIKLYVNNDWVWVNFSLNTSDMKYIKAHAKNLRLSAPVLEKRYHHYYVRFTYEETVNIPVCSVTEEPDTEPADIICAVDLGINTDAACSIMRPDGTVIGRKFINAPVEKDRMYRILGQIKRSQSRDGNYSHRKLWRFVNYYNEQISIHTASEIVAFAASFNAKVIVLEHLDINVKKKGSKKQRLHLWRKKDVLNRVTELAHKKKMRIRTVCAWNTSKLAYDGSGEVKRGSDAGFNTYSICRFSNGKIYNCDLSASYNIGARYFIKEFFKSFSETERQLYTAKVPDIAKRTLCTLSTLISLYAELSVPGAA

SEQ ID NO: 31585 - protein, 504 aa, unknown
  TnpB Polypeptide
MHTLQLSLKTTSYDNHQIVRRFHAVSHIHNVTVKHAIKLMNQLKRDKAYCSYLSEYASIKKKEKLSSADKKRLKALSKLMSDIRLSIGLSEYGLQSYIKVCARQYTKLLSSQQVQKEATRVWRGVEKVLFSNGKKIHFKKYRDFDTIGGKTNTNGAKFDKASMTVDWLGLCLKCKPISKNDAYKTEALSHDISYCEIKRMMFNNGWHYYVVLYLKGDAPKKLIKIGSNEMGIDLGVSTIAGVSDDKAVLKELAPKSKDYDKQIRKLQQKMDTSKRISNPNKYNQDGTINKSNRDRWVYSNTYRKNRRQLKCVYRKKSAYTKQSHEELANELLEDSSTFFVEDMNYAALAKKSKKPAERQDKTTNVKQKDGTIRAVKKYKKKKRYGKSLNNRSPSLFLSILKRKCELYGGQMQTVNTRAFKASQYDHVKDEYIKVPLTQREKVIGGHTVQRDLYSAFLIKNADCTLEHADRDKCIHEFEHFVMIHDQLINCLKASNTTMKQCFGF

SEQ ID NO: 31586 - protein, 415 aa, Halorientalis sp.
MEVRRTVRVKLAVDSDDAVLLRETVDEFLRAANYVVDHAFEGESVTTSKTTLHEETYQDLRDLTRLHSQHVQAARNKAANALKGTVARWVQGEYAGKPQFSSPAVVYDKRCATFHDGFASLATVGGRIKAQYVLPDPERETPHREYLFSDEYEITGAELHSKRGEWHLHVRTKAEVESDTSKLASTEHPTVLGVDLGVNNLAVSSVGTFWTGGEFDHWRGEYEQRCSDLQQSGTRWAHENIQAVRQKETGRFTQMLHKIANEILREAIENGCTVIAFENLTRIRDRLSGASWGHKWAFERLQNCVEYKAKIKGVEVVEVDPSDTSKRCSTREFTHPENRDRESFNCQNCGYENHADYNVAKNIGLRYLRRSQNGNGEGAPVGVHLNSGTLNANGEYDPPAERSAKARVHAENPSS

SEQ ID NO: 31587 - protein, 422 aa, Halorientalis sp.
MTATTTKTLEATLAPPTAHKERRLQRTVATYRRALTDAFERGADTQSAVNDVVTGYDLASYAKDALKNYVPQLRETYNAEELDDHHPVRFTNRGWRLDHSEDRTHEFCWRVPQAGRANVFWIPIRINPTQRELWDDLLDGDVTVGEFRLQEHRTTWVLHVSVEYEVADPEEPDDPTPVGFDIGESKLLTGCALTDNDTPTQPYIYDGGRARHLRKEMHTTLKRLQERDAAEWRVDERFDYYQNALTDIVEKASRKAVKYARQFENPVIVLEDLSYIREHLDYGAWMNRRLHNWAFARLTGRIEDKALEAGIPVRTVNPAYTSQTCHACGHLGSRSSQAAFRCTNEDCWVTEYQADINAAANIAGRLDPWGESLPWKPASDDSPRDGSGCDTTSGHRGASREPRQTTLSAYSSETSSRSEPSL

SEQ ID NO: 31588 - protein, 531 aa, Rhodococcus sp.
MADTGFTALRQFSFTTRPYLAVDDETGAPIGLDDLDVRVGWLLDLISGAEAQLLSRLWQPATFDVLAAGCDRQGRKLPMQGHVAAARLGWTPHYPDGVYVPSRVTRVVTAQAVGTLRALAYRDTAIIALSARFDPATGRIAAPTTAAEYVPSGFARGVVRQLAAHARGAADARLRITDVQGPPQTSAMARLSAADRQLAQLAVTGHELVLTVKLPTCPAPAGRAQWRSVRLSATIPEHLHGRAVTDWHLPTLVLDRRGLLWRCAATEIVPAADLESASVAVGVDWSPTTLGAAAITAENPDGLSSDYRGWTYDDRGLGIKLARLQAEGQLLHGKAARLTRLSATAPPEVRAELEEKIAVLDAHRTAVGIKRGKINRELAFDFARQVTDYATDAQAQLIAVEDLTTLESRGHGRVNNNRAAQSARRKAVDALTHTAAGVGVTVVSVPARGSSAWCPGCNEPLSRRPRHRRVRRSLPTVTPRLGVTPNQHVPASQASVWDTVKPTPPHGDAGSRDTRPSPTPATQVADSMRST

SEQ ID NO: 31589 - protein, 471 aa, unknown
  TnpB Polypeptide
MKTTVNAVIINLSPGQEFLLDRLQTLFSSAIRFAYQRLLEGVVKKDIQKLIQEKYGLNSRYASDAIEQSRQLKLSQERLLNMHIENWQTKVKAVKKKIARTKQPEQISGLQSKLAKREKKLAYWMKYRDTGTLPKVIFGGKKNFIARCQGKISCEEWKSLRDNRLVSRGDVTKKGNPNTRLVVEDGKACLIINTDQYEAHGKVKRYVQIKVEIYLPYKPSKKTGLINGRNYRQMVLDYIHTNQAYQVEIIHKNSQYYCHITIEEPEPEVVINRYSGLEGIDTNPDGLALTRISKDGNFKESCWLGNGELCNASSKRRKHIIGQIVKQAVAKAKEHGVAIVIEDLKFKDNRDVRAKTARKIHQFSYASLLEGLEREAIREGVEIIKVNPAYSSIIGRYKYQKQFGLTVHQAAAMVIARRGYRYKEILPKAVRKILPKKTKDTNRHHWSKWYVANKTVLKLRKVGEKPAFSVV

SEQ ID NO: 31590 - protein, 399 aa, Nostoc sp.
LVEQVRTSYQYRLKPTKEQAKIIDNTLDMLRCQYNYQIGQRLEWIEQNRCSIDRCSLLVCHIPELKDKPNRFSQQASLTQLKKNRSWYKGIHSQVLQEVSKKVEIAFDRWLKGDTNGKRSGKPRFKAKGQYKTFTYPQFKRENFQNDKITLSKLGTIKVIIHRQIPNGFDIKTVSVTKKSDGYYVILSLEDKTVPTIKPNFDSRNIVGIDVGLIDFIVTSEDERIAAPKFLRKAERRLKSAQRRVSRRKKGSNRRKKAIKRLGMQHKRVADTRKDFHFKTANNLLKKSDVIAVEKLNIKGLAKSRLAKSVNDAGWGQFISILSVKAENAGLKVIAINPNGTSQECSSCGQKSKKLLSERTHNCPNCKISLCRDLNAAINIKNRGTHDLKAQIMSSMGSL

SEQ ID NO: 31591 - protein, 326 aa, Cyanobacteria sp.
MRTAYQYRLRPTPVQEAFMDNWLELLRRQYNYRLGERFNWWEQNRCDINACPLICYLPGLKPNPDFYSQKRDLVNSKLLFPEYGEIHSQVLQDCIERVKRTFDRWFKGDSKGKRSGKPRFKGQGRYRSFTFPQMKQDCIDDKFIKLPKIGGVKLILHRPIPNGFKIKTATITKKADGWYVTLSLEDPSVPEISPELPTLDNTIGIDMGLKSFLVTDEGEETPIPQHYRKAQKKLGRLQRSLSRKKKGSKRRKKQSSELLRHIKKLPISAKTFTTRQLKSCSTKERILGMKRSISRVLPNQEWQSLPMMPDGDNSCKFSQSKLQMLD

SEQ ID NO: 31592 - protein, 425 aa, Thermoactinospora sp.
VSRFRLRPTPAQEQALLAHCAHARFVWNLAVAQHARWRPGRAPAPGYHEQSRQLTEARAEFAWLRAGSQTVQQQALRDFAQAMAAFFAGTHGRPTWRKAGRHEGFRIVGPRGPRGWDVRRLSRRVGEVRISKVGWVRFRWSRPIPVTSKSYRVARDRAGRWHLAFAVVPPPIPGPGTGRVVGLDRGVVVSAALSTGELLFSPAPPARGKGRLRRLQRRLARARPGSRRREKVKAAVARVRAREADRRKDWVEKTSTDLARRFDVIAVEDLRIRNMTTSGRGTAQSPGKNVRQKAGLNHAILSSCWGALVQRLEDKAPDRVVRVNPRHTSQRCSACGIVDAKARESQACFRCRSCGYACNADVNAARNIRHAAGHAVSAREGPRVAGPVHREPQPALLSVWAGGLESPDLRGGRQAAKSRVSPPRV

SEQ ID NO: 31593 - protein, 441 aa, unknown
  TnpB Polypeptide
VKITSSYGVELRKQNIPIRQTLDIYRSAVGYLTEIYEQVWEELERIPEMKKRFNEAEHLIHTTKKNQARFSFDLHFPKMPSYLRRAAIQHALGTVSSYKTRLSLWEKSGQTGGWPKLVYENHAMPVFYRDVMYREDKEGKDAAYLKLYDGHDWKWFHVRLSHTDMEYLRKNWSGEKASAPTLEKRHRKYFLRFSYTEDVILTKIPVKEQIVCSVDLGINTDAVCTIMRSDGTVLGRKFIDFPSEKDRMYRVLGRIRKFQREHGSVQAKSRWAYAKSLNIELGRKIAGAVTKYAKENRADIIVFEYLETKGKISGKKKQKLHLWRKRDIQKRCEHQAHRNGMRISRICAWNTSRLAYDGTGTVARDPGNHSLCVFQTGKRYNCDLSASYNIGARYFIRELLKPLPVTERSLLEAKVPAVKRRTSCVYADLKKLSSEMNLRIA

SEQ ID NO: 31594 - protein, 353 aa, unknown
  TnpB Polypeptide
MNYRTYKYLLKPTSIQKKYIDEILALTMFLRKKYEEDLSANIDLPYLVKDKLTYYQNKYIKLQNIDKSALYNEIFYIDNRNTNRPRPSNSYTTSLSTTIKHSNIKNNKIYLPYIGEVKFINSRTIDISIKIRSYTIQKCLDKYYIYIDVTLPEQPKKALNLNNSIAFDYSSTHFLIDDKGNSYDIPKFYRSNKNALSDLQRKRSCLKTNSIGSEKLKNKIKKKHRKIANRRKDYLQKLSTEIANTYDYVFIESLEMKEIAHSYNLSTATLDNSYYAFTKMLEYKLSERNKKLIKVSKYFPSSKRCNVCGNINNELKLKDKVWVCPYCGSLLNRDVNAALNIREEGKRISIAVG

SEQ ID NO: 31595 - protein, 407 aa, unknown
  TnpB Polypeptide
MNLSMRVRATARVEAVAPERGEALIQFLKAYRDAVQYIVNNIWSLKKTPSTKQLHKMFYNELRKLGFRAHHVSEIYKRAKEVVEATKKNNGSKPILKKLTARIHPLDYKIDFNAKVLRVAVSNNEWVELKLKWYKYLDKYLDGFWSVGEIQVSYRDDKIFVYITFIKDAVLRGPKAVMGVDINFNNVTYTVIDLNGNLITMGVIPFKGLGKALHLKRLAEELQRRYPKSWRFLKWVRRVRARWLRRARNILNDSSHYIAKKVVNIAKECNALIVLEDLEKLKEKANGDKLSWEAQMWCYRRVQSFIEYKALLEGIKVIYVEPRRTSKTSPNGKPLRFINYRFVELGSVVTSRDVIASWNIALRELKQMRGSWVRWSPDSPADEGMKTRPNAGNPEARYSQLITAIRR

SEQ ID NO: 31596 - protein, 383 aa, Chloroflexi sp.
MRTFEYRLYPNKEQSHLLMQCLIASRTLYNEMLETVKGQYAAQGTFPTKYDLTAQFKGRGGEQVPATTVQMLADRLSKSLKRFLEARELGIADVGFPRFKKPNRWHSLQLRQYGTSRDVWLDADNKHLHVPAKIGKFLKIKLHRPLGGTPKTVHLVHRADGHWYALIVCETEPHIEHDPGECEHPDIGLDVGLKSFLTDSEGHTVENPRFYRTSQQTLRRKQRTLCRRKKGSHRRRKAAKSTAQTHLKIARQRRDFQYKTANQYTEQYQVIAVEQLHILNLVQNHSLAKSISDASWGAFLDILSEKAERAGHAVIRVNPRFTSQKCFKCDEIVQKSLSVRTHICPCCGYVADRDVNAAQNILKLARPGHGLQESTYTDGCRVS

SEQ ID NO: 31597 - protein, 397 aa, Nitrospirae sp.
MHKAYRYRIYPTTEQKLFLDRHYGCCRFVYNHFLALRKEKWKNEQASLSGFDCKKMLPELKRQHPWLAEVNSQSLQAAVLTLESAYRRFFKGLGQYPQPHKKHSRQAFSVTQNFILTNGTLRIPKLKTPIRVKQHRPLGGHPKNLTIIRESSGKYYASVVCECVPAHLPISDSTVGVDLGLRDLAVLSTGEKLEHPKWLRKAEKRLSKAQRRLSRKQKGSANRQKVRIQVARLHERIKNQRQDFLHKLSHRLIIENQEVSIERLRVRNMVKNRHLAKSISDSGWSELARQFHYKAEWYGRTVKVIDTFAPSSKTCSMCGYVHKGLKLSQRVWQCPSCLVVHDRDHNAAVNIDIIGQGMPEVTPAERRAAAVSVFSIKQVRSKKHQVGAKKQEALASQ

SEQ ID NO: 31598 - protein, 410 aa, Actinomadura sp.
MAQQVKRAFKYRFYPTSEQAAELSRTFGCVRLVYNKALDERTEAWYGEQRRISYAQSSAALTQWKKTPEFAFLAEVSCVPLQQALRHLQTAFVNFFAKRAAYPRFKSRKRSRASAEYTRSAFTWRDGHLKPAKMDAPLDIRWSRPLPGGAEPSTVTVSRDSAGRWFVSLLCQDSIICAPATSAAVGADAGITSLVTLSTGEKIINPWHERRDRARLASAQRNLARKAKGSANWDKARRKVARVHARIADRRRDFLHKLSTRLVRENQTVVIEDLAVGNLLKNRTLARAISDAAWAQLRSMLEYKCAWYGRELIVIDRWFPSSKLCGTCGTVRAKLPLNVREWTCDCGAEHDRDVNAACNILAAGLAASACGDGVRPQRNTSRTRRSSAKQETQRATAGAPCLLSGEEVNL

SEQ ID NO: 31599 - protein, 384 aa, unknown
  TnpB Polypeptide
MLLTYKFRICPSKQQEQKLLFTLDKCRFTYNKLLEILNKQEKINQSEIQAKIPKLKQEYSDLNEIYSKTLQYECYRLFSNLRALSRLKKNGKRIGKLRYKGKDWFKTFTYNQSGFVLGIKNKRYNKLHLSKIGILQIRTHRIINGSIKQVQIKKECSGKWFALLCVHKGEEKPKERTNKSIGIDLGTINFIYDSDGNHIDAPKFLSKSLKKLAGEQRKLSKKKKGSKNRIKQKINVARIHECIFNQRNDFLHKISRYYVNNYDFIAAEDLDIRNIIKESYSARNIMDASWSNFLQMLKYKAESAGISFVKVNPRDTTSKCYKCGTIVKKPLSERIHRCACGLEIDRDYNAALNILKSGQELALEPLELPIKEVMNQEAAAFRLQ

SEQ ID NO: 31600 - protein, 261 aa, Micromonospora sp.
VAGPDGEALLVSGRAIRAEHRMHLADTKARRRGVARRAPKPGEKGSRRWRQYRRRARLVEGRHRRRVCQAQHEAARTVVSWAVRQRVGVLHVGDPRGVLDLSAGRRHNLRLRQWQIGRLIQILVDKATLAGISVRLVDERGTSSTCPACRRRVPKPRGRTLSCPHCAFSGHRDLVAAASIATRVPGGGSTTPAAVVLPEVVTHRRAGRHLPGAGRSRRDPRRPPRAAQGSVGPRRPAPPPGGESLAPKARIHNAHRKPGER

SEQ ID NO: 31601 - protein, 472 aa, Micromonospora sp.
VKVTRIAYSVRLNPGKCAALAEQARRLGRVRSEVWQRYGSIAGVGSGLTDRQVRDRWLADGTHLQFGVLANAWKETVRDAMADIAANLEGAKVQVRRAVTQRTDDPAERKRMFTALKADQWAGDPFLARQMRKHWKRGRNHTLNQIVVRADKHHAITDARGRLWLAVPGLERRKMVRIPLSTTAVPTGTLRLILRGGRVEVHYQIDASQMRSSQRPCGQRTIGVDKGYTEALTDSDGQPHGVRLGMLLASESDRLKERNRRRAKLRSIANNAALRGDHAKAHRIKTNNLGTVKRDRQAARHRAKMRTEIFTAVHRVVDEAATVIAEDLTKRFAGRKTLGKNMNRRLAAWTKGVTAEALRNVSERRGSALVPVNAAYTSQTCHRCGAFGRRSGDRFHCTPCGVVWQADVNAAINILHRAGDPDIALHTPHHTVKQILQDRTDRHRTRLPVQDSSPAIAERRANHPNRSTTSNQ

SEQ ID NO: 31602 - protein, 407 aa, Micromonospora sp.
MKTTHTKRAFKYRFYPTEAQAAELSRTFGCVRKVYNLALAARAEAWSLRQERVSYNATSAMLTAWKKTEELAYLNDVSSVPLQQALRHLQTAFTNFFAKRARYPHFKSRKSARRSAEYTTSAFRFRDGELTLAKMAEPLHIVWSRPLPKDAKPSTVTVSQDAAGRWFVSLLCEDPTVRLLPTTDRAVGIDAGLDHLLTLSTGEKIANPRHERHERRDRARLARAQRELSRKAKDSANRDRARRKVAKVHARIADRRRDHLHKITTRLVRENQTIVIEDLTVQNLLKNHTLARAISDAAWREFRSLLEYKAQWYGRTVITVDRWFPSSKLCSTCGTVRDAMPLHVRTWTCACGATHDRDVNAARNILAAGLAVSACGADVRPQRETSRTRRSVTKQEGPRATVGIPVY

SEQ ID NO: 31603 - protein, 483 aa, Micromonospora sp.
VKKFQPQPGFVVQAYRFALDPNAAQEQALRSHCGAARAAYNWAVGWVSASWWQRRAEESYGLAGPELTEWRPWSLPALRKAFNQVKRTDPRFADWWEENSKEAYNTGLANAAAAFDNYAKSKRGQRKGGRVGMPRRKSKHKARLACRFTTGTIRVEPDRRHVTLPRLGTIRTHESTRKLERRIAGGSARILCATVRFERGRWFVSFQVEVERAERTPARPDVAVGVDLGVKCLAVLADGQGEIHHVPNPAHYDTALKALKRLSRRVSHRQGPDRRTGQTPSKRWLQANAERNRVHHQVANLRTDALHKITTAISAEYGTVVVEDLNVAGMLRNRRLARKIADAGFGEIRRQLTYKTGWNGGQVQVADRWFPSSKTCCGCGAVKAKLPLHARTFCCDECGLVMDRDANAACNLAALAAASTTGTGVAGDRGAKAPKPRGADQKTRVTLPSRMAGAGRAGGATLPRQRQAEARDRHQDTATLTLR

SEQ ID NO: 31604 - protein, 459 aa, Micromonospora sp.
VKTIQAYRFALDLTPAQERAVLAHAGAARVAHNWALARVKAVMDQRAAERTYGVPDDQLTPSLGWTLPALRKAWNSVKREVAPWWPECSKEAFNTGLDAIALALKNWSDSRAGKRAGRPVGFPRFKSRRRTTPSVRFTTGTIRVEPDRIHVTLPRLGRLKLHESARKLARRLDAGTARILSATVRRNGGRWHVAFCTEVERAECHPARPHATVGVDVGIKHLAVLSTGELVPNPRHLDTASRRMRRLARRLSRRVGPDRRTGQQPSNRWRHAQTQLARAHARVANLRRDGLHQLTTRLTAAYGTVVVEDLNVAGMLRNRRLARHIADAGLAELHRQLGYKTGWNGGRLLTADRWYPSSKTCSGCGTVKAKLALSEREYQCEACGLALDRDLNAARNLAALAAQIDTAGSGPAPGRGADRETRLGGQVAVKRQPGTATAGQTGTVPPQGGTTDHTLARAH

SEQ ID NO: 31605 - protein, 476 aa, Micromonospora sp.
LRVYRVVTVLGVAHRERLSVVQAYRFALDLTPRQERAVLAHAGAARVAHNWALARVKAVMDQRAAERTYGTPDEHLTPTIGWSLPALHRAWNAVKADVAPWWAECSKEAFNTGLDALARALTNWSDSRSGKRAGRRVGFPRFKSRRRSTPSVRFTTGAIRVEPDRRHVVLPRLGRLKLHESARKLARRLEAGTARILSATVRRGGGRWYVSFTCAVQRDAGVPARPDATVGVDLGVTHLAALSTGEVEPNPRHLDTAARRMRRLARRMSRGVGPDRRTGRRGSKRWKRARVRLGRAHARVAHLRRDGLHKLTTRLAAEYGTIVVEDLNVAGMLANRRLARRIADAGFAELRRQLAYKTGWSGGRLVVADRWYPSSKTCSGCGAVKTKLALSERTYTCTTCGLVLDRDVNAARNLAALAVTVAGSGPETRNGRGADRKTRPRGLVAVKRQPGTAKAANTGTVPPQGRTSNHELTYAS

SEQ ID NO: 31606 - protein, 353 aa, Micromonospora sp.
LVPVRWYHGTFTLDGRWVRIPTAKGTSPLWVRLARDVPYPVEQVRSVTLLCEGGRLFLDVTAEVPVAVYPPGEQPDPARVGGVDLGIIHPYAVAGPDGEGLLVSGRAIRAEHRMHLADTKARRRAVARRAPKRGEKGSRRWRQYRRRARLVEGRHRRRVRQAQHEAARSVVSWAVGQRVGVLHVGDPRGVLDLPVGRRHNLRLRQWQIGRLLQVLTDKATLAGITVRLVDERGTSSTCPACRMRVSKPRGRTLSCPHCAFSGHRDLVAAASIATRVPGGGSTTPAAVVLPEVVTHRRAGRHLPGAGRSRRDPRRPAWAARGSVGPRRPAPPPGGESLAQQARIHNTHRKPGER

SEQ ID NO: 31607 - protein, 472 aa, Micromonospora sp.
VKVTRIAYSARLNPGKYAALVEQARRLGRVRSEVWQRYGSIAGVGSGLADRQVRDRWLVDGTHIRFGVLANAWKETLRDAMADIAANLEAAKVDVRRAISRRTNDPAERKRMFTALKADQWASDPFLARQMRKHWKRGRNRTHHQIVVRADKYNTAVDRRGLLWLAVPGLEPRKMVRIPLSTTVAPTGTLRLILRSGRVEVHYQIDAAQMRSSQRPCGDRRLGVDKGYTEALTDSDSQPHGVGLGVMLSSESDRLKERNRRRAKLRSIANSAALRGDHAKAHRITVNNLGAVKRDRQAARHRARVRTEIFTAVHEVVDEAGTVIAEDLTKRFTGRKKLPKNINRRLATWTKGVTAEALKSVSERRGSALVLVNAAYTSQTCHHCGRFGRRSGDRFHCTSCGVAWQADVNAAINILHRAGDPDIALHTPHHVVKQILQDRNDRHRTRLPVQDSSPTTAGRRANYPNCSAMSNE

SEQ ID NO: 31608 - protein, 409 aa, Micromonospora sp.
MEQRAAERSYGLAEADLTPMVGWSLPALRKAWNVAKSDVAPWWAECSKEAFNTGLDALARGLKNWSDSRTGKRAGRRVGFPRFKSRRRSAPSVRFTTGAIRVEADRKHVVLPRLGRLKTHESTRKLARRLEAGTARILSATVRRDGGQWHVAFCVEVDRAERAPMCPEAVIGVDVGLKHLAVLSTGKLEPNPRHLEGAARRMRRLARRMSRRVGPDRRTRQRPSNRWERARRQVVRAHARVANLRRDGLHKLTTRLAREYGTLVVEDLNVAGMLRNRRLARHIADAGFAELRRQLAYKTGWNGGQLLVADRWYPSSKTCSGCGAVKAKLALSERTYTCTTCGMTLDRDLNAARNLAALAFEVDTAGSGPVTGRGADCKTRPCGLVAVKRQPGTASAGRTGTVPPQGRTA

SEQ ID NO: 31609 - protein, 464 aa, Micromonospora sp.
VHRTARVALRVTPGQRRRCFGLLRSAGDVWACVLEVNAWRRRRRRDAPLVGYQQLCCELAASGPGTFAELDSVGARSVLRRFSDAWFAAAKRRSAGDVSARFPRRRRGLVPVRWYHGTFTLDGRRVRIPTAKGSAPLWVRLAREVPYPVEQVRSVTLLYEGGRLFLDVTAEVPVAVYPPGEQPDPGRVGGVDLGIVHPYAVAGPDGDGLLVSGRAIRAEHRMHLADTKARRRAVARRAPKPGERGSRRWRQYRRRARLVEGRHGRRVRQAQHEAARSVVSWAVGQRVGVLHVGDPRGVLDLPAGRRHNLRLRQWQIGRLLQVLTDKATLAGISVRLVDERGTSSTCPACRRRVPKPRGRTLSCPHCGFSGHRDLVAAAIIATRIPGGGSTTPAAVVLPEVVTHRRAGRHLPGAGRSRRDPRRPAHDRAARGSVGPRRPAPPPSGGESLAPKARIHNSHRKPGER

SEQ ID NO: 31610 - protein, 755 aa, unknown
  TnpB Polypeptide
MSMYRRYNYRAYPTRGQREALSRLYGACRYAYNWTLDQRELMRRRHGRMQSYTQLSGMFTQWKTNPGMEWLLAVSSTPLQQSIRHADVAYRNFLRLYKAGRTHIVTNHRTGKRHRTGLPRYKSRRDGEQSAEFTKSARFKVGHADGCKWAFLTLPKIGQIKLRWTRELPSTPNTVNIMRHADGSYEASFTVQVDGEADAPEPLHEACGIDMGLDSLMSIVYTDGTREKIPHPYTLKRKTRRLRKLDKQLTREKKGSANHAKTRLLKAKTYGRIRNQRRDMAYKLAFRVAGENQAVALETLNVKGLARTRMAKSLLDANWTRIIDRIQQLGVQYGRTVTRIDRWYPSSQICSQCGHRDGRKPLDIREWECPNCGIRLDRDWNAALNILDAAGLAESLNARGGDVRRGSAPSWLGELIHRQIDAVNYPLLLDMWRRATDPKRSARQRHEAYGMFRTGLDLLDLDPVMYRMLDMNPASIGHWLPALVKANEGKTFFRIPKTTIAKAPLTLLQLSRVEYESLTAATLDVVDRWAQAAFRLKPDESYFLKTGTFSNKYDFRNAHVTEPHEVMQIGEYLLYLQSQAVEMAGPLSQPATYGVSTTNEMVVREYIPDTHDLPTIYMGLPLRCEYRCFIDCDTDELLGIHPYWDPKVMNHRFRDWPDSDNPHMRHDAVTYKLREPSLMREYEATKDLVATHVAGLLPGLDLAGQWSLDIMRDGDDYWLIDMAPAERSTFYERTVPKGKRRPMVENWMPELEGEH

SEQ ID NO: 31611 - protein, 367 aa, unknown
  TnpB Polypeptide
MMNDSIQIGMAEKVSSLKALSSNAYKQLADHDVMSYYKLCAISAAAGVLRNYRKRVRRGGKAAKGPYARRLRLTTCYGFKLQDGCLLLPYRPREPIRIPLTHHTQATIAGQMVRSVTLTPDKLSLAYAKQVSEVNPRGFLGIDRNLNNVTLATTDGLILRHNLSEATRVKFTYRELRSHVRRNDARIRQQVTTKYGRKQREKVGQILHRASKQIVQQAKERGFGIVMENLTGIRKLYRKGNGQGHFYRGRMNSWSYAELQSQIEYKARWEGLPVIYVRAHGTSAKCSICGSRMTRIPEENRKLGCPSCRVSVDRDVNAARNILARGVRFAPIALPTEAMVQEPPIRAAGNPESRWERVNLLSHAPRS

SEQ ID NO: 31612 - protein, 445 aa, unknown
  TnpB Polypeptide
MHKRKFTVFTQLHEENNADLIEYFDDRRECYAKSMRETFHLIKNADEFDKSSYNTHLQNKYGITKRTANSIISDAQGRLNALKELKVFEKKQLEQKIEHLKKKVLPKLIQKRNDYIAQLKTNPKSSPIRLRNIRRKIVAKKNKLNQLKQKLDNVIYQIESGRLKLCFGTKYLLKRDYKRFVAQRDSQMSFVGSKSEPARNQMLQLSYNPKNNQFNIKLRKDFDGYKNASKDDKYVYGRVYFRHHKSELVSILRQGYSPLSYKIIKKRNRFYLYCTFEIHVENNDFLTRSSYGTIGLDFNKGFVTLSETNEYGHLLQTQILPYRFKAGSKTTTDLQKLMNRVVEIALQTGKDICIEDLDFKKKKAKTESRQGRKYNEMLHSLAYRTFSNIVEGIAFRNKVYVRKVNPAWTSWLAKKLYCPRMKLNVHIGASFVIARRGQGFKETFR

SEQ ID NO: 31613 - protein, 385 aa, Oligoflexales sp.
MKIRKAFKFKLKPTSEQRQKMAQTAGCVRLVWNKSLGAIKEELDKKEGYKGYCSMAGELKAWKKDEETKFLKCVHSQPLQQTLKDLDRAVKDGFKKDKGFPRFKKKSHDRSFRYPQGVKLEGDCVYLPKIGWCKFQKSREIEGLIKNTTVSFYCGHWYVSFQTEFELEIPEHKGGEIGVDMGVVSFATYSDQETAKSPRPFKKYEKKLAKEQKSLARKKKGSNRWEKQKYKVQRIHKKIADIRKDFLHKTSTSLCKSHALIVLEDLKTSNMSKSAKGDLENPGRNVKAKSGLNKSILDQGWFEFKRQLEYKSIWSGGKLVLVPARNTSRECRKCHHIAKENRKSQAVFKCVKCGHTENADVNASCNILAAGRAVLAHGDINSVAS

SEQ ID NO: 31614 - protein, 442 aa, Glycomyces sp.
MTVDYIRYQYRIYPTPGQRQMLARTFGCCRTVWNDALRIFQDAYKAGEERPVFGAVTTAVTVSAKRTVERAWLGEVSCVPLQQSMRQLYSAFGSFFNSMSGKRKGPKVCPPRFKRRSGRQSAEFTRRGFVLRGNGRLYLAKIGEVKVAWSRELPSEPSSVTVIKEATGKYFVSFVVAVEGEPLPDLGEGSVVGIDLGLSVFAVTSGGKRIESPKFLRRAERKIKKYQRAVSRKEKGSNNRRKARLKLAKVHARVAAQRRDFIEQETTRLVRENQTIAVETLNVKGMAAKGMHLGKSVHDQALGMFLRVLAAKAARAGRTVIAVDRFYASTQICSECEAKTGPKGKEELHIREWECTACGAVHDRDVNAAINILREGLRLIAEVEQLAAGHQKARNTLPGAESLNACGGDTQDQRTTGSPRDPTSGGTEPGTRAEPDDRKTNR

SEQ ID NO: 31615 - protein, 452 aa, Glycomyces sp.
VSHPVFIIVSVTVNHIRYQYRIYPTPGQRIMLARTFGCCRTVWNDALRIFRAAYQAGEDRPAFGAVTTAVTVAAKRRPERSWLGEVSCVPLQQSMRQLYAAFGNFFDFLSGKRQGPRVNPPRFKRRSARQSAEFTRNGFRLRENGKLYLAKIGEVKVAWSRELPSGPSSVTVIKAADGKYFVSFVVAVDGAPLPCLGEDAVVGIDLGLSAFAVTSSGKRIESPKFLRRAERKIKKYQRAVSRKQQDSNNRRKASLKLAKVHARVAAQRRDFIEQETTRLVRENQVLAVETLNVKGMATKGMHLGKSVHDQALGMFLCVLAAKAARAGRTVIAVDRFYASTQICSACEATTGPKGKDELHIREWTCTACGAVHDRDVNAAINILREGLRLIAEVEQLAAGHRKARNTLPGAESENACGDRVSKTGSVSAVVETPSHGEEAGTRAEPDSRETYR

SEQ ID NO: 31616 - protein, 413 aa, unknown
  TnpB Polypeptide
MEYSHRYHAYPTQEVAEGLKHHLDVHRQLYNHVRWDYTNSPEDDKPSEYDQNNKLPEWKREWPVFSDLHSKAAQATVARFHRNLSNLHKKKEKGYKVGRLKRQAPAEYRSVTYSQSGFDLDEKRGHDKYAYVRFSKIGWVKIRYSRPIPDRASIKEVTFKKETTGEWFISFGLDTDDADLPEKPDIESLDATNSVGVDLGILNYIHTSDGKTVDWLDLEAEHERLRREQRKLSRKEQGSNNYEKQRVDVAKVKRHIRRKVLDYQHKITTWLVREYDAVFVEDLDVKKMLEQSHNARNKQDAAWRQFITLLEYKADLYGCHVVQVEARGTTKECASCGVETAKPVWVREHSCPSCGFETDRDANAAMNVLQRGFSELGLGWPEDTPVETVTATDRALFESVSASHVVETGSLPS

SEQ ID NO: 31617 - protein, 399 aa, Clostridium sp.
MRILLKAYKTEINPTKQQIQKINQSIGICRWLYNSYIAKNNELYRQYKDGLIDKKQAFMSANDFDKYINNEIKILEEYNWINNCGSKARKKAICNAETSYKRFFKGESKFPGFKKKNKSDVKLYFPKTNKTDWRVERNKINIPSLKWVHLKEKGYIPTDANIISGTVSKKADRYYVSVLIEVEEKYQKNTKEGIGIDLGLKDFAICSNETTYKNINKTKEVKRLEKKLLKEQRKLSRKYENLKERNKNNKKEGGNATRQNIQKQMVKVQKLHQRLSNIRENYLNQVVNELIKQKPSFIVIEDLNVRGMMKNRHLSKAISKQGFNMFRIKLLNKCNEYSVELRIVDRFYPSSKTCHDCGAIFTGLKLSDREWVCSECGIIHDRDKNASLNLRDCEIYKVA

SEQ ID NO: 31618 - protein, 405 aa, Geobacillus sp.
MKEVINILVTRVEQHQINSYHYLYHYCNDLCFKSKNLYNYANYIVRQEFINNNEWIRYNSLDKMLKHEQVYKELPAQTSQQILRLLDKNWKSFFKAIKDWIKNKEKYLGKPKLPKYKKKNGRNVVIFTNQQCKIKDGYIKFPKTDLKLKTKVIEGLQQVRIVPKGSIYVIEVVYKKEIPNMIRESNRVVGIDLGLNNFVTMVNNIGETPIVINGKGVKSINQYYNKQKAYFQSILKKQNGLDWSKRLEKLTLKRNNKIKDFMHKASRHVVDWCVKHNIDTIVIGKNDNWKQEVDLGKRLNQAFVQIPYDMFIHQLQYKAEEQGVRVIVTEESYTSKCSFLDMEEIKKQKQYKGKRIKRGLFQSEKGILINADVNGAYNIIRKVFPKAFADGIEGVGLHPVKLNVA

SEQ ID NO: 31619 - protein, 461 aa, unknown
  TnpB Polypeptide
VTITYQYKFYPDTNQKIELNQWLRICRYWYNRQLGDRFDWWEMNRTSVNCCPLITSIAPVREKPNYYSQKQQLPIIKKDLVQVFHSGELLDFARVDSTVLQDVSKRVDKAFERLIVGDSNGNKSGKPRFKSEASFRTITFATANPSWIKLARKNWFYLRLPKLGIIKVRMHRPIPDGFVIKQVSVTKKADGWFVQLILEDVTVPSISADVVVPSWDNSLGMDAVLHEDVYLATSDGEKITSLKPLRKNQAKLTQISTKRNKCKRGSKARRKLAKKEGRQHLHIARCRKDFHYKTAHRLVRTGKKVFFHEDLNLKGLTKRNQAKQSEDGTYLPNGQSAKSGLNKSWSDAAFGNFFKTLDYIASIAGAVVISKHPAYTSMVLSYRNEIVFTDGNIRDYWDEQNSLMVNRDINAAINLKRLGLGIFPSIKRRSGKLSVVGSMDDSTIKEILHTLHRAARSLHHT

SEQ ID NO: 31620 - protein, 402 aa, unknown
  TnpB Polypeptide
VLVNRVEQHQIKKTHSMFKIVDELCFKSKNLYNYANYIIRQEFIINHNYINYYDMKKELKTHEPFKDLGSQASQQVLEKLDKNWKSFFVAIKDWTKYPNKYLGRPRIPKYKKKDGRNIVILSNIQFKIENALVKFSWKPFRKFKIPTRVQGKLMQIRFVPKTSHYIMEIVYQIDVPEVTIESKNIVGIDIGIDNFATISNNIGVQPIIINGRDVKSINQYYNKKKAELQSDVKVRYNQDWSNRLQRLTDKRNNKIDYFLHNASRKIIDWCIFYKIDTIIIGKNDNWKQRSKMSKKVNQNFIQIPHAMFIEKLKYKAENKGIKVICTEESYTSGTSFLDGELPIKANYDKSRRIKRGLFESNDGELINADLNGAYQIIRKVFPNIFIDGIEGVHLHPIRLNVV

SEQ ID NO: 31621 - protein, 406 aa, Oscillatoriales sp.
MQVFNLTYEFKLKPTKTQVAIFEDWLEQCRKVYNYALQERKDWYNSRKCRIDACSLRSEFIIRADTPRPTYSTQCKALTAYRKTSPALQRINAQALQQVLRRLEKAFVSMWEQNHGFPRFKKRGTMRSFVFPQLSLNPIQNSSVKLPVIGWVRFWQSRAIPDGGIIKQARVVNRASGWYLMLTVQWDVKIPDVVPHGNSLGIDVGLTNFIATSNSLLVKRPRFFIDAERKLKLLQKRVSKKRSGSNNWRKAQKKVALLHEYVANCRKDWHRKISHQICNDVGMVFVEDLNLVGLSRGMLGKHCLDAGWGQFFTILEQTCWKRGVYFQKVNAKKTSQICPNCGVATGKKELAERTHTCSNCGYTTDRDVAAAQVVLIRGLAAVGHTVKMLAEGKFVGIPLKQESSRL

SEQ ID NO: 31622 - protein, 494 aa, unknown
  TnpB Polypeptide
LACGRDRNYARIPVLGVSGASSVGGGWWAGCVPRCRSPRSPKVVHRTARAGLRVTRGQRRRLVGLLASAGDVWACVLELNAWRRARQDGPLVSYQQLCRELAVSGPGTFGELDSHGARSVLRRYSDAWFAAAERRRSGDQRARFPRRRRALMPLRWYHGTFTLDGRRLRIPVARGRPPLWVRLDRDLPYPPEQIRSVTLLYDAGRLWADVTAEVPLTCHPPGQEPDLARVAGVDLGIIHPYAVAGPGGEGLLVSGRAIRAENRMHLADRKARARAVARRVPKPGQKGSRRWRHYRRRQRLVEARHRRRVRQAQHEAAKTVIAWAVNRRVGTLAVGDPRGVLNLNAGRRHNQRTRDWRIGHLIAVLKDKAEAAGIGMTLVDERGTSSTCPACASRVPKPKGRLLACPACGQTGHRDLLAAANIAARLDGGTTPIIPIGVTHRRAGAHLPGVAPLRRDPRRRAHDRGVRGSPGRHRPARASSIRLARESLATQRGA

SEQ ID NO: 31623 - protein, 331 aa, Bacillus sp.
MGLRGKGLTYGTCSAKLPAMKKEFVWLKEVDSIAIQSSVRNLADAYTRFFKKQNSAPRFKSKKNNVQSYTTKQTNENIAVVGKKIKLPKLGLVQFAKSREVKGRIVNATVRRNPSGRYFVSLLVETEVQELPITHSYIGIDVGLKDFAILSDGTSYKNPKFFRSLEEKLAKAQRVLSRRMKGSSRWNKQRVKVARIHEYMANARKDYLDKISTEIIKNHDVIGIEDLQVSNMLKNYKLAKAISEVSWSQFRTMLEYKARWYGKQVIVVSKTFASSQLYSCCGYQNKDVKNLSLRKWECPSCRTHHDRDINASINLKNEAIRLLTARTAGLA

SEQ ID NO: 31624 - protein, 290 aa, unknown
  TnpB Polypeptide
MEHSHRYHAYPTQEVADGLEHHLNVHRQLYNHVRWDYEQAPEDDKPTEYDQNNKLPEWKRKWPVFGELHSKAAQATVARFHRNLSNLRKTKEKGYNVGRLKRQAPAEYRSVTYNQSGFDLDEKRGHDRFAYVRFSKIGWVKIRYHRPIPDHATIKEVTFKKETTGEWFVSFGLETDDADLPEKPALDSLDASNSVGIDLGILNYIHTSDGKTVDWLNLEDDYERLRREQRKLSRKEKGSNNYEKQRLKVAKVKRRIRRKVLDYQHKITMWLVKEYDAVFVENLNVKGMLE

SEQ ID NO: 31625 - protein, 292 aa, unknown
  TnpB Polypeptide
MPVQKMNRAIKYRAYPTDEQASLIIRTCGCVRFVWNQMLSDARRFQEETDVFFIPTPAKYKTSYPFLKEVDSLALANTQLNLKGARKAFCKGNARAPQFKSRRKSKISYSSSNFYVDSNGDKANAPHCFRKMEDKLARAQQKLARMEKGSHHYEDQLHKIQLIHEKIANQRKNFCHTLSAVIAKQWAAVFVEDINLRGMAGSLKLGKSTNDNGFGMFREMLAYKLAAQGKVFAKIDRWYPSSKACHKCGYINNNLTLQDREWTCPCCGTHHDRDHNAAINIRDKGLADLLSA

SEQ ID NO: 31626 - protein, 368 aa, unknown
  TnpB Polypeptide
MRKTYQYRLYPTKRQLSILNRSLEVCRRVYNDTLAYRKHTYETDKKSVSLYATNSLLTQWKRENPTLKMVHSQVLQNVQVRVDLAYKAFFRRVKRGENPGYPRFKGYGRYDSITYPQSGFHLNAAGTHLCASKIGDIPIILHRPLDGEIKTLTIRKTATEKWYASFSVDVEPTVAVTIPHNDRVVGIDVGLTTFCTMSDGTTVENPRWFRNDEKKLAKSQRKLSRLEKGTPERRKQRKIVARIHEKISNKRKDFICKLANNLTNTYGTIVFEDLNIKNMMKNHCLAKSIGDAAWNLLISTTVNKAEEAGCTVVLVNPKQTSQMCSQCGQIVKKTLSDRIHSCPYCGLSMDRDLNASINIMRLGLQSLG

SEQ ID NO: 31627 - protein, 299 aa, unknown
  TnpB Polypeptide
MNKAFKYRIYPNKSQQILFAKTFGCVRVIWNANVESFNSYDKDANPKPKIITKSDLITDKPWLNEISAAAIQQKIRDFQETSKQFFSKTRKKRIGRPSFKKKSGIQSYRLPNQKFSLGDNKIRLEKIGWVKMRVDRAIPDESKILSCTISMNCCGQYFVSVLVETLILHKHKTGKMVGIDLGLKSFATLSGSIVIDNIKFFREKQSEIVKIQRHLSRKKKGSNRYRKNKLRIARLHNKIANKRNYFLHSVTTYLADNYDVICIEDLNAAINIKRVGVDILYNRTQRDEVTNPVEAFKIK

SEQ ID NO: 31628 - protein, 383 aa, Brevibacillus sp.
LLAYDGWSTGRRHQTVYRNARREKVAYAIHLSIRLYPTPKQEEKMNRTLDLCRMLYNTAKQQRELAYKQFGTSIFYSMQQKELPVLKREFPEYKEVHSQVLQDCLQRLDDAYQRFFRKEAGYPRYKSKDRYASFTYPQPGAVKKGYVYLPKIGFVRMKIHREFDGCHVTQLNVKRYADQWVVNITVKGEEIEMTSSIERMVGIDVGLNTFAALSDETTIENPRYLRKAEKRLKRYQRRLSRKQKGSRNRERAKRKVAKAYRKVTRQRKDFLHKQSFRMVRDYDLIAVEQLKIRNMIQSRRLAKSIADAGWRKFITYLSYKAGRQGKRLVEVPANGTSQTCLCGTEVIKTLAIRIHTCSVCGLMQNRDIVSAKIILQRALGMIA

SEQ ID NO: 31629 - protein, 648 aa, Streptomyces sp.
MVVRVAQAARRFRGKNKAPKWTKPDGGTVSVMVLPLAVTDPADLARLGRLFGAMWYIKRAVQRDARARVDAYWAAHHERNGPGAKAVRQRLGLSREALERCAYRHLEGSVHLKHHASKALAMHMADEVWNGVQRHLFANATGQRHGRPEVGRRHDFTRIPGRARSHTTADKWETFRLAGTLHGHAMAYTDGGRHEMQQPRWMPKPTAPSGTVPTDKTTASGKPSMRKANWWDHTGPLAVVFAGGPAGEAGDLVLPVRIPQGAGQWARVEHFLADPGRWHKVDLVRRRKPGAPGGWVYEAHLMVLGPGHTSPAVREMRQQATRLDRIGGVDGNVSDLSIVSFPTALDPGTGVPASTEITLTDAERALLEKRAKKRRGRARALERSRRAMNTGQYGLSKKQTRRADRRASKGLPARTVTVPGGARAARSDGVPKQAFRRDRLSADYREQRARQTEAAASAAEHRRFRARTVAREVIAAHGVNLTVEDCDIRTWHRLWGKRLSRTTPGMLISALDRECRAAGGRLVRASTWSTVLSQHCLCGRRVSKTLWDREHRCIACGLVGKRDLVSAAPAAFVRLADVDDPRTAYLDSNLSRHAQIVYAEALEEALGESTTPCRNIPRGAGRVAVPRQRRETSAPRTAGRWHPPSNPG

SEQ ID NO: 31630 - protein, 512 aa, unknown
  TnpB Polypeptide
MVHKDAESQHLLLFASIVELSHPSRTIHRAMRHTTFRFALDPTMTQQQALVRHAGASRYAYNQCLRLLADSLSARETDPSVDVPWSGFDLIEKFNQWKHSEAAGRTFAVAGDGTIMKRVTGLAWRHEVSAQVFEEAAVDLGRALAAFSDSRSGTRMGPTIGFPKRKRKGRCKDSFRQRNKTRQNGRCSIRIGEGHPRSVTLPTIGTIRVYDDTRCLRRLLRPVGQYDSRTGEEFVAPRAKILFATIARRADRWYVSLTVHAPDFHAQRRHQFHDSQSQAGFVGVDRGLDQFAVTANADGTEVSRWPAPRPLARQLKRVRGCSRSIARKQRGSSNRAKAVRRLSREHARITNLRSGFLHEVSGRLAKTHSRLAIEDLQVANLLANRRLSRAVGDAGWAEFARQLAYKAQWFNCDLVVCDRWFPSTKTCHACGTVRQRMSLGERTFHCGTCGLSCDRDRNAAANLAAWAEHAQAPRTAKRAAGSPRPLKGKALAIASTMVEPAPVKGEPTLGLA

SEQ ID NO: 31631 - protein, 413 aa, Solirubrobacterales sp.
MFVQRTYRYRLYPTRRQAGALAAQLRFACELYNAALEQRRWAYRRCGKSVGYHAQSAELTELRRQAPGLCPPEGMNCWSAQEVLRRLDRAFAAFFRRVKRGEKAGYPRFRSARRFDTLAWTMKGHAGGVAVTEEGRLRLQGVGCLKVKWHRSVPTEATLGEVRVTRRGSGPRARFYVSICAELPDPPSRPATGQAVGIDLGVRRLVSLSTGEQLEGPRAEREASSAVRRAARRVARRKRGSQRRRKAAALLARRREREANRRRDSAHKLSRTLVERFDLIAVESLRVANMMRSARGTVAEPATNVAQKRSLNRAIADQSWAQMLSFLAYKAEEAGRRVVKVDPANTSRTCSACGAVDARSRSAKRFRCIACGRADDADVNAANVILARALAQEGIERPGRGRQAQTAALAAVA

SEQ ID NO: 31632 - protein, 546 aa, unknown
  TnpB Polypeptide
MDSNWFDKCVKLQKYIPYPEEYKKKDIESKYTNILFDLKKNKSKHLFNLNNQNEINNTFFTTYKYKINFSKNQHNILKKYFKECHTIYNLCIDIWKDYKDMTDNWMILKDAIYDIVYRDNTHNMKQNKELIIKRLKENKEKYDLENEQNKEKINQLKEIEKEKYKKKMEEYKQIIKNNKKSTIINKISKPRMKKIKIEKVKNPPKERRNNIKKPAPDETLKGEIKTFCSNLKSARTNSYNNNNNPFELTYKNISKKQTIIVSNRNISSKGIISNALKELKCKNFKNIIKKYSINQECKLLYDKTLNGYYLYILVEKNKIEIKNRKEVVAIDEGEKIFASFYSVNEIGNLGKDMRIKILGIQNLIKQYQKKIKNIKYKKKKKSLKRKIARCFNKIKGYVNEMHKKSSKYLCENYENILLPVFETKPMISKNKIKIETEKIKKLSKEEGKEKIKKLNKQIRMSKKVKFVLSMQKHYKFKEYLKSLGERYKTVIYDVNEAYTSQVCTKCGILSKEYTKERIKKCSCGYKIDRDMNGSRNILLKCINELN

SEQ ID NO: 31633 - protein, 157 aa, Lyngbya sp.
MAPNHSLTTKLKLNNRQKTLMATHAGFGRWVYNWGLAMWTDAYNQGLKPNTKTLKRLFTNHVKPDYPWMKELSSKVYQYAFINLGEAYKRFFKGLSKYPKFKCKGKNDRFTIDNSGKPIRLGGLIHKLPFIKWVRTFEPLPDCLTKKVTIYKKAGDW

SEQ ID NO: 31634 - protein, 191 aa, Lyngbya sp.
VGVDFGVKTLAVLSSGIEFKGLKPYRNAGAKLARVQRKLAKKVKGSKNWEKFQRSVQKLHHRVANLRKDYLHKMTTYIAKNHSVVVIEDLNISGMMANHKLAASIGDLGLHEARRQLQYKCERYGTKLVIADRFFPSSQLCSNCGNKQAMPLSERVYNCKNCGTQIDRDWNASLNLERYSEHGSTRKPGSG

SEQ ID NO: 31635 - protein, 402 aa, unknown
  TnpB Polypeptide
MVILKGYKTELKLNNHQKTACKKHCGAARFAYNWGLAKKMAAYNLTGKSPSAIDLHRELNLLKQGELSWLYEVSKCAPQEALRDLDKAYAHFFRRVKQGDKEVGFPKFKSRRRGLGSFRLTGSIKVFERSIQLPRLGKLRLKEVGYIPTNGVKILSATVSEQAGRWFVSVQVEQHVSEPLPNSSEVIGVDLGIKAMATCSNGMVFDNPQPLRAKTKQLKRWQKRLSRRVKGSQNRKKAQRKVAIIHARIANMRANALHQATSKIIAQKPQAIVLEDLNIKGMVKNHKLARAISDVGMGEFGRQMAYKAAWQGITVIYADRWFPSSKTCSHCGNVKLELSLAERTYDCDFCGFTLDRDLNAAINLKNTVSSTGIYACGESVSPNLLRQFSAKQELNIIYDPVS

SEQ ID NO: 31636 - protein, 243 aa, unknown
  TnpB Polypeptide
LPDIGRVRAAEQIRFEGKVMGYTVSHYAGQWHLIAQVNAEGDVKPHCAAPESVVGIDVGLLNPAVASDGTVLQLPKETLAKLDAKLRRQQKALSRSQRNSRNHAKLLVKKQRTQNKINNIRKDAVHKFTTAIAKSHGTAVIEDLDIKEMKESAPSRAVRRAHNSSLMGAIHWQLSYKVQHLIKVNRFFPSSKTCSNCGHIKGDLTVGERTYHCDHCGAVIDRDLNAAINLMKSGPVKPEASVE

SEQ ID NO: 31637 - protein, 376 aa, unknown
  TnpB Polypeptide
MFRTVKVKLPFENSLVQTAVAFNRACQTVLNYGSEHKVYNKNVLNKATYRQVRKEVPNLPSALVQTARDEASEMLLRTDFDKVVKKHLSVRYDNRCFKFYPDSNYVSLTTVHGRLNFPFKHYAYLDTWRGEYTNAQLVIRNNKAFLNVQVRLSDVPSKVAGKVLGIDRGILNIAVCSDNTFFDSRHLRAVKGRYRYLRRRLQHVGTRSAHRKLQRLSGRERRFCADVNHYISKVIINKPFDVFALEKLKINREKKNGKRFNRLLGSWSPNELQKFIVYKAETKGKICVEVNPRHTSQRCSRCGFVHRWNRHGLRFRCGNCGFELNADLNAGRNIEVLGKSEYLRLSVNEPKVASNEASLTSVVDDSYKLPFQGGGS

SEQ ID NO: 31638 - protein, 379 aa, Pyrobaculum sp.
VSLPGGRREVWIKPHRRLWLYWWKMLRGGAELASTLVLKRRRGRWYAIFVFDVKPREESPAEVIAIDINENSVAVARVSLLSTVDAVARWNRRYVDLAVYSIKTDFGRLAKRYEAVRNAKLEELKQKYPYAGRDEDERRQNVTDIREFRRFVRRLRERRRKEGRVRQIAREMTKSPALIITEELGKNPQEEMIGLEKTKKDVKRKVEKRELRHRIKQTPFRKILRAVEDKAAEGGSVVFYVSSFRNSKVCPIHFAKLEDGGDWHVLRCPHGHAVDRDAAAVLNILWKITPEGAAKALWWDVKEVRKRLKKGIVPREAVGKANLIIPRPIIHAVWTSLMALKASPQWPAVLARATPMTPAQGADEDGARAPPRPRGTPAL

SEQ ID NO: 31639 - protein, 466 aa, unknown
  TnpB Polypeptide
VSGRPQRTNTYTVEATSDRYRQCVFDWLAAQPPLWNQINYRRRQEYFSDIGDVWDAEYTDLYDEYAPIIGKATCQQIARKNSEAWRSHFRLLEQYHDDSNPAVTEKPSPPGYWGTRDEGYELHGLVRNDLYTFDWDDDKSTLEFGVGDVLEDRYDFEHNERVTLEIKGNPQWDGDDSRLELIYDEHADRLRVQHPVRIQPDHIREQREDAFTHTLDTENTTQAAAIDVGANNTLAVVTETGDTAVYHARPEFDRFQSYSERIATLQSELPDEQYTSHRIKRLYDARSRKRDHSRDAAVKHAAEWLLERNIDTVYVGDLTDVLDTHWSADVNEKNHAFWSHRQLLERIELTLGDVGIAVEEVSEADSSSECPECGSCDVTRTGDSFRCHDCRLDAHSDVAGAWNILQSEGGPMARPAALSAERGRDAPCNGAYWQWNEHDWRPVDFGEQSHSLDQPSLSKPASSQPG

SEQ ID NO: 31640 - protein, 383 aa, unknown
  TnpB Polypeptide
MASAVIKGTRKIRVFPKNEPYLLELIRQHRRAYNLAVACFKESDARPELRKSEEMKKTVLRGIIREFVRDEVIDRGGEFASAGCDEAVLNAFRTRYAVIERRKKGEAADFAFRSIKDVRQGFLIQKLSPSFVLKNFDVSEKLPKEAFKKLTRIVHERGRWFICAQKHITTAQNAETQGLRVVAIDPGVRSFATSYTDDHCTTYGDGFYASKVFPLLLEIDKLIGLRARARNDQWKKHYQKRIDRKVNRAKDLINDLHKRVAFDLVSQFDVVLLPSFETQEMASKVERKIRTKTVRSMLGLAHYRFELHLKWMCKKYGKRLVICNESYTSKTRSWDGVIHSSLGGAKMISDGNIRVDRDHNGARGIMLRALYGNLGHEQAVGAT

SEQ ID NO: 31641 - protein, 365 aa, Nitrosococcus sp.
MNAKTHIKTLKVRIRDKYARLLERMAFEVNQVWNAANEITAEYSYVPIPGVGYIRNLFTAYDLQKLIKGIKQERGFIIHSATVQEVIAVHHQSRRQFKKDKLRWRVSGGPRRSLGWVPFKKGAAKWKNGCVYVAGHYFKVWDSYGLSNFEFRSGSFSQDARGRWYFNIVVEVPVAQSTATGQVGIDLGLKETATCSNGLKLEAHRFYRNGEAQLAKAQRAHKRKRVKAIHAKIKNRRLDALHQFTTQVVRENAFIVVGNVSSSKLAKTKMAKSVLDAGWFMLKTQLDYKSKAMQAEFVEINETYTTQACSRCGCIGDSSPKGRAGLGIREWSCSECRAHHDRDVNAAMNILAAGHRRLAEGIPVL

SEQ ID NO: 31642 - protein, 453 aa, Thiotrichaceae sp.
MRALKIKIRGLKKPQFERLKELTHHAKNLYNQSLWTLREAFDATGQYFSYPQMDKAMKQVENLEGEINYRFLKSAVSQATLRRLDKNFKGFFQANQDFKKNPSKYKGQPKPPRFKQEADDNLIYNYCAFQIKDDVVVLEKGLEIKLPSPLVGKNIKQVEIIPKHRAFHAVFVYEEDSNDFKQVPRNESVMSIDLGLNNLATCVTNGVVKPFIIDGKRLKSVNAYYNKRKAKMQAKLEKQRGRKWSKKLQSLTDWRNAFVNDYMHRASHVVVKICVDSGISKVVVGDVAKSLDHINLGKRTNQNFVNLSLGQLVEKLGYKLGSHGIELVVTDESYTSKASFVDGDKMPKLYNHETKNKHPFSGKRIKRGLYKSNNGMLLNADTNGAYNILRKTDSDFSFSGLVATVGNNISEWLHPTKRVRFLNKKTHQTSNPKRERGDKGLILPHPHQLDLFT

SEQ ID NO: 31643 - protein, 652 aa, unknown
  TnpB Polypeptide
MKNKMSNISIMKKPPDKVLPNYRAIKQTLSNVVKHKSSQDVLLKTVLSAHKIVIHAMQFMKMYLINEYDKNVKLPEIDHPFVSNIMKIICEESNNSNNKKQGRPPNAKTVALKDTLQKFYIEHYKQTITTNEVLSYTHMNTILDYLTIDTITIYERNIKQHYVEYVERFINILFERKQKVSSMTKDETSAFYSKLRKIKNTILDGNKDLPTELSEHIKFLIPQRKFKKDNMYYDIQCSPQDYLPCMIYMMKFIEGKDESIKNVFPLRSDIIPKYIRIDTTTLVHLLITKKQGSKEDFLTEGNLIKRQPEIWKYFFHTEKSYFSSNNYIFNYMIETDGIACSILLVRKDVAGKRFKPTIKTEKEYYIDDVDNSILKDKNIVAIDPNKSDLIYCISKQNDETLHFRYTQDQKRKETKDKKYRNIRDELKKITIINNKTIIEWETELSKFNRKTLQLDKYKAYCKKKNEVNSYLLSFYEQKIFRKLKWNAFMNRKRSEHKMINQFKEKFGSPSETIISFGDWEQKKQMKYKEPTKGIGMRNLFRKAGYQVYLVDEFRTSCRCSKCEGECEKFRECQNPRPWKKNDTILRHGLLMCKTCKGLWNRDVNSSLNIFKIVEAKIAGKERPVYLQRKQIVSNTTSVLQNQILDVVETPQL

SEQ ID NO: 31644 - protein, 109 aa, unknown
  TnpB Polypeptide
MEDLNMKEISQDMCFGKSVHDNSRGMFTDFLAYKMERAGKKRVRIDRWYPSSKTCSCCGNIKEDLQLSDRIYECACGNRMDRDQNAAINICREGIRISGMMPDIEKKIS

SEQ ID NO: 31645 - protein, 412 aa, Moorea sp.
MIVRECKLLNGSLAQYRALDDAIRTAKFVRNKAIRLWRDQVGVNKARLSLLCKELAEEFPFAKKLNSMARQASAERAWQSISSFYRRCKQGAKKKGYPKFQKHCRNGFADAARTVEYKTSGWKLSADCLTINFTDGFAAGKFSLFCNQETRADLFRLKINRVRVVKRADGYYAQFCFEANRFEQGNYTGKVIGIDLGLKYFYKYQNDSAVIYPKYLRRAEKRIKKLQRRLSRKFVKGKKPQSNNYHKARIRLGKAHLKVQRQRKDWAIKLARYVVSSNDVVVYEDLKISNMVKNHHLAKSISDASWYQFTECLDYYGQVWDKTVVAVAPNYTSQDCSNCGHRVKKTLSTRTHKCPHCQTEICRDTNAALNILKKGMSILGVEWNSTQGHWGTAGKPGTLGETSASVDDGKLD

SEQ ID NO: 31646 - protein, 367 aa, Eubacteriaceae sp.
MLKAYKYRIYPNSGQRTQIAKTFGCCRFVYNRTLEYRKELYEKEKKSMSKTDCNNYCNRELKSQYEWLREVDKFALTNAIYNMDSAYQKFFREHAGYPKFRSKHDSHRSYTTNYTNGNIAVDFENGKVKLPKLKEVKAKLHREFRGQIKSATVSQAPSGKYYVSILVETEHKELAHTKDSIGIDLGIKDLCITSDGKNYENPRIIRKYERQLAKLQRQLSHKEKGSKNYYKTKKKIALCHEKIRNTRKDYLHKISHEIISENQVIVSENLQIKNMVKDHHLAKGISDVSWYELTRQLEYKAKWNGREYIKIDTFYASSQLCFVCGYQNPDIKDLSVRTWICPQCGAIHDRDINAAKNILAEGLRQIA

SEQ ID NO: 31647 - protein, 390 aa, Exiguobacterium sp.
MVKHKAYKFRIYPTKEQEVLIAKTIGCSRFVFNHFLSKWDAAYETTGKGLSYDACSKELPILKQEFEWLKEVDSTSVQASVRHLADAFDRFFKKQNERPRFKSKRNPVQSYKTNIQGRSQLPEVSIVGNTLKLPKLKWVRFANSRQVEGRILSATIRRTASGKYFVFLLAEQEIGELPKTGSSVGVDVGLKNFAILSNETVYQNDRYFRTLEKKLAREQRKLSRRKRIALNKRVRLSEAKNYQKQKRKVARIHERIANKRTDFLHKVSTEIVKKHDVIGIETLQVKDMQKNRKLSKSISEVSWSAFHRMLEYKADWYGKTVVKVGKTFASSQLCSSCGHQHKDVKHLGLREWTCPNCGVHHDRDVNAGLNLRQEAERLLASSTVGTTGLA

SEQ ID NO: 31648 - protein, 383 aa, unknown
  TnpB Polypeptide
VDSTVSFLGGGGNLSRYQSMQPWPHGAKKAVRIGRTHIRELDVTDEERRRLYRLNKAGQFWDVEGLAAHILTRNPFPVFRFTRMIHNDGTVLARKKNARSTFDYWLEVRGFTGHDISIPIVNNPYVLEKFFEAHKVSTTAKIVVDRDGKLHIHQPMEFANPPMRKTGDTLGIDWGLINTISTSDGRTLGRDLYPWLKKIDTQVMQLQSRLQRQGVKLHQSTRFRRFQHRIVTTVKNKLGEILNSLADEDIRTFIVESLDFRGTKLGRKLNRIITRAGRAEMSRRMREMPERYGIEIVEVNPAYTSQECSECHYTHKTNRTGERFVCGFCGHSAHADVNAARNIRFRGENPRLFDRFDTKGKILSTLASLHEVSIQRRLQYGYS

SEQ ID NO: 31649 - protein, 401 aa, Cyanothece sp.
MYKAYKYRIYPDTEQKIALAKAFGCCRWYWNYSLDLCQKTFQKTGKSLSRGAIQGLLPGLKKEYPWLSDAYSQCLQVVALNLSRAYQNFFDQRAKFPRFKSKHGRQSMSYPANVSFEGDYLKLNRKIGKVYCRRHRDFEGTIKTVTISKNSDGKYYASVLVDDGIDLPKASTEGKAIGIDLGLTHFAITSDGSKFNNPRHLAKHQRNLKRKQQKLARKEKGSNARILARKIVAKVHSKSSRCREDFLHKLSRKIVNENQVIAVENLNVKGMVRNHNLAKAISDCGWGMFCTMLKYKAENEGKTYIEVDRFFPSSKTCHVCLNQVGSLPLDLRNWTCEHCQTNHDRDINASINIRNEALRILSLGTSETANGGSVRRLGGKISCLLDATPNEIGSPNYIACN

SEQ ID NO: 31650 - protein, 313 aa, unknown
  TnpB Polypeptide
VNENSVAVARVSLLSTVDAVARWNRRYVDPAVYSIRTDFGRLAKRYEAVRGKKLEELRRRYPFAGRDGEERASPYELSEGRLLDAVPQLCSLYLLLYASFRLLLNADHPLLRVLAQILGYNHGGAPRHLASGLLYPALLPPPLTKSPHELSKLPCVRDVLREDKAAEGGSAVFYASSFRNSKACPIHFAKLEDGGDWHTLWCPHGHVADRDAAAVLNMLWKTTPTGWVKGVWWDLRDVKRRLERERGLMPKELAERKNPLVPWPVVRAVWTSLTRLKASPQWPAVLARAASMTPARGAYEGGARAPPRGAPAL

SEQ ID NO: 31651 - protein, 394 aa, unknown
  TnpB Polypeptide
MIKTIRIMLIPNNKQRSKMFKYANAARFTYNWALEKEQESYKNGRKFISDGKLRKEFTQLKKTEEYSWLNDVDCDVTKQSIKDACNAYQRFFKGCSKFPKFKSRKYSVPSFYQDNVKIQFTHTHVKLVLITGRGKVRSKRNKNFCKVRLAEYNRIPINCKYTNPRIKYDGLSWYLTVGIEYEDSTNFSLNNGIGIDLGIKDLAVCSDGNKYQNINKTQKVKKMEKRKRRLQRRISQSYKKNKQGKEYRKTNNVIKKENKLLKLNHRLTNIRHDYLHKTTSEIIKREPSFICIEDLNVSGMMKNRHLSKAVQQQGFYEFRRQIEYKSVWNNIPVIIADRFFPSSKLCSCCGSIKKDLKLSDRIYKCECGNVIDRDFQAALNLKRYGENVLKESVV

SEQ ID NO: 31652 - protein, 162 aa, unknown
  TnpB Polypeptide
MPGGTILGDDKINKEIDTGVDRAHRWKKLAENLQKRYSSPRYLAWRRRKGILNRIRSYHRKVRNILEAWARKTPLKIVRFAKKLGYAVAREDLTGLINTLRKVKNKDHRTKLIIMGYARLERWIDWQTMKLGAPLAIVDPRGTSSECPKCDAEMIENRYSKA

SEQ ID NO: 31653 - protein, 670 aa, unknown
  TnpB Polypeptide
VASSGKRTRGPNKQTPWARNADDGVSVLRLALDTSDPLQRSRIEAMFEGAYAVTRALQRGVRDACRAYKAAPHERALDPAAVRERLGLSRTALEHRAYAHLDAAPHLRRFVTKALSMHLADAVWTSAERHLFADGSGKRHGMPRIGRWFDFTRLPGRARSHTKDKKWETFRLHGSLAGHRAAYTDRDGAFVQPRTLRPVHAKDWWRYQGPLAVVFSGLANNATLVLPVRLPTAPSNQPILDHHLADPSRWHRITLVRSRDPHADGGWRYEAHLMVLTQPYVSPSTAERRARMAIETADRSAGIDVNVSNVTVASHDTGAAMALTRIERDAGQRERAWKQKQRERRRARALDRARRAANRAQYQLSKRQEQHARRLAAAGRRPIEMIPKGPRNERGDGVPFQSYRRDALSSTYRRTRAEQARDAQAASRARRDHARTIAAEVVATHGYQLVVEDVSIAAWAASWGAALAAFSPGTLVSAIDREARAVGAIAGGAGGVVRASTRTTALSQHCPCGARVSKSLADRVHQCPVCKLTGDRDAVAAVLASFVTLVTHGNPSSAQVDYAASVDALREIRRLLRSSTSSSYDGWQDTLSESTGRSARDGSSFAWMTPTPGTRELLPRAAVARRNAGTARCSTRDETGFGQTTSERATMRTGMSPRYGPTRAYLRDNS

SEQ ID NO: 31654 - protein, 541 aa, Actinomadura sp.
LRPIAPPFVAAGPCGVAVRTRLKGLTSADERVLRAVGAHLGSLAARDLKARCADGLNHGADRWSARKRELTGVSSARWAGAITKATHDQWALARRSQYAHLQSLEAGVKTIERRLALPIGAKGTKRAPGGYRSRREWVAKSRRLRVLQGRLARVRADFEAGVVHVVRGGKRLARTRHHLDEAGVSEDQWRARWQAGRWFCHADGESGKRYGNETIRVTPDGEVSIRLPAPLAEYANAPHGRYVLAARARLTHRDVEWADRVAAHRAVAYRAHLDAARGRWYLTASWQISKTPPLPMAAALAGGVIGVDTNADHLAAWRLDMHGNPIGDPRRFGYALTGSSGHRDAQVRHALTRLLHWARDCGVRAIAVEDLDFEKEKTREKHGRRKKFRQVISGMPTGRLRARLTSMADQTGIAIIAVDPAYSSKWGAQHWQQPLTTTKRTTTRHDAASIAIGRRAQGHPVRRRTAPPPAHRSDEQGHRTAQARPGTRGREGTRQPATDRAHDAPRRAGHARRTRGTSASNTVRDARSTRQWVQDPLLDTG

SEQ ID NO: 31655 - protein, 371 aa, unknown
  TnpB Polypeptide
MKTCIKTLRVRIKDKHVGVLSQWAFEVNQVWNAANKLSADFSWVPIPGVGYLNCETSEYDLQKELKSIRQERGLTIGAATVQAAISQHAKSRRQFKKNKLQWRCSGGSRRSLGWIPFKASGIKMVNGQLRFCGHLFSLWDSYGLAGYALGAGSFSEDARGRWYFNTTVEVSVKPGNGRASVGVDLGLKTVATCSDGRVFDRRKITDEFALRLSVAQRAKKSTRVKAIHAKIANSRKDAIHQFTSTMTAEYGAVFIGDVSSKNLAKTRMAKSVYDSGWHMLKTQLKYKAIARSVVFEEVNEKYTTQTCSCCREVPSNSPKGRAGLRIREWTCALCGATYDRDINAAKNILALGHERLAVGIPVLSAQAAAAG

SEQ ID NO: 31656 - protein, 386 aa, unknown
  TnpB Polypeptide
MSRKPKERSLQDGQTIQFTTIKVRLYPTPAQAELFEKTFGCCRYIWNNMLADQQRFYLETGAHFIPTPAKYKNKAPFLREVDNQALIQEHNKLSQAFRVFFKNPESFGYPNFKRKKDDRDSFTACNHVFESGPTIYTTKDGIRMTKAGIVRAKFHRRPQAWWKLKRITVEKTRSGKYYCYILYEYAAKQPEPATPTPETTIGLKYSLSHFYVADDGSMADPPRWLKQAREKLAKIQQRLCRMQSGSRNYQEAVQQYRLLHEHIANQRRDFIHKESRRIANAWNAVCVRADAFEDLTKAMTHGTMMESGYGMFRECLRYKLNRQGKPLIIIDRYLPTTRTCSACGLVRDAVSYKEKSWTCPKCGAVHNREVNAAKNIKAEGYAQFCA

SEQ ID NO: 31657 - protein, 446 aa, Blautia sp.
MKKRMKIISSYGVELRKQNIPIRQTLEIYRSAVRYLVKVYESVWEELAQIENSKKRFNAAEHLVHTTKRNPARFDFDFCFPKMPSYFRRAAVQHALGSVSSYRTRLEQWKAEGEKTGKPYLKSEQYAMPVFYHDIMYRENTEEKDAAFLKLYDGHDWKWFATRLKHTDMEYLRKHWSGKKASAPTLEKKHDKYFLRFTYAEEVSLNRTPVKEQTICSVDLGINTDAVCTIMRPDGTILGRKFINFSSDKDRMYRALGRIRRFQREHGSCQAQGRWAYAKRLNTELGRKIAKEIVFYASENKADVIVFEYLEMKGKLSGKKKQKLQMWRKRDIQKRCGQQAHRKGIRISRICAWNTSRLAFDGSGEIARDTRDHRLCTFQTGKRYNCDLSASYNIGARYFIREILKPLPETERSLLEAKVPAVKRRTSCVYADLRELISEMELRKAA

SEQ ID NO: 31658 - protein, 377 aa, Bacillus sp.
MLVNKGYKFRIYPTKEQEILIAKIIGCSRFVFNHFLNQWNDTYKETGKGLTYETCSAELPQLKKELEWLKEVDSIALQSSLENLADAYTRFFRKQNKAPRFKSKKNKVQSYTTKHTNGNIAIVDNKIKLPKLGLIRFAKSREVHGRILNATVRRNPSGKYFVSILVETEVQPLEKTESSIGIDLGITDFAIFSDGKKIDNNKFTSKMEEKLKRERQKLSRRALIAKKKGMDLLDAKNYQKQRRKVARLYEKVVNQRDDFLNKLSTEIIKNHDIVCIEDLNTKGMLRNRKLAKSISDVSWSAFVTKLEYKAKWYGKTIVKISRWFPSSQICSDCGHQDGKKSLEIREWTCPVCHQHHDRDINASKNILAEGLRTLVLP

SEQ ID NO: 31659 - protein, 341 aa, Ensifer sp.
VPLGTSMQANTGNRGVIMRQLVEICAQKDEAGRINVSYGVSDTHVSVTFDPADLPNHPQRRRPVLPLKGRCLGIDLNPNWIGIAAAANTKNPGSLEATTLLEQALVKLDMPKDASPELVRETLAAVCDRTISMARKHRCGTIVLEKGLGKLRSSGRSHSLNRLLNSWARTVFVAMLTRRARLAGIDVLEVWAGYSSTIGNLAFDAPHACASATEIARRGIARLAGMKDVLPALAEGCVSRLWKNGKVPFELGSWQDVHRTIKAAKIDYRRPHPDVPLGARGSDVHGTELFCGHAVVRLGRRLRPGLLFRVSPVKPDAAVRTFVHVDVSFRNTIPHENPNSR

SEQ ID NO: 31660 - protein, 604 aa, unknown
  TnpB Polypeptide
MKISKSVSIRVILNNKNIKYLKKLMKEQNIVYNNTLRKLLSPELFLPTREEYDSLLDKISFVKSQIKEINKKLNPMKSGILSLEDITKGFSGESLDENVKRSLETSLIELDLELQELKNKKLEYSINFSENISISRFDLVNLLNGKLSESYLVSGLAQILATSLDRFKTNKKSDGTYTKPFSGLPRYRTITRPYGVEFTNICGGIRQNNKKNRYYVKLGKVMTKLRIVDTVPNYLLDNTVWINNYTIKPQGLQSFETGIFELIINYEYDDISSLPNFERKVGVDLGISSTITTSDGEKFSQIDSSKIEKRIEKLQVHLLHKQRENPLYKRSNRYRKLQLLIEKLYARLANRRRYFSHCISKYLTDNYDIITFEDLSVSSMLKNHNLARSISRSTWNQIKIFTEYKAKYKRKIYRNCYKFYPSTKICNKCKEISKQFDSKTQLSIREWTCESCGSHNDRDLNAAKNIRDWIPKTNPGQEQKLIQYKRNQLLRDSINFIITANYIEVNYKEKGLFQKSLNLLNLKELTKEEIEFVNSELEKDSKRKNMRYQEATYRIMEMKRMRKVNPYEQKEILKWFEKIYKSIYKKQQVKNNISKKIDLQLKSS

SEQ ID NO: 31661 - protein, 516 aa, unknown
  TnpB Polypeptide
MSKKDNIQLSYNFKLRSLSKQEYKTLRYLARASKNLYNVILYYQKKSNELINRLNEDRENKLTNIEVLQISQDKFDSKKSQQEMEDEDFIYKCWYNKLIKFSSEKLKENFYPHIPAYTLDKFLNNTNVFLLPSQSVQILTQTVEQNLISYYKSGNKDKKYPNYLKKDSYFQVGYHTLSAASFKKNKIKIPLSTSDCYKHYSRKHKLSKEIYVDFPTYFLDLKNIIKINQIRIIPRQNAKYFELSIIYTIKKDPKDVNSKEYLSIDLGVNNFASCTSTIGSPFIINGRKIKSYNQWYNKEIARLKTSLDTQRNKVSNIPKVSKKMFQIIDKRNNRIKDFNNKSTRYIINYCIENKIGNIIVGYNKGQKQSVNIGKANNQNFVQIPFYKFRNKLKYLCERYGIRYIEQEESYTSKASFLSDNNIPKYKDIPKKGSIERIQMGFNPDKFANNTNFSGSRITRGQYKDYNYNIIVNADINASCNILSKANKENNLGISEDKIQQLKEILKENNIKKVKIA

SEQ ID NO: 31662 - protein, 324 aa, unknown
  TnpB Polypeptide
VKPDAIRRRLFLSKVGNVKAVFHRRTPHGKVKTCTVVREPNGEWHASLVYEDDEVAQPLAKPASPVGIDLGLKSLVTTTDGVKIPHPRFLRKAEGRLNRLQRSFSRTRKGSENRVHARLLVAVQHAKVANQRADFNHKLSAELVRRHDLIAFEDLKVRNMVRNHSLAKSITDAGWGQLRSFTEHKASRSARLVVRVRPEYSTQECFFCGALNQVPLSVRSFDCQSCKKVLDRDFNAAWIVLKRGLAQVGLDRPELKPVETGPLLVPTTGRASPVGEAGTIRGENHASQQEARRWKPTTSVVGGCHLKEIIMAQRRHSRSCPITQ

SEQ ID NO: 31663 - protein, 338 aa, Methanomassiliicoccus sp.
MLLTVKLKHNRDLSIELAKARQVAEYAVEHRSRSSADVRHFGLKSIIANQILRKYGNNRSIRAVKNIVLIVPGQGIKYDSETRIIRVPCLKLAMDASYLLSFEKINQMELNGEYAFITMTVPEPPLMSVQSFIGIDRNTTGHIAVAANPATGKVWKLGKQCQHVHEKYKEMRRRLQKQCRYKEVKKIKQRESQMVRDTNHKVSKKIVDIAVQNACGIKMEQLDGIRNNRKQAVSFRYSLNSWSFFQLQQMIEYKAKLNGVSVAYVAPQYTSQECSRCGLLGARNGKDFTCSCGHVDHADVNASFNIALRPSIEESVGRSHADRDVCEGRIDTPREATP

SEQ ID NO: 31664 - protein, 606 aa, Catenibacterium sp.
VKPDHIHVFVDVPQTAVSCDVVETFKDISAIELFKAFPQLIQFYAGCGILWSRGYFVSTVIKIILRSRKMITDKEHKRYLKQFHKLSDRHILAVETDMPYSDVLKVVALSDKIRKAGNELVGLMRKNYNQLMRTKRYRKLLFLYGNSKDKDKRKTYAEQLNEMQKAYNITWEYCRTSMIPIGKKYGVDAVFALTKAEDIWRGIEKCLYGNGNAVHFSRYGELPCIRAKQINRGIPISVTDNKLHFKLGKTVFGIQINDRFQQDEVDAVLSYLSESEILDDRAVNTLIKDGCCIDTYRPCYATLVPRMIRGKYRVCLHLTIEGKAKPKYDKHGSLRHKYGKGMIGADIGTQTVAYTSDTEVGLKNLSERGNSIQTSERKERLLHRAMDRSRRATNPQNYNDDGTVKKGRKTWIYSNHYKKLKEKYSELCRINAINRQLAINEDANHLRSLGDVFITEPKNAGKLMRRAKETTVNSKGKFNRKKRFGRSIKNRCPSGFQAAVEQKFKVSGGIYIEVSNDYRASQYDHTIDDYIKKKLSDRMYKLQDGTEVQRDWYSSFLLYCYDYRTQDIDKNKCISEFDKCYNKEKALIEWIKVNEIKVLNSGIKIA

SEQ ID NO: 31665 - protein, 83 aa, Thermocatellispora sp.
MGPRRPGRGVKNGRLARAISDASRRELRLMLEYKAAWYGRTLMVVDRWSPSSKLCSACGALQKTMPLDVRERAAPVARSMIGM

SEQ ID NO: 31666 - protein, 364 aa, Escherichia sp.
  misc_feature (317)..(351): Xaa can be any naturally occurring amino acid
VKRLQAFKFQLRPGGQQECEMRRFAGACRFVFNRALARQNENHEAGNKYIPYGKMASWLVEWKNATETQWLKDSPSQPLQQSLKDLERAYKNFFRKRAAFPRFKKRGQNDAFRYPQGVKLDQENSRIFLPKLGWMRYRNSRQVTGVVKNVTVSQSCGKWYISIQTESEVSTPVHPSASMIGLDAGVAKLATLSDGTVFGPVNSFQKNQKTLARLQRQLSRKVKFSNNWQKQKRKIQRLHSRIANIRRDYLHKVTTTVSKNHAMIVIEDLKVSNMSKSAAGTVSQPGRNVRAKSGLNRSILDQGWYEMRRQLEYKQLXXXXXXXXXXXXXXXXXXXXXXXXXXXXXXXXXXXLKQEPTEMIQATA

SEQ ID NO: 31667 - protein, 374 aa, unknown
  TnpB Polypeptide
LFKSFKFRLYPNKEQEILISKHLGSNRFVYNYFLNKRIELYKENQKTLTYYQCSNILPSLKKEFEWLREIDSISLQQTLKNLDSAYQNFFREIKKGNKNQGFPKFKSKKDNRKSYRTQFTKTSAGGNIKLNNNKIKLPKLGLVKFAKSKEVTGIIKNVTISQVPSGKYFISILCEVPELIKLPKSEINIGIDLGIKDFAITSEAEIIDNPKYYRKYEDKLAKLQRKLSKKQKCSKSRNKARIKVARLHEKIANTRTDFLQKLSTRLINENQIICLEDLNVEGMIKNHKLAKSISDASWSSFTSMLNYKAIWYGREISVVDRYFASSKLCNVCGWKYKDLDLSVREWNCPECGRKHNRDVNAAINIRNEGLRLIS

SEQ ID NO: 31668 - protein, 149 aa, Virgibacillus sp.
MKRGSANYVKQMIKVRSLHEKVANQRRDFLHKLSYHLAKDYSIIAVEDLEIRHMVKNKRLSKSISDAGWGMFRNMLSYKCERNGSILLKVDPAFTSQDCSTCGTRVKKSLSIRTHICKGCGTILDRDHNASLNILRKGMEQLDQMMAID

SEQ ID NO: 31669 - protein, 408 aa, Dorea sp.
MEGFKHMAKKQGYAITTCCFRLRCKHPEWLEETQKFYNQIQKFYYDLYLEHPELWKENSQNSLRGVEMLSIPGRSGNQVKCPLPWEHVLLYFRRAAANAGIAAAKSYLARSENGYVGDPASLNSAATYYKGMYRDLTSYEVTLRVWDGSTWKWMRCRLYGNTFPQEAQIMSPSVVFEKPYVMLHVPVKEVVTDASGVKDRIAEDRNVCGIQFANKDTFAAASVMNAQKEELAVHFFKGGKEYSHQCAKVVQQIDRSYDSHGEKAGGQVNRKYWMHLKHLNAHYAHKVSREMIDFCKANEVGIIAFPKYVEDYANYVRKGAGNYSALHLSTKIREYLTYKAWKEGILVIDVNAKGMHEICAVCGKKIINTDKKAQECVCEDGHRTNRYLNVARNTAKRCLKQFQKKSGK

SEQ ID NO: 31670 - protein, 412 aa, Streptomyces sp.
VIVVQLRYSFRVYPSAGQRTALARAFGCARVVFNDALRVREEARAAGLPFVTSAELSKRLTAVKKTPERAWLGRVSAVILQQSLRDLDTAYRNFFDGLKGKRPRMGAPRFKSRRDNRQSIRFTANAAWHITPGGKLRLPKIGDLTVKWSRALPSTPTTVTVVKDAAGRYFASFVVETDACEVLPETMPEVGIDLGLGHFAVLSDGRKIGSPRFLRRAEKRLKKAQRALSRKEKGSSNRNKARLEVARAHAQVADARREFHHQLSTKIIRENQAVAVEDLAVKGLARTRLAKSVHDAGWSAFVSMLEYKAARYGRTFVKIGRFEPTSQVCSACGVKDGPKPLGVREWTCGACGTVLDRDVNAAVNVAKAAGLAVSACRAQVRRAPVPAPRSEAGTHPKRPTQPVSEQAGIPGL

SEQ ID NO: 31671 - protein, 413 aa, Streptomyces sp.
MKIVVQVKLMPDAEQAPAIGATLRTVNDRANWVSGVAFEHGVPREYELRKHTYAELKASGLGAQAAQHVIKKTRDAYTTLKANIRAGNLGRPGSKRRVKAESKPITFRPDSAQPYDDRCLSWQYDVRTVSIWTTAGRLKNVRFACSADVLKMLREYRKGESDLIERDGVFYLIAVCEIPEAPVNENPSGFIGVDLGIVNIATTSTGYRAAGRGLNRHRKRQLELRRKLQAKGTQSAKRRLKHRSRKEQRHAANINHIISKRIVTTAERTGRGIALEDLTGIRDRVRLRKDQRAQLHSWSFHQLGSFLEYKARRAGVPLVYVDPAYTSQQCAECGHIDRKNRVDQATFACRACGVIMHADDNASHNIDRKGEAVWTAGRESRVPATPQVVWTEEATPQPVVPYLQARSFRAGSS

SEQ ID NO: 31672 - protein, 348 aa, Escherichia sp.
MASWLVEWKNATETQWLKDAPSQPLQQSLKDLERAYKNFFQKRAAFPRFKKRGQNDAFRYPQGVKLDQENSRIFLPKLGWMRYRNSRQVAGVVKNVTVSQSCGKWYISVQTESEVSTPVHPSASMVGLDAGVAKLATLSDGTVFEPVNSFQKNQKKLARLQRQLSRKVKFSNNWQKQKRKIQRLHSCIAKIRRDYLHKVTTTVSKNHAMIVIEDLKVSNMSKSAAGTVSQPGRNVRAKSGLNRTILDQGWYEMRRQLEYKQLWRGGQVLAVPPAYTSQRCACCGHTAKENRLSQSKFRCQACGYTANADVNGARNILAAGHAVLACGEMVQSGRSLKQEPTEMIQATA

SEQ ID NO: 31673 - protein, 398 aa, Lactobacillus sp.
MLSLAKGGDSMLKGIKLRLYPTRTQEGQLWQLFGNNRFVWNQMLAMAKDRYKNNPSSHFINEYGMNNLLKALKMEYPFLKLSDSTSFQVVNHHLAQAFSMLFKHRGGQPRFKSRRSTKQAYTGRFPTSTQLVVAKRRVKLPKLGSIKTSKTSQLIDGLVKRYTVSHDATGRYYLSLQVEFPDPKPLPKTGVQVGIDLGITDLAITSDGQKYPKFQAPWEENQGTAWQRKFDRRKHQAKVNVIQWNHDKAHLIKLELNDYQNWQRARQIKARYQRKLANRRKDYLNKLTTQLIKAYDVIVIEDLKVKNLMHNHHLAKSIANASWYQFRTMLAYKCQWYGKQLIVVSPNYTSQQCSKCGFQSGSKPLEIREWTCPECGTHHDRDVNAAVNILHRGLKTVQ

SEQ ID NO: 31674 - protein, 372 aa, unknown
  TnpB Polypeptide
LSAIYEAKALVKSLKCLEKENQDMIKTRLKKIDKKIKKNEKQLKKALKEKEKLINRSKKKKYTEEDYLYEVQVLDPNIKRLKSIIRNLKFRRNRNEFKLERKMPSVCFGGKKNLKNGDLETYRFKRSRRMMIPGRRQGKYSNNLFKLNVDNDILTYRSTQKDIVFKVQFHKYKDELYARVNEKHNSPNKAVAYELMDYGEYFIVKAIFKKHMNLPKTDTLYGAIGIDINVDHIALCGTNMDGNIVLIKKYPIHKENTKNKRNEELYQLAIEIMEFCKSKKKSLVVEDLNFKQLKTRMLYRPKKENKTLSSFAYKKILEKVERKCLMNEVDVIKVDPKNTSKIGKEKYTKIKGLSVHYCAAYVINRRGMGFVD

SEQ ID NO: 31675 - protein, 376 aa, Gemmatimonadaceae sp.
MTQVLSVSCKLVVPHELRQEIERTLEAFANACNQILAVANDSGVHNSTKLHHLTYYPVRAATGLKANHVCQAIRRVVGALAAKRQTRVFRPTSIALDVRTFSFREKDWHVGLTLISGRVWLPLKIGGYQIALLRRQKPTSATLKKHRDGSYHINIAVELDTPPTGSTPKVIGVDLGRRDIATTSTGRAWSGEQLQATRNRYAQVRSNVQRKRTKSSRRLLRRLSGRERRFQSNINHTISKSLVTEARNARAMLAFEDLTGIRGRVKARGAKQQREGNAWAFYQLRLFVGYKASLSGVGVVFVDPRYTSQTCSCCHRLGDRNRKRFDCGWCGLSADADINAAINIAALGVTVDAPEGSTLYCEWGCQLVDAPMCCAG

SEQ ID NO: 31676 - protein, 361 aa, unknown
  TnpB Polypeptide
MLNRHLDLCRWVYNQTLALRKNAWDDEQKYISYYESKRYIAIWKQDKPELKEVHSHVLQDVSMRVDLAYQAFFRRLRNGEEPGYPRFKGKGWYDSLTYFETGFKLEGNNLWLSKIGDIKVWLHRPIQGTIRRLTICRTASKKWYVSFLVDDVPKESLPYSEKAVGIDVGITNFAVLSDGTFIRNEKYLAAYEEKLSTLQSKKDKMPHKSPERKKAAKRLARMYEKVGDLRNNFANQLSRQIVNNYGIICVEDGFTSELIEKKPYMAKSVLDASWNRFRTFLSYKAASAGRKFVLVDPAYTSQICSSCGTIVKKDLKDRVHKCHTCGLTLDRDLNAAKNILRLGLQSMVGIQPRCPRIYLRE

SEQ ID NO: 31677 - protein, 375 aa, unknown
  TnpB Polypeptide
MKKVIQLQLVPTESQAESLTQTMRRFNAACDWLAGRAYERRLANRYALQKLYYGEIRDRFGLKAQQACLVCAAVAGAYKRDKNKRVHFRPDAAMPFDARLWRPLNMSEVSLTTLDGRITMPFKMGSYQADQWADLRMYAKLVRRKDGKWFLLACVESTDEDPSHPDDFLGIDLGVENISTDSDGEIHTSEAVEAVRKKRMALTQQLQAKASKKPNAKARKALRRKLKRVGDCESRFRKHTNHCLSKQLVVKAKDTDRGIALEDLKGIHDRIRFRKPQRAKTRSWSFAQLRDFIAYKAQEAGVFLALVNPRNTSRTCHECGHCEKANRRWQAEFRCRQCGHKNHADVNAALNIRATATCKRAELLDASPCYQAAAG

SEQ ID NO: 31678 - protein, 313 aa, Oscillatoria sp.
MRNVVKVRIYPTPEQQELLAQSFGCARWFWNNSLALNNETYKATGKGLSRQGYNDRLPALKTEYPWLKDCYSQVLQSVSLNLSRAFINFFEGRAKYPNFKSKHGKQSIQYPQNVKLLDGKIKLPKIGSVSAKLHRTFEGKLKTVTISLNKAGKYHASLLFDDGLPGPAPNADGQAIGIDLGLTHFAITSDGSKYDNPRHLAKRAKNLKRKQQKLARKQNGSDKRKKARKIVARVHERITNTRKDFQHKLSRKIVDENQVIMTEDLAVKNLVRNHSLAKSISDAGWAEFTLADQVQGRERRENLPRDWAVFPLK

SEQ ID NO: 31679 - protein, 240 aa, unknown
  TnpB Polypeptide
MGTITSILAVVVPTQPKGKTPKVLGVDLGWRDIATTSTGKSWDGAQLRETRNKFVRVRASIQSKRTKSSKRLLRRLSGKESRFQKWVNHNISKQLVEEAQKLNSVIAFEDLSGIRFRTKVRRKTRTEINRWAFYQLRLFTEYKANIAGIDVILVDPRCTSQTCSRCHHIHPKPGKSYRKGKVFKCGFCGFEHDADVNGALNIAQLGVVVNLPEISTYSCQLEGQLSLFPDGSGLGIKPTP

SEQ ID NO: 31680 - protein, 392 aa, Bacillus sp.
MLVNKAYKFRIYPNKNQTELINKTIGCSRFVFNFFLGKQKEKDAYWYMAEEMKQNGQLRANDWKGTCLNKYETVKSLPELKKHYEFLKEVDSIALQKSVENLSDSYERYYKKQNKQPRFKSKKNPVQSYTTKHTNGNIAVAGRHIKLPKLGNVRFAKSREVEGRIISATIRRNPSGKYFVSLVTETEVAELPKTNSAVGIDVGLKDFAILSDGMIYSNPKFFRTLEEKLAKAQQILSRRTIGGSNWYKAKINVARIHEKVANARKDYLDKISTEIVKNHDIIGMEDLAVRNMLKNGYLAKAISEVSWSQFKTMMEYKAKWYGKQVVTVAKNFASSQLCSGCGYQNRDVKNLNLREWVCPSCGTHHDRDLNAGRNLKNEAIRLLTVGTTGIAY

SEQ ID NO: 31681 - protein, 371 aa, Bacillus sp.
MARLKGKLSKEEWKELRSNALYSRGDRSKKGNLNTRIVWNEKGHYFQLEVANPLHSTKRVAERMTFKLHVPEKRFNEVAQLTMAQETFVKNEKGKIKTIEYYEPYTIELKIRNGKCYVLLTYDIAVYGKELTYGDDIPSERVAGMDINIDKIAVSILTREGRRLESKTFYCHEMEYVRGNRRSNIAGEMAKEIIDYLLSWNVGVFILEELNIKQTHDTNKTFNRKTTQFAYRKMHKALMARGLKDGFTIKQVNPAYTSVIGRFKYSHMYGLSVHEAASFVIGRRGLGMDEKIPKKLLQHLKEKVKPHLIALLGSMEESEKANKSGKQKRQFLALLLKNIHTFKEHHNWKLWNVIHKTLRIKNQDILLLEEV

SEQ ID NO: 31682 - protein, 450 aa, Frankia sp.
MAEHCGHARYAWNLAVEQQSWWNPRRGPAPGYAEQNRQLTEARRAFDWLAAGSIVVQQQALRDFSTAMANFFRGSHRKPGFRKRGRGDGFRIVAVKPSNVRQINRRWSEVRIPKVGWVRFRRSRTVPDARSYRVTRDRAGRWHVAFAAVPEPIRAPGTGEVVGVDRGVSASAALSTGELLRCPGLRPVEVVRLRRLQQRLARAKRGSNRRGRLKARIARVKARESDRRKDWVEKTSTNLARRYDLIRVEDLRIGQMTRSARGTVEAPGRNVRQKAGLNRGILANGWGQLVARLEQKAPGRVEKIPAAFTSQRCSACGHVASESRESQSRFRCVTCGHTANADVNAACNIAAGRAVTARGGAGLPVPVNREPQHCAPPWWVCRSWNPPAFRGEDVNHRSWRAGAAGPTVWSRSRSRSESGRGRDLPPSQAPATRRRRVPAPARSPGPTRPS

SEQ ID NO: 31683 - protein, 384 aa, unknown
  TnpB Polypeptide
MNTVQRAYRYRFYPTAEQEAILSQTFGCARFVYNHFLRVRTDGFYQDGQRIGYNETARLLTDLKRQPETIWLQAVSNVVLQQSLRNLDTAFKNFFQGRAKYPAFKKKHGKQSARYTTSGFRWKDGQVFLAKMEAPLTIRWSRKFTGTPSSVTVSKDAAGRYVLSILVEEQVKVLPVVNKMAGIDLGLKDAAILSDGEKIPNPTYRRKAERKLARAQRRLARKQKGSKNRAKARLKAARIHAKIADSRNDWAHKLTTRLVNENQVLAAESLQVKNMVRNPCLAKAISDVGWSEITRQLAYKAHWYGRIFVQIDKFYPSSKRCSVCGHRLESLTLNVRSWTCPECRAEHCRDVNAAKNILSAGLAILAGASALRGHEKSTVGHTES

SEQ ID NO: 31684 - protein, 255 aa, unknown
  TnpB Polypeptide
MCYAASKLWNLCNYEKYNWKELGLKEFPNWYYQKKKWKNNFWYKMLPSQTAQEVCKSLDQSWKSYTSLKKTGGIRNPQPPNNKKIPMPITYMQNGMKHNEEEIRLSLPITLKQMVKEADGFDKTFLFLRHKAFSQVSNIKQLMIFQPQNGKCDVVLNYEVKEAVALPDNGKYLAIDLGIHNLATCFDSVNDKTFIVGREYLAICHYFYKEIAKTQSALAKQSSSQWKAPQYTSKRLKALRKKRNNSIRDYLHKLT

SEQ ID NO: 31685 - protein, 219 aa, Clostridium sp.
RHYSISVGIDIEQPIVALTSESIGIDVGIKDLAICSNGMTFKNINKTKSVKKHEKRLRRLQRRVSCKYLKNKEWSKFVKTSNVIKIEKQIKLFHRKITNIRSNHNHQATNMIVKTKPSRVVMETLNIKGLMKNRHLSKAIAKQCLYEFKRQMQYKCEFNGIEFVEADKWYPSSKTCSECGHIKPKLSLSVRTYICEECGCVIDRDYNASINLSRYELVV

SEQ ID NO: 31686 - protein, 439 aa, unknown
  TnpB Polypeptide
MYKRKIKHYNHIFNDTVRLYRGAVDYLITVCMDHWTEIAAIPKELERKTYVESMIHKTKDNPVVPYDFDDRFYKFPSYLRRSAIATAIGKVSSYKSNLAAWESSDTEDRGLTPGLPRAGFSFPCMYRKVMYEQTGDYMAQIKVWMHNTWDWLAVSIRKSDVDYALHHCQYRKECVPVLMKRGKQWSLDFAYEESVDLNKTDIHEQVIVAVDLGINSACTCSVMRADGTVVGRRFLKLPAEYDSLQHKIDHIKCAQHHGSRRVPNLWAYADGVNKDISVKAAQFIADTAVLYNADTVVFEHLDLDGRKHGSKKQRLALWRANAVQSMTADKVHRLGIRISRICAWGTSRLAFDGSGRVLRGKESEKTAGNYSICEFQNGKIYNCDLNASYNIGARYFIRELLKTVPVTEQQGILAKVPGCSKRSTCTLSDLISLNAVLCA

SEQ ID NO: 31687 - protein, 531 aa, unknown
  TnpB Polypeptide
MQPKVELTPLEMQQISVYVTLTASLGSQNLRPTIRSVIAELEQRNSETTWIDKLLTWCPSSPKQKSSKTLVPDSTLSEKVLEPYWNDLCQGTSSRLLLPVGTDLFASGSSLLNGWSNITVEKSWFKGKLFTAPKANSPQIFSPLFMATVAECTDLENTGKRSRKIRIYLTASQRNLVRQWFGVSRLVFNTTVKYLQEPDTKANWKAIKTGILNSLPEYVASVPYQIKSIAVKDACKAISNAKTKYKKTGEIQKVRFRSRKNPYQSCYIPKSAVKYLGIYHTILGQLSYAEKLPKSFGDCRLVCAYGQHYLCVPEDVTTEKAENQGRVVALDPGIRTFLTFFSENSVGKIGQGDFSRIQRLCHHLDHLISRLTKADAKRRQRMKKAASRMRLKIRSLIDELHHKAARFLVDHFDVILLPTFKTSQMALKSTRKIRSNSVRNLLSFAHYRFKQFLKHKACETGKLVLDVCEAYTSKTVSWTGEVVNVGGAKLIKSKIDGLVMDRDVNGARGIFLRALVDTPWMQQHLAFVSKC

SEQ ID NO: 31688 - protein, 435 aa, Psychrobacter sp.
MKINKAYKYRLEPNAEQEVILNNLVGCARFVWNQMLAISFEMFAKNEHINATNLVNKIMDLKNNPDFAFLKTHANAVALQQKVRDLASAWSRFFDPKAHARFKENKRKPRKPKLFKLNAGTEIELRPLMPRFKHKSDGRDSIRLVQFDKYCRIDGNRVKLPNGVGFVKFRKSREIVGTIKNITISKKSGRWYVSIGVEKELTESPKHPSTSALGIDLGISKLISTSNGEYIKPKNSFKAKQIKLAKLQRDLARKVKFSQNWKKQNRKIQKLHQHIANIRHDYLHKVTTTLSKSHAMIVVEDLKVANMSKSASGTLDNKGRNVKAKSGLNKSILDQGWGMMADMLEYKQKWQGGILVRVDPKYTSQACFECKHIAKENRQTQAKFECVKCGYKANADFNAARNILAAGHAVLSVKGGCSKGRPLTQKTSGIREDAT

SEQ ID NO: 31689 - protein, 405 aa, PVC sp.
MKINRSTNISMKYATPAKLASVDVILTEYGRVVNEFIDLFWGECPDKAKLLKPIVDYVDTWFGARMRKVAAREAIDMIKSATNAMDHRKETLEIAAEGCRKDALSIEPKTRMARRKIQKLHKRAKRLGDKLRDIHPSKPHHSGLRMCLSSTIAELRPAKQATEFDAWLHLSCVGNNTIIDIPVRFHKHYHELLERGQRLESYVITRKHVQLCFEIETGPKIKPKTAAGVDTGIKALASLDDGTQFGSDIEQNISRIKRCKQGSKGQQRARHSLKQRIDEVARDVASRADLIVVENLKGICNKTKAKRRLAKNMRRSLGSWNARYWLARLEARCQYNRVVFRSVPAHNTSIMCSACGHTERSNRKSESFRCRECDFSGNADVNAARNILARFLLGPYGAEFKRCLV

SEQ ID NO: 31690 - protein, 409 aa, unknown
  TnpB Polypeptide
MQLVEQHVIRKGDSRYEGIDRACFASKNLYNLATYIIRQAFFRDESNYLNWYAVDKILQASDAYQALPAKVSQQVLKQVHETWISFFAALKVWKVNPRVFTGRPRLPGYKEKQSGRNVLIYTDQAFSKKSLKDGIIQPSKLNIAVKTRQTRINQVRIIPRSKFYVVEVVYTVEPIQAELDAGLVAGIDIGLNNLATLTSNKPGFRPVIVNGRPLKSLNQFYNKRKAELQARLPEGQYTSDQIMRLSIKRNWRIRHYLHTTSRRIVELLVKERIATLIVGKNTGWKQDINLGKKTNQNFVSVPHAQLIDMLKYKCQLVGIEISIHEESYTSKCSFLDLEPIQKHETYLGKRISRGMFRSSTGEKINADVNGSYNIIRKVIPNAFIEGIAGLVVAPVRFNLQTKIASFCGS

SEQ ID NO: 31691 - protein, 355 aa, unknown
  TnpB Polypeptide
MINASGVIYNHCIALHRRYYRWWGKHLNCSKLQSHIARLRKRNSLWQTVGSQAVQDICQRIDQAYQLFFKHNKKGVRPPGFKKVKKYKSFTLKQAGYKFLGGNRVKIGLRVYEFCQSREIEGTVKTLTIKRTTLGELFMVLVVDDGNKKEVEVKTGKIAGFDFGLKTFLTCSDGSKIESPQLFKQSISAIRKASKQHSKKLKGSSNRERARKNLVRRYEDISHRRRDWFWKLAHELTDKFDILCFETLNLKGMQRLWGRKISDLAFGEFLQILEWVAKKKNKLVVFIDRWYPSSKTCSHCGHVLENIDLSVREWRCPSCQSVNGRDENAARNIQMVGASTIGLGNVRLALPAIAI

SEQ ID NO: 31692 - protein, 391 aa, Paraliobacillus sp.
MIVNKAYKFRIYPNKKQTELINKTIGCSRFVFNFFFGKQKEKDAYWYITREMVQNGHLPANNWKGKFLNKYNTVKSLPELKKHYAFLKEVDSIALQRSVENLANSYNRYYKKQNKYPRFKSKKNPVQSYTTKQTNGNIAVLDKHIKLPKLGLVRYAKSREVKGRILNVTVRRNPSGKYFVSIVTETQVKALPKTGSAIGIDVGLKNFATLSDGTIYSNPKLFRTMEEKLAKAQRIMSRRTKGGANWNKARIKVARIHEKIANARKDYLDKISTEIVKNHDMIGMEDLSVSNMLKNHNLAKAISEVSWSEFKSILAYKAEWYGKQVVTVAKNFPSSQLCSCCGYQNKDVKNLGLREWECTLCHTHLDRDINAGINLKYEAVRLLTAGPAGLA

SEQ ID NO: 31693 - protein, 543 aa, unknown
  TnpB Polypeptide
MSKSENEKWIATIPSQSSANSGKIDLVADLLVPYSELSAHFLKDIDLRFVRDNELSKYTKAKGYRTEEEFDALLVNCHKRYQKQIADDVKPKRSLTEQLEDIHEYAVQTPLSARFVQTCYSQTIEIYKSWSTTLEEAVRSYLTNSSVSEKDEFFLVTCYRINKNHLWYHKELSLDWHRTKEGELLVPTKQNKANATLSVSEDILFFMRRLIKQARKRIHFPRLKQLKTLKLDEKVAVLEASQNATHFEYFLKLSTLEKRKPIYLPLNRNPYLDECLTKGVRKPFVQLRLDGKKCVISVIVEYDKAPLRPSDSSLGLDFGMVSMFTTSDGEQHGLTSFAKLKIWDEELIALTKELQEKGIKFKSNARYVQLQNRIKSYFKNEICRILNKLAKKNVGVFVVEQLDFRASGLSKRMNRLIGRTYRSFVKAKLARLEEQFGIQIVSVNPAYTSQECSRCHHVSKNNRKSQKQFICEHCHLHCNADVNAGRVIVQRRSLSSEFPVYSKKGTSRIIRCQVREASEECHRRYCQNNELSTTNASFAESSL

SEQ ID NO: 31694 - protein, 258 aa, unknown
  TnpB Polypeptide
MQSQLFLHFLHTLCLLYRIQRNLFDRGRLPSQALCNPCSKIFSFVVKNLFNSIECHKCNPMNFYTIPTIYLACSQDFEQYAHIRRNLQRKKRLDLVKRIGCREERIVNQQLHIIANEIIAYAKQFPNPIIVMEKLDGIRENMNGSAKLNRRLHAWSFRKIQTYIEYKANLERMAVVYIEPRDTSKKCHRCGHVTQANREFRCRKCGLRYNRDLNAAINIAHALTRGMGWGSREPLELPHEVLTQSQDGTGEAPSVRVG

SEQ ID NO: 31695 - protein, 356 aa, unknown
  TnpB Polypeptide
MKHTKTLKLRIKDRHAKVLRQMAREVNTAWNYCNETSHRAIRDKSQWLSGFDLQKLTNGLSKCDGILIGSPTVQQVCEDYAKARKQFKRSRLRWRVSNPQSSKYSLGWVPFKARAVQYKSGQIQFAGFKLSLWDSYGLSQYRLRAGSFSEDSRGRWYLNVCVQVEQQMPTGTAAVGIDLGLKAAATTSEGEVLVGRQYRALEQKLGIAQRAGKKARVRALHDKIKNQRKDGQHKFSTALVERSAAIFVGDVASGKLVRTKMAKSTLDAGWCQLKTMLEQKCHRAGVVFEVVNERYTTQACSCCGSISASSPKGRAGLRIREWTCVDCGTAHDRDVNAARNILAAGLRRLAVGIPAL

SEQ ID NO: 31696 - protein, 442 aa, Streptomyces sp.
MAESAKRLKTGVVEGEQAEQIKREALGIGGRRKHHARETNRLTAHAKDADARHRLYRFRFYPTEEQAAQLERTFGACRWVYNEGLALRSGAWERHRVKVGFAETCRALTGWKRAEETSWLRDVSSTVLQQSLRHLDQAYGRFFKGQAKYPRRKRKGRSRDSATYVRTGFRWVEHPERPGTGLITLAKQSVPLDVRWSRALPAGVVPVRLSVTRDRAGRYFVSTLVEEQIAPLPAVFVPGTGEPKAVGLDLGLASLVTLDDGSKFGHPRLLKRYAERLARLQRELHRKVKGSRNRGKVREKIARLYALIGDVRRDMLDQLTTRLVRENQVLVVEDLSVATLTRVARGRGRRRKAKLNQAILDASWGELVRQLRYKCEWYGRELVMVDRFFPSTRRCSACHVVGPRLDVSVRQWTCSGCGALHDRDVNAAVNLRDEGLRLLSAV

SEQ ID NO: 31697 - protein, 420 aa, unknown
  TnpB Polypeptide
MKTILLTQKNRLRLKPKELEVVKQLSYYSARLYNVGLYSVRQYYFNNNTYLPYAKNYHECKTNENYKLLLSDTSQQILRIVDRNFKSFFALLKLKAKGKYSEKIKLPHYKKQDELMNITIQGRSARIRDGYVIIGLSKAFKEKHNPSFKELKFKLPKNIKVNKLQEVRIIPVFGGLEFDIEFVYKKEIKPISVDKDKYLSIDMGLDNFATCFDSNDGSSFIIDGRYIKSLNRHYNKQKAYYQSILDRQNIKQSKRLLTLSRKRYNKLNNYFNLAVKKITDYCIKHNIGNIVIGDFSDIKQNINIGKKNNQNFVFIPYGVFKRKLESKCEQLGIEYHLQEESYTSKCSYLDNETVEKQETYLGKRVTRGLFRTAKGYLINADVNGAANILVKFLTSNGQRIANRYGCVNHPTRLKLNDLVV

SEQ ID NO: 31698 - protein, 439 aa, unknown
  TnpB Polypeptide
MKITSTYSVRLRNFNRVFDDTVEVYRHAVDYFIELVMANWNTHFANLSHANDCIRVAEGLSVRTKKRLMTPYNFCHDFVKFPSYLRRAAIKAAYGQVSSYQTRLAQWKAKPGQKGRQPGLPKAGRSFPVMYRDNTFIRAGRNSVKLKVRIRNTWDWVDVELDKHDVDYIALHCAARNELSPALRKRGKKWYLDFSFEEKVILDKVSLDTQRVLGVDLGINNACVCSVMDSKGTIIGRRFKKLPVEQDSLERALRRIRKAQSNGAKRTPRLWARANGVNQDIAVKTANFIAGVANEFKVDVIVMEPLDLAGRKRGSKRQRLHHWRAKSVQKMVEHKAHRCGIRIRRVCAWNTSKLAFDGTGVVTRDTNNYSMCTFQTGKRYSCDLSASYNIGARYFLREYEKSISVTKWRRISAKVPGCAKRVTRTLDTLIRVCAELRSM

SEQ ID NO: 31699 - protein, 485 aa, unknown
  TnpB Polypeptide
MISDKEYKKLLKQFHKLSDRHILVVETDMPSSDVQKVVILSDKIRKAGNELVGLMRKNYDQLMRTKKYRKLLKFYGSTKDKKKRRDLADQLNEMQKQYNVTWDHCRNAMIHIGKKYSVDAVFALTKAEDIWRGIEKCLYNNGKTIHFSKYGELPCIRAKQINRGISMSVKDNELKFKLKGNVFGIQVKDRFQTDEVCAVLEYLSRSEIINDKAINKFLDKAYCIDTYRPCYATLVPKFIRGKYRVYLHLTIEGKAKPKYDRFGDPRHKFGKGSIGADIGTQTVAYTSNTEVGLKNLSERGSSIQTSERKERLLYRAMDRSRRATDPQNYNDDGTVKKGRKTWKYSNHYKKLKAKHSELCRINAINRQLAINEDANHLRSLGDVFITEPKNASKLMKRTKDTTVNSKGKFHKKKLSDRMYKLTDGTLVQRDWYSSFLLYFYDYRTKDIDKNKCISEFDKCYNKEKALIEWIKANKIKILNSGIKIA

SEQ ID NO: 31700 - protein, 492 aa, unknown
  TnpB Polypeptide
MGKQRAPSLSKSFQHSRVIRYRLLPTPEQEKELRSWRWHLKTVTNEYIKALQDRMLAAGCDFTPEGFAARAEERERAHAEIDSSKIDNEENLSESEIEEIKEKLKREWSAEAKGKFHHAAWKAWLGNGEKDDPKAVKNLVHADFRKIREKYKKKTGINASSVEEIMSRLDKTFLKSINHTKYPRAGFPKFRKFSDRCNFSLRLFDGTKRVNTVIGKDTIKFPKIGRIRYVKHKQISNKLKGALCFIQYDKRNGGFYEFGIMYEHKVNNPWCGDECVGLDLGVSINAMLSNGERHQWVSKKQFDNMERIKVLQRKRSRLQGSKKGEKRSNMYHKLTKKISRLHYSIAEDRKRLQYEAANAIIKGKKMIVIEDLQLGNMTRSAKGTKEKPGKNVKAKSGLNRALTGAALRQFVGILEFKAEEAEVQIIKVPPAYTSLECSECGHVDKNSRRNQAEFECTECGYAYNADYNAAKNILSKGVKLLEEESAGVSACS

SEQ ID NO: 31701 - protein, 372 aa, unknown
  TnpB Polypeptide
MAGIQFVKVFMGGGGMERVRRAVAVEVESPPPELSAVEELYRRIVEEVAAYVAERGRLEKEKYNVLYRRFRKQYLLPAQLIQQAMNQGVETGKSFLQQKKDGCVHKPRPEVGQVSRRFAKDSWSYKKAVGSVTPVRLALSLPGGGREVWIKPHRRFWLYWWKVLSKEAELASTLILKRRRNKWYAIFVFDLAPKKETPAEVVAFDVNENWVAVARLCLLSTVDAVARWNRRYIDPTVYSLKTDFGRLAKRYEAVRNAKLEELKQKYPFAGRDDEEKLQKVTDTRLEGLPHPYPPQTWCYTSSIPQPSQSESLWPWHSRHRGTRAGDHASGQSNPAGINPPLHQAMARTAIAVRNRYWSTTRPPRHWCGATRR

SEQ ID NO: 31702 - protein, 362 aa, unknown
  TnpB Polypeptide
LYPTAVQRAQISRNFGCCRYVFNHFLAQRQEQYRETGTSPTRFQQDKSLTMLKRELPWLKEVDSTSLQATLQDLDAAFQNFFRRVKHGDKPGYPRFKSKHDHRQSYKSKCVGTNIKVLDKAVQLPKLGLVKCRISKAVKGRILSAAVSQNPGGKYFVSICCADVETKSMPPTGAAVGIDVGVKAFAVTSDGVSYPNHKYLAKSEKKLARLQRQLSRKSKGSRRREKARIKVAVLHEHIANQRQDAAHKLSTQLIRENDVICIEDLAPKNMVRNHRLAKAISDAGWGEFRRQLQYKAEWYGKTVVAIGRFYPSSQICSCCGAQWSGTKDLSVRGWTCPECGAQHDRDINAAKNILHEGLRLLA

SEQ ID NO: 31703 - protein, 409 aa, Lactobacillus sp.
MFDIILKRKERTNVLKGIKLRLYPNRTQQNQLEQMFGNDRFVWNQMLAMMNERYQNNKALPFLGKFKLNYLLKPLKKEYPFLKTSDSSSLQVVNEFLTQSWKNFFQDKSGQIGKPRFHSRKYLKKSYTGKSIIKTAGKRYLKIPKLGYVKTSKTGVLQNTKVKRYTVVLEPTGKYYLSLQVEISEPEKYSLTDKQVGIDVGVADLAILSNGLKYPSFDSSYFEKKAKVWQRKYARRRHLVKLLVLQNKNKRVLCPRSLESFTNWQKAQKSKAKCQAKAANQRRDYLHKLTTHLVKQYDVIAIEDLKTKNLQKNHHLAKSIANASWRIFRQMLEYKCEWYGKKLIAVDPKKTSRICSKCGYNSGTKPLEIREWTCSKCQTKHDRDINAAVNILHKGSTKLNGQGLAMVTS

SEQ ID NO: 31704 - protein, 441 aa, Lactobacillus sp.
MRKKVVPRNKAKYEHLASEYLVAGNSKLDQCSHASHDLYNRALYDLRQGFFKRNYVKGYCDLDQRFKKRYSARESMLYHSLFYVQSAQQTLKEVNTIWSAWLKALKAYQANPGKFTGRPRMPKYLAKGQRHVFFVTNQNAKVKDDYLIIPKLGFKLKLTPHLKAIQRVAFKPVYGGYKAIVQYKTNRDIDYLPDNGRYMGIDPGVDNAFACVANIQKAPLLVNGRAIKSVNQYYNKERSRLKALQARYHQLESIVDTQQGKKPVYRETKAMRRITAWRNRKIRQFAHKASKRIVDYALSCGANTIVIGNNKSWKRSSDMGRKNNQNFIGIPHKVMIDMIQYKANLAGISVIRTNESYTSQTSALDHEKPCWENGSQSRKRQGKTPINRRIHRGLFQSNNGRLVNADINGALQIIRKVFPEFSLDEGIEDAVLHPVKWSPLI

SEQ ID NO: 31705 - protein, 262 aa, Lactobacillus sp.
LNGRRKVDFVCKGFDQYLDQTKWKFGSLKMLQLRGKWYIHLSATTAIPEFEAEQAVHVVGIDRGLRFLAACYDEKGKSILFSGQKILRKRRKYKKLRAELQAKGTKSAKRRLKKIGQRENRWMSDVNHRLTKTLIDHYGSNTIYALEDLTDVRFATEKSPKDQRYEIVSWAFYQFEQFLTYKANLNSSAVVKVPAKYTSQRCPKCGRIHKDNRDHELHLYTCDKCGYKSNDDRLAAMNIQFLGTLYRSGEEAPQFNKQASVE

SEQ ID NO: 31706 - protein, 375 aa, Clostridium sp.
VIKSIKIRLLPTEEQRILIFKTVGCSRFTYNWGLNRWSELYKQGLKSNNLEIKKEFNNTIKKNEDYKWIKEVSSQALAQVFLDLGVAFKNFFNKKSDYPKFKSKRKSRTSFYVRNDAMTILENTINIEKIGKVKFKTNYKIPILKSYKNPRCSFDGRYWYLSFGFEYNENQVKLNKDLSVGIDLGVSHLAIVNCLDKPIKNINKSSKVRRLKKRLKRLQRQVSRKYEANKNDKQFMKTNNIFKLEKVIRLLHRKLANIRNNHIHQATNKIIKLYPYRVVMEDLNVSGMMKNKYLSRVIVEQCFYKFITYMKYKCEFNGIEFIQVPRFYPSSKKCSICGNIKKDLKLKDRIYKCSCGLVIDRDKNASYNLANYELV

SEQ ID NO: 31707 - protein, 390 aa, unknown
  TnpB Polypeptide
MPEGVYRRALKARAEIVDGDINDLLWDLNLYRYALQRAVNALWDLDKIPKKSQAHQMLYNVLRSYEFRAHVAKNIYSTALALVKSAKQIKGSKPVIKRLSTRLDYQDARVDIGNHVVKVILRNKWYTLRIVHRREYIERFKGLRWKEVHLKYVNGVLYICVVFEVKYKPYTPRGAVALDVNLRHVIAYNGSSVKRYRARFTDALSRRARVEEIQRKYPKRWRYNSKILNRIKSLHRKARNIVIDWCRKFAKEVIIKAEKHGYAIALEDLKYLRENIVKKEDKIVWKLSMFTYRKLQEAVVSKAIEHGVPVIFVNPRNTSTNCPRCGARLSYDHRLATCKKCRFIADRDVVGAMNIWLRVLYAYVGEPGSPQRAPAVNNEARGSGETGMRG

SEQ ID NO: 31708 - protein, 222 aa, Fischerella sp.
LPKSEKSLKRKQRKVSKCKKGSSNRRKAVKKLAKKHLKVSRQRKDFAVKTARALVQSNDLVVYEDLQVRNMVKNHHLAKSISDASWSLFTDWVDYYAKVFDTWAIAVAPHYTSQDCSVCGTRVKKSLSTRTHKCHKCGTVMHRDHNAAKQILAKGIKNTVGHTQINDRWTEQPLSRWGNSSRQVDWLKQESHTFKVWECQFLPETATVYIQILVQCIYPASK

SEQ ID NO: 31709 - protein, 253 aa, unknown
  TnpB Polypeptide
MPAPLDGSPGGEQGHVVLPLQGLGQRVPLRSEAELSARQASAERAWFAISNFYRRCKEKAARKGYPKFQKHCRSVEYKISGWKLSQDGMSITFTDGFQAGTFALYCNGEARRDILTLKINRVRVIRRADGYYAQFCLDVERREQVEYTGQAVGLDMGLTYFYTDSHGNKVECPKFLRRAERRLKREQRRLSRKLRTPSRLRERRGAKPQSKNYHKQRKRLGKVHLKVQRQRRDWAVKLARCVVLAYGGAERFV

SEQ ID NO: 31710 - protein, 241 aa, unknown
  TnpB Polypeptide
MKICPSAGEGVDVTKIIREFCDADFYREDYETITSYFSADYFEPEPRPNAGGTIGIDVGIKAFYSDSNGNTVSNPRYLERSMRKLIREQRRLSRKQKDSHNRGKQRLRVARVHEKIANQRNDFLQKQSTMLVRENQTICIEDLNVKGMIRNHKLAKSIASVSWAKFFEMLEYKAAWYGNELHRVPTMYPSSQTCSSCGYRNPRIKNLSIRIWECPKCHAVHDRDTSASINILKKALQMQSA

SEQ ID NO: 31711 - protein, 501 aa, unknown
  TnpB Polypeptide
VWIRIGTNNLPKKGHIESRCPRLSLVCSLKAEPLNQIQIVQVRLLPNQYYLRYYNHLLRFISFNLPFIFVVPWIFYHLTLRVSHRFGSYGWYWLKMGEHKIRVAIIIMIKSIKIRLKPNNKQLTKLFKYSDCARFAYNWAIEREQENYKQGNKFLSDCELRREFTQLKKTPEYKWLNEVSTDVTKQAIKDACNAYKKFFKGKCGYPKFKSKKRSSPSFYQDNVKIQFTDTHVKVVSFSNSKKRNKQKLNWIKLCEKGKIPTNYKYMNPRFTYDGLYWYVSVSFEVEDNTDTDTLSNKGVGIDLGIKDLAICSDGNTYRNINKTQRVKKLEKRKRRLQRSVSRRYEKNKKGASYCKTSNIIKREKELLRVIKRLTNIRQNHLHQTTSEIIKRKPSFICMESLNVSKMMKNKHLSKALQEQKLYEFRRQIRYKSERNNIPVIIADRFFPSSKLCSCCGHIKKDLKLSDRVYKCECGNVIDRDFQASVNLKVYGENVIKQQSVA

SEQ ID NO: 31712 - protein, 425 aa, unknown
  TnpB Polypeptide
MTSITLVAESKLYLKDNTPLYDYFDNYSKLFNFLVRRCVHHLRHKLNGETESRYRTNLMFEFNITNRMAKAVMRTAKNQLKLLKESARYQYNNLYKRRRSLYKKIAKLKAILSSSSASLKQRKLVKLQLFWTQMRLNTVNQLIDNGLKLHLTFGTKHLLKINKKKFLAKRDNQVVYIGSKYETCGNLQFQVSFNSKYNRFEYKLRLDNQWESGSNKYIYGSFALKNKEAKAHILKTLSEKKSNPLTYRIIKRDDGLYLQIMYRRETTDVTRYNHGVLGVDFNKGFISVSEIDFSGKLTSLIRYNYLHQGKATKTKTSMLELVSRLVSQAVSVGKDIVIEDLISLDLNKKQEKTTSKNYNRMINSLKFGLFKRCLFSKATKEGVSVHSVNPYNTSKIAKESYTDRMKLNVHDAASYVIARRFYQYD

SEQ ID NO: 31713 - protein, 426 aa, unknown
  TnpB Polypeptide
MYSVPFEDDKVKRLISWYVTVLQKALNIIWDNTEWVYDFKRFKAKKHVKFKVPKIPKNSAFKKKLRDELMKDNPYAKHWIDAVIRTAYSILESWRKRYIKGRARKVKPRIRRRFARCKITLMKIDYERKTIRITLKPHEYVEVSFANTWFIKRVKGWAVGEVTLKDDRVLIPFKRVETAMVNGAIGWDCNELTVDGFSPNIGFIHVDLKPLITTRIIYQEKRRRVQSIASKKLKNGEKLLSKYSHREKDKCKDIERKLATQLVNLFPNTLHGFEKLNKEEMLKHNYKSLRKRIARVSWRNIVGEIKQRTVVKEVGPKNTSRTSSRCGFKVKDLRGQVFKCPKCGLVIDRQKNACINIYLKMRGLAHSKDWWDEVVKPLIRQELWVGVALRGRMPMIWSPMKGDLTAMKPKRLVDQNTRLSIKVHQP

SEQ ID NO: 31714 - protein, 99 aa, Halomonas sp.
VGWYQLTQQLAYKAERYGRDFVQIDKWYPSSKRCFHCGHITEKMPLNVRTWDCPHCGTQGIDRDVNAARNILQSGKAILAGADKLRQHEKTTTVGLTGG

SEQ ID NO: 31715 - protein, 370 aa, unknown
  TnpB Polypeptide
MKQTLLIKLGPTPEQHAALLRTLEAFNAACNAIADVAYERHMANKIELQKLVYYEARQRFGLSAQMAIRAIAKVAEAYKRDKRVKPSFRPHGAMVYDERIYNFPTADRVSLLTLDGRVVLPFRFGAYGEGMMQRRRGQGDLLYRKSSNTFFLAVTVDAPEPMPDEPNDYLGVDLGVITLAATSDGEFLNHSTGPKHAHINQVRARYSRFRQKLQKKGTESAKRLLRKRSGREHRFGRDVNHCISKALVSTAQGTSRGIALEDLKHIRERISAKRTVGKRHRRVLHSWAFLQLRAFIAYKAALAGVRVVFVDPAYTSQTCSRCGHSERANRKSQARFLCVACGFFAHADLNAAENIRRVAVIPPNVAALAG

SEQ ID NO: 31716 - protein, 425 aa, Caballeronia sp.
MERRKVTFKLYPNAREAERLTSWIRLHCELYNAALEERIDAYRKAGKSISYYDQQNALPEIKAARPEFVELGSHALQQTLRKLDLAFQAFFRRIKAGQAPGFPRFKASQRFSGFCYPDPAGCKLAQNGTRGATIRLGSAQDAMSIRARGQHRFGDGAKPNDLTITRKNGEWFASVTLRVSEDACARARTGEDQRGVDFGLTDWATFDNGETIDNPRFVRNEMPRMADLQRQQARKKRGSIRYQRLGKQVAKLHERIGHLRREFLHKTTTRLVKSCALIATEALRTQNMSRSARGTPDKPGRRVKQKGGLNREILSAGLSMAHHMLAYKAVEAGTRVHVANTRQLKPSQRCSSCWEIVPKTLAQRVHVCPHCGLKMPRDQNSASVMLIDAHTPGTGVAARPKPLARQRAKSKSVTRETPATASQDA

SEQ ID NO: 31717 - protein, 401 aa, unknown
  TnpB Polypeptide
VTRHQGYRFGLKPTKADVAVLRRFLGCSRFVWNDVLALNELRYERGEKRLGYSAMCQYLVYLRDAHPFLREAHSQPLQQTLKDLARAYQRAFDPKLATRLPRFKKRGRPFGIRFPQGFRVDGQGIYLPKVGWLGFRKSREIEGEIKNLTLSFDGRNWYVTVQTEREVETPVHASESAAGIDLGVAKFAALSDGTFVDGANAFKAYEKRLALLQRRMSRKVKFSANWRKAKAKVSRLQRKIANVRNDMLHQASTRISKNHAVVVLEELRITNMTASAKGTLEQPGMNVRAKTGLNRRILDQGWGEFRRQLAYKLEWSGGALLLVDPRDTSRTCSACGYVSRENRQTQETFRCIACVHASNADTNAAINILRRAGQARIACGDAPLGASAKQETRRVANALAA

SEQ ID NO: 31718 - protein, 594 aa, Chloroflexi sp.
MFVKGRPMRTSRTHQPLTYDVRLPDEAQADALRLLDASKVVVNTALTMLWPSLDEFGSERASPAWKQVGKSIASPLPHGDRQWRCESEVVGRVLRQQAERKKAFELVLPILSEGLIRPKTEKRPVGKNRPAIKEAITTLQKSLDEDETSFVTFQNVVEQACNYFFQHDRFPSSYEELQPVPRLQVGMLTYAGDDGREKGQAYRLALDLDAGTARFRFRFPDEAGIWQWRTVDTIIPLPDCLKERLSDGELMAPTLREECRAAGERFAVLDFIIEVEKEELPAWESVQRVLGADWGIHSLLTATAIDEHNEQVGRPFFLDTGGFDGRQARTRRQIDELKKKVARYEQERDALPQDHAKRTWYSQRLALYRREIDRCWRKYEQRNRALAHLASNVLLLLCQMHGCSLLSMESLKTLKSTGRGKGVRGRWRNYCNNSTIRGEIWRLLRYKCHLLGLRFHTEAPRGTSHTCPRCEQAAKTYRSPSDRDEAVKWGRWMFCDTCSYNADRDYCASVNIARLGVAYLSQMKQTGKARSCSISDPLVKPVTYTGTGSALLLPPTSSHARPIRSGKICYYSGWPDSIFLQSSQPKAVFLRLCG

SEQ ID NO: 31719 - protein, 403 aa, Deinococcus sp.
VLCWNGNAPALLEQPGAWQTPSKEVTPIQSTTHRKAFRYRLRPTKAQEAALLEQLRLCRNLYNAALQERRDAYRKAGKTITAYDQMKYLREIKEALPEYKGVYSQVLQDVLKRLEKAFKAFFRRVKAGQTPGYPRFKGAGWYDSICYPQSGFSVAGDVAYFSKIGNIRLRLSRPLEGKIKTATITRDCGEWYVSYVCEVEAQPLPATGSAVGVDVGITYFCITSDGEFTENPRYFKSSMAKLRVKQRSLSRKKRGSERRKKAKGAVAKLHRKVSRQRLDFHHKTAAKLIRENDLVAHEDLNVSGMGRGNLARSIHDVGWGQFFSLLSQKAASAARTVIAVDPRYTSQACHKCGHTCKANRVSQSQFVCQSCGHTANADWNAALNILGRACPSVENVALGASVH

SEQ ID NO: 31720 - protein, 382 aa, Mycobacterium sp.
MQLRYNFRVYPTPGQQIALARAFGCARVVYNDALAARREAHAAGLPYIKDSALQTRIITEAKKTPERAWLSEVSSVVLVQAIADLHTAYRNFFASATGKRKGAKVAPPKFRSRKDNRQSIRLTRNGFSLKPNGKLYVAKVGELTVRWSRELPSVPSSVTIIKDAAGRYFASFVVQADDHPLPPVESEVGIDLGLTTFAVMSDGKTIESPRFLRQAERRLRKAQQALSRKEKGSKNRAKARMKVARAHAKVGDARRDWAHKNTTRIIRENQAVYVEDLCVKGLARTRMAKSVHDAGWGMFLRLLEEKAARYGRTVVKVDRFFPSSQVCSTCGRVDGRKPLHIRTWACSCGAVHDRDLNAAINILAAGRAERLNACGETVSLSA

SEQ ID NO: 31721 - protein, 558 aa, unknown
  TnpB Polypeptide
MSEDEKRHVFHLSENIRKASNQVVNTMNKRLDQMERTKAYRETKIAYNAVLNKIKNISDEDSKQFKALTAEKKNLSKMLQEIQISFGITKKDVEEVMRKVGDYMGIHSVFCLSRSIDIWQGIEEVLYGNGTKLNRRKYQDYPEICATQPERAIIVQVKDGKLKFLLDVSKKARNNAKKIGAATTKENNEKNKRNVIKFGVKIKKNDQFAQMEVDNIINFQTNPDAEKLFVQKFIDTEIPQDTFRVCYAALNCKIIRGKLRVYVHLTIEGKPVLKFTKDGNLRHPAGKGRVGVDIGTQSIAYVSDTEIGLDNLAERNGKSTKASEAKEKAILRYMDRSRRATNPDRYNADGTYKKGTRGEMKKSKRYLKATTHLKDIRRKNAVNRHLAINEMANHLRTLGDVLITEQSNAKALAKKAKPKVVINEKTGKKKNRRRKRFGRSIQNRCPGYMHEALKKKFTNYNTVDMYFRASQYNHVSDSYEKKKLSQRWHELCNEIKIQRDIYSGFLLYCALADFKSPDRNLCIKKFDEFYKKHQQLIADIIKNGQNICNSGIKIPKTA

SEQ ID NO: 31722 - protein, 446 aa, unknown
  TnpB Polypeptide
VQVRYRYRVYPTPGQEQALARAFGCARVVYNDCLRLRDACYASGEKISDTEVQRRVITLAKQAPERAWLGEVASVALVQACRDARRAYRNWFDSLAGKRKGRKVGHPAFRRKHYRQSIRLTRSGFAVHGLRLYVAKVGDIKVQWSRDLPSVPSSVTVIREPDGRYYASFVVEREITPLPVCAREIGVDVGLSSLAITSDGEVIGNPRFLRAKERKLARAQRALSRKQEGSANRAKARHRVAVVHRKVRESRLDHAHKTALRLVRDNQAVYAEDLCVSGLSRTRLAKSVRDAGWSQLVRLVEEKAAQYGRTFARIGRFEPTSQVCSACGVKDGRKPLHVRQWTCAACGTIHDRDINAARNILAAGRADKSNACGGSVRPGLALAVPGEAGTHRSADVGRAGGIPVVHGGEDVNSPPLRAEVKIAPVLLQKAGQQVARWPERVRVQGS

SEQ ID NO: 31723 - protein, 389 aa, unknown
  TnpB Polypeptide
MKKAYKFRIYPNKHQEVNLNRTLATCRHLYNDSLSKRRRQAKLNNLCRDFGVFPWGKPEWVSYEDQANDLASSKTPEQNEVFSQVLQDVLRRLDKTFKNFYRGFGYPRFKGRNRYDSFTYPQKGFGLKDGKLILSKIGNIRIFQHREIEGTIKTCTIKKDIDQWYVVFTVEIEKPIIPVEIMTRTGIDVGLKSLITLSNGKQIEPPRFLRASEQKLVWEQRKLSRKKKGSANRNRQRFKVAKVHRKVKNQRKDFAHKTSRELVNNYDLIAFENLNIRGMVQNHRLAKSISDAGWYQLQTFTAYKAEDAGKQCKFVVSNGTSQECSVCGNKEILTLADRVFRCSRCGHIEDRDVNASKNIKNRAVGTDCPELTPVESMHKQLVEAGSPVL

SEQ ID NO: 31724 - protein, 401 aa, unknown
  TnpB Polypeptide
VTVLGQRIRLDPNNVQASWLERCAGTARFTFNWGLARWQEQYAAGEKPSWQKLNAELNACKVADFPWMTELPWAVPNKALADLGVAFTNFFRRVKAGQRAGYPRFKSKKQSKPAFAIEARALAFDERKIKLPKLGWVRTREALQFPGKILSARFTKHAGHWYVSIQVEVSDSWSYPHRCETQATVGVDLGVVDLAVLSTGERIETPRALRTHEKRLRQLNKELSRRTKGGKNWQKTKAQLGQLHERIACIRHDVTHKLTTDLVSRFRWIGIEDLNIAGMARTRLAKSVMDAAMGEVGRQLAYKAPLAGSTVVVVGRWFPSSKTCSDCGTKRKGPLSLSIREWSCEACGVVHDRDENAAQNLKQMAAAHAATACCHGSAGPGLETGAKLPLGQESSSYVNPG

SEQ ID NO: 31725 - protein, 416 aa, Moorea sp.
MRAAYQYRLRLTKNQEREVERWLDMLRHQYNYLLADRFNWYEQNRCSINSCPIVCYLPDLRNNPDYFSQKKTLPQLKKDRPWYKVVQSQVLQDCVKRVDLAFKGFLKGDSNGKKSGRPRFKSKDRYKSFTFPSLSKDPINGNILTLPKFGKVKMIYHRPIPEGFKIKTATITRKSDGYYVTLSIQDEFVPNIIPVDSATNPIGVDMGLKSFLIKSDGSEVPIPQYYRKAQKRLKKIQKAVSRSKKGSNNRKKAVSRLGKAHKKVADTRKDFHFKTAKGLLDNHDLVAHEKLNIKGLAKTKMAKSILDAGWGQFLSILSTKAVRVAWPTALNAGLVTVAVNPRNTSQNCSNCGTKVPKKLKDRIHSCPHCGYTEDRDVNAAINILKLAVGHPVGNKAFRVSEPVGGVGKKPTLNLKR

SEQ ID NO: 31726 - protein, 444 aa, Methanococcoides sp.
MQLTLPIRINPSLEQETVLWNLSEKCRLCYNFALMERRDAYKNKIKISYVKQQNDLPTIKQTYPEYAWVYSKVLQGTLKCLDNDYKSFFNLKKNGDKKSKPPGFKGKDYFTTMLYNQSGFEISDSNGHVVIRKSMDTRINRPVLDYFDQDKLYIDLSHKHPSKIPLKFELPIEVLNEGIFKQAVSIDQINVYQKETEFYISITYSVASTQFSNNDAYLAIDIGTIKQSMVDTDGNFTELINRRPDKYWEPKIHQIQSRRNHCLKKSRKWKLLNKNLKKMKRRSSDQLKDNQHKITKRIIENNDANVIIIGKLDVKQMASSKPDDKKYDKSTHRGTHNSGHMGRFAQFLTYKAENAGKRIIRIDESYTSKMCCVCGSLKDMSLNDRTYECGVCGNVLDRDCNSSVNILLRYFKHNALWTGYQQTVDNLRLTGLQIGIIPNRMITK

SEQ ID NO: 31727 - protein, 398 aa, Microbispora sp.
VWLRYNFRLYPTHEQRVALARAFGCARVVFNDGLRMRQDAHAAGRPYISDGDLSKRVITEAKKTLERSWLGEVSAVVLQQALADLNLAYRNFFKSIIGRRKGPKVAPPRFRSKRDNRQAIRFTRNARFSITADGSLRLPKIGDVPVRWSRSLPAEPSSVTVVKDAAGRYFASLVVDVSGDPLPETTSEVGIDLGLSHFAVMSDGRKVDNPRLLRRAERRLRKAQQALSRKAPGSANRAKARVKVAKAHASVTDRRRDWAHKLSTRIIRENQAVYVEDLAVKGLARTRLAKSVYDSGWSAFVAMLEYKAALYGRVFHRIDRWFPSSKLCSECGALTASMPLSIRQWTCPCGAVHDRDVNAAKNILAAGRAERLNACGGQVRPPHQVAQPVEAGSLRGAA

SEQ ID NO: 31728 - protein, 400 aa, Streptomyces sp.
MASRMKRAYRYRFYPTDAQAAELSRTFGCVRRVYNLALAARTEAWTLRQERVNYNATSAMLTAWKKTEELAYLGDVSSVPLQQALRHLQGAFAAFWDKRAKYPRFKSRKNSRKSAEYTSSAFRWRDGALTLAKMSEPLDIRWSRPLPEGAEPSTVTVSQDAAGRWFVSILVDDPAVRPLVATDTTVGVDAGLSHLVTLSTGEKIANPRHERKDRARLAKAQRKLSRKAKGNGANRAKARRKVARIHARIKDRRRDHLHKLTTRLVRENQTIVIEDLTVRNLLKNGRLARAISAAAWGEFRSMLEYKAAWYGRDVVAIDRWFPSSKQCSTCGALQGRMPLNVRTWTCDSCATTHDRDVNAARNLRAAGLAVSACGAGVRPQRESSRTGRSAMKQEPLRREP

SEQ ID NO: 31729 - protein, 424 aa, unknown
  TnpB Polypeptide
MKLTYKFHLPFSSELKELCKISKDLYNQANYTVKTHLNETGKWLRYNDLNKIMRTIKNLENEINYEKLKAQSSQQILRLVDKNWTSYFRSLKEYKKVPGKFKGLPKSPNFKKKDGLNLLIFTNQNAKIRNNVLSLSKTIKINIPKYEGKDFSKFQQVRIIPKHSNFECEIIYEEKVKEHNLDKEKCVGIDLGLNNLATLVGTDGAIIFSGKPLKAKNQLYNKTKAKLQSINDKSKSKTAVKYTKRMRRLDEKHEALKRDYLHKTSAKIINYCVEHKVGNIFVGLNKDWKNSISLGNKTNQKFVSIPHSQLIRMLKHKAELNGINFQTTEEAYTSKCDSLTLEKLEHHENYSGKRVHRGLFVSSASFAMNADVNGAVNIVRKVVGNSYASRIINSGLLFNPVKSPEIFTNKAKVLRNFDRIKQYE

SEQ ID NO: 31730 - protein, 213 aa, Okeania sp.
KHQKNLARKQAKLARKKKDSISREKARSLVAKVHERISNARQDFLHKLSRKIVNDNQVVIVENLNIKGMVSYGMLRKRNHNLAQTISDVGWGIFINFVDYKLQQKGGLLVEINRWFPSSKTCSRCLYQISEMPLDVRERVDLSELWYSPRPRRKCVQKYKGRRHQGNIGLGRTAAVRAASRREGGEVRPKGGRKSVLRHSPLSLETPSLCTVG

SEQ ID NO: 31731 - protein, 347 aa, Paraburkholderia sp.
MILVYRYRVRSLNGLLNRQSRAVNFVWNFCNDTQKHALKWNKKWPSGFDLNVLTTGSSKELGIHSGTINATCEQYAKSRSQHRRPYLRYRGKRSLGWVPLKGRDLKREGTAFRFAGNTFRVFYSRPLPEGKIKDGTSFAQDARGNWFLNIVIEVPEPPARPVRRAIGIDLGLKDFGKLSNGETLPNDRYGQRAAEKLAKMQRARKHRRHLAKLHAKVAYARADFQHKAALDLVRRFDLIRVGNVSASKLARTKMAKSVYDASWSSFRDKLRYKAIAHGVLFEEVNEAFSSVTCSACGTRSGPTGLKGLRMREWQCGACGYVHDRDVNAALNILRCGRASPVVGIHRL

SEQ ID NO: 31732 - protein, 371 aa, unknown
  TnpB Polypeptide
MKTYKYRIYPTSKQEVKLLYTLNSCRKLYNACLEQRKLAYKEHDISLNYYDQQKQLPEVDHLDVYAQVLQNVARRIDKTFKNFFRGNGYPRFKSRNRYDSFTYPQHGFKMVDSRLRLSKIGNIKIKLSRPLPEPKTLTIKRDACGDWWASFTVETDTVPKREIINVVGIDVGIEKLATLSTGEYFENKRFIKNQEHKLKCLDRSLSNKMKGSSNRGRIRLLRAKAYRKLQNQRNDYLHKISRYLVDKFDLVAFEDLQIKNMMKNHSLSKAIGDMAWYKLMQFTSYKAEEAGATVVLVDPRNTSQECSQCGELARKSLSVRLHSCPNCCFEADRDLNASFNILNRAIGQELSKSTPVEFIRTMKQELQPISV

SEQ ID NO: 31733 - protein, 600 aa, Thermoproteus sp.
  misc_feature (401)..(591): Xaa can be any naturally occurring amino acid
MENVRSMRRAVAVELEDPPPELYAVAEAYRRIVEETAVYVAERGRLEREKYGELYRRFRELYPWLHSQLIQQAMNQGIEVGRSFLEARRDGRVRKPRPEVRRVSIRFAKDSWSYKKAVGSAAPVRLALSLPGGRREVWIKPHRRFWLYWWKALRGEAELASTLMLKRRRGRWYAIFVFDVQPRGEPPAEVVTFDVNENTVAVARVSLLATVDAVARWNRQYVDPAVYSIRTDFGRLAKRYEAVRGRKLEELKRKYPYAGRDGEEKVQNVTDTREFRKFAKRLRERGRKEGRVRHIAREMTKRPAVIITEELGKNPQEEMIGLEEKKVKKRELRHRVKQTPFRKLLKTIEDKARETDSVVVYVSPYRNSRVCPIHFALLRDNGGWHTLYCPRGHAVDRDAAXXXXXXXXXXXXXXXXXXXXXXXXXXXXXXXXXXXXXXXXXXXXXXXXXXXXXXXXXXXXXXXXXXXXXXXXXXXXXXXXXXXXXXXXXXXXXXXXXXXXXXXXXXXXXXXXXXXXXXXXXXXXXXXXXXXXXXXXXXXXXXXXXXXXXXXXXXXXXXXXXXXXXXXXXXXXXXXXXXXXXXXXXXXXXXXPASSSARGL

SEQ ID NO: 31734 - protein, 401 aa, Thermoproteus sp.
  misc_feature (401)..(401): Xaa can be any naturally occurring amino acid
MENVRSMRRAVAVELEDPPPELYAVAEAYRRIVEETAVYVAERGRLEREKYGELYRRFRELYPWLHSQLIQQAMNQGIEVGRSFLEARRDGRVRKPRPEVRRVSIRFAKDSWSYKKAVGSAAPVRLALSLPGGRREVWIKPHRRFWLYWWKALRGEAELASTLMLKRRRGRWYAIFVFDVQPRGEPPAEVVTFDVNENTVAVARVSLLATVDAVARWNRQYVDPAVYSIRTDFGRLAKRYEAVRGRKLEELKRKYPYAGRDGEEKVQNVTDTREFRKFAKRLRERGRKEGRVRHIAREMTKRPAVIITEELGKNPQEEMIGLEEKKVKKRELRHRVKQTPFRKLLKTIEDKARETDSVVVYVSPYRNSRVCPIHFALLRDNGGWHTLYCPRGHAVDRDAAX

SEQ ID NO: 31735 - protein, 287 aa, unknown
  TnpB Polypeptide
VFKLGDQGREIAIRSDNRVFEERIRSVTVSKTKSGKYFASILIIREKSVNPMVEIHEEKVIAFDMSLKDFVVTENYKLGNPRFFRQSINRIKKAHRNVSRTTKGSGNRAKASHHLATIYEHYVNQKKDWTHKLTRQIADQHDAVIVEDLNIEGMKRFNTGYAKSITKDFSWGEFLMMLEYKMARLGKHLVKVDRFFPSSQLCSSCGYQYKELALDEREWTCPGCGTRHDRDINASQNLRGEGICVLSECGITLMRATVGTTESHACGDRVRLPAMGAAVKETRIHAL

SEQ ID NO: 31736 - protein, 378 aa, Dictyobacter sp.
MIKAHKMRLHPTAEQFVSLSKAAGTSRYVWNWALAEWNRQYAAGEKPTALKLKKQFNAIRREQFPWTWEVTKNASDQPFLDLGKAFTAFFEKKAHYPKFKSKKKSKPSFYLANDQFELGDHRVWIPKLGWVNLAENLRFKGKISGARVTRQADWWFISITVEVPDEVPQKRPAAVGGDVGLNRLATLSTGEECENQAFLKTNLKKLRQANKRLHRRKQGSKNREKARRQVARLHYRVTCKRDDVLQKLTTRLADCYGIIGIEDLHLKGLLKNRHLARSFSDAALGKLLALLTSKVEQRGGQVVKVGRFFPSSKQCHACQWRWDDITLSDRIFVCQDPTCAYYELRQDRDYNASLNILQEALRLIGLIDQAVSGTGLDE

SEQ ID NO: 31737 - protein, 233 aa, Ruminococcus sp.
  misc_feature (47)..(50): Xaa can be any naturally occurring amino acid
  misc_feature (215)..(218): Xaa can be any naturally occurring amino acid
MRISSDICAMQHPSSGMSVITSVSITKKLGWSSIRTGIIRKKPIKRXXXXGMAQYPDWYYQKKAHKKDLWYKQLPSQTAQEVCRLLDKAWKSFYALKRSGGIEAPRPPRFKQESIPITYMQMGIVHERDTDRVRLSLPKTLKKYMEETYQIHENFLYLENKIFRGMDQIKQLRIYPPEKGNCKIIVVYEVPDQEELPQNGHELSIDLGLHNLMTXXXXPDQTAADLSAGEGKL

SEQ ID NO: 31738 - protein, 483 aa, Blautia sp.
MYLHENKENFQEMIELVSTDTGRAAAVIEKDYYVTLILRLLSEQLSNVVFKGGTSLSKGYHAINRFSEDIDITFDEHIGEARRKKLKNQILKGISEELCMPISNWESTQSDRDYNAYYFSYESVWNLDDDRMLSSVKLETALGSYAFPTEKIKIGNYIGEYFRKRGREDLAEKFRLDEFEMKVQALERTYIDKIFALCDYYIQNKSKRYLRHLYDIYKLTQHISFDANFEKLYYEIREHRKTMKICPSAGEGVDVTKIIREFCDADFYREDYETITSYFSADYFEPEPRPNAGGTIGIDVGIKAFYSDSNGNTVSNPRYLERSMRKLIREQRRLSRKQKDSHNRGKQRLRVARVHEKIANQRNDFLQKQSTMLVRENQTICIEDLNVKGMIRNHKLAKSIASVSWAKFFEMLEYKASWYGNELHRVPTMYPSSQTCSSCGYRNPRIKNLSIRIWECQKCHAVHDRDTSASINILKKALQMQSA

SEQ ID NO: 31739 - protein, 326 aa, unknown
  TnpB Polypeptide
MKAEKPELNTVFSQVLQNICKRIRRGFENCWARRRHGLKAGLPHFRDRHQYRSLTYPQMGFSLKDGWLKLSKIGTLRMVYHRPIEGRIKTLTIKRTPTGKWYATFCCEVESKPISGRKKAVGVDFGLVHLVALSDGTIFEAPKTYRKIEAQSRKAHRFLSHKKKGSRNREKARVRLVKVEEKAKNRRRDFAFKIARSIVDRYQKVVVEDLRIDNMRRNRCLSKSIGDAGWGILRSALTYMAQRSEGVMVLVDPSYTSQLCSGCGKLVSKSLSERTHRCSVCGLVLDRDVNAAQVILRRGIGVEYAESKPVDGVATAPLFPGCKLPL

SEQ ID NO: 31740 - protein, 295 aa, Escherichia sp.
VKRLQAFKFQLRPGDQQECEMRRFAGACRFVFNRALALQNENHEAGNKYIPYGKMASWLVEWKNATETQWLKDSPSQPLQQSLKDLERAYKNFFRKRAAFPRFKKRGQNDAFRYPQGVKLDQENSRIFLPKLGWMRYRNSRQVTGVVKNVTVSQSCGKWYISIQTESEVSTPVHPSASMVGLDAGVAKLATLSDGTVFEPVNSFQKNQKTLARLQRQLSRKVKFSNNWQKQKRKIQRLHSRIANIRRDYLHKVTTTVSKNHAMIVIEDLKVRATCQSQQRVRSASRGAMSGQNQV

SEQ ID NO: 31741 - protein, 300 aa, Deinococcus sp.
MESITAPKRTKAFVVRLYPNAAQQERINCTLGCARFVYNHFLARRIETYKATGKGMGYAETDKHLTLLKKAEGTEWLAEVDKFALQQSLRDLERAYQNFFRTVKQSGKKVGFPNFKKKRTGEAYRTQFTNNNIEVGEGRLKLPKLGWVKTKGQPDITGRILNVTVRRIHETHDEASVLCEVEIPYLPAAPRYAAGVDVGIKDFAIVTDGQEFKHHANPTYYRSSLTQLRKAQKTLSRRKKGSARYGKAKTKLARIHKHIANKRQDFLHKPRVSSQANASCRAFISGLKWEKVRSAQHISD

SEQ ID NO: 31742 - protein, 541 aa, unknown
  TnpB Polypeptide
MGYTVSIAKEKIEDLNLDISLASSNIQLVKKVAVTDVNDVFCCLLLSNTAKKLYNSSLYLFKQQYKQNQTTLTYETLDKLMKNELLHPNFARLYQDLPAKVSQQVLKLFSQNVKSFFSTKQSKKLTEEERKKVNLPRYYSKNGLVPVYYTSQAISKKAFNKEGVLHFSGTDLKIKLDKSLFQEIKSLSQINQVRIIPSTRNDKNKRLSDLINERDLFTIEIVYTVPKSEKCHNNKSLQLLYRTSIIHKINPKTNKISTIEKKELVEARYTEDFLNSVAGIDQNLDQLAVGVIASDKTLAFNYDIKYLKSVNQYWNKRKAKLQEEISKQEKLLEDLKYTKLDFYQTFLTEYSVSRLIEDTRTLIKKLKNKIKKITKKRNRQIDNYIHQLSRKLINHLSQLGVQNIIYGKNVNFKKEINLGKVTNQNFVNIPFNQIIEKLRYKALLAGINFMTVEESYTSKTSFLDEEKLHSYKHNQPEKGYTFLGNRFARSLFRTQKGYIIHADINASFNIIRKVSGDIIYNFIDNVSIRGSCPKRMKINLS

SEQ ID NO: 31743 - protein, 381 aa, unknown
  TnpB Polypeptide
MKSTTPTFVIELPLRVNDQQNRFLTQAFEFGRTLYNATLGTALGQLQRMRESKEWRETRDMPKGKKRSKRFSELQRTRGLTEYGLKTIANNHRKASGRNDIGAHEAQCIGRTVWRALERYLFKDAGKPRFKSKSRGLNSIEGTDNREIMYKPECQAVVWRKQVLRLVNADTPYRNEALADPLDKSRSKRVKYCRIVRRTINGTKRWFAQICLEGQPPVRKIYALQSEVVGIDPGPSQIAYFHEHYADIVKVSPNVDLQEKAVRRLQRKIDRSRRANNPDNYEDDGRIKRGPLKWKFSHRFNKLSRELAEHHRCLAATRKRDHGALANLLLQIGGTIKIEKNSYRSYQRNFGKSTTRSTWKQFLVMISVVQSSQQFVCGHGN

SEQ ID NO: 31744 - protein, 316 aa, unknown
  TnpB Polypeptide
MAAFFDRGNPAGRPSWRKAGRDEGFRIVGRGKQWNVRRVSRKVGQVWVPKAGWVRFRWSRPVPPDVRSYRVTLDRADRWHVAFAAIPSPVPGPGNGKVVGIDRGVAVSAPLSTGELLHAPSLTALEQQRQRRQERKLARARRGSNRRGRVRLGIARLKARQTDRRKDWAEKTSTDIARRFDLICVEDLNIGNMTRSAKGTLGDPGRNVRQKSGVNRSILASGWGLLVLRLQEKAPQRVEKINPAYTSQRCSACGHVDRNSRESQARFRCTACGFACNADVNAARNIAAGHAVTAREGDGVARPVNREPQLLLQSAR

SEQ ID NO: 31745 - protein, 399 aa, unknown
  TnpB Polypeptide
MKRLRAYKTELNPNNVQRSRFRQHAGVARFVYNWALADRKHIYETTGKSGSMYEQKRRFNALKAEQFPWIYESASRTTEEAFRNLDAAYRNFFRRVKKGEMPGFPKFKSRFRSPKKFTTRGCIHITGKAIKLPRIGWVRMKESGYLPTDESDHVRILSVNISERAGRWFASVQTEEEVSEPNPAQGPPMGVDLGLKALAVCSDGARFENPKALATEERKLARLNRELSRRKKGSKNRDKTKRKLQRCYARIANIRKHAQHQASHYVTAKANPSAVVIEDLNVAGMMKNHKLAKAIGDASMSELRRQIAYKAEWNGVQVMTADRWYASTQLCSGCGQRVEKTLSARIHACPHCGLVLDRDYNAALNLASLVSENGEGPNRPGLPVELGEVQTPTVKQEAG

SEQ ID NO: 31746 - protein, 389 aa, unknown
  TnpB Polypeptide
MVNKGIKLRLYPNKEQEKQLNNMFGNNRFLWNLLLEMQQVRYKLFGLSCMSAYTMDSLVTQLKKVYPFLKLSDSTAFQKLTKSLNTSYWNFIKDPHKYGMPKFKSKRFDEPAYTGKSEHVSVLDKRHIQLPKLGSIKTSKTGVFKDTDQIKEYTISRDTIGRYWVSFSVETGVEPIPLKQPYNLDKVHGIDVGIRYLAVLSDDTEFKPFDFRLLEKEIRKADSKYAKRKNRILKDIEKGLYPGKKLSDFKNLEKARISRAKKYDKLKNKRKDYLHKLTTDFANKYDVLIVENLNIKGMMKNHKLAKSIANAAWCEFFRMLEYKFQWQGKRLIKVSPHNTTQQCSCCGHIGPHIDLGVEYWTCEKCGTHHKRDNNAAKNIRRKGIPLLYT

SEQ ID NO: 31747 - protein, 465 aa, unknown
  TnpB Polypeptide
MTILSGVKLKLYPNKVQRETIEQTFGNSRFVWNQFRNTQEKRYKAMIDDYNQYKEQAKETNQKIINPIYIDAYGMQKMLTILKKDYPWLHLSDATVLQKTLATLEQAYKNFFKKPKQFEKPKFKSRKNRKQTFTGKSNKKKSGQTSVFVAGSRYVYIPKLGFIKVSKTTRINGQIKEYTIIRESFGDYYISFQIEEPDRELIVKTKQLIGGDLGLTHLLTLSNGFKFPKFSPGQALAISLNAQSKASKSAHHNLKVLNTNALSYLVETGAFDMDKLDVSELSEFKNHEKRKKKSAKAQRKVANKRYDYLHKLTTELVKTYDVIVLEDLKVKNMLKNHKLAKVISNASWATFVRLLRYKCEWYGKLFILVPPHYTSRVCHQCGWDSGKKPLGIREWTCPHCHETHDRDVNAAINILYRGLETYLQEQLIVLNEQATNGYFSTVFFQVASQWIHQTIRYFNQALELA

SEQ ID NO: 31748 - protein, 473 aa, unknown
  TnpB Polypeptide
MNKTDERVLEEKMTSTYTLTNELDKFNLSQLIKSFKVRKVRGFISEKQKDNVKTQLKHQTSLYNFTLKYLYDHFGRFNIKRHLADNMTNIQYMVRDIRRSYMLYLTNGAKNRWDIKKTGIHSQAAQEFIGQIIRNFIMYRKTYLIPRSKWSDEAKAQYKVKNGKAWYRAGALKFKDQNETTDVLTLPNNSTIKFPDRNCLYIQSIGHVMVNYDLSNLEPSDIAQVKFRIRGNGDAEVQLVISYEVERKEAETATGYDWGMHENTVWTSNTGEKINLENALLEELKVLERQIQDLDTQMKNHRKGTSKYKKLEKKRQKLYAKHTHKRENQFRHDAIKMLEGTDVIALENLDSFTMRRQGKTSAKNKGFNSKLSVLSPYKQIQFIKQLANRLGKTVLLVDPKYTSQFDYGTSNYRKHELNERSWYNALGELIDRDINAAMNILKWALNPELHGRLIADEEFKKDYEHWSQLVKVY

SEQ ID NO: 31749 - protein, 408 aa, Streptomyces sp.
LIVMQLRYSFRVYPNGPQRSALARAFGCARVVYNDALRAREAARAEGLPFPKAGDLSKLLVTEAKKTVERAWLGEVSAVVLQQSLRDLDTAYRNFFDGLKGKCSRMGAPRFKSRKDHRQAVRFTANAKWKITPGGDLSLPKIGDVRVKWSRVLPSVPSTVTVIKDAAGRYFASFVVETDPAPLPDVEPVVGIDLGLGHFAVLSDGTKIDAPRFLRRAEKKLKKAQRNLSRKAKGSNNRDKARIKVARAHARVADARREFHHQLSTKVIRENQAVAVEDLAVKGLARTRLAKSVHDVGWAAFVAMLEYKAALYGRTFLRIDRFEPTSQVCCVCGTKDGPKPLHVRVWECRGCGTVLDRDVNAAINIAKAAGLAVSACRARVRPERVPAQREEAGTHRDGRPAVVGISGL

SEQ ID NO: 31750 - protein, 379 aa, unknown
  TnpB Polypeptide
MIKTYKYRLYPTKKQTQSLATQIEGHRFLYNQALAQRKETYEQTGKGISYTAQATGLLLKLKKESESLAFCNYSSLQQTLRRLDKSFKAFFRRVKAGEKAGYPRFKSVDRFNTIAYATLGDGCQIKDNRLYLQNIGRIKVKWHRYISGNIKTLFITRRNSKWYVSFIVETESVALPKTGKSIGIDVGLNAFISTSDGQQIPSPKYLYESERKLIKAQKRLSRRKKGSTRRKKARILVAKHHEKIANQRLDFCHKVAYSLVKSYDGFAIENLNIKNMIRNRHLAKSISDAGWGMFLKILSDKAESAGRWYQEVIPNGTSQICSKCGNIVKKSLAVRVHNCPYCGLSLDRDVNAALNIYQKAWIEPSWRGGVVMPLVEARS

SEQ ID NO: 31751 - protein, 428 aa, Geitlerinema sp.
MVLRAFRYRFYPTSAQENLLRRTLGCVRLVYNKALAARTQAWYERQERIGYPQTSSMLTAWKTEEELQFLNEVSSVPLQQGLRHLQKAFSNFFSHLTKYPRFKKKRNGGSAEFTRSAFRWKDGQLWLAKCSEPLNVRWSRQLPKGVEPSTVTVSFDPSGRWHVSLLVEDATVKPLPQAEKSIGVDVGINSLVVTSDGEKITNPRHFNKHYKRLRRAQKALSRKMKGSRNREKARRKVAKIHAKITDSRTDYLHKRCDPAPSHGARERAPRELSTRLVRENQTIVVEDLSVKNMVKNPKLARHISDCAWSEFVNQLDYKCQWYGRTLVKVDKWFPSSKRCGHCGHIVESLPLSVREWTCPECGTVHDRDLNAAKNLLAAGHAVSVCGADIRRSLRSSRSLHPRERRPKGHPSGGQLRKTRKGPKQKPKS

SEQ ID NO: 31752 - protein, 378 aa, unknown
  TnpB Polypeptide
MYKAYKFRLYPNDIQTELINKILGCSRYTYNHYLDKMINNGYTTSYNNIKDFTNTLKYEAPFLQEIDNIIIHKSIYNLGDAFKRNFNQISGYPKFKSKYKRNSYNTPATYTGSSCNIELDLKSRKLKLPQLDWIKVRGYKNIKTINGKIRNATISKEPTGKYYVSILYEMYEKIPGSTPKSIVGIDLGVKKLLTLSDGITYDNNKYIDKYQKRIKRKQRELSRKEKGSKNYYKCKKELAILYSKLANARKYYTHKITKKITDNYDIITCEKLTTKEMIIKGKTTKLSSKINDATFSEIIRQLLYKSKFKGKKFYQVSTYYPSSQICNRCNNQDRKYKDLTEREYNCPKCGEKIDRDLNASINIMFEGLKLYIKSYANT

SEQ ID NO: 31753 - protein, 308 aa, unknown
  TnpB Polypeptide
LQTAYNNFFAKRAAYPRFKSKRGEQGAEFTRSAFRWDGKQLNLTLAKIGHLRIRWSRQFTSEPSTVTITKDCAGRYFATPCLDETVVPLPKTGKAVGIDLGADRLATLSTGEIVPNPQFLGRSLARLATLQRTLGRRKLGSGRWHRQRLKVARWHTHVADSRKDLLAKLTTGVVRRFDLIGIEDLDVKGMMDTRHRARRIADVGRCAFRQMLTYKCRWYGKERRVASRYFPSSKRCSHCHYVLKDLPLAVREWTCPNCGVFHDRELNAAQNLSPAGPAGSARGGHVRPQATRVAGGNARRSVNQPALP

SEQ ID NO: 31754 - protein, 272 aa, Okeania sp.
MQSIKTKLKVNNKQKTILAKHAGVARHAYNWGLATCICEYESSKKRLSAITLHKRLVAEVKSQNPWYYEVSKCAPQQALRDLERAFKNFLTVPKRGFPQFKKKGKKDSFYLEGSIKILKGNYIKLPRIGIVKTYEILPSVPVKNVRISKRAGDWYISFTYDYQANPTTKKRDVIGVDVGINTLATCSDGTPFGNPKAYQQAKKRLTRYQRRVSKKKLGSFNRAKAIKKLARLHKKVVDIRADTLHKLTTWASFEPQQHSHRRFECKWNAQKP

SEQ ID NO: 31755 - protein, 452 aa, unknown
  TnpB Polypeptide
MKVLRQNRYHVKKTHPDYELLLDHMRDSKAVYNFANFLVRQRYFRKIGRNFNEKFLDEFANDPALQSDIRAYLDGDKMLPSLLKRIVCVVARRFDCKINAKVVQNVVDKLHTDWNSFFELLKRKKNGNYDEKIRPPHYKKEAFNLVEYNPQVVSKTKLNNGFIGTAAMKQGILLRRLLPNETVQSFRVYLKNERVLLEVVFVREIVDMPKETGCDGQKIASVDLGVDNLMTVAFNYERRPVVISGMEIKSLNRFFNKEKAKLQSALPNGVYSSRKIRCLLGRRHDEIRNLFGRIANRFIAFLLREGVTKLIVGEAKGWKDAVELGHVNNQNFVHIPFGSLVKILQYKCEEVGILLVTQDESYTSKASFLNNDFVPTYRKIKEGEEKPVYQFSGSRVKRGLYKTKDRVFINADLNGALNIMRKASDLSPEKASSLAYLKRYTHLFPISFECVA

SEQ ID NO: 31756 - protein, 374 aa, Anoxybacillus sp.
MIVYKAYRFRIYPNQKQKILINKTFGCARFVFNHFLAKWNNAYKETGKGLSYQSCSAQLTKLKKEYTWLKEVDSIALQTSLKHLSDAYTRFFQKQNDRPRFKSKKNKVQSYTTKYTNGNIAIVGNKIKLPKLGFVRFAKSREVEGRILSTTIRRNPSGKYFVSILAETDVQPLPKTHTTVGIDMGLKHFAILSDGTKYANPIFFRKLEEKLAKAQRILSRRQRGSSNWHKQRMKVARIHESIVNARNDYLHKISTEIVKNHDIIGMEDLSVSNMLKNDKLAKAISEASWATFEAMIAYKAKWYGKQLIVVAKNFPSSQLCSCCGYQNKDVKHLALREWECPSCHTHHDRDVNASINIKNEAVRLLTAGTAGLAY

SEQ ID NO: 31757 - protein, 466 aa, Halobacteriales sp.
VSDRPQRTNTYTADPVTDRYQECLFDWLAAHAPLWNQINYRRRQQYFDEDGDVWDAEYTDLYDKYAPILGKATCQQLARKNSEAWRSHFELLSLYRDESNQSVTEKPSPPGYWGNRDDGYELHGLVRNDLYTFDWNEQRSTVEFGVGDVLEDRYDFEHNERVTLEVRGDPQWRGDDSRLELIYEEHADQLRVQHPVRIQPDDVQEQRQDAFTHTLNRENTTQSAAIDVGANNTLAIVTEDGDTAVYHARPEFERFQAQSDRIATLQSQLPEDQWTSARIRRIYDERSRKRDHSQNAGIKHAGEWLLERNVDTVYIGNLTDVLETHWSAEVNQKTHAFWSHGQLVTRVKVTLGDVGITVTETGEYKSSSECPVCNSDTVTRAGDSFRCHNCELEAHADVAGAWNILQSEVGPMARPAALSADRGRDAPTDGAYWQWNDHDWTPADFGGQSWSPDQPSVSEPVSSQPG

SEQ ID NO: 31758 - protein, 396 aa, unknown
  TnpB Polypeptide
MRVAYQYKLKPTKVQAAELDRWLSMLCAQYNYLLADRFDWYERNRSPINACPLVCHLPELRDNPDYFSQKKTLPQLKVTHPWYGEIYSQVLQDIVKRVKVTFDRFLKGDNNGKRSGKPRFKSRNRYRTFTYPQIKDSCLQGNLINLPMFGKAKVVLHRPLLDGFKIKTASVTKKADGFYVTLSLEDATVPTVKPDINPNLIVGIDLGLKEFLTTSDNEVVAIPQHYRKAQKRLRVVQKKVSRRNKGSNRRKKAVRQLGLQHKKVADKRKDFHFKTSKQLLSKYDVIACEDLNVKGLARTRLAKSVLDAGWSSFISILISKAENASLLVVPVNPHGTSQNCSSCGVKVPKDLKDRWHSCACGCELDRDLNAAINIKNRAEGMPVLKAQRLLSNSRIG

SEQ ID NO: 31759 - protein, 280 aa, Methanothrix sp.
VVGDYQRLLLENPITGARLILKRGMPYIQIFIVCEVLPKEMEDPVGVDLGTRKLLVASNGFKINGRPVNAKRQHFKALKYSLMEKGTSSARRRLKRLIKREKQWFRTTLHQSSKALVESLDEGNYLVLERLRETKVRMGSKRNLRGTWPSFQSLAIGRLQQMISYKCRDRGIPVILAKPDFTSQRCPRCGTIDKFNRRSQALFRCVHCGYQHNADFVASINLRELALGGWVAVSQPDAVPKSEETASPIQRNNSTMWAADQIQDASKKRNKVKGGAAMAR

SEQ ID NO: 31760 - protein, 384 aa, unknown
  TnpB Polypeptide
MQTISVKCKLQVPIELRSEVDRTLQGFADACNQIYEVAKRENCWNTTKLHHKVYKPVREVTGLKANHVCQAIHRVIGNAKAVKQVHKFRPTSINLDVRTFQYIEDLQTVGITLMCGRVKLKLSIGNYQLALLKGQSPTAATLNKTKRGDYYINICVDLPTNPTGTTPKVIGVDLGRRDIATTSRGVSWSGKQIQATRDRYSKVRANVQSKRTRSSRRLLRRLSGKEQKFQTWLNHNISKQLVQDAKQSNSALAFEDLTNIRQSLNQQPRSKTERRRTNNWAFYQLRLFVGYKAKVAGVPVVFVPPAYTSQTCSRCGHIHPTKGKSFRNSKFFKCEYCGFKHDADINAANNIAALGKSVSLPESPGMSCQLGGQMTLFPTIQICG

SEQ ID NO: 31761 - protein, 247 aa, unknown
  TnpB Polypeptide
MGKLYTIRDACKILQLNPNTLRKWDREGKIRCVRLSNNFRRVPESEINRILGIKNNRMSFIYARVSSHDQKADLDRQIQKLQKHIRNPQKRSKKLKQARGRQRRRIKDALHKQSTTIVREHPDTSFVLEDMKGIRKSGEDKGKKFRTHLNRWPYSEFQKMIEYKSQKKTIYVNPRGTSSECPVCGEKVKHPAWKISKCDNCDRDYDRDRLASLAITLRGIDLCGDPFPVSALASWQSMKNEYLYIRD

SEQ ID NO: 31762 - protein, 239 aa, unknown
  TnpB Polypeptide
LITQVDKQKQIREIPKENTVGVDMGLSDFITTSDDKVIDNLKPFRKKQRQLKIRQRKLSKKQTKSNNRTKQRKSVYRVHRKIKETRKDFHHKTANNLLKDYDLICIEDLDVKGLMRTKLAKSIQDTGWSSFKTILEYKATLLGKSVVSIGRFDPSSKTCNACGNKQDMPLNQRVYRCECGHEMGRDLNAALNILDWGYKKYTVGTTEIYASQIRTHKSKKSQDVLAGSGEEAKCSLDAR

SEQ ID NO: 31763 - protein, 326 aa, unknown
  TnpB Polypeptide
MWKGYFVAIKDWKKNPSKYLGMPKLPKYLPKDGRQVFMLKNIQCSLNDRQFRIAFKPFGGYTVNTHAEGKLMQCRFVPKADYYVMEIVYKIEVPETENIVSERIAAIDLGVDNLMTITTNCDVSPIIINGKPLKSINQYYNKKISEMRSALKLRNDSDWSNEMQRFTTKRNNQVDDYIQKSTKMVVNFCKCNNIDTLVCGYNSGWKQDTNMGKRVNQKFVSIPYLSIVQRLEYKCENEGIKFIKTNESYTSGTSFLDGEEPIEKNYNKDRRIHRGLFQSEKGKYINADVNGSYQIMKKVFPKAFVNGIVDAGSHPVVVNIPLQTVK

SEQ ID NO: 31764 - protein, 395 aa, unknown
  TnpB Polypeptide
MKLTETLQVKRSGELSKLCHLAKNLYNLANWYYRQDFFTLHSYLSYYDLDFILKDKEAYRALPSQTSQQVLKLVVRNWKSYFKALKEYKVNACKFRAKPKIPNYKKKNGESIAIFTNQQCRIKDGRLNFPKSVNLRPIKTRIEGKIREVRVVPLGIAYKIEIVHEKAEMDLRLHKSNILSLDLGLNNLTTAVNNKGLKPFVVKGKVLKSINQYYNKQLACYQSMENLKGNFCDTKRIQKLRVKRNNKINDIFHKLSRAIIEYSKENDLGTIVIGYNERWKQNVNLGKKTNQNFVQVPFSNLVQKIKYKATLVGTRVILQEESYTSKCSFLDNEPIEKRDSHAGIRISRGLFRSSNGTIINADINASYNIMKKAVPNSIAEDGIEGVGLHPLLVAI

SEQ ID NO: 31765 - protein, 361 aa, unknown
  TnpB Polypeptide
MIQKVERHVIRKNNANWQACHKLCSLSRKLGNCAVYLLRHRVFEKASVLTRKELDTELRHQYGSDYRAMPSAASAQRQGQVIAKQFKGFAKAAVEYSKHPEKFQGKPRLPGYKRNYRTFYVGRNGYQIRDYRLTITGGKDIGFSAIRIVCCKHQEFNAKAEEAVTGDLRIIPMGNTFIVELTYRVDKDECKNSKSVSLNPNEALCCDLGIDNFATFVSTKPGIKPFLIKGKVLKSLNQNYNKQVSELRSKGHCEHIRIKGAKRYRQMHDLMHKASHLVIHFCLAHDLGHIVIGVNKDWKKGVHIGKRNNQNRLEHAQKQDRQRLAQNADAKHCAVRQALCHVDRLFQKRLRIARAFAFAGG

SEQ ID NO: 31766 - protein, 435 aa, unknown
  TnpB Polypeptide
MRCLLLFYVLPDNLNGSDNPAMQRLQAFKFELMPAGEQERNMRRFAGSCRVVYNEALALQKARYEAGEKKLGYAGLCKLLTDWRNGAPLPSGRVSPWLKEAPCHPLQQTLKDLERAYRNFFEKRADFPRFKKRGMKDSFRYPDPKQVKLEQGNSRLFLPKLGWLRYRNSREVLGKVKNITVSLFGGKWFVSVQTEREISDPVPKATTAIGIDMGIARFATLSDGSYFEPLNSFRKHEQRLKHYQRVMSRKQKFSSNWKKAKAKVQRLHSHIANVRRDYLHKASTTISKSHAMVCIEDLRVRNMSRSASGTKEVPGKHVRAKSGLNKAILDQGWFEFRRQLEYKLAWNGGMFVVVPPQNTSRTCPVCGHVSAENRQTQAQFCCVECGYTEHADLVGAINVLRAGHARLACGETAQSGRSVKQEPTEAIQEATPCPA

SEQ ID NO: 31767 - protein, 378 aa, unknown
  TnpB Polypeptide
MEQTLTIVVKLEPTPEQCLKIEDTLQGFAGACNYANSKVDAKVTNKNTIQTLVYQEIRALFGLSSNLAVRVCARVAANRKTAKLKKKPVKKFAGTSADYDARIFDYREKDLTVSLTLLGGRERIKFHAANYQLGKLKGKKPTSAQLCKHKDGLFYIHIQVDNETPDPTDSDQVIGVDFGRREIAHTSTEKSWNGKQIQKVRDHFAQLRASLQEKASKGTRNSRRSIRRLLKRLSGSERRFQTWLNHCISAEIINEAKAINAVVAIEDLTGIREDTNKKPRHKTERRRSNSWAFYQLRQFLEYKGIRDGVRIVIVNPAYTSQTCHQCLHIGLRSDKKFGCTNCGWHGDADYNGAMMISLLGGAVSHPESSELSCPIQVA

SEQ ID NO: 31768 - protein, 486 aa, unknown
  TnpB Polypeptide
MNGSYKFRLYPIEQQVKILNDTIETCRHLYNDSLGERSQDWDVSFWNQKQLLVLRKQDNKYYKQVHSQVLQDVLLRLDKSYQTFFKKIMKYPKFKRREKYNSFTYPQYGGFRLKDNKLVLSLIGTINIKMHRIPVGTMKRCTIIRDADQWYCCITTDDGVDKPATKPNTNPVGVDVGLLNWITLSNGKQIQNTLNFEAQAKKIKQLQRNLSRKEKGSKNREKARIALAKAWRQVRRNRDDFVHKTSKLLAEEYTMTVFEKLNITVMVKNHNLAKAIMDATWGKLRLYTAYKVERRGGQVIVVNPRGTSQKCSRCGADTEEKLDLSVRMFECRSCGLVLGRDLNAAINILKLGLEQAHAETEPLLVQQRISKFQSRKQEAHVLRRGWFTTSQTTNNITAPKITPVKSLAFPVIGSESRRNPSVREVKLTTVPRTTSNTNAQSQTIHSLLKWSHCFAFVQLANQRDYTRSIIFQLGTEKINLFSSKQT

SEQ ID NO: 31769 - protein, 939 aa, unknown
  TnpB Polypeptide
MLLSDFSDPSQLYYVPRERLSAFRSNKPVDMRTICRPVKAGSISETDRDLLEELRKAYGKQLGRFHRLFNMRDYRRYVIGDSYRDLRDLIVKDREGVERHLGELAVKVPHGGFRHMVEPKAVIEPLLTGGLQGRHWKCALQQSAGIKERWWRQIQVRAMSEIRARRCFEKFNEAERRYCYQLLSGLSPRFFDMLDGHVPPPVVQSDAAAIKHRHSLCVVMKSTIHSVMGRPPRHRENRSIWFDESSYSVTYFEKDDETRFELMSCQPGQRVFVKVKGRFPCREFIVPAGTGARIPVAHVKKQTIQLVWTDAGLEVHVSIALKKHKPVLDKSRRSLTSYPIQSFGGRLPAKSAFLSEWFDAGHYESVYDASADETIVPLMKKPGATPFCVTVKGRLPMKDKIKRKSGNLEDLKSKYKPVLHFKRGKLGSAMIGIVGNPAAPHWAKPAKGTEFVKFWSCPVKTLTGVCAPVPKTMSGRWFEGSAYTAVRDESRREMTITVSRPKLGHKFSVVVGDNVPIRDLILQADGQTVPCRNRKKPAFRLTYPKKGPVMLEVLLPGSNPVGQVASNDGLLVLVSHNAQVILDRKPVSKWFEPHEYTACHDERTDMTNIVMNGVHDTALTLTVKGCPRIASQRIDRAGRSVLIANPLKAAVRLEVLGCDPFTGGRFAGLRMKVSNRRKTEECPCDSAAWPDRVRAMAFDLGYTEVAYDAQGNRFGEKLGVVLSATSDWLTQKVRIRNRFQAKTRPLPPLPDGTVRPFDAAKAKRILKNNLGSKKFDKRMNAFRSELKRLINESLNRMMDMHEGAVLIFEAFGHTFNFQGLSKVWRRRLSSWVRGEMDERIEFKASERGVRVLYVPAAYSSQTCPECGYTSRKNRKGDRFKCRACGLEAHADIKAAEALLLRAHDSHFTRWTSAAAIKEHHMSEYQAYCAKKGIPEIEEK

SEQ ID NO: 31770 - protein, 728 aa, unknown
  TnpB Polypeptide
MSRIRMMKQDIQCQSWKQGQRVKSKPKHNSMTGKYSMSSSRTSYLVESFSLNSEERIVSRTEKGRKPDPSYKSCIKVISDLSSIVKETGKKVKDVDLETLTLHFGNYVQAVNMLLSRIYSSPKRVEQLGKGLAEYTGRAYTLLRREKDLCYEHNEDIKELVFERLHRNVLEQTGRMLLADWTRRRLFITALKVLNESPEDTLALLRRKRIPPFLIRKVRDFCESTKNNGSGYHYTMGVLRQLRLTIDRHILDTLDIKIGWRARQRKKVTLLLKDNSALYDRLVDMVTKLVKQWVQKGYPFTAPQLRNHSLDFSASTENSIGQGYWFTQDSERENEILLHLKIPPGIDGKRHDDSPFKERTLTFRFLDWLPSAAISDRRKAENAKENGEIHQDESLTFRAAKFEDMHNQLMNTIQFQHTAHRLTKMKQRKGTDPEEIVRLQEQVKQSKVSRRSAPPRLLLRGHRVTLQIPFLSPNGSVSSEVFGEREYTAKAGADRGLRAPVALSVEKEDETFEDLLITVGHLVKKRERIKEFVSALISEVTLKKNNWDKKRSGQSYPTQILRQDRQIAASWRKIRRLDLEIARQVASSTVWFCEEHRVKKLFFEDLRSFQAHAGSRDLAYNLSSNLWGKIIDTVRYMRESLSHSKYSVWTVNPRYTSQTCHQCGERGIRVQDETSTTERKGGEYFYCEKCEEHFHADINAARNIIHVQDSSAAPGRTKDSCPSLSTLQ

SEQ ID NO: 31771 - protein, 403 aa, Rhizobiales sp.
MLIHRANVYRLDPTPEQSSAFDQWAGACRTVYNLALEQRLTWGREHHLSYSQQQGEITGLRAEIDWIKAVPVHALQMAVRALDNAYQRFFLGLGEYPTLRKKFVNDSFTLPDPSYLDFRRLNKNRGAVKVPKVGWVKLIGYRPLGGELRSITISRKAGHWYVSIAWRKEVADPIPANLPSVGIDRGIAVFVALSDGTKIKPLNAFKTIRSKLAKAQRRLSRKQKFSANWKKQKAKITRLHRKAANARKDFLHKRSTEIAKSHGIVKIEKLQVKNMSASAKGSVESPGRNVKAKSGLNRSILDQGWSMFATMLRYKLEQRGGQIVEVDPRYTSQACAECGTIDRANRKDQATFECVACGHTDNADVNAARNIHQARSLAVEPPKRTLRRVGKRKQLSEATIVAA

SEQ ID NO: 31772 - protein, 337 aa, unknown
  TnpB Polypeptide
VAFGSAVAGVAQRRGALEARLWPLLPEAGPPPNPAWPGRRPVRVANERTVPLRTAGRWRLVIGTRKHPVGALRYVADRPHAEPASICVSIDAGRWHVSFATEDAALDPSPDEIRAELSAWTEADLMRSAIGIDRGVAVPAYASTGEIHDFDPVQKCRMAKKARRRLRWQRRMARRTRGLSGWRKARRQVARSYTYANNVRRDFAHQASHRLVGTPGIHLLVMEDLKVQAMTRRPKGKQDQAGRWMRNGARAKSGSIRPCCTAHGGGYAPMRSTRPPRTMSCSWLFRRTTVRRNVPHAATFTPTTGSAKAGLSADAASTPTTRTIMPAGSSPGVASSP

SEQ ID NO: 31773 - protein, 369 aa, unknown
  TnpB Polypeptide
MKRTISIRLDITPEQNTKLFQLQEAYMVACNQIVPDVIAARCWNRVALHGLVYSKIRKTSPLGSQMVCNAIYSVCKAYQAKSVLPKEEIPQICFRKERSVHFDKRTYTIKNGIISLYTLGKRIKVPMRFGQFQKDYFSKGVPKEGELICKKGRWYFNLVLDFPDPPLQTDTGLLGVDLGENNVFATSTGKIVSGSKIRYERDQFLAKRRALQSNGSQSAKQLLKKISGRENRRMKHINHKLSKEIVQEAIEQKAGIIVLEDLTNIRKRIKAGKRMRTRLHRWGFRQLQLFVQYKAEAKGLSVLYVNPAYSSQTCSVCDCLGVRERHLFKCSCGNQQHADSNASKNLCRFALGTPEATCAVNRTQVAVKC

SEQ ID NO: 31774 - protein, 215 aa, unknown
  TnpB Polypeptide
MSASTWASRISSHCQPARRLATAVSYTHLTLPTICSVEKNVMRQQKILSHRTKGSNRYQKQRLRLEQAYVKLKHYRENFQHQLSHRLIEENQFIGLETLAVRNMVRKVKPKKSPDGRYMRNGQNRKRTLNRLIHSASWSQLVELLRYKAEWYGRTLVRVDRFYPSSKLCHKCGWKYSELTLSEREWTCRNCGTRHDRDVNAAKNILTEAKRLSTP

SEQ ID NO: 31775 - protein, 437 aa, Cyanobacteria sp.
MLTMNYTYRIYPDAAQETELLQWLETCRGVYNYALRELKDWIASRKSPIDRCPLDKEYIIPADAPFPSYALQQNNLPKTKKQFPHLGEVHSQVLQTTIRRLHDTWEAFQKRGHGFPRFKKFGQFKSFVFPQFKTNPINGLTIKLPKIGAVRINLHRPIPEGFKVKQVRVLSKVRGTQWYVVVTIESDVSVPDAPVHGRAIGIDLGLERFLTASDGSFQERPKFFTFVQRQLKLLQRKAAKKKKGSKNWEKAQIEVARMHHRIANRRKDFHLKTAHKLCDQAQTIFAEDLNAKGLTRGMLRKDCVDAAFGPFLSLLEWVCWKRGAFFFKVNPNGTSQTCPACLATVSKTLEVREHHCPECGYRVHRDHAAAEIVLYRGLEQISSQGLWQTETACQVGLSGVYDLDKWRRAGMSSCEVGSPRCTASAVSVGRMSRWFRG

SEQ ID NO: 31776 - protein, 492 aa, unknown
  TnpB Polypeptide
MAKKEQVYHRSFQIQIKPGHKLYDYFVQNCMNAKNLYNATNFHIRQIYSAYKSPRPLHALQQEVLDHVDEFFPSMNEVQRKAHEKRLLKQQEKMQKGESVKKPSTLNLFVKPNKEKSFVDYNFLDAYFKASKNVDYKSLSAHTAQAMMKKAYDAWKSFFEANKRYNTSEENKEKFSGRPKIPGYKKQDMTTTYFSNQECVIKDGKYLKFPKTKTHLNIGKLGVLSDGQKLVEVRVNPYAAIFIVEVVFAYKEKNETPQDYIDGGNTLSIDFGLNNFAACVFSEGQTPFIINGRGLKSVNFYYYKKRQHLVSTLRIGKKDQSGQHTSKRLQRLDLKRRNKTRDFYHKASKEIIERCLQNDVKNIIVGKNVGWKKNASMGKSSNRDFCHVSHAMFVDILKYKAEQKGIFFAEVEESFTSKASFIDKDFLPVHVPGEKNKHTFSGTRVKRGLYIAKNGTKLNADVNAAYNIMRKLSSRNFEGVEACVTQPQKIGL

SEQ ID NO: 31777 - protein, 417 aa, Metallosphaera sp.
MWRARGKSDKIQLSFKYRIYPTREEKLLRVMQVEAKVYNALLDAVNNARKEGRRMTPKDTQDMLKDLKIEGKELVYSKALQMVNNQLWYNINSLHELKKRGRRVGKLRYKKIMKIINYNQSGFKVVGDKLILSKIGEMKVLFHRPLEGEVKGVIIKKSATGWYAIFQVEVEKKPLEKTGKVVGIDLGVEKLVTTTDGAVVENPRVFDEVEKRIKILQQLLSRKKKGSRNYEKVREKLAKMHEHVKNLMNDHIHKVTSWLVEQYDEICVEDLDVKEMVEDSESKVLRKHILHTNFSKFVSYLSYKAERAGRRVVKVDPRNTSKTCAKCGHVKKDLTLADRVFVCPKCGWVADRDYNASLNILRAGSGLPLEPVDRKPLLYIPFSEGVYSKFPGRSRKSSSRGGDAPSVTVDPKSYYEK

SEQ ID NO: 31778 - protein, 265 aa, Metallosphaera sp.
MLKGWRRAEKGRASLRKPRLKKVYVRVKSTLRKVDGENVRITVRPYEYLTLSWSHTWFSPRVKGLELGEPVIKEDKVHLPFRYKLPWSTPLDYLAIDSNLYTLDAYDGEKFVTFSLRELYSLKFGMELKRGRIKSFASKHGRKGELLSRKYSHRERNRVRDHVHKFVNELLEMYTVTTIAVEKLNKQDMFQEADDRLSKKISRTVWRSIHRALKYKAPLYGSLVKEVNPHLTSKSCPRCGRISRKVGLFVVRGVVSPWIDNSTHP

SEQ ID NO: 31779 - protein, 291 aa, Metallosphaera sp.
VYKTLRHELEEVNVLASHYADKAISDAYSVLRSWKRRAEKGRASLRKPKLKRVYVRVKSTLRKVDGENVRITVKPYQYLTLSWSHTWFSPRVKGLELGEPVIKEDRVHLPFRYRLPWSTPLDYLAIDSNLYTLDAYDDEKFVTFSWRELYSLKFGMELKRGRIKSFASKHGRKGGKLMGKYSHRERNRVLDYVHKFVNKLLEMYPVKTFAVEKLDKQSMFQDADDKLSKEISRTVWRSIHRVLKYKAPLYGSLVKEVNPHLTSKSCPRCGWVSRKVGLFVVRGVVSPWTGN

SEQ ID NO: 31780 - protein, 410 aa, Metallosphaera sp.
MPDVGLRFRAYTGEQTLRALKAQLKLACEVYNTLRWADIYFYQRDGKGLTQTELRQLALDLRKQDGQYQQLYSQTAQQLADRYYEARQRFFEGLARYPREKRAHKWYSLVYPQSGWKVLRVREIRTKSKKNKKKVMTLRLSHLGIFNVIVHRDFPLDRVKRVVKLTRSETVYISFIVENYEFPKLPSIGKVVAIDIGVEKLLTTSDGEYVPNQRPYEKALNKVKRLHKALSRKKFLSRNWFKAKIRLARAHEHLKNLRMDMYMKLGKYFAEHYDVLVMEDIQVKQLVGKSLRRLRMRLHDVAIHELRSVMEYQLGKYGKKLTLVDPAFTSMTCARCGHVKKDLTLADRVFVCPKCGWVADRDYNASLNVLRRSGSERPLVPVELRPLPFGQASALKQEAPSVTVDPKSPP

SEQ ID NO: 31781 - protein, 366 aa, Metallosphaera sp.
LRLKSFQPEEEYVYLTYSMKNDEGEESRVLLENYSVLLQRALDWLWERIKVERKEVKKGKKTFTKVKITLPEKKGVYRTLRDELEKINNLASHYADKAIRDAYSVLKGWRRRAEKGRASLRKPRLKRVYLRVKSTLRKVEGETVRITVKPHQYLTFSWSHTWFSPRVKGLELGEPVIKEDKVHLPFRHKLPRFTPLDFLAVDSNLYTLDAYDGEKFVTFSLRELYSLKFGMELKRGRIKSFASKHGRKGKVLMRKYSHRERDRVLDYVHKFVNELLEMYPVTTFAIEKLNKQSMFQDTDDRLSKKISRTVWRSIHRALKYKAPLYGSLVKEVNPHLTSKSCPRCGRVSRKVGLFVVRGVVSPWTGN

SEQ ID NO: 31782 - protein, 348 aa, Metallosphaera sp.
LKNDEGEESRVLLENYRVLLKKALDYLWERIKVERREVKKGKRVITKVKVTLSKKEEVYKSLRDELEEVNVLASHYVDKAISDAYSVLRSWRRRAEKGKASLRKPKLKRVYVRVKSTLRKVEGESVRITVRPYEYITFSWSHTWFSPRVKGLELGEPVIKEDKVHLPFRHRLPWFTPLDYLAIDSNLYTLDAYDGEKFVTFSLRELYSLKFGMELKRGRIKSFASKHGRKGGKLMEKYSHRERNRVRDYVHKFVNKLLEMYPVTTFAIKKLNKQEMFQDADDKLSKRISRTVWRSIHRVLKYKAPLYGSLVKEVNPHLTSKSCPRCGRVSRKAGLSGVRGVGSPWTGN

SEQ ID NO: 31783 - protein, 409 aa, Metallosphaera sp.
VERTVKLRVRVDHKTYSALKEVEEEYREVLEDAINYALSNETTSFIRIKAGIYKTEREKYKDLPSHFIYTACEDASERLDSFEKLKKRGRAYTEKPSVRRVTIHLDDHLWKFSLDTISISTKKGRVFISPTFPKIFWRYYNKGWSIASEARFRLMKGNVVEFYVIFKKDVKPYEPKGFIPVDLNEDSVSVLVHGKPTLLETNTKKITLGYEYRRKLTTTGKPTKDREVRGKLKRLRERDKKVDVRRKLAKLIVIEAFESRSAIVLEDLPGRTPEHMIKDVKDKQLRLRIYRSAFSSMKNAIIEKAREFGVPVILVNPSYTSSTCPIHGTKIVYRPDGGDAPRVGVCGKGKERWHRDVVALYNLKKRAGDVSPVPLGSKESHDPPTLSGWLRAKSLHSIMNEHKMIEMKV

SEQ ID NO: 31784 - protein, 350 aa, Metallosphaera sp.
LRDELEEVNVLASHYVDKAISDAYSVLRGWKRRAEKGRASLRKPRLKKVYVRVKSTLRKVEGEEVRITVRPYEYLTFSWSHTWFSRRVKGLELGEPVMKEDKVYLPFRYKLPWFTPLDFLAIDSNLYTLDAYDGEKFVTFSLKELYSLKFGMELKRSEIQSFASKHGRKGKELIRKYSHREKSRVRDYVHKFVNKLLEMYPMTTFVVEKLNKQSMYQDANDKLSKKISRTVSRTIHRVLKYKAPLYGSFVKEVNPHLTSKSCPRCGWVSRKVGRTFRCERCGFTLDRQLNASLNIFLKMCGFPHLFLTPSGSRWVGVIPLRGRRGVNGAMPRDSGEAQGLRIDIKYYEIL

SEQ ID NO: 31785 - protein, 259 aa, Metallosphaera sp.
IFNVIVHRDFPEKVKRVVIKLTPSGRVYITFVVDQEYQLPKTNKVVAVDVGVEKLLTTSDGEYVPNQRPYERALNKVKRLHKALSRKKFLSRNWFKAKIRLARAHEHLKNLRKDMYMKLGKYFAEHYDVLVMEDIRVKQLVGKSLRRLRMRLHDVAIHELRSVMEYQLGKYGKKLTLVDPAFTSMTCARCGHVKKDLTLADRVFVCPKCGWVADRDHNASLNVLRRSGSERPLVPVELRPLPFGQASALKQEAPSVRAG

SEQ ID NO: 31786 - protein, 334 aa, Metallosphaera sp.
MITIPNMVNWRFNKVSVNVLTHKGWVEIPLMVTRQLIRYLHEGWRVSQELKLRLVGRKVLVWLTFEKEVEVDTKDGNHISIDVNENNVTVAVFEGLKLKELRRYETGLGRIVVNYSLRREEITKGHSTKDELIKKKLRKLRERERKTDVLRKTVKRITELARSLSAKVVVGKFSSRSKEKMESNKNDKLRHRIHQWSVVKFLEMLKTQPIEVAEVSESYTSSINPFNGEKLRKRKQTVEKVIRVFNPHLMTGSAHEGGGVKVLKVNARYLESGEVLLERDSIAPLNLVRKVDGRVVVFPSTSPNELRVTLYDPSRGVPVAELEVIKSKEKLRHG

SEQ ID NO: 31787 - protein, 413 aa, unknown
  TnpB Polypeptide
MLVTFCTEYRRMTKLILDDVWDNGYEYTNDDGVTHRFCVAENKLQAPLYIDYKKYSDLTFLSARTMSSLTNQLCGILKTTVEKQHKRVYVLSTKKGTSRKSYRLLVRKIKTNIPQKPCVDSIRPELSSKCAEWIQEDDPNAEFNGFLRLKSITKYGDEIILPISFTRHSNKLNSLGGRMMGSFLIGQRTVDLRWSIPKPELKTEGVTVGADQGLKDVITLSDEQKAGKTDKHGHTLDTILDRMCRLKRGSNAMKRAQAQRENFVNWSLNQLNLTNVKEVRLEHIWNISYRHRTSAKLSHWTNTLIRDKVESLCELNGVRLTLSASTYMSQRCNACGRVRKANRKGKVYMCDHCGNEVDADLNAACNHALNLPEVPYTLWKLQLNRKGFFWNLNGFSDAEGRSLEFLPPVEQSA

SEQ ID NO: 31788 - protein, 400 aa, Actinomadura sp.
MRTAYKCRAYPDPEQAAMFGRTFGCARLVWNKTLAERRRAHHTEGRNIPYKETDAALTGWKKTEDLAFLSEVSSVPLQQVLRHQYTAFTNFFAGRAKYPRFKTRTGRQAAHCTRSAFRMRGGELRMAKTTGPLAFVWSFDDVDVAALDPTMVVVSRETGGRWYVSFAIDTCAPEPAPPTGRELGLDLGVEHFAVTSEGERIANPRHLERKQRNLARYQRRMARKQPGSANRRKARTKVARAHRKVRHARQDFLHRISTALVREADMIVIEDLTVANMVRNRKLARAIAVCGRGEFRRQLEYKAERAGRTLVVIDRWFPSPKTCSHCGHVLDELKLSTRRWTCPGCRTRHDRDINAAKNILAAGRAVAGVPPGDVCGVDVRRQGPSLPQPATKQKDPRREP

SEQ ID NO: 31789 - protein, 381 aa, Kouleothrix sp.
MARKAFLYRLYPSCTQARLLDATLETCRLFYNDCLAERKTAYGERGEQVGKFEQLRQVKGRKATNPYAKNVHSHVLQTVVQDLDKAFDAFFRRVKAGEKAGYPRFKGRNRWHSFGFKELGNGFKVDGRRLKLSGIGRIAIRWHRPIEGAIKTLRISKKAGKWYAAFSCVVDDSTHARATGEAIGIDVGLASLITTSNGEKVDHPRFYRTAQRKLRVAQRRVARRAKGGKNRRKAIAILQSQHEHISNQRKDFLNKLANDLTNRYDRIALEDLTITRMVHGNLAKSILDAGWGYLVQRLTHKAESAGRVVVLVDPRSTSKTCSQCGHSFESLSLSDRWIDCACGLSLDRDHNAAINILNRGGQLRWGISSPVGGLPQEAAGF

SEQ ID NO: 31790 - protein, 398 aa, Hydrocoleum sp.
MVGNYFLSLTKLSASLNWKRSTKRTIITKFYIRSSAQQILRTVAESFRSYYGLIIAYTEGKVSDRPRIPKYRKKGGMATVSYPKQALKLKGNKIRVPLGNTCKRWFGLDCFEIPMPSNLQFLSLRELRILPRNRCFTQEFVYEKEVVVKPLLNQENVLGIDHGVNNWLTCVSNVGTSLIVDGKHLKSMNRWYNKQISTIKENQPTGFWSNKLAAITEKRNRQIRDAINKGARIVINHCLKNAIGTIVFGWNKGQKNEIKLGKKSNSEFVPIPTARLKERIAHLCYEYGIILIETEESYTSIASFLDGDNLPIYGEKPDDWKPSGKRIKRCSAVLGVSPMSDCIKKRGLYRTGNNWLINADCNGAANIITKVSRKLGLNLSQLCRGTMKLSPENISLVS

SEQ ID NO: 31791 - protein, 401 aa, unknown
  TnpB Polypeptide
MWLRYNYRLYPAPGQQIALARAFGCARVVYNDALAAREAAHEAGEPYPTDAQLSARLTAIKATPERAWLTEVSAVVLQQALADLNTAYRNYFASRTGTRKGPKTDKPRFRSRKNNRQTIRFTANARFKVLPNGKLRLPKIGDVPVRWSRPLPSAPSSATVIRDSAGRYFASFVIEARAAPLPPTAQVVGIDLGLNHFAVLSDGRKISAPQFLRRAEKGLKRRQRELSRKQKGSANQHKARVKVARAHARVADARRDFHHQLSTALIRDNQAVAVEDLAVKALGRTRLAKSIHDAGWSAFVAMLEYKARLYGREFHRVGRFTPTSQTCSVCAVKDGPKPLHVRAWQCRVCGAWLDRDINAAVNVARAAGLAVTACRAQVRPEPVPARRGEAGTHPKSCLRAV

SEQ ID NO: 31792 - protein, 382 aa, Lactobacillus sp.
LDQSVVIKAQLLNIDDETAQAFSNTMCKYRDACNFISQYIFEHAFELKQSKLNKALYHNLRDKLELKSQMAQSAIKTVIARYKTVKTQLFQHPFRYDTGKKDGKGRGIWAQIYRDLTWLWQPINFKRPQLDLQRGRDWSYLSAANQLSLNTLNGRRKVDFVCKGFDQYLDQTKWKFGSLKMLQLRGKWYIHLSATTAIPEFEAEQAVHVVGIDRGLRFLAACYDEKGKSILFSGQKILRKRRKYKKLRAELQAKGTKSAKRRLKKIGQRENRWMSDVNHRLTKTLVDHYGSNTIYALEDLTDVRFATKKSPKDQRYEIVSWAFYQFEQFLTYKANLNSFAVVKVPATVSAVLNVDVSTKITEIMNCISILAINVATSPMMIV

SEQ ID NO: 31793 - protein, 409 aa, Lactobacillus sp.
MKRMSSLAYHFGIKLRFYPSSKQKKIIKLNYDAQRFVYNSYAGRNRTNYHARRFLAINQGQAMPFAFPILNDYEAKLAETVVANDELLAKPKNIRDAYSFLRVKEIDSLALANAIQNYRKAWNHYRKIGHGIPTFHKKRSDWSYQTNCQYPKQKEAYLDNGTAKFIDAKHIKLPKLGVIRIAGLRKLIKERLLKHVSTRIGTVTIKKTAGDQFYLSMQLGSDIAFAQKLPKTQSQIGIDLNLDNFLTDSNGAMVAKPRFYRNAKKKLAHAQRVLSRRQREDFLQVLSTALIKNHDLVVAEELRSKNLLKNHALSQAISDVGWRRFLNMLAYKAKLYDKEFQTIDPKYTTQRCHNCGTIMGQNGCRKLKLKDREWTCPMCQTYHIRDWNAAVNILEKGLGSWQNPKKQTA

SEQ ID NO: 31794 - protein, 448 aa, Cyanobacteria sp.
MAKAKNAIGVQQILLHPDKQTKAVIEYLCQQSGKLYNKGVYFARQIFFKTGKLLSGKFDLIYEPSVSKSMVAQSIPSTPMQQTLMSVAETFKSFKGLRDLYFKGELHFKPRPPNYLKGSKLFKVTYPNSGGQKPVLVDGSLKFSLGLTVRRWFGLSEFYLPMPSNIELSVVKEFTILPKNGAFYLELSYEIKKEKHDLDIRRALSIDLGTADNLAACVDNLGNSFLVDARAMKAMNQLWNKKVATRKEGKKEGYWDIWLDRITRKRNHQMRDGINKAAKLIVDHCLKYGIGTLVVGWNQGFKSDANLGRLNNQKFVQMPLGKLKERLQQLCDLYGIRFVETEESYTSQASFLDGDSLPKYGEKPLGWKASGKRISRGLYRAADGSIVNADLNGAANIAKKVSGNLGLDLGLLRRRCLTTVARVRLWQTPKPPLSAESQRMQDLRVSTF

SEQ ID NO: 31795 - protein, 121 aa, Blautia sp.
MEVEKINHVIIEHTPAGKYFAVLNVDFEPEPRLNAGGTIGIDVGIKAFYSDSNGNTVSNPRYLERSMRKLIREQRRLSRKQKDSHNREKLRIRVARVYEKVTNQRNDFLQKQSTMLVRENQ

SEQ ID NO: 31796 - protein, 376 aa, unknown
  TnpB Polypeptide
MLTGRKFAARFKNSSAREAYLTWSAGQMFIYNECVLEQRFFDSLSRLIAETERHKQPIRNECRIARPKPDQKYAHLVDKAQRPWLSQVPSAILGIGAFRFCQASKRAATGLAARPKLRAIKDAERHLLLTRAYFTIAPSGRTGWYELRFGSARIPGGTILFRAHREFVVPAMVSVTLTSKALFVSMSYEETEQERFPETEKEILERLRQYSEEELIACGNGIDRGVVRPVQTSNDPEPYALTKDQLERIRRKERQRKHYQKRMARCEKGSRNRAKMRRKVARTFDYRKNVINDFAHQTSHALVSDDKVQFFVLEDLRVKNMTKRPEPKYDDNAKALPNGARAKAGLNRAILSSGWGKTEEYLKYKAKKGGQTCHKG

SEQ ID NO: 31797 - protein, 383 aa, unknown
  TnpB Polypeptide
MARRGNKAIRATVSMKIALSEPLLALVNNYVKALRFALFWLKENVPNPNEKGVLSKVHRGLYEKLKEEYNLPPKVAVDCYREALSVYKGWYNNPRRGRFPRVYRPTVWLTPGASYNVDFEAMTVRIASVGVLPILGYPRNLKEYSSWKMKEARLVVRDDKAFLKVVFEKPIEEKVEPKESIAVDINMSEIVVGKDDTHYVRIPTRLDEVHHWKSLAESLQRKYPRRWRENKRILQRIRSFHLKARRVMEDFARKVGRWVVDVAKRMGANVIKLENLRNLIKNVDKLPKEFRDKLYLMQYRRIQYWIELQAKKHGILVQYVNPSYSSVSCPKCSKKMVEVSNRWFKCSCGYENDRDVIAVVNLNGRGSLTLSTAPRMRDVIPNR

SEQ ID NO: 31798 - protein, 542 aa, Nocardiopsis sp.
VGTDQRGLRPIADPYPVSGPTGVAVRTRLKHLTAQDEKVLRLVGAHLGSLAAIDLKARCADDLGHDSASWAERKRALTPESSSRWAGSITKATHDQWALARRSQVAHLRSVEAGITTIRHRLSLPVGTKGTKKKPGGYRSRQEWHAKSRRLATLQDRLAVVRDDFEAGVVRVVRGGKHLARKRHHLADAGLSESSWRERWQAARWFLQANGETGKRFGNETIRVTPQGEVSIKLPAPLAGWANAPHGRYLLSGTAVLAHRGGEWAERVAANRAVAYRVHLDVDRGRWYLTASWQIAAPSQVPLRAALAPGVIGVDMNADHLAAWRLDTHGNPIGDPRRFDYRLSGTAAHRDAQVRHALTRLLRWAHGCGVRAIAVEDLDFTDAKSREKHGRRKRFRQLISGMPTARLRARLTSMADTTGITVIAVDAAYTSRWGAQHWQRPLTGRKPRTSRHAAAAVAIGRRALGHAIRRRMAPPPHHRSDGAGHRTVQAGPCGPGREGDRPRACGPRTRSDGARRGQNAVDHNAQDRSGRWAEHVQLMLRL

SEQ ID NO: 31799 - protein, 429 aa, Micromonospora sp.
MIRHRLSLPVGQRGTKGVPGGYRSRQEWFAKSRRLHVLMQRLERERAEREAGLVHVMRGGKRLARNRHNLAQAGLTGAQWRDRWEAQRWFLQADGESGKRYGNETIRVTPGGEASIRLPAPLAGLANAPHGRYVLAAKARFPHRGQEWVDRIETNRAVAYRIHHDARRGRWYITASWQYAPTKTVPLQAALADGAIGVDTNADHIAAWRLDVHGNPVGNPRRFHYDLSGTAEHRDAQLRHALTRLLNWVKVCGVKAVAIEDLDFEAEKTREKHGRRKRFRNLISAMPVSKLRARLTSMAEAPGIAIVAVDPAYTSKWGAQHWQKPLTSRTRTATRHDAAAVAIGRRAQGHPIRRRTAPPPAHQSDGQGHRTVQAGPGDPEREGTRPRNLGPQTRSVRAGYGANAGDQRAQHRSGHAAEHTQLVLSPQER

SEQ ID NO: 31800 - protein, 385 aa, unknown
  TnpB Polypeptide
MAKAIIKSFRFRINPSKAQSAKLENTLNLCRELYNAALAERRDAWKLNRINITRFDQDKQLPEIKQTNPEYKEIHSQVLQDVLKRLDKAFQSFFSRVKQGVKAGFPRFKGKNWFDSFCYAQSGFNVSGNRLTLSKIGKVKIKLSRQIQGKVKTCQIKRELNKWFVIFTVETAIEPLPKTGESVGLDMGVSAFVTLSDGTQIDNFKYYESTQKKLRVAQRSISRKKKGSNRRRKAVLKLRKIHQKIKNQRNDFQHKVSTYLVKTYDLIAIEKLSILGLSRGILAKQMNDIAIGNFFQKLEYKAANADKELIKVQPHFTSQDCSSCGNRVKKDLSVRVHYCLVCNLRIDRDFNAAINILNLAVGQTVKGSKWNNSSCLPLESTSNLL

SEQ ID NO: 31801 - protein, 187 aa, Clostridioides sp.
LGIKEFCISSCGEFIENPKYLKKSLNKLAKLQRELSRKTIGSLNRNKARLKVARLQEHIANQRNDFLQKLSTKLIKENDIICIEDLQVKNMIRNRKLSRLISDVSWSEFIRQLEYKANWHGRQIVKVGKFFASSQICNKCGYKNEEVKDLNIREWICPSCNEIHDRDINASINILKEGLRLITIQNK

SEQ ID NO: 31802 - protein, 419 aa, unknown
  TnpB Polypeptide
MLKSYKYKLIPNDNQVVLLNKHFGSIRFVYNHFLNERKVKYEKNKESLNYNDNSSSLTKLKRLDEFKWLREINSQSLQVSLKHLDDAYNSFFKKRTGFPKFKSKHTKDSFKIPQYVRVIGGRLLIPKFKTGIKIIQDRKFKGKIRQCTISKTITNEYFVSILVETTHSVVSKTGENIGIDLGIKDFVITSDGYKYKNNRYTKTYAKKLKKQQQHLSRKVKGSNRYNKQKLKVAKIHKKITNSRVDNLHKVSTDLIRKYDIIFLEDLNIKGMIKNHKLSKHIADVSWGKFIDMLNYKAKWNDRQIVKIGRFFPSSKTCNCCGYINQNLNLGIREWVCISCDTKLDRDLNASKNILKEGYKIISSSGTDDNRCGDEIRPTLVGKIYETSKKKKPSVSETHTTVQCSSYINKLKSKTIECLR

SEQ ID NO: 31803 - protein, 226 aa, Geobacillus sp.
VRFKAASSRPPFVAIEQGSISSPSSWKRTFPHCPNRQESGRRFGVETDRGAFHRRKIEHPRYWRRYEEKLAYWQRVMARRKPGGSNWEKARLKVAKLHEKIANCRNDFLHKLSTRLIRENQVVCVEDLRVRNMQKNRKLAKSISDSAWGRFLNMLEYKATWYGRTVVRVAYTFPSSQLCSCCGHRQVEVKSLGIREWVCPSCGAEHDRDHNAAWNILNEGLRLLSL

SEQ ID NO: 31804 - protein, 478 aa, Mycobacterium sp.
  misc_feature (391)..(474): Xaa can be any naturally occurring amino acid
MARLKVPEGWCVQAFRFTLNPTQTQAASLARHFGARRKAFNWTVTALKADIKAWRADGTESAKPSLRVLRKRWNTVKDQVCVNAQTGQVWWPECSKEAYADGIAGAVDAYWNWQSCRAGKRAGKTVGVPRFKKKGRDADRVCFTTGAMRVEPDRRHLTLPVIGTIRTYENTRRVERLIAKGRARVLAITVRRNGTRLDASVRVLVQRPQQRRVALPDSRVGVDVGVRRLATVADAEGTVLEQVPNPRPLDAALRGLRRVSRARSRCTKGSRRYCERTTELSRLHRRVNDVRTHHLHVLTTRLAKTHGRIVVEGLDAAGMLRQKGLPGARARRRALSDAALATPRRHLSYKTGWYGSSLVVADRWFPSSKTCHACRHVQDIGWDEQWQCDRXXXXXXXXXXXXXXXXXXXXXXXXXXXXXXXXXXXXXXXXXXXXXXXXXXXXXXXXXXXXXXXXXXXXXXXXXXXXXXXXXXXXVTAI

SEQ ID NO: 31805 - protein, 206 aa, unknown
  TnpB Polypeptide
MFFFLIIQTTIIKERDKWHVVFSCEIEKEKPKVKIDPKKTVGIDLGLKYFANLAIGRDNHFVTIENPKYLRKALKKLSNLHCYLKNLRLDFFHKLALTIVKSHDIIGVEKMNIKAMMQGLKTLSRAISDAAWGMFLNCLKNKAFEYGKNLYEVSSFLASTQLCSKCGQKKEMKLGQSKYSCECGQNIDRDHNAAINIKNLAVGMTV

SEQ ID NO: 31806 - protein, 423 aa, unknown
  TnpB Polypeptide
MRKAENKDYRSYIIATAKPTERLNSINRLGGRIYSKTVSLTQKTHDTKGFWLSDSGLKKYLKFKDYPCHAHSVQAVIDDYCGARRSFFSHRPNNKDARPPFKRKWYHTFTWRASGISYKRGKLRLSMGRGREPLWIKIDKNFYKKVPAEVSLVYNRNTHTYEFHATYQTQPKKHTPKPNNVVAIDLGEIHPIVSFDGIDSEIYNGRYLRSLTQYREKFKAKINHLLSRCKRGSRRWKKLKRAKNRTLHYLNNLIRDVRHKITSRFVSTCKAKKVETIVIGDIKHIRESINYGKKVNQKLHQWAFGEFRRMITYKAKAVGIKVDTQDEAYTSQSCPSCGNRKKPSKRTYYCSKCEWQGHRDVVGASNILTKYQGFLFNPVVGAVVSPVGIRYNPNLCRLEKDWSPFSGLKSSKPPTRKQRSTRL

SEQ ID NO: 31807 - protein, 377 aa, Serratia sp.
MMKRAYKYRFYPTPDQVQLLAQTFGCVRFVYNSILRWRTDAFQERQEKIGYAQASSRLTTLKKTPEFSWLSDVSCVPLQQSLRHQQTAFKNFFAGRAAYPAFKSKRHRQAAEFTASAFKYVDGNLFMAKSKAPLKVRWTRPLPSAPSTVTLSKDNAGRYFVSCLCEFEPVSLPVTTSTVGIDVGLKALFVTDTGFKQDNPRHTAKYAKRLALLQRRLSKKQKGSNNCAKTRMKVARIHAKIADCRLDNLHKLSRKLINENQVVCIESLKVKNMLRNPSLSKAIADASWGELVRQLRYKGEWSGRSVVAIDPYFPSSKRCSCCGFTMPKMPLDVRQWVCPACSETHDRDINAARNIKAAGLAVLAHGERVNPGSRNAA

SEQ ID NO: 31808 - protein, 376 aa, Serratia sp.
MKRAYKYRFYPTTEQVELLSQTFGCVRFVYNFILRWRTDAYFQRKEKIGYTQASARLTALKKDPDLVWLNDVSSVPLQQALRHQQVAFKNFFEGRAAYPVFKGKRHRQKITLTNAAFKYLDGKLSMAKSKTPLDVQWSRPLPSTPSTVTISKDTAGRYFVSCLCECEPASLPVSPKIVGIDVGLKDLFVTDTGFKTGNPGYTAKYATRLALLQRRLSKKTRGSKNRAKARLKVARLHGKIADCRLDNLHKLSRKLINENQVVCVESLKVKNMIRNPTLSKAIADAGWSELVRQLQYKGGWAGRNVVAIDQYFPSSKRCSCCGFTVQKMPLGIRQWVCPECGAAHDRDINAARNIKAAGLAVLAHGEPVKPELLNAA

SEQ ID NO: 31809 - protein, 200 aa, Desulfonatronospira sp.
LIDLYYTSEGAHSPAPKYYRKEQKHLARLQNLLARAKKDSPKWKKLLKAVQRAHCRIKCMRKDFLHKEANGILGKSSLVVHEDLKICNMIRRPKPKQDADGKYLPDWAFWKSGINKSIADMGWRMFLDFVGYKATWQRKNVIAVPPHYTSQSCPDCGDIVKKTLSTRTHVCPCGCRIHRDHAAAINILRIGLNTLAGKAA

SEQ ID NO: 31810 - protein, 369 aa, Clostridioides sp.
VEKAYKFRMYPNKKQQELINKTFGCCRFVYNKYLAKRIEVYKNDKETFTYKQCSSDLTNLKKELKWLKEPDKFLLQNALKDLDNAYKKFFKEKAGFPKFKSKKINRFSYKTNFTNGNIMYFSQHIKLPKLGMVKIRDKQVPKGRILNATISKEPSGRYYVSLCCTDVDIEVFENTNNQIGLDLGIKEFCISSCGDFIENHKYLKKSLNKLAKLQRELSRKTIGSLNRNKARLKVARLQEHIANQRKDFLQKLSTKLIKENDIICIEDLQVKNMIRNRKLSRLISDVSWSEFIRQLEYKANWHGRQIVKVGKFFESSQICNKCGYKNEEVKDLNIREWICPSCNETHDRDINASINILKEGLRLITIQNK

SEQ ID NO: 31811 - protein, 461 aa, Bifidobacterium sp.
MNQGKQEQLLALAKVWRDALMYSMRQWVQLLLAEGKMPRWLDAKRFGMGLSQRQWDSVNRQTRAALDSWMRLRQDEFRRIVNDSTLTQEQRIALHRINKRMAWWERSDDDGHRLARRIIRHLRCRVPFPDMRRCHTLSMDGKIADIQNSVASSRYARWVKVSTLTKGKPMYLPLGDNMRLEGQLMQPGVRLANHLQVNIHDGRIDAHVMTVQPAATPREYGETLGLDWGCKTMFATSDGRLLGIRLYQWLQERDKELTRLGAELNHARIPCHKSKRYRALNRRIRSYFTNEVGRLLNQLEREQVRELVVEDLDLRALRVSRRMKRIISRAGRSAVKRKLTRLEQGEGITVTTVNPAYTSQTCSKCGNVGKRNRRTQATFHCTCCNHRINADINASRNILARRSRKEGWRRIGRTQILSTLRKEHEQRCPSHAERNAAQSTATPRPSRTDTEVKIISGIKYH

SEQ ID NO: 31812 - protein, 363 aa, Saccharopolyspora sp.
VWSIEAAILLLGGLVKVTRIAYSQGLNAGKFAQLAEQARRLGRVRGEVWQRYGSVNGAGVSDRAIRDQWMADGTAEAFGVLANAWKETVRDAVADIAANRAAAKVAVRKAIHQRTLDQAERKRMYTALKVLTDSDGQHHGTELGALLTCESDYRKVKNARRAKIRSVAEKAREAGDHAKADRIVGNNLGTVKRDRRSSRWQQTVRTTTFRAVHAVVDKAALIAAEDLTRTFTGRVRRGRNVNRRLAAWTKGVTAEALASVSERRGSALTLVNAAYTAQVAPCCGVLGQRKGERLHCTRCGVVWQADHAAAINVLHRVGDPDITPRTPYQRVKRIVQQRTDRRPDQTADPGLQLTLWAESEISN

SEQ ID NO: 31813 - protein, 415 aa, unknown
  TnpB Polypeptide
MPLRLIPGSWLSLFIVLAVKSVWQYYVSSSEVLGLLKVFKKMVNESLRIGMANDASSLRKLSLLSYNQLAQYNSPSYYKLCAISRAAGILAARKKSIRRGYATRTPYAFRQQLVSCYGFKIGNGLLEIPVSRDRRFSIPLTKHVLEVISQSGVKVRSFTLTQNRLSLCIARDTPRIECASTIGVDRNLRNLTVGNDQETRYYDLSKCVRIANTTVRIVASFTRDDARIRTAIASRYGQRRTYRTGHLLHNSTKTIVALAVQRRTAIVLENIEGIRSLYRKGNGQGRKYRRRMNGWSFGEAQRQIEYKARWVGLPVIRLSRRETRATSITCPRCGERLQSDKRLKRKLWCGKCRVVMDRDQVAAMNLARRGRVRFARSRPPIIEAQGGAVEAVKGNPTPTVIPGVDAPKLTRPTKS

SEQ ID NO: 31814 - protein, 470 aa, Beggiatoa sp.
MSLSKTSEVDSIPRQARDIVLKGKDLTPYWNESCLDLSQKLLSHTKTGCVGSDLNSLNLLQIKTIANSWFSTTINCHHHQKWLETFCQSFTSPRQAQDTASLVECTDLESTIVRSKKIRIYPKNQQQARKYLGLSRWWYNRTIAYLKQPDTKASLYEVRKIVQTGDDIPEWAFDCPQRIREHAMSEACNAVKNAKLKYKKTGQFQKVKFRAKHDPIQSFGFDATSLNQDFVFGSKKFKMEFEATESFNVDLEGTRIVREGRRYFLIIPQKRHYQAPENQRIDAVALDPGIRTFVAFYSEVLHGKISDGDFQRIYRLCLFLDRLMSKIAKAKCRQKRRLKQAAERMRWKIFDMIDELHKKTANFLCRTFSRIFIPTFETSQMVTKLTSSVARNMMTFAHYRFKQFLMAKGPEYFCEVIECNEAYTSKTCSYCGKIHPIGSKKVMKCDCGATVDRDLNGARGIFLRALAVSP

SEQ ID NO: 31815 - protein, 388 aa, unknown
  TnpB Polypeptide
MKGRFYLWQIEVNESLRNGFRIGKPFFVDVCCNVNTINTKEGDNLKITMQIKLQPTKEEMVLLDFTMQEYISLVNDILDYAIASDIMPRLTSKTMIAPLPSALKAQCYVDAKSIYNKTLKHKSRLPALKKPVAIWNNQNYTIGDGYVAFPLFINNKVTKTKIAAIVPQRVLDIAATHKLGTLRITKKSDKYIAQIAYEIAKSAVKTDGNVMGIDLGIKCPAVAVTSNGKTKFYGNGRQNKQKRRKFTAKRKKLGKAKKLKAIKKSRNKEQRWMTDQDHKISRAIVNDAAASGVKTIKLEELSGIRQSARTSRKNNHSLHNWSFYRLAKFIEYKAALAGIEVVYVNPAYTSQTCPCCGKRNHANDRNYVCSCGYHTHRDRLGAVNILAA

SEQ ID NO: 31816 - protein, 323 aa, unknown
  TnpB Polypeptide
LDLVAKNWKSYFSALKEYKINPSKFLGRPKPPKYKPKDGESIIIFTSQNSRVKDGRIHFLKSTHLPPIKTRIQRYQQVRIIPKGNYYICEIIYQNQELNLNLNPDHVLGIDLGLNNLITAVNNVGKHPFVIKGGIVKSANQFYNKINAFLQSTKDKQKCEFQTKQQQKILKKRNNQIRDIFHKISRKVIHYCLQNDIGTIVVGYNKGWKQAVTMGKRINQTFVQVPFAKLTAMIEYKAKLVGIQIITHEESYTSKCSFLDNESIEQHDTYAGKRVNRGLFRTSNGQIINADVNGAYNITKKALPNAFAKGIAGLALIPYSMTI

SEQ ID NO: 31817 - protein, 398 aa, unknown
  TnpB Polypeptide
MKMHLAFISLFLYFERRIMTKTVKRTYRFRIYPNPSQKELIEKTLGCCRQVYNDFLSMCIESYEVDHNRTVNKYDLIKLLPEYKETFPYLKEVDSVALQQTVVHLFNAYMNFFRHNAEFPKFKKKKNDYGYMTMNINNSIHFVEDDIQIPKLGRVKVKVHRRLPESFKFTMVSVSRKGKYYYVSLMGEDEYFDYGEYIKEKLDTNNSIGLDFSLAHLFVDSNGNHLDMPTYYQDSLTKLAKEQRKLSRMKKDSSHYKKQLLRVRNLHEHIANQRKDFLHKVSRKLANTYDYVFVENLDLQEMSERKDKLKLGISIFDLGYGTFLNYLKYKLEWLNKKLVKVDRYFPSSQLCSNCGYRKSDLMLHQRKWSCPKCGAKHNRDINAAVNIKREGIRIIALN

SEQ ID NO: 31818 - protein, 439 aa, unknown
  TnpB Polypeptide
MLKRTYRFVIDRHDKPYQKLKYCTRVCKDIYNQSLFILRRELEENNNLISKFDLPKVIREIKNLEGELNYRKIPAKSSEKVVQLASQTVKSYFKALKDWKKNPSKYRGKPKFPNFLPKNGYQVMSIYGSSLSIKGNVIQFGKKTFGQPVQISIPEKEYLKYRHLWYKDIQRSITNRSDLSNRLIKMVRIIPTSSADYFSVEIVYDKAQLLAPVDQEKAVGIDLGIDNLITMVPNFKQEILIVNGRPLKAINQWFNKKNAEVSSRINKAGHRNTREKRDLYTKRRHKVYDYMHKGSRVVIDWCVKHKVSKIVIGVNKGWKQNVNIGKVNNQKFVSIPFSTLISNLEYKAEEYGVEVVTVTESYTSKCSALDLEPIQKHETYLGRRVHRGLFRTAEGVELNADVNGALNILRKEIGDQFIVDAKGSGSNYLIDNPIRINLN

SEQ ID NO: 31819 - protein, 331 aa, unknown
  TnpB Polypeptide
MGIVELRRTAVVKLDVDDDAHRLLQETIDRFKQAAQMVADHGWNGTEDGYIVTSKTELHSRTYDEVREATDELNADLVCAARNRAAGALDSCAEKRKDGENPSKPQFTSDSVVYNLNAITYYDEYATLATVDGRIEAEYILPNKDIPPTTYFSEEWEKREATLHHRDGEYYLHVAVVKETETEPEAAENGTVLGVDLNVDGHLAVTSTGAFIGNADYLNHKRREYEKRRGQMQQTGTRSAHLTMKSLGGRFANWSEDYLHRVSKALVQEALAHECTHIAFEKPTHIRKRISTASKFQQWAFRRMQEYTEYKAAEYGIAVEKSRATVHQSTM

SEQ ID NO: 31820 - protein, 413 aa, Streptomyces sp.
LPGGYRSRQEWFAKSRRLHLLQDRLERERADRETGRVRVVRGGRKLLRNRHHLQAAQLTEAQWRVRWEAERWFLQTDGESGKRYGNETIRVSPGGEVSIKLPAPLAGLANAPHGRYVLACRVAFRHRGQQWADRIAADRAVAYRIHYDVTRDRWYLTASWQIPPVRTVPLEAIRSGGLTGVDTNADHLAAWRLDTHGNPVGEPRRFDYDVSGSASHRDAQVRHALIRLLHWAKRHGVAIAIEDLDFASEKTREKHGRRKRFRKLISGMPTAKLRARLVSMAAELGITVVAVDPAYTSRWGAQHWQKPLTSKNRKTTRHHAAAVAIGRRALGHPIRRRTAPPPQHRSDTVGHRTVQATSGVPGREETRPRIPGPRTRSAGAERGAKAGDQGAQHRSGHPAEHEPWQQDSLPLSL

SEQ ID NO: 31821 - protein, 391 aa, Clostridiales sp.
MLMLRAYKYRAYPNVSQRVLLGQAFGCVRKYWNECVSSFNSYDKDTNPRPVVPTPRVFRQTYDWALLTSAGALAQKHMDFEAYRKHFFDKQQGLGRPRFHKKGGRDSFRLPNQKFTLRGDRIRLEKIGWVRIVVDRSVPDGCKFMSCTVSRDADGRYYISVLVETVPVRRFARTGRSVGLDVGLKSFVTTSDGVVVDNPRFFRDSQLKLSRMQRFLSRKVKGSRRYRRLRRRVASVHGKIRRQRDHFLHVLTTGLVRDYDVLCVEDLNIKGMLANHRLALSISDASWGDFYRMLKYKCDWYGRDLRVVGRFAPTSKTCSVCGWRYDALTLDVRSWTCPACGSVHDRDVNAAVNILALGVGNALRSVSVGSGGRVPRRRHVDPNNSSMDKTS

SEQ ID NO: 31822 - protein, 253 aa, unknown
  TnpB Polypeptide
MNQSNNIRITGRYIKLPKLGYIKIRQSMEIGHINHVTIERTPTGKYFVILNVDFDPELRPNAGGKIGIDVGIKAFYSDSNGNTVSNPKYLEKSARKLIREQRKLSRKQKGSSNRNKQRIQVALVHEKITNQRNDFLQKQSTMLVRENQTICIEDLHIKGMLRNHRLARSLSSVSWASFFSMLEYKASWYGNEIIKVPTMYPSSQTCSCCGYKNPLVKNLTVRRWKCPACHAVHDRDINAGLNIMNKGLQMQSA

SEQ ID NO: 31823 - protein, 209 aa, unknown
  TnpB Polypeptide
LGKVFFANRSFEGKIGTITISKSSTGKFYASILVDDGIPNPGKFVIDPDTAVGIDVGIKDFAVLSNGQVFSNPKYLESAQKRLGCLQRRMSRKKKGSNRWKKAKHDVAVCHERIRNRRQNFLHKVSKKIVSENQTIIIEDLNVGGMLKNHCLSKGIASASWNEFFKMLQYKSDWRGVNLIRIGRFEPSSKMCGCGYIHRNLKLSDRVWT

SEQ ID NO: 31824 - protein, 466 aa, Succinatimonas sp.
MIVGQVIELKANNKFFTYCRKAFGVRRFAYNWAVAKFKKDYAAHIAAMDRYNKELAEYKKSPLQSTVAPVKPKLPTWQDYKKEFNAIRLEEYPFTYEVTKYASQQAFANFGKAVSNYFENVKKRKKAKVKQNSKKRKAFFPKFKKKSYQQGKFYIGGDQVKIVTGNACSKKLENHSTKQYMNIPNFGYVQLKEELRFNGHINGVTISQRADRIYASFSIEITDEEYLRTHKAAVQNNTAAGIDLGLKSALMLSDGISIDSPKPLKAKLRKLARLQRQLSRKQHPRTKDDKTELSRNYIKFSKKVSKLYLEITNIREDFSQKITSVLANHYEYLCMEDLNVKGMMANHKLARAISDVGFYNIKKNLKYKMEFKHRKLQEVDRFYASSKICCKCGALKEDLTLRDRVYECHECGLTIDRDLNAAINLRQQIKIVGVAISELKPVELTALLSDLAINGITTSSVEAGIW

SEQ ID NO: 31825 - protein, 402 aa, Escherichia sp.
VKRLQAFKFQLRPGGQQECEMRRFAGACRFVFNRALARQNENHEAGNKYIPYGKMASWLVEWKNATETQWLKDSPSQPLQQSLKDLERAYKNFFRKRAAFPRFKKRGQNDAFRYPQGVKLDQENSRIFLPKLGWMRYRNSRQVTGVVKNVTVSQSCGKWYISIQTESEVSTPVHPSASMVGLDAGVAKLATLSDGTVFEPVNSFQKNQKTLARLQRQLSRKVKFSNNWQKQKRKIQRLHSRIAYIRRDYLHKVTTTVSKNHAMIVIEDLKVSNMSKSAAGTVSQPGRNVRAKSGLNRSILDQGWYEMRRQLAYKQLWRGGQVLAVPPAYTSQRCACCGHTAKENRLSQSKFRCQVCGYTANADVNGARNILAAGHAVLACGGMVQSGRPLKQEPTEMIQATA

SEQ ID NO: 31826 - protein, 471 aa, unknown
  TnpB Polypeptide
VITSKAFTIETRLNQKDNAEIIEYAKEYSVLYGKMIRFTWHRIKNGGQLPIKKSDFNTLLQKTFGVNKRVANSVIYEIVGIYKSLYQLKWAEFFQLKAKIAKKHKKYEKLQQKVYVLKEKAKSNSLSANQLSYYRKIKADLFHAKQKINRMNRSLKNRLAVLNSRKLEICFGSKKLFLAQYHLSENHMTSHKIWYETFCKRRDNRALYIGSKDEQRGNQLIQLVPMVNVGKGNSYAIQIRKNTKEREYVRGSCNFKHMGGRLAKLLVDKAHGISYRIKFRGKKCYLQAMVTIDRDFKDCQTRSTYGTIGLDYNDGFIEMAETNETGNLIKLKHIDLEYHGTGTKAENEIRQVVSDIVNHAASVGKDIVIEDLDFKKTKAETEESKSDRGKAYNKMIHLFDYSRYKSTFEGCCYLRNVNLIKVNPAYTSKIAGQKYCDQRKLVIHQGASFVIARKGQGFVDKYTKPKKKEAA

SEQ ID NO: 31827 - protein, 219 aa, Lactobacillus sp.
MQLASDKPFVKESKTNHGHIGIDLNTNNFLTDSEGNTVPNPQYYRTIKSKLAKEQRILSRRQRRAKKEHCSLRDSKNYQKQRLLVAKLHAKVMNQRHNFLQQISTALIKNHDLVVAEELRSKNMLKNHALALSISDVGWRSFLGMLAYKADLYGRQFITISPRNTTQTCHNCGFVMGTNGTDKLTLADRKWTCPNCGTHHIRDWNAAKNILDKGIAKLA

SEQ ID NO: 31828 - protein, 356 aa, unknown
  TnpB Polypeptide
MIIVHRFHIEPTIEQEQRLFQSLTLCRRLYNTALEQREICYRQKGKSLSCTSQKNELPALKRELSEYKQVNAQVLQDCLQRLDDAFQRFFNGLAGYPRYKDRDHYRSFTYPQADKQDHFKNSGYIYLPKVGYVKMKAHFAFDPAKVSRINVKYHNGKWYVNLTSEIQEAEAVEILSKTGIDVGLLTFAALSDGTKIDNPKYYRKSERKLARLQRRLSRKKKGSNNRGKAKAKVIRLHDKIASQRRDFLHKASFAIVQKYDFIAVEDLSVKNMIKNHHLSKSIADAGWGKFVDYLEYKCLKYGKAFVKVPPGGTSQTCICGAHVPKDLSVRIHECPECGMVANRDVVSAMVILQRAS

SEQ ID NO: 31829 - protein, 416 aa, Saccharolobus sp.
VKRSNTVRLVVSKEQHEVLKRLGIATAKCWNEVNWLRMKQYKEGKRVDFGITEKAVYEKYKSVLRVNAQQVARKNAEDWRSFFSLTREKKEGKLPSWFKPRPPGYWKDGRLIVIIRNDRYTVDERNRVVYLKDFNLSLKFKGRLKWHGKQGRLEIIYDEARKIWYAHIPVEVETEKVKEGIKASIDLGIVNLATVYVEDGSWYLFKGGSALSHYENYSKRITIVQKTLHRHRQRRSRRLKLLHEKRSRFLKHALNSMVRRIMEILREKNVGEVVVGYPKEIAKHHGNKLTVNFWNYSYIIKRLEDIGEELGIKVITVDEAYTSKTCSLCGEAHEDGRVKRGLFVCPRTRKAINADLNGAINILHIPESRGSEGNFHRGIGVIGLKTQPVTLSDLSKIKNHYNYSISDYTILHYIQP

SEQ ID NO: 31830 - protein, 398 aa, Kribbella sp.
VSRYRLVPSQEQEAALAEHCRHARFVWNLALEQWSMWRPGRRVATPSYGVQSVQLTEARAVTPWLRAGSQIVQQQALRDFRQAVTNFYNGSHRRPTWRRAGRHEGFRVTGAQSRRIERLSRKWGRVLIPKAGWVKFRLSRTLPDAKSYRVTRDGTGRWHLAFAVVPEPVPAPGNGEVVGMDRGVVVSVALSTGELLTVPRLRRTERARMLRLQRRLARAKRGSNRRGRLRAAIAKLKSREVDRRKNWVEQTSTDVARRFDVIGVEDLRVTNMTRSARGTLDDPGRNVQQKAGLNRAILANAWGLLVARLEDKAPGRVAKVHPAHTSQTCSRCGTVDREARESQAAYRCRSCGHSAHADTNAACNIAARTIAAGRAVTARRDLGLSRSAKREPQLAASV

SEQ ID NO: 31831 - protein, 392 aa, Rubrobacter sp.
MVKLLPSKSQAQALEATLRRVNEACDYASGVAWETRIFGKYKLQQATYHDLKDRFDLTAQVVIRLLAKVADAYKLDKRTKRSFRPLGAIAYDDRILRWYDDEVSIWTVASEASEAKSRQRIPFVCDERTRALLDAKRRKGESDLVYRSGKWYLLATVEVEEPPPGTPEDWLGVDLGIVNLATDSDGETHAGEQVEKSRKRYERIRSKLQHAADTAIKAKGRKSARRHLKKLSGKERRFKRGTNHVLSKRVVDKAKESDRGISLEDLQGIRERTGKRLRKSQRGRHGKWAFGELRGFLEYKSRLAGVALVTVDPAHTSQTCSECGHCERANRRSQSEFLCKGCGHVAHADINAALNIRSRASVMVPIVSDTEGATHASSISPGTSPRALAVGT

SEQ ID NO: 31832 - protein, 366 aa, unknown
  TnpB Polypeptide
MQQFFGSTRWLWNQMLDMQTKRHENGAKRITRNGMNYILTELKNEYPWLRESESTSLINVNAQLHETFRRYYSGLCKKPKFKAKKYEQSATVNCVNNNIQIVDDHHIRIPKLGYVYYRGGKNIKGRIKSVTLRLSASGKFTASVLTEYVTDDLPLTGKVCGGDLGLKELLILDDGAKFPLPRLDKKSEDQLHYWQRLASRRLLKAKEAMKADSSLKLSDFSNYQKARKMCAKIQEHIAKQRLDYLHKLSSWLVEQYDVIVIEDLKAKVMLHNHKLARAISNAGWNSFIGMLRYKCERYGKTLIQVDPAYTSQTCSACGCINRRLGYDRYDWLKVREWKCHECGAVHDRDINAAINIREKGLAVSLS

SEQ ID NO: 31833 - protein, 420 aa, unknown
  TnpB Polypeptide
LSNPSGILEKTMRLVEQHSIKKGDPRYEKIDKAAFASKNLWNAANYVVRQSFIHEGIYLDNVKVFQQVKSHEAYQALPRKVGNQVLIQLHQAWVAFFAAMDEWREHPEKFLGRPKLPKYKHKTEGRNLLIYEFKAVSKRALKRGMISLTGLGDLVATKQTRETIYQVRIIPRSTHYVIEVIYERPEVQAVTPCSLFAALDLGVTNLAAITSNKPGFVPLLVNGRVLKSINQGYNKQREHLQKQLAKQDRFTSRRMKALTEKRNRRIHHHLHVASRTIIDRLVAEGISTLIIGKNAFWKQEVELGKRNNQAFVQIPHTRFIEMLQYKAALVGITVIITEESYTSKASFLDRDALPTYDPKRTEKPRFSGRRDGRWYWASGKRLIHADVNGSYNIARKVFSTAFDGREIEAPAVRPIRLAVK

SEQ ID NO: 31834 - protein, 282 aa, unknown
  TnpB Polypeptide
MRLDKRNLRVNLEHNLISISSIYGRKKISFEDNPMIIKYKDWSPIAGTLLFKNKNLYLNLVLEKESPNININNFKITDFIGMDRGIKNIVVGSNKQFFKSLHLKEIKGKYQYKKKVLQSKGTKSALRKLKRIAGKERRFVSDTNHCLSKEIANSDFKVFVLEDLKKINNSKKGKKFNKKLGNWSFKQFETYLQYNLEYLGKLLIKVNPKHTSQMCSKCSYIEKANRNGSIFKCKKCGYELHSDLNASKNIVNLGISEFNRLYVNQPIVASHESYKPTNSLVR

SEQ ID NO: 31835 - protein, 398 aa, unknown
  TnpB Polypeptide
MESTILRRVYRFRLEPTSHQEEGFRRYAGARRWVWNWALAQKQAHYKATGKGLPEKVLSARLTALKGEPGTAWLREMDSQLLQQVLADLKKAFGAFFERRVRYPRFKSRKRDMARFRIPQRVTLRDGSLTVPKIGRVKVRQSQAIEGVTKSATFKRDACGHWFVSLVSEMEMPAAPLPLPSEERTVGVDLGLKDAVVTSEGTRMAAPRFYRAAQRKLRRTQRGQSRKVKGSNNRQKARMKVARVHQKVANKRNDFCHKLTTTLIKEHDAVCIEDLNVQGLAKTKLAKSILDASMGTIRRQLTYKGQWDRAHVVAVDRFYPSSKLCYECGYKNDALTLSDREWACPSCRCVLDRDVNAARNIKREGWRILDVAAGHADTKNACGQGVRPAMPATVAIPA

SEQ ID NO: 31836 - protein, 424 aa, unknown
  TnpB Polypeptide
MIKTSKHITAFTNFAKRARLQAFLTEYRRYASKILDRLWDSEFVWDGRILDISKQKYDCPSFISTVELDIPTTLSGRAKKCCTTQVCGMIKAATELPRKRLYMLEKLTKAGKPAANLERAISRQKIVKPNIDSIKAELNSICTNFQENSDQHYNGFVELCSIGKEFGKIRIPIKHHRHSRRLCERGELLNSFLISSKSVDFRWDIPTVKKRDQGITVGADQGIRTLLTLSTNQTTAHADIHGHTTDSVLNALSRKRKGSRSFKRAQDHRKNHINMLINQLDFTGVKQVNLEKIVNINYRKRTSRKLSHWTNTLIRDKMSEVGEREGFSVKLQSSTYRSQRCSQCGLVRKANRKGKEYRCGGEDGCGFVIDADLNAARNHAMVLPDIPYALRKQGLNRMGFWWTPTGFKTLAGEELTVPLSEERP

SEQ ID NO: 31837 - protein, 250 aa, unknown
  TnpB Polypeptide
VVEVKARENNGARRAAVDLGETILMACAFDDGSVILYSGRLIKAVRRYWQKVRANLRQNSRRWKQIAHREKKQVEHLLHMAASHFIAECVRRDVKEIAIGDLNGIRESIDYGYQLNQRLHAWPYRKLIDMLKYKGALAGILVRDDINEGSTSITCHACGKVVASNRRHRGLYVCSCGWRAQADVNGALNIYERAYQVSPVKGSSGRVTRPAVVSFLLGWHGVAEPKRRNNSLRASWKGCPRIHSGEDVTI

SEQ ID NO: 31838 - protein, 399 aa, Alphaproteobacteria sp.
MIIAHRIALDPNNAQATYLARAAGAARFAYNWALAEWKRQYEAWKLDNSLPKPSQLALRRQLNSIKREQYPWLLDVTKNAPQMAIIQLGAAFSNFFAGRAKYPQFRKKGIHDRFSLTNDQFSIDGSRIRIPNLGWVRMREALRFDGKITSATISRLAGRWFVSIAVETRDDSHLPQAENQGAVGVDLGLSALATLSTGEPPIPGPKPHKALLARQRRLSRSLSRKLKGSANRRKVKAKLGRLHARIAAIRNDALHQLTTDLTRRFHTIGIENLHVRGMMKNRSMARSITDMGFFEFRRQLEYKAAMRGGRVVVADRWFASSKTCSACGYKVDSLPLSMRRWACLACNTNHDRDVNAAINLRNMAVSSTVSACGEEGAGRCRKTAVKPASVKQEVSVVPV

SEQ ID NO: 31839 - protein, 407 aa, Streptomyces sp.
MQLRYAFRLYPEPGQRIALGRAFGCARVVFNDAVRARKDAHAAGLPYPKAAELSQTLITQAKRTVERSWLGGVSSVVLQQSLRDVEAAYRAFFASVKGERNGARVGASRFKSRKDARQSIRFTANARWSITPGGRLNLPKIGEVRVKWSRTLPVVPSSVTVIKDSAGRYFASFVIDTDPAADAGRMPATEQAIGIDLGLTHFAVLSDGTKIDSPRFLRRAEKKLKKAGRELSRKQKGSKNRDKARLKVARAHAQVADARKEFHHQFSTRLIRENQAIAVEDLSVKGLARTKLAKSVHDAGWSQFVTMLACKAARYGRTFIKIGRFEPTSQVCSTCGHHDGPKPLHVREWTCPACGTRHDRDVNAAKNVKQAAGLAASACGAKVRPEPVLAQREETGSHGIPAGSHAA

SEQ ID NO: 31840 - protein, 351 aa, Cytophagaceae sp.
MQYTTYQFRIKDSTSGKHLTRMGYSCNFVWNYCNEVNQERWKKFRKTFTNFELNKLTAGCSKDLGIAARTIEAVCQEYADKCKQHKMIRLKWRSRKRSLGWVPFKGNTVKVKDDTITYYGHTFRFWLSRPIEGVVRFGSFTQNSKGHWFVNLTMEVADSGRIKTGKECGIDLGLKTIATLSDGVEFSRENLTKKYEKKLAMAQRARKKKRVTAIHAKIRNKRRDWNHKASTRLVQEYDRIIVGDVSSSKLIKTRQAKSVSDAGWHGLKQMLAYKANRLGVEVRVVKESWSTVTCSSCSKRTGPRGLGHLAVREWVCSSCGSTHSRDVNAAKNILLFSLSGMTGQLREASTI

SEQ ID NO: 31841 - protein, 375 aa, Coleofasciculaceae sp.
MKTLKFKLYQHKRNRYLKQTINAAGVIYNHCIALHKRYYRMWGKHLNCSKLQAHIAKLRKRHPFWQSVGSQAVQDICQRIERAYQLFFQQHKKGAKPPNFKKIKKYKSFTLKQAGYKFLSSNRVRIGNLVYQYWNSREIAGNVKTLTIKRTPLGELFMFVVVDDSGNEPIIKSETSSIAGFDFGLKTFLTCSDGTRIESPEFLKQAMKAIKQASSQHSHKIRGSSNREKARKNLVRKYEDVINSRTDWFWKLAHQLTDRFDILCFETLNLKGMQRLWGRKISDLAFGEFLQILEWVAQKKGKMVVFIDRWYPSSKTCSICGHVLENLDLSIREWRCPSCQCVNGRDENAARNICAVGASTVKLGDVRQGFPAFAV

SEQ ID NO: 31842 - protein, 486 aa, Mycolicibacterium sp.
VAKFEAPHGWVMQAYRFALDLTPAQERALASHAGAARFAHNHMLALVKAVLNQREAERSYGIGQRDLTPMQGWTLPSLRKVWNERKPQCAPWWRENSKEAYNTGLDSLARGLNAWSKSRAGQRAGKIVGFPRFKTARARRSVRFTTGTIRVEPDRHHVTLPRIGAIRTHESTRKLARRVESGTARILSATVSQDSAGRWHCSFQAVVAAKARPAHSPHSLHPVVGVDVGVKAGSLVVVATPDGVEVARASAPKPLTAAQARLRRLQRRAARQHGPYDTSTRSRRTPSKRWRRTQARIGRTHAHAVAVRRDVLHKVTTALAQRHQVIVVETLNVSGMRAAGGARKRGLNRVLADASLAEIRRMLEYKTHWYGSHLVAADRFYPSSKTCSACGRRKPNLTLADRIFNCDGCGMSIDRDLNAAINLARLGEPAYTGEQGPAGSGPAAGRGATRETEPAPAGDAAGDEASTPHHHLVDQTGTASPQGEAA

SEQ ID NO: 31843 - protein, 393 aa, Lactobacillus sp.
LIKTHKIKLYPNATMRRELERLFNYRRYCWNQALETWNAMYDASLVMTDKTLRPNERKVRDELVWNKADWQYEQSARVLQLAVKDLGKAWKNYFNPKMPDHDKPNWKSKKRSRKTFKTDRAQLVNGKLRLDKPHSAGAWYDIKLAEQPRWQGELKQVCVVQDADGYYASFSIEVQTSVEKRPVLTVTGVDANIGKFDYQTSTGYATQPTLPDRLPVLYARIAHYQRQLARKRKVSPKHFNSKAYRTTRTKLKRQYQRVERIQMDLLQKFTTRLITDYDLIGIEDLDNHHMRMNKRLAKNLHRSLFGKFKVMMQYKADWYGNTLVLADRFYPSTQRCSRCGYVKTADERITLSGNLKHRTGHDDYHCYQCGVRLRRDENAVENLIAYAKSKVTG

SEQ ID NO: 31844 - protein, 401 aa, unknown
  TnpB Polypeptide
MVRSSKVTLKFSNTQKLALLEKLYTDYNSDLTEYIKLILNGNLPFKKLLSCKELPTIRLSHSHYKSILYKQASEIIRSNLKYTKNRTFKKYQKLYAIFIKKGIHSQFTNKKFSELNINYMKRIKIQLKNITIPIDERQFNFSTDSKEFNEFVGLKLPYFYENKHRAIQINLPIKYHKQYNKYKDWNRRKTVFLKKNCNGQFEFIFMFEKEDTIKKSVGPIIGIDLGYKKLISSSNEDYYGKEMESIYNKLSNKVRGSKNYSQYLKYKKDSINRNINLFLNEYDDVQKIVCEDLKLLRYKSKLSRKQLNIQQYFAYNQVLDLLEIRSQEKGFQLIKVNPAYTSQICSNCGEVDKSNRQGEKYQCKSCGFEADADYNAALNILTRGSYHSSTEKDLILESSFL

SEQ ID NO: 31845 - protein, 413 aa, unknown
  TnpB Polypeptide
MKTLNAESKMILAERHLISSSHPYFSECDHLTFLGKNLYNATLFYQRASFFKKDFQNYYAVNKFFTHENQADYRALPAKVSKQVQLLVDKSFKSYFALVKKKVKGDYTSPVRIPKYLHKVKGRCTLPYPKDALSLKKDGFVKLSKTGIEIPTKIEKENIQGARIIPKGNHFIIEILYKKVKKALVSETIQKVAFIDPGLNNLMTVTSNAFSPLLYSGKKLKSINQLANKRIAQLKSALSKKGLYTSPLLVSIYNKRNRRITDSLHKLSSHLVNQFVSYQIDTVVFGHNLGQKQDIQLGSVVNQNFVQLPFYQLISLLKYKCELQGIRFVTTEESYTSKCSFLDLEPISKQKEYLGKRIKRGLFQTKTGLQINADVNGSLNIGRKYLTKLGVYTEQLHQELVACMANPKRIRLV

SEQ ID NO: 31846 - protein, 510 aa, unknown
  TnpB Polypeptide
MSSKTIVSRTYPRIPYAAFDKNGVSLNLDDVLNGVKADAELVAHYALLEMTEQNLALSTYFDRYKPAEAGRQMNLKLPSEVKSHFKSGASRLERMFREQVVSNLRSWAARVEVMTQTSTKYVSAGWERTASDSKPSSMQPRLALSATDKQYREMNVTPERIELMMIVQGKKTVLHFPTPPQLLDVGCEPGAPDIWIDDQNRVVFGFHGKSDPGRPEFSERYVVGVDLGITNPAAYVVWDTEKKQVVEESLLGQRARSLSNKIKRGQTQVSALKKKGKDDEAVSHREHLSNRRLELSILIAQELVDVSWRYGNAIVSFEDLSHIKNTMKHGRWCRGEAFRRTRDMVEADGGRVMKVNAAYTSKRCHVCQSDLDMSDYSQPRCTTCDTTHHRDLNAAANIAQRVNIKKACETRKKHATNTKRVRRSKCQMKPLKHPGTKNRPTPKAPQNRPKTHARTYPPLPKREVSVRMCPADNRVSVVDHDTWFQTTSGTTNPKENLSIANTVDVVYPQE

SEQ ID NO: 31847 - protein, 669 aa, unknown
  TnpB Polypeptide
MRTIKIKLSSISSDVIKNKIKKYVDLENYLTSVTTLFIKGYVLNCKTIPFINLNFISTAYNVIIENHNQFGNSTFKKKGKPISTNKDLFETMNTYYKNKFSKIATLNNDYTFKNMSHIIRSSATQLLICYRNNVLLNYVTYINKFVNYNLKDYKLEGDEKKQQLKELKQVKSDIINNTLISKSKYHLWIKKNKSKIIPDLKDGEELFKLLHSRNDSLKLHPYMMFMNNYFEKNKKKTLQQFPLRKEIGNKHILIGTDMLIETFLDNDFDYQALDFSNTCFKEIKKKCDIGKCGKIVRKLQNKEDKNSKEEIYLSYLENEYLKIKTEIWKCLFNFKSKHLNNKTYTFNNSICTDGYSVSIHQISKNEGKIKKAVFDDNFKYLDELTKNEKKILSDQIIIGVDPGKKNLFQMIDQEGNKFRYTSIERRRELQIEQLNHKLNKFLPKSNFTDSSKSNNPTIFNEYIKNKTKQLCTNLIQYSKDIIKNISFNRYVFVKKTEDKMINNIKEKFQNTKDKKNKDIVLCYGNWSFTKQMRYFYPTPGIGLKKRLSKEFKIYNIDEYNTSKKCFSCGSNNEKFLKIKDPDYNKKRIKRVKWEKFVEERENKDILNKKIKPVFEKKLCHSLLCCQNKNCNKIWSRDINASLNILKIGVELLKNNERPKELQRTQVEGY

SEQ ID NO: 31848 - protein, 352 aa, unknown
  TnpB Polypeptide
MLAIKTLKLRIKDKHARVLGQMAREVNQVFNFCNETSMRAIRERHQWLSGYDLQKLTAGYSQCEGVTVGSGTVQLVCAEYATRRRQFKKARLNWRVSNRKSAKHSLGWVPFKGGHAKYKAGQIEFAGHKFSLWDSHGLSKFALRAGSFSQDSRGRWYFNVAVQVEAKPSAGTAALGIDLGLKECATTSAGEKLVGRWYRANEKALATAQRAKKKGRIKAIHAKIKNQRKDALHKFSTQLVRENAAIFVGDVASSKLVKTKMAKSTLDAGWSMFKTMLEYKGHQAGVVFEEVNEAYSTQACSQCGSIEGPKGLNGLQIRQWTCGCAAVHDRDVNAARNIAARGLARLAEGTPA

SEQ ID NO: 31849 - protein, 241 aa, Dolichospermum sp.
IIVYGCQQILISPNKDLKAILEYVCTEAKKLTNCGVYYSRQLYFKTGKIPTKADLHKQLRTIQKNAHYQALYSDTAQQILTTVAESFKSYFGLLKGIKEGTVTQKPKPPNYCKSVMSIATFTGRSLKLKDGILRFPLGSKVKAWFGIDAFYIPMPSNLDYKSIREVRILPRNRCFYAEFVYQQDIKSSEVYASKVLGIDHGLNNWLTCVSNIGTSFIVDGLHLKSINQWYNKSVAKIKEKN

SEQ ID NO: 31850 - protein, 389 aa, unknown
  TnpB Polypeptide
VRRAYKFRAYPTVSQEGRAVRLLRDHCDLYNAALEERRDAWRKCNISVGFYGQCAQLREIRKNDLAGQGRHSCTAQQQTLRRLDATFRVFFRRAKAEGRRVGYPRFKPYQRFNQVRFVAGDGAKWMPASAGHWARASFQAVGHLKVRQHRPVKGRVKTLQLKRECRRWYVIVVAEADAESLPSSGHAVGIDVGVARFLTTSDGVVVTNPRFLATAQARIARLQRRKERATLGSGNRRRLRRALAREWRKVRNQRRGFHHKTARALVDAYDVLALEDLRIGGLTASARGTVEGPGRNVAQKAGLNRSILDAGWGQFTSILVAKAESAGRRVVRVEPGYTSLDCHTCGSRCVRPRQDTVICPNCGEQDADRNGACNIATRAGLGSGQAHVA

SEQ ID NO: 31851 - protein, 420 aa, unknown
  TnpB Polypeptide
MQLCTKIKLEVSDQDAATLEFMQSKCRGLYNWWVIRLRDGETWHFNECKKTLAESRVHDPELDDVYGKLLAEVYYRLDNAMKAFFRRVKAGEAPGFPRVRPRHNFFTLCYPAMYLEVKGNMLTLPTGGRGKFKRFPNIIARLAEEAPQDFGEVAISRDARGNYYASFTYQEDEQVPEHEEGQADYLAFDLGMKTLATGVNEQGRVYTVGGFKGHQWYNKQLDKIRSKRDKCKKKSCRSIYLSKVYKRVSERKRNKRKDSLHKASHLIAHTLVERTVIVGDLSQRQMVTKQHEDRNKHLNRAVYNEWGLYSFIEMLKYKCDRYGKALVFIDERNTSKMCSGCGTLQAMPLWKRTYCCVECGLVMNRDENSAHNILTRFLARLEPYTLEQECDVLQDTGHEVGIAVMPHAREVQQLSMFEYI

SEQ ID NO: 31852 - protein, 398 aa, unknown
  TnpB Polypeptide
MQLVEQHCISKNDSRYEVIDRAAFASKNFYNAANYELRQSYIRTGVYLSYETLYHLMKRHEAYKALPAKVAQQVLKVLDKNWKGYFEAMKAYPRDPSKFLGHPKLPKYKDKQKGRNVLVFTVQAVSKRGLSKGVIQPSGVPIEIQTQHTNINQVRIVPRGTHYVVEVVYTQKTTQAAVDFSLYAGIDIGLNNLATLTSNKSGFVPRLVNGRPVKSINQFYNKNRATLQARLPQGQYTSHRMEHLTLKRTRQIDHYLHTASRRIIDLLVSERIGTLVIGKNINWKQEATIGKRTNQNFVQVPHARFIDMLTYKATLVGIQVILTEERYTSKCSFLDNEPIGKHEVYAGRRVKRGLFRSVSGKTYNADINGSYNILRKVAPDVFAQGSSGCVVHPSPLAV

SEQ ID NO: 31853 - protein, 292 aa, unknown
  TnpB Polypeptide
MENATERVHGRRIVRMTVSRHAGFWYAALTVERPTESVPAKNRKRKNRNRQVGVDLGVRTLATLSDGTTFPNPRNYVRMQRKLRHAQQSLSRRDRGMSHGCGSKRYNRALGRVRRIHARIAAQRADNIGKLTTWLADNYSDISIEDLNVQGMSHNRRLAKHILDADFHEFRRQLEYKTARAGTRLHVIDRWYPSSKTCSNCGTVKAKLSLSERVYHCGKCGLVIDRDVNAAINIQVAGSAPETLNARGGSVGQTRLECGTMRHPAKREPSGGASRVRLGAGLGNEAMQMTSL

SEQ ID NO: 31854 - protein, 446 aa, unknown
  TnpB Polypeptide
MAKKRKKPIPRNSTQYEQLVSEYLIKATPVLDETATQAHNLYNRALYDIRQAFFKHQYINSFTDLNAMFKKRYELKENMLYHKLGYVQSAQQTLKEVMTVWQAWLRALKTYRKNPTKFTGRPRMPKYLHRDQRHTFYVTSQNARVNKAGFLVIPKLSIKIRLASTDIKKIGRVAFKPMANGYKVIVPYKTNKEIKYLSDNGKYLGIDPGIDNAFACVTNTGDRPLLINGHAIKSVNQYYNKKRAELKQLQAKYHQLEKMINTKQGLKPIYQETKAMKRITAWRNDKIRQFAHKASKCIVDYALSCGTNTIVIGRNKSWKCSSDMGKKNNQNFIGIPHKTMIDMIKYKANLAGITVIQTNESYTSQTSALDHEQPCWNNANKSRKKQGKSPINRRIKRGLFKANDGTLINADVNGALQIIKKVFPNFSLDDGIVGAVLRPIKWSPAI

SEQ ID NO: 31855 - protein, 281 aa, unknown
  TnpB Polypeptide
MNYNYRYRIEPDKAVEAALEQHIDTCRQLYNHYLYELRNTDEYLSYSAMQNMLPDLKDWWDELNNVYSKVLQMVARRVSDNLDRLKEKKDNGRKVGMLKWKSPREYRSLTYNQSGFELKNTSGQTILSLSKIGEIPIHLHRDIHDDACVKQVTIKQEKTGDWYAIFGIETEDDAPAKPALDEIEREDMVGIDVGILKYAHDTDSTMVGSLDLEDEYERLEREQRALSRKQEGSQNWHKQRRRVARIHARIVRKRRDFLHKLSNITLGCTTSWPSKTSMFTG

SEQ ID NO: 31856 - protein, 225 aa, Geobacillus sp.
MIRESNRVVGIDLGLNNFVTMVNNIGETPIVINGKGVKSINQYYNKQKAYFQSILKKQNGLNWSKRLEKLTLKRNNKIKDFMHKASRYVVDWCVKHNIDTIVIGKNDNWKQEVDLGKRLNQAFVQIPYDMFIEQLQYKCEEVGIKVVLTEESYTSGTSFLDGEAPIKENYDKNRRIKRGLFKSNKGILINADVNGAYNIMRKVFPKTFANGVEGVGLHPVKLNVA

SEQ ID NO: 31857 - protein, 474 aa, unknown
  TnpB Polypeptide
MKRTVKIKANCSNNEDEILLIGTIQRNIKNYVWSRYSGIGSLLKQSGWTIRDELIQKNLLSNKITKTLSKVAVEQSASIIKSNWTTTKKKVKKAIAQNENLTKDDKHYLYLCLKHTPTLYNILNYKKVDYQTDYLKDLKIDVHRLNNLLRRYVRRYKTKSHTNKTNIVLTSSLYKFDLNNKNFAFTGKKKHSRIEISLIGNIPKLKGTLELVKNQKTNQYYLHVPLDRIIIKKNMTDESEILGLDVGITDLITLSNGSVYGANSAELFYTLSDNLVNKNRSRLFSYKQKLEERISTEQDQSKKSILEQKLKKLEDNNLGSKKRISKISKYKSRIVSHINCELNKMVKEEDVKEVVREDLNWISKKRNKRNVSKKQQNRFSTWAKGTLLERLSVKLTENGITETIVNPAYTSQVCCKCNHLGDRKGKEFKCSNCNLSIDADFNASINTKKRKFIKEIDIDTPYKEVKKYYENLPV

SEQ ID NO: 31858 - protein, 412 aa, unknown
  TnpB Polypeptide
MGMKGAFLSWGKGGADFRFRSPQPEWSLMNKTYQFRLYPTKKQQAMLSEWLGLCCEVYNAALQERRDAYRMAGVSLGFAHQCAELPACKQVRPELAEINSQVVQDAVKRVDLAFAAFFRRCEAGEQPGYPRFRSRLRYDSLTFKQYQNSFDVQGGKNQKGTLILSKLGHIKLVMHRSLKGTPKTATVKRTATGKWFVSITVETEQEADSLPPSDEQVGIDVGLKTFAYLSTGEQIANPRFFRDEERALAHAHRKLSQEQKRTKQREKRRKVLARVHERVRWRRENFIRQQVASLIKRFGFLAVEALVVRNMVKNPKLSKSIADAAWSSFFAQLLSKAEEAGREVVRVNPAYTSQTCSACGHQQAMPLSVRVYECSNCGLVIDRDHNGSKNILAEALEAVGRHGRVIPEAHGL

SEQ ID NO: 31859 - protein, 357 aa, Paenibacillus sp.
MLKAYKYRIYPSIEQAHFFARTFGCVRFIYNKMLADKISHYESTGKALKNTPAQYKREFEWLKDVDSLALANAQLNLEKAYKNFFRDPKVGFPTFKSKNTNHHRYTTNNQKGTVAIEDEFLKLPKLKTKVRIKQHRLFTGMIKSCTISKTPTGKYYASILVETDIQPLPKQNTRIGVDLGLKEFAITSNGEVTSNPKHLRKSEKRLAKLQKDLSRKKKGSNNRHKARLKVAKLHEKISHQRQDFLHKVSSKMISENQVIVMEDLRVKNMMQNHKLAKAISEVSWSMFRTMLEYKANWYGRTVLIAPKHYASSQLCHVCEYKHAGTKDLAVRQWRCPECGTEHDRDINAAKNLLKLAM

SEQ ID NO: 31860 - protein, 385 aa, Paenibacillus sp.
MITNVCAIIKANSWIGGERWLFHHKAFRFRIYPTQEQIVLIQKTIGCARFVFNYFLDKWNQAEIGKARSYHACATGLPPLKSIFPWLREVDSIALQSSLRDLADAFSRFHQKQNEAPRFKSKRNPVQSYTTRYTNGNIAIEGNRLKLPKLGWIRFAKSREVEGRILSATIRKNPSGNYFVSLLSEVEMQPLPKLDVVLGVDLGIKSFAVCSNGEVVSNPKHLRAYEKKLAFWQRRLSRRTPGGSNNQKAMQKIARIHEKIANCRQDFLHQLSTRWIRENQTICVEDLQVTNLMKNHKLAKSIAEVSWAMMRMMLTYKAAWYGRQLSVVAKNYPSSQLCHVCGFRNPEVKQLSIREWSCSDCGTQHDRDHNASRNILKEGLRLLVG

SEQ ID NO: 31861 - protein, 369 aa, Paenibacillus sp.
MLHHKAFRFRIYPTQEQMILIQKTIGCARFVFNHFLGKWNEAYQETGRGLTYNTCATGIPSLKGLFSWLKEVDSIALQSSVRNLADAFARFHQKQNKMPCFKSKRNPVQSYTTKYTNDNITIEGKRLKLPKLGWVRFAKSRDVDGRILSATVRKNPSGKYFVSILCELEIEPLRELESIIGVDLGLKSFAVCSNGEVVSNPKHLRPYEKKLAFWQRRLSRRTKGGSNYTKAKQKMARIHEQIASCRQDFLHKLSTRWIRENQTICLEELQISHLMQNHKLAKSIGDASWATIRTMLNYKAVWYGRQIQTVAKSYPSSQLCHVCGSRNREVKQLSLREWSCSECGTHHDRDHNASMNIRQEGLRLLGNPN

SEQ ID NO: 31862 - protein, 388 aa, Nostoc sp.
MSIDYLHDKWYYVYMKTLKFKLYQHKRNRYLKANINAAGVIYNYCIALHKRYYRMWGKHLNCAKLQAHIAKIRKRKEFWQSVGSQAVQDICQRIEKAYQLFFKHNKSCVRPPGFKKVKKYKSFTLKQAGYKFLGGNRVKIGNRIYQFWKSRDVEGTVKTLTIKRTPLGELFMVIVVDDCFEPEIKSTTGNIAGFDFGLKTFLTCSDGTKIESPQFLKQSLNAIKKASIHHSTKLKGSSNRERARKNLVRKYEDISNRRRDWFWKLAHELTNKFDVLCFETLYLKGMQRLWGRKISDLAFGEFLQILEWIAKKKNKQIVFIDRWYPSSKTCSCCGHVLESLDLSVREWRCPYCQSVNGRDENAARNIFKVGASTVGLGDVRLAMPAFAA

SEQ ID NO: 31863 - protein, 388 aa, Nostoc sp.
MSIDYLHDKWYYVYMKTLKFKLYQHKRNRYLKASINAAGVIYNYCIALHKRYYRMWGKHLNCAKLQAHIAKIRKRKEFWQSVGSQAVQDICQRIEKAYQLFFKYHKSCVRPPGFKKVKKYKSFTLKQTGYKFLGGNRLRIGNRVYQYWNSREIEGKIKTLTIKRTPLGELFVVIVVDSDDESKIKFTTGKTAGFDFGLKTFLTCSDGSKIESLQFFKQSLNCLKKANRHHSRKLKGSSNKERARKNLARAHEDIANRRTDWFWKLAHNLTNRFDVLCFETLNLKGMKRLWGRKVSDLALRDFLDILGWVAKKKGKQVVYIDQWYPSSKTCFCCGHVIDTLDLSVREWRCPSCQSVNGRDDNASKNIQTVGASMVGLGDFRRATPAIAV

SEQ ID NO: 31864 - protein, 462 aa, unknown
  TnpB Polypeptide
VRAIKVRIKDKHILNYLRTKIFLTQHFENMMIILINQDLNQNNGVNFKYLTNGRIMRAVFTGTSGGALKSDVDYIKNFYMNNCLMKDIMDVVKQLKVHNIVEQIKNIRKNYTSFFTKAQNDDTKANKPSPKSLKNLNHATLYMDGYKSITLKRKNSIGLNLSKRMTYTHVNHEPLIKLVKNLSSIKNINLNYSNGFIYMIINYAEASETYYNISTPKYAGFDIGVKNIASIYIHDEYSPSLIIDGSKFIAYNCSFNRFVSKLNSETYKLSMDPHNSLRLNSLINFRKFLYEKRNNYFFSEFHKLSKLILKYLHSKNVTHLVLSKKICHLKNNGCCKINKNIKQHFMQIPLIKLIDNITIKAIWYNIKIIFVDESYTSKTSSISKNICSIKNLSLNSTPLSTDGFGGSRVKRGLFKDFKYDKLINADLNGAFNICKLGVLDLPVLKINYKKLCNPVKIKAIAI

SEQ ID NO: 31865 - protein, 441 aa, unknown
  TnpB Polypeptide
VSFDHKNGFLILIQKASGASVISQVAARWKPRGFPQVPDLRQPLWRKAGFSFPALAAYQSCETAVSGYMKLTAKVKLLPTDDQARLLRRTLETANLACDHISTRAWNAKTFNRFKIQKLTYAETRTKFNLTAQVVIRCISKVADAYHLDHKHKRRFRPHGGIAYDNRILNWRMADGTVSIWCLGGRQSMPVVAGPHQLELLAHQRGQTDLATIGGKWYLFAVCEIEEPAPGDVSDVLGVDLGVTNIAVDSDGRVHSSAQVNGLRHRHRRLRQKLQAKGTRSARRLLKRRSGKEARFAADVNHVVSMRIVAAAQGTGRGIALEDLHGIRSRITVRRSQRATLHSWSFFQLRSFLEYKARRIGVPLVLVDPRNTSRTCPACGYIDKANRVSQSVFACVVCGFSGLADHIAALNIRVLGRAAVIRPYVSDAQTTAQRQGQATPL

SEQ ID NO: 31866 - protein, 337 aa, Staphylothermus sp.
MVRVTRTVVVESTRVPRKLFRVLVEVEGMYRNMVEQLTIHAVRNGASSFTRLKALRYRELRKLYPKLPSHYAYTACQDSSTRAKSFLRLKKLGWVKSGYPRVERISIWLDDHLWRLDGYTSIRIATHRGWIRIEFEPHKLYWKYINSGWKPASEAKIKLDKRNRKIIIYLVLVKDVEPYKPKGYIPVDVNENNVAMLVDGKPILLETDMKKITLGYYYRRKRVQEKYDKTYGVKSRTKRKVLRRLREKKKKHSIRWKTANIIVREALRRGYGIALEQLGRRSANNMIKKIRDKQLRHRIFQASFRSIQKAIAEKAREYGVPVIYVDPRNTSKTMPNT

SEQ ID NO: 31867 - protein, 439 aa, Staphylothermus sp.
MQGSSLVIREDVRMYSVDFSDERIRELITWYVKSLQRAIDEIWENMEWKYDFKRRYAKVRIPVIPRNKEFKKYLRDKLMKDNPYTKHWVDAVIRTAYSIMENWRKRYVKGMARKKKPTVKRRFARCKITLMKVDYSRKTIRITLKPYEYIEVSYANQWFSKRIDEWKVGGVVLKDDRVLIPFKKENTYRVNREIAWDCNEKTIDGFSPQMGFVQVDLRKLITARIRYQEKRSRIQSLMKRKPKSARKLWEKYSRRERNVCRDIERKIAIEIVNAFPNTLHIFEKLNKQKMISKRKNKNKNLRKRVARISWINIIREVEMRAPVKKVDPYFTSKTCPLCGYVNKDLRGQVFECPRCGWRIDRQKNASINIYLKMKGFPPSPNTFYRVVTKRMIHSGKVWMRRGSGVTQIGGETNEMLPNERGDEAGVPQSLHRQIKAYVG

SEQ ID NO: 31868 - protein, 382 aa, Staphylothermus sp.
MTGKFKIKENVEIDRLFKIYREIVNYLINYAYENNITSFYKLKSKTYRNLREKYPNLPSHYIYTACQIATSIYRSYRKKKRRGEARNKPVFKKDSIMLDDHLFKLDIEKGVLKLSTPKGRITLKVYVSNYHMKFKDWRTGQAWLVKKDNGIFLNVVFSREVEIGEPKDFIGVDLNENNVTIALPNGFARFETREREIRTAYYVKRRKIQKKIRAGKKRKKLLEKYGKRERNRLNDLYHKLANKIVELADGYGIALENLKNIRKSIRYSKEINGRLHRWSFRRLQSIIEYKAKLKGIKVVYVDPSYTSSLCPICRGKLSPNGHRVLKCMRCGFEADRDIIGSLNIRLKALKMWGVSVPPESPSMKPERGRLAVIINTYNKSYG

SEQ ID NO: 31869 - protein, 402 aa, Staphylothermus sp.
MVEVTLTVPFKYEKSGEIRRLLVDFRDMVNFCIEKAVQSGVTSYARLRKLVYGEWKRRWDYSTHFCHSACRIASSMLKSWRRKTRRGEADPKKPPKAKKLFIRFDQQLVKFDGERLRISVKPRRFLYVKLRYGEYQRRFIEEWRRGNLRIGEITMNENKVIIPFKKEVDLTNPSDWIAIDINESNVTGVSSNPHILRIEHNLRTIHTTYYEIRRRIQKLSRYKPITSRRLLKKYSGREKRKTHDLCHKISKMIVDFAKKEGLGIIMEDLRGIRKRIKYNRNLNRRLHSWNFRKLQFMIEYKAKLNGIPVVYVNPRNTSRLCPICGGRLAPNGRRLLKCRKCGYINDRDIIACINMLRMRGVPVPPESLSMKFEGKNPMKMERGRLAVAKAIKVTANQNGGGS

SEQ ID NO: 31870 - protein, 441 aa, Staphylothermus sp.
VKWRESLVGARGQTVRVARTVVVESARIPRKLFKVFVEVEGMYRNMVEQLTIYAVRNTITSFTRLKALKYRELRRLYPKLPSHYAYTACQDSSTRAKSFIRLKKLGQIDSDYPRVEKVSIWLDDHLWRLEGYTSIKIATHKGWIRIEFEPHKQYWKYINGGWKPASEAKIKLDKRNKKIKIYLVLIKDIEPYKPRGYIPVDVNEDNIAILVDDKPVLLETNMKKITLGYYYRRKRVQEKYDKIYGVKSRVKKKILRKLREKKKKHSIRWKTANIIVREAVRRGYGIALEQLGRRSANNMIKKVRDRQLRHRIYQASFKSIQNAIAEKAREYGVPVIYVDPRNTSRQCPIHRAPILYDNGSRIGKCSIGGEFWHRDVVACYNILSRTLGVDGSYAPKPLGITVDGRPVPLASTAAHDPIVLDRGLWERWKSPPKIHKYRMTR

SEQ ID NO: 31871 - protein, 333 aa, Staphylothermus sp.
VTIRGRLILNSIVDKAWLLLLMRNFRDAVEYAHNLLRKNVSENDIVKLLASRILSNAHYSYSALQRAKMYRQQPYLKLKKPQLFSIGKRNEKGNRNIRFLSTDRVQIKIPSATGKHRWITAGVRFGRKYISTIKKLINNSIPYGAGVYINSGLELHVNVPLELYTEKLKVGNKNTKNDKGYIASFDFNSDRICMVIVSREGRILDVKNKHFPEVTSPGYSGRKARDKRMKALAELVDYAYHHNVTDYVAEILSRPKKKSRSKTGNRKSSRWALREFVTHLKTLVARYGGKPHFINPAYTSVDAIPLSKQLGLDIHTTSAYLLAIRFIKGYEEL

SEQ ID NO: 31872 - protein, 390 aa, Staphylothermus sp.
VETIKSYKVPINAPKDLIKAYFEIKKKTLNEILKHINYSKHGKAHLKFGREDRRRLRNKLLKNWEYAKHYVDSAINSVISLVKSWITLHNKGRAKKPPSITRKTVYIKTTLFKVKDNKIRITIKPRQYLEVDLSKFSYLPKDYDRIGGLILQENKLIITFKKNVEVKNVKDCASFDANLTNVTGYINGRIVRYDLRKLYHIHRVYEEKRRRIQKLDKTKPKTSKRLMEKYSRREWNRARDIMHKLTTGIARMLTSLNHGVILEDLKNIKERTLRKGKDFNRKISKWNARTFQYMLEYKLRWLGLPVKYVNPAYSSQTCPLCSGRLTAYGGRLMKCTRCGFIWDRDVVAVLNLRMRGLRGCPERGRGIHEQGSVDADAPQSLHRQIKAYAG

SEQ ID NO: 31873 - protein, 406 aa, Ruminococcaceae sp.
MRRKKKKDPTRHNKAFKYRIYPNREQEILLTKTFGCVRFIYNSELYISMETYEATGKSNIIPYARFKDEHEWLKKVDSLALANAQLNLEAAYKNFLSEGEHSYSKKTIEKAERTGKALTFYDLNGHPKFKRRNEGQSYTTNLVNGNIAVVEGRLKLPKLGQVKMKEHRSAPNDYELKSVTISGTPTHKYYASILYEYMQEIIPAEAETTVGLDFSMGNGYVDNEGKKSQYPKRYREQEDKLAREQRKLSRMKKESANYEKQKIRINLIHEKIGNQRRDYLHKESRKIANFYDLAGVEDLNMQALSQALKFGKTVHDTGWGMFRQFLEYKLAEQGKHFIKIDKWFPSSKKCSTPKCKYLNKDLTMDIREWDCAECGAHHDRDVNAAINIRNEAVRIYEERKRNAESA

SEQ ID NO: 31874 - protein, 394 aa, unknown
  TnpB Polypeptide
VKTIEPIQKTATITAKLKLNVSEDIKAPLLETIAAYTKACNYVSEIVFESRQLVQPKLHTMTYETLRADYGMKSQMAQSVMKSVIARYRSARGNGHEWALIKFDRGEYDLVWNRDYSLLRDGTFSLNTVNDGRVKTPFAIKAMEKYFTDEWEFGTAKLLFKNKKFYLHIPATTIVKEYSLSECTDVVGVDMGMNFTAVSYNTKGKVEFHKGRPVKEKRAQFAQTRKELQMRGTPSSRRRLKKIGQRENRWMNDVNHVTSKALVAGTGKNGLIVLEDLGGIRGATEKVRKRDRYLSVSWAFFDLRQKIEYKAELAGKNVLAVDPKYTSQCCPKCGHTDRYNRDKKRHTFKCRMCNYQSNDDRTAAMNLHRKGVEHISTVASQTCSAESGAQSIAP

SEQ ID NO: 31875 - protein, 370 aa, Bacterium sp.
MEYSYKFRISPNKVQENLIQRTFGCCRFVFNRYLAMKKELYEQDGKTMNYYDCAGDMTQLKKVLPWLKEVDATALQSSLRDLDTAYQNFFRRVKQGQKPGFPRFKSKHGHRRSYKSKCVGTNIKVLDNAVQIPKLGFVKCRISKEVKGRILSATVSQNPGGKYFVSLCCTDVEIEPLPSTGAVVGLDLGLKEFAISSDGLKYPNHKHLAKSQRKLAKLQRQLSRKSKGSNRREKARIKVARLHEHVTNQRNDMLHKLSTGLVRDYDLIAIEDLAPSNMVKNHSLARSISDASWGEFRRQFEYKAAWYGKQVVTIDRFFPSSQLCSACGAQWPGTKDLSVREWACPVCGAVHDRDVNAAKNILNEGLRLSA

SEQ ID NO: 31876 - protein, 338 aa, Moorea sp.
VLQSQVLQDCVKRVDLAFKQFLKGDSNGKKSGKPRFKGKNRYKSFTFPSLSKNPINGNILTLPKLGKVKMVYHRPIPKGFKIKTATITRKADGYYVTLSIKDDSVPGTIPVDNVSNPVGIDMGLKSFLVKSDGTEVQIPQYYRKAQKRLKKIQKAVTRSKKGSKNRKKAVTKLGKAHKKVADTRKDFHFKTAKNLLDDHDLVAHEKLNIKGLAKTKLAKSVLDAGWGQFLSILSNKAENAGLVTVAVNPRNTSQNCSNCGKKVPKKLKDRIHSCPHCGYVADRDLNAAINILNLAVGRPVRSKASRSRSVAKGLVTVRVASASPIPLGGVGKKPALSR

SEQ ID NO: 31877 - protein, 311 aa, unknown
  TnpB Polypeptide
MKQELLWLKEVDSTALQSSVQTLDVAYQNFFRRVKQGEKPGYPRFKSKHDHCQSYKSKRVGTNIKVLDKTVQLPKLGKVKCRISKEVKGRILSATISRNPSGKYFVALCCTDIDIVPLPFTGAVVGLDMGLKSFAISSDGAEYPNHKYIAKSAKKLARLQRQLSRKAKGSHRREKARVKVARLHEKVANQRNDTLHKLSTALVRGYDLIAIEDLAPKNMVRNHKLARSISDASWGEFRRQLEYKAKWYGKVVVTVDRFFPSSQLCSACGAQWHGTKDLSVREWTCPECGTVHDRDVNAAKNILNEGLRLLA

SEQ ID NO: 31878 - protein, 302 aa, Anaerosalibacter sp.
MIFNRKIEVIFTKQDELILDGQSKICNWLYNYLLEMTIKDYKENNNDKKLLTGRNLRNQVPILKQEFIFLNSVHSSPLKNTAIRLKETYKKFFNNETGYPKFKSWKKHWFSLYYDEPNKGFKLIENKNLQITLGINKENKRIKVIGKLKENLNLRNTDKIKNFRLCKQQGNKFYAIFCIERKDIDKKETNKWIAIDQNHKNFFVAIDNTGVSYEFEKLPQTKYWDKVIDEIKSKRDLCSRKSKLIETETGRIYYLPSKRWTKLNNALDNAYHKRREQIKSSCYSIANWIAKNYDYVAIGDYT

SEQ ID NO: 31879 - protein, 417 aa, Lactobacillus sp.
MAKTMAQLPYHYGLKVRIFPSTEQKRLIKRNSDASRFIYNQMNGMNNDLFWLKKVKTPITLVLKRIADLTERLKKPSTAISNIHGWLNHPDFDSLMKANAIKNYKTAWKLFRQVHQAGTPKFHKRGYTQAYQTSCLYSAKVTVLNMENGSVRLTDNHHLQLPKLGHLRFKGLPLKILERANDIRIGTTTVSMDAVGHYFVSMQIGSEYPFVAKQPIVKSKVGIDLNLDNFLTDSNGQVIDNPRYYRMIKGRLAKAQRKLSRRSRRAKNGQRRLSESKNYQRQRLLVAKLQLKIANQRKNFLHHISTDLIKNHDLVVAEELRSKNMLRNHALAMSISDVGWRTLLSMLAYKADLYGRKFLTIDPRNTTQTCSHCGHVMTGKNKLTLADREWTCPSCETFHVRDHNAAKNILAKGLAAL

SEQ ID NO: 31880 - protein, 393 aa, unknown
  TnpB Polypeptide
MRVYKTEIHPTQAQIELIHKTFGCTRYIYNQYVYENLENLASGKDFISAFSYSKRVNNDPNTPSWLKEVPSKAVKQALIYADRAFRNYFFKRKGKPKFKKKGRNDSFYLTDTLKVERHRVFVPVLKWIRLKEFGYIPEKISSVTISMKNGRYYISCVCKEEKDERIALSKESMGIDFGLKDQFITEDRTIPSINRSLRIKKLEQRLRREQRRLSRKMEANMVEKVYYKSGVKKGQLKSYKWLKPLSECRNIQKQKLKVARLHERLTRIRTDYNRKTLRSLVLERKPSSITIENLSVRNLMKNRHLSKAILKAQWYQSRLYLENLCNRLGIELRVVDRFYPSSKLCSTCGFKYQDLKLKERFWTCSNCGSEHDRDRNAAINLGRCQTYTVLTAV

SEQ ID NO: 31881 - protein, 469 aa, unknown
  TnpB Polypeptide
MGESAKKTCKTLVTHARNTQQVKRLLDPHAYDASKLWNCGLYQLYEWLNNHNLPSGDLDHALKAHLKTNQHYNGLHSQSAQQVLEELADAFTNWLDSPDKRDNPPGYRKQWYHDNEGNLVHEEHPRSTITWKQSAIRHDEQNHRLRLSKGATHKSSPRAREYILVNYDKPEHREIGEITQVRAVWNGDEYEIHIVHEIDVPELSPGDKVAGVDLGICVTAAVAFPEEAVLYPGYTLSEDKHYFQQEEYETEGQDGPSNKAEWARETLSSRTTDFRHKLSYEIAEQCVERNVGTMIIGDPSGVEEEDWGRHGNKMLHNWGYGELGDMLEYKLLERGVEVERPDERGTSSKCSNCGHKNEDDRVQRGLWKCSSCGVVIHGDVNGADNIRQDSIPVTPPLARAASAGDSGNGCVAQPSVFLFDRSRGFLPREALVDCQSEASNPVSSGSTTSGGSEKGSNNVVISETGSPRL

SEQ ID NO: 31882 - protein, 382 aa, Bacilli sp.
MEIYRAYKFRLYPTNEQKKLINKTLGCKRFVYNYYLNYLKDNNSINRFDLHKDLPKLKEENAFLKEVDSTVLCSAVDDLCKAFNDYYAKRKGYPKFKNRFSKQSYRTSCIRSIHKEKEYSNIEVDLLIRNIKLPKLGKVKIRGFRTKNKIEGKILNATISRESTGKYYVSVVVVKDALIEKVTPTSIVGIDLGIKDLVVTSDGIKYSNEKVLMKYERRLKRLQRKLSRQVKGSKNYLKTKEKIAKIYAKIKNYRKHYLNDIANEIVNDHDIIVTENLLVKDMFKDKKKAFNKSLSDACVSTLRSLIEWKCKIKGKIYYKINTYYPSSQICSHCGYKNSKLKNLSIREYDCPKCGSHNDRDINASLNISLEGLKLHYNLVSIV

SEQ ID NO: 31883 - protein, 382 aa, unknown
  TnpB Polypeptide
VATIQKGIRVRLYPTEEQRVLIDRTIGCCRFVHNQTLENCIQSYEQTKHLPSKNERITNLVSLKEEFEFLKEVDAKALQQSVRDLNFAIDNFFKNRSHFGFPKFKSKHDLKQSYRTPHSGGTADVVDGRHIKLPKLGSVRTKRFDMPKVYKILNITVEKTNTDKYYASICIETEIQPLPKTGKQVGFDLGLIDLLIGSDGTRVERPKFSYVYKEKLAKEQRKLSKMRTKLERTNANLDECKNYQKQKHKVAKLHEHIANCAKDFNHKLSRELVEEYDLIATEDLNVSGLIKNHYLAYSIADVRWGQLLGFIKYKCQWYGKNFVQVDRFYASSKICSCCGTYHKDIVSSLKVREWTCPDCGAHHDRDVNAAKNILNQALSVGV

SEQ ID NO: 31884 - protein, 423 aa, unknown
  TnpB Polypeptide
MSEEKNSKIKDTLRATKERRSQMDCRVFSVKIQKNRLSRAKEEKLNRCFLETKWLRNAVVATDSLSLEDTSTVQVKVNGSFETREIKCLSSQMKQSVMDSIKQDIYNLSKAKKKGLKVGRIRFKKECNEINLKQFGHTYSIRGKNKIRIEKIGVLTVNGLEQINLDEVEFANAKLIQKPSGFYIHLTVYTKKQSTSNTEKEVLGLDMGIKSQLTFSNGVKVNFYLEESEQLKGLMRKLSRQVKGSNQYKQTLTRIKRIYEHLNNKKNDVVNKLNSILKTNYIICFQDELLNQWKRKKSKQKFSFGKQVQHGILGRVKDKLKKNTSNVMLDSSVPTTQTCPVCGCLTKHSLDKRKYHCMHCGYENPDRDIHSANMMVLLSGYGTYRSLNTDTVSTNKLVSLLTNLENVGVVVTTDGMEAHCISS

SEQ ID NO: 31885 - protein, 225 aa, unknown
  TnpB Polypeptide
MRLPNSGMSATMNVIIIKNWDWKSILTGIIRKKHIKEICGTDSCHHRQRRRPASSWTKHGNLFYVLKKTGGIKEPNPPRFKKDNIPVTYMQMGIRNEKGSDQLRLSLPKNLKSYMEETYGIHEKFLYLENKIFRKMDRIKQLRIYPPKNGKCDLIVIYEIEEPEQHSQNGHYLSVDLGLHNLMTCYDSGNGRTFILGRKYLSVSGKQKELSVTGLKTPEIIKVAA

SEQ ID NO: 31886 - protein, 431 aa, Streptomyces sp.
MEQRGPEDGLVKRQFGHRARLALDPAQAAVLDAQAHAARTAWNLLHDWWLMLPKAKRTLAAADTVIRQGRAELDWLGVLPAQAAQAVLKTYFQAWRNCWEGRAQAPEFKARFRTRMSIDIPQGRDLHVVRVHRRWGMVNIPKLGKVRFRWTKDLPVGKHVGKHRRVTGARLVKDALGWHIAFRVATLEQAPAPHPGPEVGIDAGITIPLALSDGETAEHEPWLSKKEEARLLSFEQRAARRKEHRKKGERTSRRLHKTYDQIARIRATAKRRRDDWQHKTTTGIAERYGTVVVEALPITNMVKSAKGTVEQPGKNVAQKAGLNRSILGEAWGRTVELLAYKLAQRGGALAEVPAPDTSQECSRCHTVTPGSRRNQAEFVCNNPACGWEGNADHNAARTVLHRYRTGHALDPAAGRAVVRRAGHGVKPATAR

SEQ ID NO: 31887 - protein, 435 aa, Streptomyces sp.
MSRSVKQQDGQQGLVKRQFGHRARLALTPAQVAVLDGQAHAARTTWNLLHDWWTMLPRAKRTLAAADRVIRQGRAELDWLGVLPAQSAQAVLKTYFRAWRNCWEGRAGAPEFKSRIRTKLSVDIPQGRDLHVVRVHRRWGMVTIPKLGRVRFRWTKDLPVGRGADKNNRITGARLVKDALGWHIAFRVQALTKAPAEHPGPEVGIDAGVTIPLALSDGERAEHDPWLSKKEEARLLSFEQRAARRKEHRKKGERTSRRLHRTYDQIARIRATAKRRREDWQHKTTTAIAHTYGTVAVEALPITNMTKSAKGTIEQPGKNVAQKAGLNRSILGEAWGHTVQLLAYKLAQRGGLLAEVPAPGTSQECSKCHTVTPGSRRNQAEFVCNNPACGWEGNADHNAARTVLHRYRTGHALVPAAGRAVVRRAGHGVKPATAR

SEQ ID NO: 31888 - protein, 407 aa, Streptomyces sp.
MQLRYSFRLYPNPVQRTALAQAFGCARVVFNDAVRAREDARAKGKPFPEAGELSKKLITEAKRSKDRSWLGEVSAVVLQQSLRDAEAAYKNFFAALKGTRKGPKLGPPRFKSRKDNRQSVRFTANARWKITPKGRLALPKIGEVRVKWSRSLPAAPSSVTVIKDAAGRYFASFVIATDPATDLTTVPDTEQRVGIDLGLTHFAVLSDGTKIGSPRFLRRAEKKLKKAQRELSRKQKGSKNREKARLKVARAHVSVADARREFHHQLSTKLIRENQAIGVENLAVNGLARTRLAKSVHDAGWSSFVNMLEYKAARYGRTLVKIGRFEPTSQTCSACGHRDGPKPLHIRTWTCPACQTVHDRDTNAAINVKTAAGLAVTACGVQVRPELVPAQRRETGSHGFPLEPCAT

SEQ ID NO: 31889 - protein, 383 aa, Bacillus sp.
MLVHKAYKFRLYPNKAQEVLIAQTIGCSRFVFNHFLAKWNDTYKETGKGLTYNACSSQLTQLKKELVWLNEVDSIALQSSLKNVADAYSRFFKKQNRAPRFKSKKNNMQSYTTKHTNGNIAIVGNKVKLPKLGLVRFAKSREVDGRVLSATIRRNPSGKYFLSVFVETDVQSLEKTGSVTGVDVGLKDFAILSDGIVYKNPKYVRQLEAKLAKAQRVLSRRQEVAIKQKRKISEAKNVQKQKCKVARIHEKIANMRVDYLQKISTEIIKNHDVIGIEDLQVSNMLKNHKVAKAISDASWTQFRTMLEYKAKWYGKQVVAVSKTFASSQLCSRCGYQNKDVKNLNLREWDCPSCGTHHDRDRNASKNLKNEAIRLLTAGTAGIA

SEQ ID NO: 31890 - protein, 426 aa, Halogranum sp.
MAKQVVTRTYTASIRNQQQVSDDLDSLGFSASKLWNVGRWTCSRVWDEIDYIPEHDELTAYLKSHERYDDLHSQSSQQVLQGLAEAFNGWYGKRRNGDTKANPPGYRKHNDEHPRSTVTFKNKGFKLDTQYNRVRLSKGSNLKEYWSDFILCEYQTRPDVDLSTVESVQQVRTVWAGDEWELHFVCKVEIEVSESPGEKTVGVDLGINNFAALAYEDGHSELYPLNCLKQDDYYFSKRIAQCDDSDSEQATRLNQKKSARRTHYFHTLSKHIVQRCVDEEVGTIVMGDLSSIREDEESGESKNWWKHGNLDLHSCAFDRFTSMLDYKAEIEGITVEQVSERDTSKSCSCCGQKRKSNRVERGLYVCDKCDTVANADVNGAENIRQKVSPSLTCDGGDRSNGWLAQPSVYLFDSESGCFAPREQATS

SEQ ID NO: 31891 - protein, 466 aa, Streptomyces sp.
MKDLADQPTRVNGDEAKRIKREALGIADRKKHHGRAATAMKGRAKAPDTQQRVYRYRFYPTPSQAEQLEKTFGACRWVYNEGLELRVGAWERHRVSVGFAESCRALTGWRQSSETSWLREVSSTVLQQSLRHLDGAFTRFFKQLAKHPQRKTKHRSRDSATYVRTGFRWAENPELPGTGLVTLAMQTVPLDVRWSRPLPAGAEPVRVSVTRDRAGRYFLAVLVEERIEPLPAAFVPGERAPKAVGIDLGLAALVTLDDGTKVDHPRLLKKYERELARLQRGLHRKTKGSKNREKARQRIARLYALISDVRRDTLDQLTTRLVRENQVLVVEDLAIMNLLRPAVGKGRRRKARLSRSIIDAAWGELLRQLRYKCVWYGRTLVIVDRFFPSTRRCSGCHAKGPSLDVSVREWTCAECGAVHDRDVNAARNLQEEGMRLYWLVASALPPGRRPPSVIKASEPADVLLAA

SEQ ID NO: 31892 - protein, 376 aa, Methanosaeta sp.
MRKSFKYPIYPTKSQQSRMERTLDLCRWVYNQTLAYRKDAWEKEGRSTSKYETHNLLPEWKVEKPELIEVHSQVLQNVQERVELAFKAFFRRVKSGEKPGYPRFRGLGWYDSFTYPQSGFKLSFGKLRLSKVGDVKIKLHRPIEGKIKRLTIRRTSTGKWFACFSVEIDDPPKPPWKDGSMVGIDVGLESFATLSNGEKIDNPRFFRSEEKALAKAQRRLSKCEKGTPDRMKALKVVQRIHERIANKRYYFAHQVSHNLVERFGLIAFEDLSITKMLNNHCLAKSISDAAWRMLVTIISYKAESAGSIVVLVDPRNTSQLCSRCGLKVTKSLSDRVHECPQCGLIMDRDENAAINILRLGLQSLPKARSPALQGGE

SEQ ID NO: 31893 - protein, 270 aa, Methanosaeta sp.
MRYNQRVVTVNLVHGIATIASIKGRIKATFFIPQNYRDYLTWKIKSSTISYDRRSDTFYLHVSLEHDDPQPITEFKVLGIDRGIVNIAVCSDNTFYNSKKVKNTRAKYAHLQKELQSKGTKSAKRKLKRLAGKERRFVTDVNHCISKQIVNSDYTVFALEDLSKIRVQKRRGKQFNHKLNNWSFYQLEQFIRYKAEAIEKHTLLVDARYTSQKCSECGHIYKGNRNGSSFRCRKCGFELHADLNASRNIAQAGISCLSRLPCQPAQCSPV

SEQ ID NO: 31894 - protein, 366 aa, Methanosaeta sp.
LLKVLRYRIYPTKSQRTKMADTLELCRWTYNEVLAVRKNAYEQEGKSLSYYDTKKLLPGWKEEKPKMKEVHSQVLQEVVKRVDLAYQAFFRRVKNGEEPGYPRFKGYGRYDSFTYTQSGFSLKPGKLWLSKIGDIKIKLHRDIVGEIQRLNIRRMPTGKWFASLLVKVEPDEPIPKTGLSMGVDVGLKSFITLSSGEHVDNPRFFVHEENALARAQRKLSKAGKGTPERARALKVVHRVHERITNKRDDFVQKLSLSLVKSYDLIAFEDLNIKGMVKNHCLAKHIADAAWNQLITATSYKAEWAGKRVELVNPSKTSQICSGCGQVVQKVLSERVHRCPFCGLTLDRDHNAAINILRLGLQSVAKA

SEQ ID NO: 31895 - protein, 378 aa, unknown
  TnpB Polypeptide
MRVYQEGLLPAQEVQSQARHRLRDRKCRSNPQEKRRVQNRNGARADKKVPRLLSVLHHRQARGTTIQADRRFYFAAVPAQHGSSNPISGDRVRLDKLAGDMCSAAPAILHRPIPETATIKQVALTIRGPRMFAVLMLDLVGQDRQYAATGQVAGIDPGRKMALSLSNPDQTVTERMQPPLARHSHVLKRLRRLQRKAARQLRAANPDCFNADGTFKRGKRPKNKSNNFRRASQQVLDAQEHIANARSDYYHNAANQLLSAYDVIGVGTWRGKGNAPGEGKAKRAQNRKDYDHAISSFVSILEYKADECGKQVFDVPEHGSTKRCSFCRADTGPTGLEGLKVREWTCRECGTHHDRDFRAAAEIARRAQRMAGANSRPR

SEQ ID NO: 31896 - protein, 383 aa, Chloroflexi sp.
MTSFSTRTICCKVQVDSATDAALRATQQAFNAAATACASVAWDQRVTNKNTLHKLVYGPTRTNYGLGAQLACCARDKAAEAVRRARQDPDATCPVFRDDGSIRYDVRTYRLKSLDRVSLNTIQGRVVGQLVLGDLQRRTLADTSWQIGGAELIRRAQVWYLHITQTKPDPEPAAPMGVIGVDLGVVNLATDSDGETYSGQQVQQIRERRFRHRQRLQKANTRRARWRLRQLAGTEKRFQRDVNHRISKKLVQKAQQQRKALALEDLKGIRERVTVRRSQRRQHASWAFFQLRQFVSYKAQRDGVWVYLRNARNTSRTCNVCGYCAKANRKTRDRFVCGQCGHTQPADENAAINIARVDVNPPMVLRHPGGGASTSRRLEACGR

SEQ ID NO: 31897 - protein, 295 aa, unknown
  TnpB Polypeptide
LIQHGARVGDAKLWYDQAKKYFYLLVSLEIERTDPTLESHKQVIGVDVGIRYLAVTAASTGQTSFYAGKRVRHQANHYARLRKRLQQKGTRWAKRRVRRIAQRERRLQQQANHVVSKHIVRTYPRSLIGLEQLSDIRERTKRRKRRRKKKGKGTELVSRKARKSNRVYSQWSFAQLQGMIAYKAALAGSMAIKVDANYTSKSCPKCGHTSDKNRPQKGLLFHCQNCHYELHADLVGARNITMRALLLRQDWGKTGHLSVAPDASDKEAKALRLQRYSELRWSPEASPSRSTGRGD

SEQ ID NO: 31898 - protein, 235 aa, Escherichia sp.
  misc_feature (47)..(50): Xaa can be any naturally occurring amino acid
  misc_feature (171)..(174): Xaa can be any naturally occurring amino acid
LSGLTKTSSRSGLLFPDSKSGDRMMHSATRRALSSIRKTAVFFCRNXXXXSMVGLDAGVAKLATLSDGTVFEPVNSFQKNQKTLARLQRQLSRKVKFSNNWQKQKRKIQRLHSRIANIRRDYLHKVTTTVSKNHAMIVIEDLKVSNMSKSAAGTVSQPGRNVRAKSGLNRXXXXHVLQGVEDVNELRHLLVQRADAVFHLSHFALLHTGAKAEQASQQEQSKNVSIHRSSLSRRN

SEQ ID NO: 31899 - protein, 442 aa, Synechococcales sp.
MYACQQNLISNQEILPFLDYLCTEANNLTNCGLYLARQLLFKAKYIVGKYDLEKSLKQNLHFQFLYSQAAQQILRSVAESFASFKALNKLFYKGKIKDKPKLPNYRKSGGLALITYPKQALKLVNDQIRIPLGKKVKASFGLDCFYIPMPTNLTFNSIKELRILPRNGCFYAEFLYQKPDVETNLDKSNLLGIDHGLNNWLSCVSNIGKSFIIDGKKVKSNNQWYNKHIGKLKTGKPQGFWSDELANITEKRNRQMRDSINKTARFLMNWCLKNNVGTLIFGWNKGQKDGINIGVKNNQKFVQIPTAKLKDRIAQLCTEYGIEFIETEESYTSKSSFLDNDKLPKFSGEKPAREYKFSGKRIKRGLFKTQNGFLVNADLNGAANIIRKANQNVSIQTSFDLSEVCREVLSLPHLYDIFSDLKKSYRKQAQKSAVLTRFFASA

SEQ ID NO: 31900 - protein, 421 aa, unknown
  TnpB Polypeptide
VQLVERHIIKDDRFMDICVKAKNLYNQSLYYYRQSIFGNIEYFKEYELTGLFAEFKEENYTSLPAQTSQQIIKLMFKNIKSWQKSRKEYENNKSKFLGKPKLPNYKDKTSICIFTNQQVKIKDGFLIFQKITGLPNIKTKQNNLQQVRVIPKLNHCIVEVVYNKKVPSILKYNGNWMGIDLGVNNLMACTTKDSAFIIDGKRLKSLNQGFNKTRGKLKSILPILPKIKTKTGNKIQKGTSKKINVITQKRNRRVEDYIHKSSRLVIDVAQSKQITKIIIGNNKNWKNEINIGTKNNNIFCSIPHDTLIEKIKYKAQMVGIEMICTQEAYTSKCSALDLEPIEKQESYVGKRVKRGLFKTKKGLLINADCNGSLNIARLGLSASGDEINFSESLVRCVSQPKKVYVLNYKNKLLKVYKDKIL

SEQ ID NO: 31901 - protein, 212 aa, Bacillus sp.
MKTFLCRKQNKIAKSREITGRIVNATVRRNPSGRYFVSLLVETEVQELPKTSSYIGIDVGLKDFAILSDGTHYENPKFFRSLEDKLAKAQRVLSRRMKGFSRWNKQRVKVARIHEYISNTRKDYLDKISTEIIKNHDVIGIEDLQVSNMLKNHTLAKAISEVSWLQFRSMLEYKAKWYGKQVIVVSKTFASSQLCSCCGYQNKDIKNLNLRK

SEQ ID NO: 31902 - protein, 486 aa, Mycobacterium sp.
VGTLDGHLNTFGHPKLPAAMTTAAGAATALAGTSILAQPSRMPTPPRPVSKSWWDHHGALAVVFTGLPAGDLVMPVRLPAGAGQWPHLQHFLGSPALWHKIDLVRVADRRAPGGWRYYARLLIHGRGYQSPSTRARRAQIPAGRRAGVDANVSNLAVASFSASEPSGHEPGTLVAAQIVCTPEHLQAAAWAAKKIRERQRALDRSRRNTNAGQYGPSVRQHKRADRRAAEGLAPRLVVNPGGARAARADGVPLRAYRRDELSARYRQLRHDHVASARASSQAKHARATTVAAEIVAAHGNTITIEDCRISNWSRLWGKRIALFSPGTLVAALAAECAATGGRLSRASTRTTAMSQHCLCGARVPKTLDQRVHDCPRCGLRADRDTVSAVLAACVRFTDPDDPSTAVIDYRLAHALRAWLAPQQERGGSVNRHQPPPPSGDGSARTGSHPVASAEHAAPGPPPNRPRQRGRHGNSRKQPAPKLIGAA

SEQ ID NO: 31903 - protein, 310 aa, Streptomyces sp.
LKANLRAGRYGRPGTKRHTRAAGKPIVFRPEAAQPYDDRMLSWQHEQRTVSIWTTAGRLKGVAFTGQAEQLAVLAAHRHGESDLLCRDGTWFLIATCEIPEQRLNAHPVAFLGVDLGIVNVAATSDGVKHSGRRINRKRAKDRELRRKLQQKNTKSAKRRAKKYAGREARRNKDINHKISKGIVAEAERTGRGIALEDLGGIRERARLRKPQRTTLHSWPFAQLGAFIAYKAKRAGVPVVYVDPAYTSQECSQCHHIERGNRPSQARFACRVCGFVEHADLNSSHNIAHRGWLAWVCGVQSTAPELTLIA

SEQ ID NO: 31904 - protein, 493 aa, unknown
  TnpB Polypeptide
MAQLASEIRGISSYATYITRNDTQLGNELARITTTAPAEAGRRAGVVMPDFLVSGRGKSRKERLLRYNVVTAFRSWQERTKAVNGESAKYVSQGWKRTANDSAPTYGEGDFINLGAVDKQYAVIENDNPFSDGEIVLKMVIRGAWYYLIFNFDNRRFTEGKVTLPLIKVENNQPVFIFSVVTDNPVVQFSSDYVIGVDVGINNYATVVVRNTATGKIVHRTTLSQRVHSLWNSVRASERQVKQLREKATRLLNDRPYERQAIMAALDEAQLHRKAASRKKKELAIVAAQEIAHLSHFYGNAVVAIEDLSWIRNTMQNGRWNRGAFVQWLTHYVSQNDGWVVAVNSARTSQLCHKCSSEVEHPEHKVSRCPMHGDMDRDVNAAANIAARAVPKVEKARKKRAKNPRLQEDAPLKTPITRCSLKYPGRDRTKNCPTPKRKKKCQGVNTLSSPARAQANRLEASVLADCLTYGVAGTSQAAIKQGTITTYRLCSPI

SEQ ID NO: 31905 - protein, 424 aa, unknown
  TnpB Polypeptide
MQLVERHLIKPNHELYNTLDDLTFKAKNLYNHGLYLYRQSYFEHKKNSDVPILTWADIDKNLRKQGNDDICALPSKVANAVLKNLGENISSFWRLVRLKRDGRLAQKPKLPGYLHKTDGRYPVSFNYQTFGTKRGANMELFLCPRGINLPIPTKVANPKQVRIVPNHNNFVIEVIYNVEESEPKHTSKYAGIDLGVDNFATVTFSTQNKPLIIKGLELKSINQGYNRLIAKAQTQLPVSCKASKSIHRLWSRRSWILTTKIHQMTAFLATLFDEMQIEKVFIGKNTNWKQNLPFGKKVKQRFAYLPYETFIEQLQYKCKLRGIAVITQEESYTSKASFLDNDDIPVYGEVDNPKFSGRRIKRGLYRSGDGRLINADVNGSYNILRKGLMNNNQSFSQVDNPLIQPLVVKGIGKEPNNKLVQLYM

SEQ ID NO: 31906 - protein, 525 aa, unknown
  TnpB Polypeptide
LAKSQTYKAFVARPTHILDLNGELREIAPVMSQLMSEIRNISTYATYVVRNDTVLGERLARAGAVQPAAAGSRAGVTMPDFLASGRTGRSRKERLIQYNVVTAFRSWLERIKAVNGESDKYISQGWKRTMNAAPPSYGEDYINLGAVDKQYAVIENNPFTDGEITLKMVIQGQWYRLLFPFDNTRFTEGKVTLPFVKVEDGKPVFIFSVVTDNPIVQFSSDYTIGVDVGINDYATVAVRDTKTGKITYQTTLSQRVHSLWNSVRASEKQVRQLREKAARLLQDRTYERQAIMAALDEAQLHRAAASRKKRELAILATQEIAYLSHFYGNAVVAVEDLSWITNTMQNGYWNRGAFVQWLTHYVSQNGGWVVTVSAFNTSQVCHKCGSEVTHPKHKVSQCAKHGIMDRDVNAAANIAARAVPKVEKARKTKAKNPQLQEKQTPLKTPVARCSLKYPGRDRTKNVPTPKRKNHPRNVKEVTLPSSPARVNPTTVLADCNTCSVNVTGTSQAAIKQGDVSYKCKLCNLN

SEQ ID NO: 31907 - protein, 206 aa, unknown
  TnpB Polypeptide
  misc_feature (184)..(184): Xaa can be any naturally occurring amino acid
  misc_feature (186)..(186): Xaa can be any naturally occurring amino acid
  misc_feature (202)..(202): Xaa can be any naturally occurring amino acid
VDRNLRNLTVGNDQETRHHDLSETVRIVKTTLRIIASLRREDTRIRTGITSKYGERRTSRTSHLLHSATKTIVAVAAQRRQAIVLENSQGIRCLYRKGNGQNRKYRGRMNSWSFSEAQRQLEYKARWIGLPVIRLSRRETGGSSVSCPRCGERLQSDRRLGRKLWCGKCRIVMDRDMVAAVNLXRXGRVRVRTFPASHHRGXRRSS

SEQ ID NO: 31908 - protein, 357 aa, unknown
  TnpB Polypeptide
MDVPKYVTVCGRVIFDNNETYLELGKLCYLFRKNLQKAVKMYAKGLSKNIIVKTITKEMNLGYADTIYKLAKFIVKGCRANGGNPLRIRIKRMFLVSRGFSSNKGNRNIRLVSTREVLVRTLDKRWLKLGVKFGKKYLTLIEELVKLALQKRASYSARIIFRNGKAYLSVSVPIQLYLKYFKLGKAKGKLIAGLDINSDRINMVIIDDDGNIRDVKNEHFHEVTSQGFPRNKAKYIRLNAIARLLDYAYHHGVRYVCFENLDVIKKKKFTKSKKANRKITKFAKRQILSHAVIRAMRYGFKILFVNPKNSTKEAKKIHRKLGFDVHTASAYIIALRGLKILKNNGNFQNILTTQTSE

SEQ ID NO: 31909 - protein, 418 aa, Clostridiales sp.
MPPLKKEELCQTMKLHIHPCDNDIALLKDLTEHYRLACNDISQYVFDHGCMLNSVELQKVLYEHIRKAFRLKSQFAISSIKTVTARYKTIETVYAKSPYKYQDEKGKWQFIPRDLSWLWKPVLFSRPQADFVRNRDYSFVNGASGEKLLSLNTLGKRIKVSFDVPECFHEYFDGTWRFGGGKIVNLLGEWYFHISMTRAADHQFDLTNTSHVVGIDRGLRFLAVAYDEKGKTSFHDGRKIMKKRDTFNKVRAELQSKGTKSAKRALKRISGRENRWMTDVNHQISKALVQKYGADTLFVLEDLTGVSFDEQNLSTRTKKQRNELRSWAFYQLEQFLTYKAHAVGAEIIEVDAHYTSQRCPKCGQVRKENRNHETHEYVCSCCGYQSNDDRIGAMNIQMLGTMYVSGDTNPRFGVRKEN

SEQ ID NO: 31910 - protein, 367 aa, Ruminococcus sp.
MLKAYKYRLYPNKEQRLQIAKTFGCCRFVYNQTLAYRKDIYEQGKKSLSKTDCNNYCNRELKAQYEWLKEVDKFALTNAIYNMDSAYQKFFREHAGYPKFKSKHENHKSYTTNYTNGNIEVNFENNKAKLPKLKWVKAKIHRRFDGDIKSATISQTPSGKYYISFLVETIHQSLPSVNKTIGLDLGIKEFCITSDGDKYENPKTLRKYEKLLIKLQRQLAHKKKGSNNYHKVRTKIAKCHEKIANIRKDYLHRISLKIVSENQVIVTENLKVQNMMKNHHLAKSVADVSWYEFTRQLAYKAKWNGRIYQKTDTFFPSSQLCSYCGYLNPETKDLSVREWVCPSCKTIHDRDVNAAKNILSEGLRLLA

SEQ ID NO: 31911 - protein, 385 aa, Chloroflexales sp.
MQRTIRVKLSPSTAQAELLAETSRLFTAAFNAVCRVGWEQKITNGVDLHHATYYPSKAAYPTLVSDLLVQARVKATEAVKSAIALQKAGRKVGMPQSAACPPRYNVHTYKVDWERQTVRMSTTGGRQTIRFDIPDYCVQYAGYPVDTADLMNQDGVWWLHVVVTVPAPAVEPTEEVVGVDLGLAQPAVTSNNQFLGKRVWKDIEGRLFYLKRQLQRKGTKSAKRHLRKVRGKQARFRRDCDHVLSKQIVQSAQPGATIVLENLTDIRKRSKIRKQTKTSRRVHSWSFAQIKGFVEYKAEGRGCTVAGVDPRHTSQACSCCGHIVRNNRRSRGRFVCRKCGYELHADLNAARNIAAKYHASVAICDAGGLPVNQPIVPTSTLLALE

SEQ ID NO: 31912 - protein, 359 aa, Domibacillus sp.
VETISLRLELMKPTETKKQMYQKMTELNTSFSNWLLSYEELSKATSRVYKLFSLEKLPSAVVNQTIREVKSKQKTQKAKTFRRFWCGFNNQNLAIEQENGLYKLSFPTLEKRIGVPVIAEVYQQHWLDKILSGQAKQGAAELHEKKGKWYISLSISFEPRRAASSSKVMGIDVGLNYLAVASVGTKMLFFRGNGAAFIRRTFSSRRKKLGKRKLLSVIKKSKNKESQWMKNLNHKMSRQIVNFAAENGVHCIRMEDLTGIRCKAKSKKEAGRNLHSWSHYQLQTFIEYKARMAGIQVEYVNPHHTSQTCKCGHVDKKNRKRHTFSCVKCQYTLHADANAAINISKAISGLSKRKNKQAA

SEQ ID NO: 31913 - protein, 254 aa, Domibacillus sp.
VETISLRLELMKPTETQKQMYQKMTELNTSFSNWLLRYEELSKATSKVYKIFSQEKLPSAVVNQTIREVKSKKKNQKAKTFRRFWCGFNNQNLAIEKENGLYKLSFPTLEKRIGVPVIAEVYQQHWLDKILSGQAKQGAAELYEKKGRWYVSLSISFEPKRAASSSKVMGIDVGLNYLAVASVGTKTLFFRGNEAAFIRRTFSSRRKKLGKLKLLSVIKKSKNKESQWMKNLNHKMSRQIVNFAAESGVRCIRM

SEQ ID NO: 31914 - protein, 519 aa, Bifidobacterium sp.
VGSYLVFASQYPAGCSLEAVDERAQGNLGRVGDEQVHMVVLPVEFDEFAFEVPADFAHDLFHVLEHGVGEHSSTIFCHKDQMRLEIVNACAAVSEFIRILHRPNGIIGGMEQTVRYRYRAYPTAVQEQSLKRLFGCCRVVWNDTVRLFRELFDPNGRMPSSAALQKKVLADAKRTEERAWLAEVANVPLLQMHRDALQACWNGVRKTRRQRRARYRSLKRNPVNSARFTANGFRLRDNGRLYLAKIGDLKIKWSRDLPSTPSSCTIIREPDGAWYVSFVVRRETTPLPEIPVSNAIDLGFNHLGSLIDTDGNRRRIPAPKPINQTQRRLAKAQRKEARQQQGSKRYQKQKQRIARLYAKARHQLDDYQNKQALRIVRETQAIGLETLNVHGMSRIHGRSVLTVAPSRFVMKLEHKAQQYGRQIRHIGRFQPSTRLCSQCGHHVKGGIPENIRVWKCAECHTILDRDYNAALNILDAAGLAESLNARGDSVRLHLATAGRSNSQGNANHRHHNDAGIPVL

SEQ ID NO: 31915 - protein, 307 aa, Bifidobacterium sp.
MRKSHGGSATFMKTAFTWDESKRELTLAKMREPLDIRWSRTLPKGRMPSSVTVSLDSAGRWHASILVEATVRPLRRSENAVGVDLGLESFAILSTGEKIANPRFSRRQAKRLRHAQKALSRKAKGSNNRRKARLKVARIQARIADQRRDFLHKLSTRLIRENQTVVVEDLNVQGMSRRVKAKPDPNRPGHYLQNGKKAKNGMNRSIRDASWSMFRTMLEYKADWYGRRLIVIDRWYPSSQTCSTCGKRTGCKPLNIRSWTCPYCGTHQDRDVNAAKNIQAAGLAVIACGDGRKGENRKQSSPEPIRQ

SEQ ID NO: 31916 - protein, 316 aa, Leptolyngbyaceae sp.
LQKANRRQERLSPVQEIPNSRQRRYKTTGWKLSNDRQQICFTDGFKAGRFKLKGTRDLNFYSIEQIHRVRAVRRSDGYSVQFVLDVERFERSEPTKRTVGIDVGLNYFLTDSDGNTVENPRHLRKRERRLKRLARRVSKKPKGSKNRRKAQQRLGKAHLKVQRQRRDFAVKTARCVVKSADFVAYEDLQVRNMVKNRHLAKSISDAAWSEFRRWLEYFGRVFGRVTVAVAPHHTSQNCSACGKTVKKSLSTRTHICTCGCILDRDHNAALSILAKGLETYRGALGNATLGESLAATETGAIQSQQAISRNQESHCL

SEQ ID NO: 31917 - protein, 271 aa, Microcystis sp.
MPRDFLRLFIENLGLKPRRFTAALLLNISTFTKYMLKYETWKSYRYRFYPTPEQESLLRRTLGCVRLVYNKALHERTQAWYEKQERVGYAQTSSMLTEWKKQEELDFLNEVSCVPLQQGLRHLQTAFTNFFAGRTKYPNFKKKHQGGSAEFTKSAFKFKDRQIYLAKCTEPLPIRWSRQIPESCEPSTVTVRLHPSGRWHISIRFDDPTIKPLPVTDKAIGIDLGISSLVITSDGDKVSNPKHFKKHYRRLRKAQKKVLRFVLCNGQDYKR

SEQ ID NO: 31918 - protein, 413 aa, unknown
  TnpB Polypeptide
MVGVGSGGLRGGFRVFRVHVDRANMERLRQLFRDFADGCARTKGALRYREEWMAEWGNVLKMREEAGKRTMPNPPAITLLTKFITPDGGVRGNKNAPCVIDLRRRELRVPSYGVAVPLRGSMVEALIGENELEPRPDFVLQVTRRGFLRVIARREVQAALALPLRIITLDENSSYGFALAALDVSADGTKVSLRLFEKLRPPNHGYRREVAKLLQSYAKRPSEEARQRLSEILPQEVLEKLTTERARELAGATRAKEKRLNEAFIQRLAAEVRRLMREARQQGMGALVLIDPIDPDSLRGTRLQGTLLRARRRLKNLAMYEGAMLRLLRASGRHCPRCGYEGREVGHTKRSRIYECPRCRLRWDRDKGALYNLAYSYFAGMVREECDDYTAMACRVLASLREWLERHKNSLTR

SEQ ID NO: 31919 - protein, 407 aa, unknown
  TnpB Polypeptide
LVPSRTIDRYARALDSLGDSASKIWNVARWTADRIWNATGQIPDEGTLKAYMKNQSCWKDLNAQSSQKVIEELSDAFQSWFDLRQKGPEANPPGYRKHGDTRPKSTVTFKEDGFKHDPENNRVRLSKGSNLTENWSDFVLCEYQTRPDVDLSAVNRVQNVRAVWNGDQWELHFVCKVEFETNDSAGDDVAGIDLGIKNIATVVFPDKYVLYPGNSLKQDKHYFNRTEYDTEGKDGPSEKSMWARQKLAERETHFYYVLTNTVITECVERGGGRLAVSWPEDVRESDWGETDNKKLHTWAFDRIYQYLEYNGEIRGVEVLKEDEWDTSKTCSACGDDTESNRVERGLYVCSSCELVANADCNGAENMRQKITPSPHGEDRSNGCVAQPSVHLFDRESGTFTTREQAVS

SEQ ID NO: 31920 - protein, 250 aa, unknown
  TnpB Polypeptide
MFGKYIPLGKLKAHFAKRIKRTLLHSQTVQEILERLDNSYKRFFKKLSKRPPKYRKAEKFSSFVFKQGGFTLNGNVLTINKVNKRFKFSYSRPYEGRVRQIRIVRETCCRFSLIIITDYNPITSYGKTHDGASVGLDFGLKTYLTKSDGNNVVSPLFFKEYQKKIKKCSCKLSKAKKGSNNRKRRVFELQQVRFSDLDCLIKCCIIMKYSLFMEGENQGISISGISTEKIQRMFHTKSLNSLEERCIRLY

SEQ ID NO: 31921 - protein, 389 aa, unknown
  TnpB Polypeptide
MIVQKSFRYRLYPTYEQEQAMAIQFGHARFVWNWALALREAAYKETQKGIDYFDLKRRMTALKRQQETAWLKEADSQVLQAKIKDLEQAYQNFFEKRAQFPRFKSKKQDQSIRYPQRFKFSENLVYLPKVGWIKMKVHRPLEGKAKNVTVSKTKTGKYFASIQCEVELPDPPARGGEIGIDLGIKSFLVTSEGDQINNPRHLQKAEKKIKRLQRQVSRRKKGSSAREKARLLLARQHEKVANQRADFLHKLSRRLVDSYGLIGMEDLNVRGMVKNRKMAKAISTTGWGAFRFMLEYKGKWYGSRVHRISRFYPSSKTCGRCGFELPELALSVRRWDCPICGASHERDINAAINILNETRAGVAQSNAGGESVRWHQDATVLTEAGNLTA

SEQ ID NO: 31922 - protein, 548 aa, unknown
  TnpB Polypeptide
MTRAKDPTAPVRVTFERTRKLAVPATLNAGKAAALKGTHDLYIDMLGFFVDFFNSHYLLVEAKDAKAALSACEKLVLAVTERKVAGQRRQARQAMEGWDFTARFGPVPRDLRRAAINAAYGHLVSNLEQVRAWQEAGKEGRTPKLGVPANHPVLYAQVSKLQSAFYKDGYVRLHLLDPSDNKWRWYNVPVAGRPGTLRLLERSEEEKARRAKARARAVEACRREGRLTKAGRPAFSDEEKSAMRLAVGAVEALSPTLVVGRKGQVSLNVAFKQAVEVVRAEPGRLAGLHKTVMAVDTNTHNVTAVVKRGQKVLAARKLSYSAITARREKAVGTAIRKARLSGRRPRGERQNIVLWEHIANQGETAARQAAAWLTKLAAAYGVTVIVFEHLRPYRPERGVRSTRSARANRRRSYWLRGKVRSYTADAALARGILTVERNPAWTSTSCPRCHRLGERFSASTTNPANKARFQCWHCGWAGDADLVAALNLHLKWERAFLYPSADEVKAWKAAGRSKTPQECGAAVRANHNGDSGRSDVAGTAMLAREEAA

SEQ ID NO: 31923 - protein, 515 aa, Thermus sp.
MGQSYFQGIQAKLLFLHEEDRQAVLDLMRRFSSAQRFSYNRLLEGGSRKELKKRDGPLCTLFSLNTRYADDAVLKAEMALSSARELGRDPRKVVFGGRKLFFDLRKKHDSKLLKQRKREWRERRQGLLYARGEKAKGGNLNLRLEVEKGALWLRINLGNGTYAYTLVQTSHPNLGQLLRRVYASEPYNVELTLKDGQVYASFTWEEKAPPLTCTKDNGVLGVDVNADPYHLALALVGPDGNLRQHLALSLEELDRAPNRGAKETLLWTVAHRAVDFAATHGVAIATERLKYLRKSRRRDGSGRAFRRWQHRFAYASLLNKIHALAKKRGVEVVQVNPQDTSTIGMLKYAPQLSLSKDVAAAYVIGRRALGFEERLPKHYEALLADPRFRENAEAFYREKAGELEERRRHETNPYLKRRWSREVGKAEKAMLLLSPQGLPGSRKEVTDGRNSYGANPWRVLRVGFFLPLLGLEVPRDLSPLKPVLVQGLWEGRKAGLGPLTGGGRSVGVDAVSESK

SEQ ID NO: 31924 - protein, 365 aa, unknown
  TnpB Polypeptide
MQKGIKFRIYPNRKQQNLINQTLGCCRLIYNRGLAMRKEAFEKGKKIGYSQTSAMLTELKKCEDFAFLKAVDSIALQQSLRDLDRGFVNFFQKRAAHPAFKSKHNRHQSYRTVNQGNKIRIVGRYIKLPKLGFIKIRQSMEIGKINNVTVEHTPTGKYFAVLNVEFEPQPRPNNGGRIGIDVGIKAFYSDSNGNAVSNPKYLEKSMRKLIREQRKLSRKEKNSNNRNKQRVKVALIHEKITNQRNDFLQKQSTMLIRENQTICIEELKVKNMMRNHKLAQHIGSASWSKFFSMLEYKSAWYGNSVVKIPTMYPSSQTCSSCGYKNPMIKNLAVRIWECPNCHVSHDRDTNASINILNKGLQMQSS

SEQ ID NO: 31925 - protein, 248 aa, unknown
  TnpB Polypeptide
MERIKAVIHRPVEGKVKSITLKLDSCGDFFASILYDDGKPCAEKPKAVRASEVTGFDLGLAAFVTDSNGEKIESPKAYRRAKKRLVKSQRALSRKQKGSANREKARRRLAKQHRRVARIRADFLHKASRKLVDESQALVFETLKVKNMLKNHHLAQAIADSGWGEFVRMVEYKAEREGRCVARIDAFYPSSKTCSHCGHKREVLDLSVRSWTCPKCGARHDRDENAALNIKAESIRMLRANGLVVLRA

SEQ ID NO: 31926 - protein, 454 aa, Flavobacteriaceae sp.
MTIETIHKAYKFRLKPSEEQLKKLYQMAGCGRVVYNDSLDYFLSVLKKETGISDKKKLYEHLNDVAPKERRGLKKNLSSAFSLNKLLTGWKKKPDRLWLDSAFSACLQQRQADLVKAVKDWASGKRGFPKFRQRKIAHHSTMRFPSFSTQCEIDNRKIKLTGKLGFVGFYKSQDIEGKPKSATVTLNAQGQWHVSILCEVENKLPNYVEGGQVGIDMGIAKNITCSNEVCGDRGVFVGVHSYRSFEKKLATEQRKLSRKEKGSSNWKKQKQKINKIHGRIANIRRDYQQKTTTEISKNHAMVVCELLKVRNMSKSAKGTEEKHGKNVAAKSGLNKSILDEGWHEIRRQLEYKMAWKGGVFATVNPRNTSRECNRCGHTEKGNRTSQANFECVACSHSENADKNAAKNILLRYLKELDESITGLDLARSACEVSRVIGQQQETVDWSNSVQLALI

SEQ ID NO: 31927 - protein, 441 aa, unknown
  TnpB Polypeptide
MSDEEYKKLLKQYHKLSDRHILVVETDMPYPDVLKVVALSDKIRKAGNELVSLMRKNYDQLMRTKKYRKLLKLYGNTEDKDKRKALADQLNDMQKSYNVTWDLCRTSMIPIGKKYSIDAVFALTKAEDIWRGMEKCLYDNGKTTHFSKYGELPCIRAKQINRGIPMFVEDGKLRFKLRKMQFGIQVNDRFQSDEVNAVLSYLENPDKMDADAVNTLIEEACCIDTYRPCYATLVPRLIRGKYRVYLHLTIEGKAKPKYDRSGNPRHKYGKGMIGADIGTQTVAYTSDTEVGLKNLSERGNSIQTSERKERLYYRAMDRSRRATNPQNYNPDGTIKKGKKTWKYSDRYKKLKAKHAELCRINAVNKQIAINEDANYLRSLGDTFVTEPKNASKLMKRAKKTTVNSKGRFNKKKRFGKSIKNRCRLDFKLLLKRNSKSQAAHI

SEQ ID NO: 31928 - protein, 466 aa, Caldilineaceae sp.
MPNSPDSTAQAPKTVHRTVRLRLYPGDAATGILLTAIAGACRYVWNHMLADCEWRYARWKEMHVPALNWPEVREGKTAWAKAIRRKMGPGPSTSFFTLGQRFTALRHDPDHAWLKAYPYQVVRYSLKYLADAYKRFLADPVNEGKPRFKARHYTVPAFTIPEAVRMDGDRLHVPKVGWLRLAGSDPYADCRPLTVRVRMEGTEQHPKWYAYVCYEVPAEQVKQPAPDGALGLDRNVGQATDSEGTVYAMPDTDKLDAQIARKQRELSRKQGWGPKDRRPKSNRGRRVNGQLNKLQRKGARKRDDATHQASRKLADTAHTVVVEDLNTKGMTQSAKGTVEKPGKQVKQKSGLNRSILASGWGSWERKLAYKAGELRKVAPAYTSQTCSRCSHVHRDNRPSQAVFACGACGFRANADHNAAINILVRAGLPCVPVSARGTGAAARRGALPWGSPTTRERDGPTVKSGL

SEQ ID NO: 31929 - protein, 411 aa, unknown
  TnpB Polypeptide
MNYKNKLLITYKFKAYPSFEQENKIHEIFNIETQIYNEIIKRINEIYAQNKEITENDIKQVIYKLKNLWDNKIYFIIISSLKKRIFGNLKGLIKLKKKGRKNIILKPKEKITYLFYKHYGFRIESDGILFLGIGKIKVLFHRPIEGKVKGVGIKKDKDNKWYVFIIVELNKKPLPKTGKIVALDWGIEKLLTTSDSIAIENPLILDKLEEKIKKLQKTLSRKKKGSKNYEKTRIKLAKIYKYAKNLMDDYLHKITIWLIRNYDIIYVENLIIKRLMQASYSKKLRKHIFYSNYSTFIKYLTYKAKLYGKQVIKVSPKNTSKKCARCGYINKKLFLKDRIFKCPKCRLEIDRDYNAALNILNAGLGRPKAPVEEKSLLYISFLKGIYSKFPMKQENKSPRGPRGDFIPSIVG

SEQ ID NO: 31930 - protein, 553 aa, unknown
  TnpB Polypeptide
VTGCLRRLAAPFVAAAPAGARVRARLRLSPEDEAVLRAAGAHLGSLAGKDLAARCAEGRLDARGQARSRAVRKRALTAASSSRWAGAITRTSEDQHRLAAQNLRTERASLQVRIRRIQTRLTVPAGLKTGRDRGYATAAERYAKTVRLQKLQARLAAADRRLEAGTVSVVRGGKALLRKRGNLAAADLTQAQWREQWESARLFLTADGEKDKAWGNETIRWNPDQSWLEIKLPGPLAHLANRPHGRYRLSCPLQFSHRGDEVAAQAATGAVRYDISHDPARDRWYLDASWRTPPVPAPPLEDLRQAPVLAVDLNHGHLAAWAVTPEGNPAGPPVTIQLVLAGLRATQRDGRLRAAISFLVRRARQHGCRAVVIEDLDFADAREQGRERNDGRPARGRRGRGFRRLVAGIPTGRFRDRLTQMASNAGLAVIAVDPAYTSRWGREHWLAPLQDQASPIATGHHAAAVVIGRRALGHRARRRVGVTGGGQRTGRRGTAPRAPVAGRADRDGRHREAQRQPPSWRKTATARRTRPPDQATQDRSGPPASRDHVRLAQ

SEQ ID NO: 31931 - protein, 529 aa, unknown
  TnpB Polypeptide
VPRGRRRPPPRPRSRPPPRLHPHLPTWRTCFHLLLWRLVARGQCGAASLRASAATGNVRGVTPRGDTAGVPRKRNSNSVPLVYRTARVRLRVTPAQARRCWALLVAGGDVWAGLIELNRYRFARCGRPLLNYQEFCREVAGVRVGELSVPALRSVVRRYADACMETAKRKRRGEDARYPRRRRRLMPLRYYAGTFCLEGQRVRLSTARGTQELCLRLARALPYPEADVRSVTLLAEAGRLCLDVTAEVPRSDPPGEGVAGVDLGIIHPFAATSGNEALLVSGRAIRAEERLHLADTKARQKKLAPKTPRRGQRGSRRWRKLRATQRRAEAKHRRRVHQMQHQAAKTLVEWARGAGVATLVVGDLRGIARQKTGRVQNRRVGTAWRRTHLLGALGDKAEVAGIALLLVDERGTSSTCPQCHQRTPKPKGRQFSCPHCGHTGHRDIVGARNIAARGGGSTTAPAVVKHRRAGKPPARRDRRRHLMDVHRSCPAPGRPRPEGVARRAAVSDQGTVAAFTGRRRGSGNRANVV

SEQ ID NO: 31932 - protein, 420 aa, unknown
  TnpB Polypeptide
LPRRTFRAFVELEGMYRNIVEQLVLYAVNNNITKFTRLKAERYRDVRSLYPQLPSHYAYTACQDAAERAHSFLKLKRMGRARKPYPEVRSVSIWLDDHLWRAEGLTLVSLATHRGRVRVSVELNKHFLRYVNRGWRLASEAKVKLDHKERRLIFYITFKKEVSEYKPKDYVTVDVNEDAEAVLIDGVVYLLETGLSKVTLGYYYRRKSIQERYDRVYGSGSRPARRIFKRLSNNERTFKREIRWKLAALIVREAARRQAAIVLERLGREPTNHMIEHIKNPQLRHRIYQAAFKGVQAAIEEKAREYGVPVIYVDPRNTSRACPIHGAEIIYGRNRHGVCSKGGETWHRDVVACYNLLLRALGGDGGAAPSRLRALIPVDGGPVPLGPTAAHEPAPIARGAWARWRSLGATNDYRQTRISV

SEQ ID NO: 31933 - protein, 246 aa, Moorea sp.
MVVVQNSQNPHLNGKTVKSIWLNVLNLYLFALCRQLPVNCNPSTVTVSLDPSNRWHVSIRFDDHRDLSLSPTDKQVGFDLGITSLITTSDGDKIANPKHFKKLKKKLTKFQKALSRKQKGSNNRYKARLKVARIHAKIKDARRDFTHKLTTQLVRENQLIAFEDLAVKNLVKNHKLAQVISDANWAEIIRQIKYKAEWYNREAVSIDRWFPSSKMCSVCLNRVESLPLNIREWDCPSCNTRHVRVA

SEQ ID NO: 31934 - protein, 500 aa, Brasilonema sp.
LITEVPLKVDSKQESELLSRFQAGRQLYNACLNEAMKRLELVRNSELYLTAKKLPRIKKKERGDAFKKAREQYRYSEYDLHSFATATSKSAKWIAQKVDSNTQQKLATLAFKATERVMTGRAKEVRYKVPSRFRSMEGKSNQTGIRWKNDCLVWGKLVLQPIIDPNNPVIRHGLESPIKYVRLLWRILNGKRRWYAQLVNEGSPYQKPQNYVSDGLVGLDLNVSNIAYVGNDHADLLPFAEKVPTFQNQITKLQRQMQRSQRANNPDNFEPNFEAHIGRKTVSKKGKVKKGKAQWKKSSNYLKAANRKRELERRKSAYAKTQNRRVVNEILRHGKHIKTENVSVRGWQKRYGKAISAKSPGFVQSELCRKAENAGGTVIKFSTQTTALSQTHLDGSRIKKPLSQRVHRDVTGIPEHHRDLFSAFLSRHVNQDKLVLQSAQNEYLGLEPILLEAYQQRITREQVSTSESRQSGSPSERVSNELLTPSQIVNKDEKLGGDVA

SEQ ID NO: 31935 - protein, 318 aa, Streptomyces sp.
MRARSCSRRAPSPSPCSVQSGRSSATSASTGPVGTSTHCAHTACVSPAWTRTATSVWPNSPATPSFWPLSSSRSWPATARARTRWSGRWREPRLRTRRRPRVSPCDPAGRRARRDARAQRDASRVCGTERRPEVAPNTDPVDFLGIDLGIVNIATTSDGEIMAGREINRIRARERGLRRKLQKKNTPSAKRRLKKRRRKEARRAKDINHKIAKHVVAEAERTGRGIALEDLTGIRERVRLAKPGGTSHALKAVGEGHPLQLVLRPAGAVHRVQGPQGGSAGGACRSGVHLPHLRRMRTRRQGEPGLPGLVRVPELRIR

SEQ ID NO: 31936 - protein, 547 aa, Streptomyces sp.
MAEPRKQLRLLEAPFVAAGPSGVAVRDRLKHLTPGDEEVLRLVGAYQGALASGDLKARCAAGHGHDNEAWAVRKRELTGRSSSRIAGAITKVTHDQYALARRCLLAHIQSLEAGIAMLRHRLSLPLGAKGSKRAPGGYRSKGEWFHKSRRLHLLEDRLTAARADWDSGRARVVRGGRRLLKTRHHLDAAHLTEDQWRRRWEAGRWFLTADGESGKRFGNETIRVTPDGQVSLKLPAPLASLANSKHGRYTLAGKVAFAYRGEEWRDRVEGNRAVAYRIHLDVDRGRWYLIASWTRPTVPTIPLATARAQGMIGVDTNADHFAAYQLDTHGNPVGDPHRFFYDLSGASTHRDAQVRHAITQLLHWAKQCGVRAIGMENLDFAAEKTREKHGRRKRFRQLISGMPTGRLRARLTAMAAEAGIAIVAVDAAYTSMWGNEHWRTPLTTAHRTMTRHDAASVAIGRRALGHSIRRRTAPPPQHRSDAAGHRTAQARPGVPGREGTRPPVTDRALDARHRTGTPRTRATSASNTVRDVRSTRTWVQDPLLHTV

SEQ ID NO: 31937 - protein, 352 aa, Blautia sp.
MQIISSYGVELRKQNIPIRQTLEIYRSAISYLIGIYVQVWEKLAEIPDAKRRFNAAEHLVHTTKKNHACFDFDIRFPKMPSYLRRSAIRHALGTVSSYKTRLDLWEKTDGKSGKPRLVYENHAMPVFYRDVMYREGAEGKDEAYLKLYDGHDWKWFCVRLEHTDMEYLRKYWSGKKASAPTLEKRHRKYFLRFSYTEEVTLTKTPVKEQIICSVDLGINTDAVCTIMRADGTVLGRKFIDHPSEKDRMYRTLGRIRRFQREHGSAQTQGRWAYTKRLNTELGKKIAGAIVRYAEENHADVIVFEYLEMQGKISGKKKQKLHLWRKRDIQRCCGHQAHRKGMRVSRICAWNTS

SEQ ID NO: 31938 - protein, 459 aa, unknown
  TnpB Polypeptide
MKTIVFNIEYKTEKDMLVVMNDERIYSSAFRYSFNRFIDGIEKKEIYHDLSGKFSELGSHIRDSAISDAKGQYEAYLENKKSFYKDDANKDKPYKVHFGKLFRYQNKLITKDEYRESRNRGLMSVGEANQHGNRMFKLDVDKKAITYKRRCKEHIEFGITEKLSEKRRELLKRIEIAMSEMSSPITMRIKRKKLYITYDESEIEKYKRFHNLRSNRILGIDSNPNYIGLSIIDCNDAFNFDVVHKRVYDIKELLKLDDSNKENYELSIIGCEIVKLCKHFRVGKMAVEKLDFDVPLTKRKNSVNKNGKRRRINGRDQNRLLLNKWKYRRIFGHLKTLCNTYGIEFAEVNAAYSSQCGNLIYGSENTPDMVAASMEIARRSFKQFEKGTFYPPFNKERVVDVLGSQWKDEPMPNFNSWKGLFPIIKESKPRYRFPLDESAAVFRHNYSKRLTVVNVFNGS

SEQ ID NO: 31939 - protein, 403 aa, Clostridioides sp.
  misc_feature (128)..(128): Xaa can be any naturally occurring amino acid
LVISQNKSGNIYVYSLTKNLFFNRNKARLKVARLQEHIASQRNDFLQKLSTKLIKENDIICIEDLQVKNMIRNRKLSRLISDVSWSEFIRQLEYKANWHGRQIVKVGKFFASSQICNKCGYKNEEVKXGFPKFKSKKTNRFSYKTNFTNGNIMYCGQHIKLPKLGMVKIRDKQVPQGRILNATISKEPSGRYYVSLCCTDVDIEAFENTNNQIGLDLGIKEFCISSCGEFIENPKYLKKSLNKLAKLQRELSIKTIGSLNRNKARLKVARLQEHIANQRKDFLQKLSTKLIKENDIICIEDLQVKNMIRNRKLSRLISDVSWSEFIRQLEYKANWHGRKIVRVGKFFASSQICNKCGYKNEEVKNLNIRDWICPSCNETHDRDINASMNILKEGLRLITIQNK

SEQ ID NO: 31940 - protein, 297 aa, Acrocarpospora sp.
MGTPLTFVWSWPGVDAAAINPTTVTISRDPCGRWYVSFAVDVEEPTPLPATGAVAGVDMGIKDFAVTSDGVKIANPGHLARRARNQRRMARKVKGSSNRNKARAKVARAHRKVRASRADFLHRTSTRLVRGHDVIVLEDLAVKNMVRNRALAKAISDCGWGTFRRVVEYKAARAGRHLIVIDRWYPSSKTCSACGHLLPTLNLGTRVWACPGCGALHDRDVNAAKNILAAGLAVSACGADVRPQGSSLRQSATKQELPWRREESPSFRAESSQSIPFRWMTPRYHSALSLSTRRWVP

SEQ ID NO: 31941 - protein, 492 aa, unknown
  TnpB Polypeptide
MSQVVKITKVSVKGATPYLGDRNADSSQPIFSKSPNQVMEWLCSAWRKRFNDHRSQRKKYSKDKVLIPLGDSVVEMTDKQSREEHSFLRAVPSLVLQSPEQIEAKEWFAAVKRRKTLKESGRNPGVMPKFKSFKKHDHTFACWFNGGRNARFERVGRRSGIVFITGMNPKGKKLPGEKGQRFVIRIHVRLSQDIRPYTSVRVNWSQKKLVFVNEPLAVTPRKERGQGSATGVDRGAVVLSADVQGNLDILPWDTITKLDNKVRCLQRSQERSAKDLGFDSYQAAKKAGKQTAAATRREQEIADTRAKISRVVQDVQHKVSRRLVKDNDIIVVEKLNLAGMSKKAKAKVDPNNPGEFLPNGQGVKRALNRKLRLSALAQFGEFLRYKARFSGAQVVEVDPRNTSRRCSSCGHVAQENRESQAVFLCKKCGHEDNADHNAAINILDRALRDHVEEINEFWGGKHPSVRAYKSGPCGLTAGQPSPMIRKPVCPSS

SEQ ID NO: 31942 - protein, 481 aa, unknown
  TnpB Polypeptide
VKTKTHHRSVDVRHNANQSKVEQVEDLIRWFSSACAVCKTEKIRHLRAGGKLQRFPKKQWTIGKPDVFSARMFKSVENVVDAALRSWQETSVIAGRKIISEWRKQDTGLSDDDFIALYTLNKAKRWWDPHADYPERREILIREILKRNPFPVLDGKTATLDSIVCDVVDAEQSKHETWLEIRGFKGARISLPVEKTSYFNTEMSKGKECGVTQLHLDRDGNLVIHRVVEKTNAPLRQTGKDIGIDWGLTSLVATTDGQLLGLALHPWLKERDEELLALTKSLQRQGIKPRSSRRYRALNRRIRQYVKNEVGRVLNRLAEQDIRSITCEDLDFRGKGLSRRTRVIVSRAGRSAFKQKLADLTESYGVEVHEVNPAYTSKQCSGCGLVADTQRKGSSFECLHCGKRMHSDVNAARNIVGRRSASDNGFRYWSKEEVLEYLNREFTSTWGWTPDLILKRHHALTAGLPGTAHSKPGGASLPVIK

SEQ ID NO: 31943 - protein, 404 aa, unknown
  TnpB Polypeptide
MLAKGVVFYLESDLPSEGKFLLEDFRLAVNNAIRAGLQARLSSRNALVKIAYKDFRQEHPKMYAQHLVSAFEVACGILKNHRKRVRKGDTRKIPFVKRLMMKAENQAYKLDRNSGVIDLPIRAGCHVELGLIVSEYHRKYLDDMSLSLGSLTVLPDRVIVAFRKNAPKPYTPDSVISLDTNERSLDGLFVEGDVAKAIKAGFPEVAIIQQRHHDRRKRLQKKKAHDRRTSKILCRREGTREHHRIDHRLHQVANSVLKFAEERRSAIVLEDLKGLRPKRSKELNRRLSIWPRRKLHRIIEYKAQWKGIPVVKVDPRNSSRTCPICGRIQYSRMGTEFKCECGWHLDRHINASINLLQTAISRGMAGGLRFNPGAFQQDVMMILYEPAMAARSEPNGTSSIAGVT

SEQ ID NO: 31944 - protein, 440 aa, Planomonospora sp.
VFRILTGRRYRLEFDFGQKLVAERIAAVCRSVWNTALEQRRAYRRRGAFIGYAEQCRQLAEAKAEFPWLAEAPAQALQQTLKDLDVACRRHGTWKVRWKTKTRWTPSFRFPTPKHLPVETINYKWARVFLPKIGWVCFRLSRPLGGTVRSATVSRDGGYWFISFLVEEAQHTPDTHAYPSRTVGVDRGVVTAAVTSDGEFFDRRHATACGVSAPESPKEGKAGRAVDRGYLSPREAERYVRLQRRLDRAKKGSARRARVVQALGEAMRRVRRRWADFNAQAAHRLTRDYAHVVFEDLKVRAMTASASGTVDAPGARVAQKSGLNRAILDKGWYGLEVAVRSKARYTGSLITTVSAAYTSQTCSVPACGRVDVKSRESQALFRCTACGYTEHADVNAAKCVKARGQAAGPVVSGRGDSGVARVGEASSTRSTARGTPRAAA

SEQ ID NO: 31945 - protein, 310 aa, unknown
  TnpB Polypeptide
LEKAYKFRFYPTKIQIEKLSKTFGCVRYIYNYFLDLKQKLYETEKKSMSFNKCSKELTILKQKKEWLKEVDKYSLQNSLRDLDRAYKNFFSGSGYPKFKSKKDNRKSYRTSYTNNNIDFLDKWIKVPKLGKLKIRDKNFKPQGRILNATISQEPSGKYYISLCCTDVKIENLKTSNKEIGIDLGIKNFAVTSDETTIENSKYLQKSLEKLVLFQKRLSRKTNGSSNRNKARIKVAKCYERIANQRKDFLQKLSTKLIKENDTICIENLQVKNMVKNHKLARNILDVSWSEFTRMLEYKSKLVWKRNSESR

SEQ ID NO: 31946 - protein, 349 aa, unknown
  TnpB Polypeptide
MLLAFKIKHTYNFSAELSKARQIAKIAINTRTDSSKDVRHIGLPSTIANQILRKYGGNCKAKKISSIKLIVPGQSINVNKEERIIKIPSLNASFMYYFKNDFEKINQVEADDRFFYVSASFKEEPLFEPKGWLGMDLNTSGHSIVMANPVTGKVLKFGKNFSHIRMKYLNIRKNIQKSGKFSLLKKIRGREPRIIRDLNHKISRKIVDYAKSAQFGIRFENLKGITERGRRQRRQRHILHAWPFYQLQKMVEYKAKLKGVPIEFVPAFHTSATCSRCGAEGKREQKKFSCLLCGHVDNADANAAFNIAKGQTGMYQLRADRDARKGNTGIPKEAIVRMPPTSKFQCAGS

SEQ ID NO: 31947 - protein, 301 aa, Duganella sp.
LTKGSSKELGLHSGNINAVCEQYAKSRGQHRRPYLRYRGRRTLGWVPLKGRDLHREGDAFRFAGHTFRVFNSRPLPEGKIKDGTCFSQDSRGNWFLNIVIEVSEPPVRPLDQGVGIDLGLKDLAVLSDTKRIPAPGFYRKAEAALAVAQRAHKRRRIKAIHAYTARCRIDFLHKESLKIARAFDHIAVGHVNAAGLAQTSLAKSVLDAGWSSFRRMLAYKAVRHGARYVEVDERFTTKTCSNCGTPIQIRAPRRGPRGIAGLGIRAWACSDCGEVHDRDLNAAKNILRRGRATLVAGIPVL

SEQ ID NO: 31948 - protein, 278 aa, unknown
  TnpB Polypeptide
LIDVERQESHKPTGQITGIDLGLKEFYTDAQGNTVENPRYLRKSEKRLKKAQRKLSKQFRKGKKQSNNYHKQRIKVAKLHLKVSRQRKDKAIKDALALVQSNDLVVYEALKVRNLVKNRKLAKSISDASWYQFTEWLNYFAKIYRIVCIAVPPHFTTQDCSVCGTRVQKTLSTRTHQCPNCKTVLDRDHNASINILKKGLKYLGNHLNGTVGQTGTDPNALGESSLWILNGDIENLSCLVEQGISDSDRSRIPRHSVALRWEYVNLVWVSWRQPNLVY

SEQ ID NO: 31949 - protein, 421 aa, unknown
  TnpB Polypeptide
MSVGANILYPAMKRKYVRYMQLRYNYRLYPTLGQRKALARAFGCVRVVFNDALRMRQEAFEAGLPYITDAELSARLTAAKATPERAWLAEVSSVVLQQALADLNAAYRNFFASVTGKRKGPKVAPPRFRCRKDSRQAVRFTANARFKILPGGWLRLPKIGDVKVRWSRDLPSEPSSVTVVKDAAGRYFASFVVETDPAADAERFLLGDAEVGIDLGLTAFAVLSDGTVVKAPRFLRRAERKLKRLQQAFSRKAKGSANREKVRVRVARAHARVADSRRDFHHKLSTAIVRENQAVYVENLCVAGLGRTRLAKSIHDAGWSAFAAMLEYKARRYGRIFGKVGRFEPTSQVCSACGVKDGPKPLRVRTWACPACGTVHDRDLNAARNIVALGRRETLNACGGTVRPGLAPAGPSETGTRRSAT

SEQ ID NO: 31950 - protein, 354 aa, Clostridium sp.
VILLQLTVKVKLVPNKEQKLYIQNTALEYIKTVNDKVSLMVAENNSLKLTSKDIIADLPSAVKNQAIRDSKSVYSRYKKTKIQSILKKPMCIWNNQNYSIGKDYIAFPVMINGKSKKIKVKVIIEQYQRELLNNKLGTLRITEKSNKLVAQISINVAEKENTNNKAMGVDVGLKVPAVAVTEDKKVKFFGNGRQNKYIKRKYRALRKRLGKAKKLNKIQSINDKEQRYMKDQDHKISRGIVNFAIQNNVSVIRLEKLTNIRNAAKTSRKNEKNLHTWSFYRLAQYIEYKALLEGIKIEYVDPKYTSQKCPICGKLNHAKDRKYQCSCGYRAHRDLNACINIINATVVDGNSLQA

SEQ ID NO: 31951 - protein, 429 aa, Candidate divison MSBL1 archaeon
MPELTIPAHLHQSTPRQAEKLRELMSRFGRARRRAYNLLRKGVNKSEIERSLQEETGLNARYVKDALNSVKDLPPNVTFGGKYNQELRMRHKISKDEYKTRRNSIIISRGEKYHKGNLNLRVIHEDDQLKLRINVGNREWIYPRLYIPRKYLDKYSHLLDGSKPYQVIIKRRDNDSGYDVKVAVRVNPEVRESRRVMALDVNSGHIDYAVLNENLELIQVGKIECQALLHASRYKRENLLHQLVDKIAGIAKHFNAKVVVGKLNTGKFSSWNSRANRRVKQMLQYKLRQILGYKLPLQGVPVEERSEAWTTKLGQELAPLIGLDVHKASSIMFALKIINYEKFEELRSSFKGEELHRGVRADEDDGSPSARLSVGSGLTAPRQAQSLACNEVTTQCDGGYPATPGSWGLSQFAESLKPNLVRKTVKVKI

SEQ ID NO: 31952 - protein, 259 aa, Calothrix sp.
  misc_feature (18)..(51): Xaa can be any naturally occurring amino acid
VARSGKNRRNLYPRRSKXXXXXXXXXXXXXXXXXXXXXXXXXXXXXXXXXXTGFDGSDFSEFGNGDFNKLLTLLPSRQAKSRHDKSVGRNFKRLRYKLRQAMERIRTRIKNLRSECHKQVASYLAKNYDVIVLPTFETSEMVVKKKRKLKNKTARAMMTWAFYQFSQTLEHLCNRYGSKLVRITEEYTSKTCTKCGHVHRKLGSSKNFKCPNCGYEIDRDFNGAVGIFLKAMWDTTFTDSVGDVVLNIENVLDVQKCPG

SEQ ID NO: 31953 - protein, 365 aa, unknown
  TnpB Polypeptide
MLKAYKFRLYPNKEQEIYFSKCFGSVRFIYNKMLNDKIEYYKKSNKMLYNTPAQYKKEFSWLKEVDSLALANAQMNLDKAYKNFFRDKSVGFPKYKSKKNNHYSYTTNNQKNNIKIIDNKYIHLPKLKTLVRIKQHRQIPKDGTIKSTTISKNPSGKYYISIMVEQEINELPRNEFAIGIDLGLTDFTITSDGVKYSNPRYLRKSLNKLAKEQRKLSRKKKGSKNRNKQRIKIAKLHEKITNQRKDFLHKLSSELINENQVICLEDLQVKEIQQNKYLSQSVSDVGWYEFRRQLEYKAKWYGREISFIDKWYPSSQICSNCGNNTGKKSLDIREFDCPYCGSHHDRDINASVNILHEGLRLLNNE

SEQ ID NO: 31954 - protein, 498 aa, Escherichia sp.
  misc_feature (89)..(184): Xaa can be any naturally occurring amino acid
VKRLQAFKFQLRPGGQQECEMRRFAGACRFVFNRALARQNENHEAGNKYIPYGKMASWLVEWKNATETQWLKDSPSQPLQQSLKDLERXXXXXXXXXXXXXXXXXXXXXXXXXXXXXXXXXXXXXXXXXXXXXXXXXXXXXXXXXXXXXXXXXXXXXXXXXXXXXXXXXXXXXXXXXXXXXXXXAYKNFFRKRAAFPRFKKRGQNDAFRYPQGVKLDQENSRIFLPKLGWMRYRNSRQVTGVVKNVTVSQSCGKWYISIQTESEVSTPAHPSASMVGLDAGVAKLATLSDGTVFEPVNSFQKNQKTLARLQRQLSRKVKFSNNWQKQKRKIQRLHSCIANIRRDYLHKVTTAVSKNHAMIVIEDLKVSNMSKSAAGTVSQPGRNVRAKSGLNRSILDQGWYEMHRQLEYKQLWRGGQVLAVPPAYTSQRCAYCGHTAKENRLSQSKFRCQVCGYTANADVNGARNILAAGHAVLACGEMVQSGRPLKQEPTEMIQATA

SEQ ID NO: 31955 - protein, 312 aa, Ruminococcus sp.
MNKAYKFRLYPNDIQQSVIEKTFNCVRFMHNKMLTDKIKYYFETGKTLKNTPAQYKKEFPFLKEVDSLALANVQMNLQTAFNTYFSKPGMLFPRFKTKKRCRKSYTTNCVNGNIVISGDTIKLPKIGHVKINLHRAIPDGYKLKSVTVSRDAKGNYYASILFEYEPVEPEIPPESIIGLAYSKHGLYTDINGKTVMYPEELERTAEKYRREKKRLSHMKKGSKNREKQRIKTKRIIEKLERQRTDFLHKQSRQIANAYDRVCVKESSGSSGSDYGWTLFKMFLQYKLNDAGKKLIKVDELSPQKTLYSGKAV

SEQ ID NO: 31956 - protein, 370 aa, Microcoleus sp.
VTQSDQEVTMLLGFKTELKLNNRQRTMLAKHCGVARHAWNWGLWLTKNILEYNKSHPDEKLNFPTAIDLHKLLVTLVKSENPWYYECSKSTPQQALMALRQAWKRCFNKTAGVPRFKKKGQRDSFTLEGTVKILGNNKIQVPVIGIFKTYERLPQVLTKSCTISRQADRWFISFRFDVEQQESCQTSIVGVDLGIKALATLSTGEVIVGAKSYKKYAAKLSRMQWLNRHKTIGSRNWKKAQLKIARLHIKIANIRKNTLHKLTTLLAKNHGTVVIEDLNVSGMMANHKLAASIADMGFFEFRRQLTYKCKLYGSKLVVVDRWFPSSKTCSNCSTKKETLGLSERVFECGHCGFVIDRDLNAAINLSKTVS

SEQ ID NO: 31957 - protein, 407 aa, unknown
  TnpB Polypeptide
MRLVEQHIIKRNSICYNELQDLLHKCKNLYNKGLYVVRQHYFQYKDDNTVKYKYLNYYSLEKKLRIEDDVDYRALPSPVAQQVLMMVDQNFKSFFNLLNKKNRGEYSEKVRIPKYLDKDGMFMAVFPTTAFSQKWIKQGIIKLPKQFSFTTRTNKQNVQQLRFIPKNGYIMLEIVYNKKEKDLMSDNGNYLGIDIGLDNLASCVSNNGSCFIINGRPLKSINQYYNKRLAYLKSRLKGNKQVSKRIRSLTNKRNNKIKDYLHKASRVLINHVVSNGINTIVIGHNRCWKQEINIGKRNNHDFVSIPFNMFISMISYKATLEGINVKIVEESYTSKCSFLDNEQICKHEEYAGRRIKRGLFKTSSGNIINADINGAFNIIRKSAKEAFDVSTLPEGRGFWWNPVRISV

SEQ ID NO: 31958 - protein, 483 aa, unknown
  TnpB Polypeptide
MITIQAKLGFQSKEDEQRVLDLMRRWSSCVRFAYNRLLEGKSRNELKRELQGGFSLNSRYVDDAIMKAKSVLQSCKERDENPRKVIFGGRSLFEKLKKRHINGKAYKKLKQEWQERRKGNLYSRGDRSKKGNLNTRIEIDESGTWLRINVGERKYAYARIQAGWKRGKSREGLLEAISTCGEPYSVELKLKNGKVYALFTIEEDLPEVVVTKERGVIGIDINAYPDHIAWAEADVNGQLVSYGKIPMPNLASGNSDKREYYRWQYAHEVVRLAEEKGKAIVIERLDIRDKGRRGDFSGRKSRRIRHNFSYRSLLDKVKLLAQRKGIQVIEVDPAYTSVIGLLKYAPQYMISKDEAAAYVIARRGLGLKEQIPEGYMAILRELTVDELEELKEHVKRTAENKHLKKKQLKEIDRAIKLIQSLGSEPGKASRPLGGTSLGACSESYRLWRVLKVAVVTPLSPERVLRDVSVLKGVLHTGQVGRPG

SEQ ID NO: 31959 - protein, 283 aa, Moorea sp.
MEFKAVIKEPQKLAINEAIRTARFVRNKVLRYWMDNRGTRKKELYRYNTQLRDEFKFVKDLNSHACQASVENVERAIKRFFDNCKNQVPGKKGYPRFKKHSRSVEYKQSGWKLSPDKKFIKFTDKKGIGQVKLKGTWDLWCFDQKLIKRVRIVQRADGYYVQFCVKVDNYEQLEATGFTVGLDVGLKEFYTDSDGHSEPNPRFYRKGEKRLRFYQRRVSRKKKGSANRKKAINRLGRTHLKISRQREEHAKRLVRSYRKKSAAFIVGRLCIKGDRFCCKAALF

SEQ ID NO: 31960 - protein, 429 aa, unknown
  TnpB Polypeptide
MRETREEKNKQIAQTIKATYEKRASQVCRVFTVKIQDNQLSKVQREQLKMIFVEAKWLKNSILAWTKENPENKVWDYDTKKKTIIHKDKDMNDVEVELKYIPASVKQCVQSEMISNIRTIITLQKKGFQSGGHLKFVKEVSSVNFKQYGKTHKIISSKRIKLQGISGSLMVNGLKQFLNKNLEYANAKLLNTPQGYYVQFTTYVDKSKIANKQTNGKVLGIDFGCETSFTTSEGEKIEASVQESERIKRLSLRMNKRQKKGSKNWWRTVHLLRKEYQKLTNQKNDLANKLVAKFSEYDTVIIQDEQLSNWHKGNHGKKIQHSVLGRVKSKLLLKSNVVVLSKNCPTTKLCTKCGRWHDEMSVWNRIFKCGCGVEMDRDIHAAQNMVWFYENKVGVGRTNFKRVEIKALVSEALASGIKLESVKHEADRL

SEQ ID NO: 31961 - protein, 372 aa, unknown
  TnpB Polypeptide
MRKVVPLKLANDADLRATIESFRLTQQRVSEIAFEHGCPLSAVELHQLSYATVKGPLRSQLTCTAIRTVSSEYSRARKRNRRIYGPIHFSKPRALFLIGKAKRDACPPRKETIRVWTVAGRKDIPCSIPARFKAELKNVKSYDTLAVSIKKGRLVATLSVTLSDPKREGTLPAGIAVGSKNEVAVVNSEGKSLRVITVAQNVMEETSRKTKKRLERRLAARKADGLETRSVRRVLKRLGRRRHMRTRTFCHAAANRLVEWVGKGSILVMEDLRTPPPSRRNRRRSSTPRPHFYEVLRRRVEEKAKDAAIPVYYVNVTGNERRCSLCGAAGSISKHTFHCDSCGSESPMSKNAALNIRNKFTVTRPWAAVNQP

SEQ ID NO: 31962 - protein, 437 aa, Thermoanaerobacter sp.
MAWSDKSHPHRLLLTKQFPLGRKKLPVFQPVMLAANRVWNSCVWHSRETFKQENRWPTEAELKAKFKAFTVWKELHSQSAQAVVEEYFEAVSAYRKHRENGYLEMSPPGFKPKNHLRTVTWKRQGFDVDGNTLLLKLSRGKEPVKVALPEGWNVVTLPDGTEVKGVPVEVKVKAVVRRRRVENLVLHVTLDLGVMPVYRAGAVSAYDYNSAMFARATSNSQLDLFICRGLLSLVQYRNKTVAEFQQKMSRLKEGSRRWRRCLSAKARVLKKLDRRIRQIEHALTKLFAELDEAESVAFAVVGDLTDLRRSACTGMKSKKASQKINQIAYDRLRQEQSYKNLMRGIETDTWPERSTSSTCCLCDTRNPAWRRYRGLWVCGKCRLILQADLNGAANLLKQYLFGSCAGRVELPLAFGEVRVWRWDGRHNRFVQVSSRAA

SEQ ID NO: 31963 - protein, 403 aa, unknown
  TnpB Polypeptide
METIYRAYKYRIYPNKEQEVLINKHIGSCRWLYNYALEKKTKAYKKDKTKLSRFQIQADLPKLKKQEKTMWLKEVNSQSLQASLEHMDNAFVKFFREKKGFPKFKSKHHSRRSFSIPQNVKVDWDNKRVSIPKLKDIRFALDRKPQGTIKSATVSKTPTDKYFISILVDTGIKPPKKYKIKPKTSVGVDLGIKQFLITSDGEKVENPKYLRHHLFRLKKLQRKASKKQKGSTNRKKANFRVAKLHERIHNSRTDFLHKISSKLISENQTVCLEDLNVKGMMKNHCLAQAISDCSWSKFNEFLEYKAEWTGVNIVRIGRFEPSSKMCSKCGWIKKDLTLKDRKWECEECKVFHDRDINAAKNILQIGLKEQLFLGSGRPKVKPLENASLEGSVKEEIQPSLVVG

SEQ ID NO: 31964 - protein, 490 aa, Mycobacterium sp.
LTPRFEIPTGWTAQAYRFALDPSPAQLPMLESHCGAARFAFNHMLGMVKANLDQRSAERSYGIAELELTPAQGWSLAKLRKAWNQRKEGVAPWWPANSKEAYNTGLDALARALEAWDKSRAGERAGARVGFPRFKAKHAAGRSVRFTTGAIRVASDRHHVVLPRLGCIRTHESTRKLARRLEAGAARILSATVSRQAGRWFCSFQVIVANKGRPANIAKSPHAVVGIDVGVRDLLVVATPEGVEVDRIPAPKPLQAAQARLHALQRRAARQQGPYDATNRIRREPSNRWQRTQRRIAKAHARAASVRAHEMHLVTTTLAARHDVVVCEHLNAAAMRRRGGVRKRGLNRALADAALGRVRAQLAYKTLWYGTTLVVASRLFESTQLCSRCGAKTKLRLRDRRYRCRNGCPAMDRDLNAAINLARLSETTTAGGRMRTGTGSSPAASVTAGEGRRANQKTSPTVPVGTARGDDTSTPRTTKAGTAAPQGEAA

SEQ ID NO: 31965 - protein, 301 aa, Longimycelium sp.
LAGSTPWSDLRAGTAVARTRSPTPPATRLHLQGIGHVRAHEHRAILGRVRTVSVKCEGSRWFVVLSCDDVPVEPLPATGRVVALDMGITHFATTHTGEHIPNPRCPEAVGRGVGAGATCLVYVPTTTPHQALPSASGCRRKVARLHAKICRPRLDHAHKTALHVVRAADVIAHERMNITGMVRKPQAKPDPDQPGVFLPNGAAAKTGLNRSTLDTGWGVFLRLLAHKAESAGRRVIAVGLRNSSPTCPCCGHCAESNRDREHFCCTACGYLDHAPRIDDGAVRGMPRAGPGRHSLVTMGDH

SEQ ID NO: 31966 - protein, 337 aa, unknown
  TnpB Polypeptide
LTGFKNFFDGNGSFPTRKKKKDNHFSFQVPQNYQINLTTSQIYLPKIGWMKIVLHRDFLSEEFIENSLVLKEINEEKIRDQKLNKEFKVLKTLTVSRTPAGRYHVSILIEDHEPCPEPESFTEKTTVGIDVGIKTFAVLSTGEEIENPKFLKRSLKKLVKLQRSVSRKTKGSQNRKKAIVRLAKHHQLIANQRNDFQHKISATIISESQAVAIEDLNVKGMVKNHCLAQSISDVGWSGFINKLTYKAEWFVKTILKIGRFDASSKLCNVCGYKFKELTLDIREWKCPSCKTLHDRDLNASINIKKIALSNLNTHGTWGRACGLTDVGQGNETRSYPF

SEQ ID NO: 31967 - protein, 703 aa, Nonomuraea sp.
LKFLSRPTARQAAALAACIEDHRQVYNAALEHRRVSGIVKTISVKRKGRRWYVILSCDQVPAQPLPATGTAVGIDLGVVSLVTTSGGDHIANQRHLAASADRLAAAQQDLARKKRGSKRRRKAAARVAALHAKVRRQRLDGAHKAALALVPGYDVIAHEVLDVTGMTRRAAPRLDGAGGWLPNGAAAKSGLNRSILDAGWGVFLTILSHKAESAGRELIAVNPANTSRTCSRCGHCAKENRVTQATFACTACGHTAHADVNAAVNILRAGLALRDAAAEAAWREAAPRRERRSHLFSIPRDIGVAEVMCDHRRVWRRLGVLDGIRIGLLLLGLVFVATGLLPLREAEESLGDIAPLLVFLVGIIVLAELTKEAQVFDAIAARMAVFGRGNYTALFVLCTAFASFVTIFLNLDTTAVLLTPVMLALAPKARIAALPLAMTTIWLANTASLLLPVSNLTNLLGMEKIGLDAQAFAGRMWAPQLVAILVTMAFLWTFYWRRGERRDLRYTPPVLEPVGDRVLFAAASAACLLFIGALLAEVEVGVAAAAAALIVVAAFAVRDRARLTWNLVPWQLLIFVTGLFLVVPTLSRWGLADLMSGLLGDGHDPYRTAAVGAGLANAINNLPAYTAVEAVIPGARQDQLLALLVGTNVGPVVTPWASLATLLWFESCRRHDVAVPMGRFLLTGAGLAVVGLPLTVWALVATS

SEQ ID NO: 31968 - protein, 419 aa, unknown
  TnpB Polypeptide
MQLVEQHCIRKSDPRYSVIDEAAFKSKNVYNAALYEMRQAFIHHGVYLSYEEMDTRMQSHEAYKALPAKVAQQVLRQLADAWKAFREAKAAYEEDPSKFTGRPKLPKYKHKTEGRNVLIYTMQAVSRGKRSLQRGIIKPSMLPIEVKTQQDPKQIDQVRIVPRNGHYVVEVIYRKRPVQAQVDPSFCVAIDLGVTNLAAITANREGFIPRLVNGRTLKAMNQWYNKRMKELTLCLPKADRERVTRQMEQITNTRNRQVNHYLHAASKGIIDFLVKEGVGTIIVGKNPLWKQEAGMGRRNNQNFVAIPHARFIDMLTYKAELVGIQVEIQEESYTSKASFLDLDPLPTYKPDDEEQHSFSGKRIGRRNRLYRTKDGRVICADVNGSYNILRKRKPDAFTHVDAKGIAAYVVQPLRLAITV

SEQ ID NO: 31969 - protein, 465 aa, Acidimicrobiaceae sp.
MTSRLTTPPTSRSGHILSRAVTFQFALDPNAQQRILLDKCAGARRFTVNHHLARVRANLDVRSAEREAHGDVGETTEPSTPSLSWSGFSFINEFNAWKNGQSDDSPLNDDGSCGLAWRHELPSDVFECASVDTARALENFSSSKRGERSGTPVGFPRFQAKGKVTPSFRLRNRATPGTAPSSQPVRFTDPAHLRLPRFGPMKLFGPTLKVRRMIDAGRFHIYSATLSQRAGRWTVSLTGVAAELHRAERSRTNRHAGPVGVDRGIISLCVAADANGIPIESFEGVKILKQALVKLKAANQTLARTTPGSKGRQRARSRLARTHRKVANTRRHLVHQASRSLVDRCQILVLEDLNVAGMVKNRTLARSLSDAAMGELSRQLLYKARWHGVEVRVADRFFPSSKMCSGCGVVKDDLDLSTRTYSCGACGLIIDRDLNAAINLARWRPKEPSAVTLVVPTRASLLSTA

SEQ ID NO: 31970 - protein, 485 aa, Vulcanisaeta sp.
MLCRAVAVELEVPKGVSKLLYSVESAYLGIVREVAVYAVANNVTSATELQGLFYSKYRSEYQGLHAHLIIQAIRQASEVAKSFVERRRKGLVSKPYPEVRSVSIRFTEKAWNYEQFIHSTAPVRLELSLPGGRTEVWLRPHKRFWLYWWRVLNGEAELASTLIIKRRLNRWYAVFVFEIKPRREVPQSVVAFDINENTVAVGKIDLASTVSKVVNWNRQYMIPELYTIRTDFGRLARRYERVRNAIIDRLKQSFTLPSGNYVNVANTREFRKRVKRLRERVRKLGRVRQVASELTKNPSIIITEELGENPQESMISDVGKDELRHRIKQTPFKALEKAVGDKALERGSKIFHVSSYRNSRVCPIHFTRLERTDDWHVLKCPLGHLVDRDYASILNMLWKTTPEAWVKGVWWNLRREINWGEYEGKSNPSIPYETVSHLWAHLKTFKASEQSPAVLARGKPMNPTGEADEGGGEETTQKRRRPEGG

SEQ ID NO: 31971 - protein, 488 aa, Vulcanisaeta sp.
MLCRAVAVELEVSKELNKLLCSVEEVYKRIVREVAEYAVENNVTSANKLHGLFYSKYRQEYPNLNSQLIIQAIRQASQIAKSFVERRRMGLMSKPYPEVRRVSIRFTEKAWGYEQFIRSIAPVRLELSLPNGRTEVWLRPHKRFWLFWWRVLNGEAELASTLLIKRRANKWYAIFIFKLKPREEEPESIIAFDINENTVAVGRIDIKTTVSKVVDWNRQYTTPQLYTIKTDFGRLARRYERIRSTIIERLKPEFALPNGNYVNVTNTREFRKRVRKLRERVRKVGRVRQVANELTKTPAIIITEELGDNPQESMIEDVMKDELRHRIKQTPFKAVERAVEDKALERGSKLFHVSAYRNSRVCPIHFVRLERTDDWHTLRCPKGHYVHRDYASVMNMAWKITPEAWIKAFWWNMKQEMNWREHEGKSNPIIPHGIVTLLQHIMENAKASEESPAVLARGKPMNPTGEANEGWARAPPRPLGRGGGQKEY

SEQ ID NO: 31972 - protein, 373 aa, Clostridium sp.
MIKAIKIRLLPTREQEQIMLKSIGCSRFSYNWALSRCNTLYKQGIKYSINDIRKEFTQLKKQEDFKWLNEVSSKVTQESIRNLDKAFKSFFKKTGSYPKFKSKRKSRQSFYVRCDNLYFKDDVCNIEKIGKVKFKTKYDIPYCKYTNPYCSFNGRCWILTFGVEVEENQTTLDQNLSLGLDLGIKKLVTCSNGLTFKNINKCKRVRNLKSKLIHLQRSISRKYEANKQGNTFVKTNNIIKLESQVKLIYRKLSNIRLNHIHQVTNKIVKMSPYRIVMEDLNTSGMMKNKHLSKAIQEQCFYEFIRQMKYKCKFNGIEFIQADKFYPSSKTCSCCGNLKKDLKLKDRIYKCDKCNLVIDRDLNASFNLSNYSKV

SEQ ID NO: 31973 - protein, 450 aa, unknown
  TnpB Polypeptide
MSQKVCIDGVKHIGASVFLGVDHCGNPCWTRNAGRIMVWLCDGWRTRFNQRREQRTHNIPVKDEAGGIVDWRKEPLGGPDVAELLSDKEARLQYSWMAGIPTPILSSTDRIEGIEWFAGLKRKKTIGGRIPGFKSRHRGLGFVCWRNASKTGNALFYQTGRKSGVVVIAGMNPTRWRKPGEKLHWRVIIHVRVSQPIRPYASVHVDWTHKSLTFTNMPQPLPRTGNGKVGIDRGCVHTLASSDGIFMDMPKPSKAELKRLKYLQRRMARQDRVNEARGGKNAKFASKRRRKTLSQFNVLQGRIVHRRNDWIEKTTTKLARENFLVAMEDLDVKAMTKRPKPKPDPNRSGHYLPNGAKAKARLNRSILSNNWSRLMKRLNDKMNANGGKLVIVPAAYTSQTCHQCGHVAKENRDSQAVFKCVECGYQVNADINAAMNILGRALIQTGGGTA

SEQ ID NO: 31974 - protein, 602 aa, unknown
  TnpB Polypeptide
MKAGKAHGFNRGLVEQQKREEGNFMAFGSKNSTPSFVLTLPLDISLNEQDYLYKEFKKCGVIYNQLVSVTTKMWHQLRKTRKYRDLMTAIAKAVPDSEEQKALLKQRQKKIQETGFSEGAFHKMVEPYAKHFAINSHVAQNVASAVWTAWKGFFFSKGKAVHYKKLEDVTSISGKNNATGIVLRPANLTTSNIESAKRKAQKAVEKRYDDMYGWPDPKDDKKVVLPDEVKPQMEAEIAAAIAKIKPTIGKGNLRIVYGKHEFPVVLRNPKTQTGKYQQEALKCGVKYCRITRKWVKTKWKYYAQFILEGYPPTKCDGNGVMKHPVNHGRIGLDIGTQTLAISGKDICDLRVLAPSARAQARGLTNEIARTTRAMNRSRRATNPKYYNSDGTIKRLKRKHGHKQRRDWKYSKRYFRLKAKLRDLNRRLADIRKMEHNILANELLQHGNEFVIEDMNYKALQKRSKETKVNPKTGRAHTKKRFGKSLSRCAPAMFISILNKKANRYGSSVIKVDTFETKASQFDHTDESYTKKRLSERMAHLSSGEVVQRDLYSAFLLEHIDIESLQYNMETLNSAFPAFLEMHENTKRRLQAVGSSLPASIGF

SEQ ID NO: 31975 - protein, 402 aa, Escherichia sp.
VKRLQAFKFQLRPGGQQECEMRRFAGACRFVFNRALARQNENHEAGNKYIPYGKMASWLVEWKNATETQWLKDSPSQPLQQSLKDLERAYKNFFRKRAAFPRFKKRGQNDAFRYPQGVKLDQENSRIFLPKLGWMRYRNSRQVTGVVKNVTVSQSCGKWYISIQTESEVSTPVHPSTSMVGLDAGVAKLATLSDGTVFEPVNSFQKNQKKLARLQRQLSRKVKFSNNWQKQKRKIQRLHSCIANIRRDYLHKVTTAVSKNHAMIVIEDLKVSNMSKSAAGTVSQPGRNVRAKSGLNRSILDQGWYEMRRQLAYKQLWRGGQVLAVPPAYTSQRCAYCGHTAKENRLSQSKFRCQVCGYTANADVNGARNILAAGHAVLACGEMVQSGRPLKQEPTEMIQATA

SEQ ID NO: 31976 - protein, 295 aa, unknown
  TnpB Polypeptide
VQGHCLGAVGFPKFKSKHNSHQSYQSSIATIKNKKLKLPKIGEVKTKFHRGEIVGKIKTVTVSYEANQYFASINYEDGLKELMGSNNGKSIGIDVGVAVFAYTSENKPINPTKEHDLTKDIQKMIKAQKSLSRKKKGSANRIKAKTKLAKKHLKIKNKRNDFLHKISNELSEKQTVKVEDLKVKNMSKKAKGSIKNPNMRASAKSGLNRSILQQSWGKFFELLEYKLKRNGRELIKVNPKYTSQKCSRCGHISKENRLKQTQFICTKCNYKANADYNASINILNSNAVGTTVKAS

SEQ ID NO: 31977 - protein, 408 aa, unknown
  TnpB Polypeptide
MSARAAVFYIDGKLAPEARFLMEDFRLATNGAIRAGLQAGVTSRNALNKLVYKDFREEHPGLYAKHLVSAFEVAAGILKNHRRQLKRSRTGQAVHTPFVKRLMMKAENQAYKLDRKEGIVDLPVRAGLHIKCKLVVSQYHRRYLDDEAWSLGSLTLLPDKVVIAFRRIPPKPYAPRSVLSLDTNEKSLDGVFIREGSGVAVWAGFPDVAIIQQRHHDRRKRLQKKKTNDRRTARALCKREGKREHNRVEYRLHQVADTILSFAKSHESAIVLEDLTGIKHKKNKDMNRRLSMWPRRNLHRIIEYKAEDKGIPIIKVDPRYSSKKCPICGTVQYSRMGAEFKCECGWHMDRHINASINLLQTASSKGLAGGLRFDPGAFRHDAMMILYEPAMAARSEPNGMSEDVVMPP

SEQ ID NO: 31978 - protein, 380 aa, unknown
  TnpB Polypeptide
  misc_feature (357)..(357): Xaa can be any naturally occurring amino acid
MERLKAYKFRIYPTEEQEIFFAKSFGCVRKVYNLMLDDRMKAYEETKKDSSKKMTFPTPAKYKEEFPFLKEVDSLALANAQLNLDKAYKNFFRDKSVGFPRFKSKKNPVQSYTTNNQKGTVALIDNKFIKVPKLKSLVKIKLHRQPKGMIKSVTISHHSSGKYYISLLCKEEVSELPKTNSTIGIDLGITDFAIFSNGQKMDNNKFTSKMAKKLKREQRKLSRRGLWAKKKGFNLFEAKNYQKQKRKVARLHEKVRNQRNDFLNKLSTDIIKNHDIICMEDLNTKGMLRNHKLAKNISDVSWSSFVAKLQYKAEWYGREIVKIDKWFPSSQICSECGHKDGKKTLKIREWTCPICHXHHDRDINASINILTEGLRIKQLA

SEQ ID NO: 31979 - protein, 317 aa, Anabaena sp.
MLVLEAKLNGKQSQYNLLDEAIRTSLFIRNKALKHWMDNKDVGKNDLQKLCAVLAKEFDFADKLNSMARQASADRAWFAIKRFYDNCKAKKLGKKGYPRFKKRGHSVEYKTSGWAISADKKYITFTDGFKAGRFKLVGTRDLSFYSTKQIKQVRVVKRADGYYCQFCVDVERQEQHQHNGNIVGIDVGLEFFYTDSDGKTVENPRLLRNSEKSLKRKQRKAFKCKKGSSNHRKAVRKLAKKHLKVSRQRKDFAVKTARTLVQSNDLVVYEDLQVRNMVKNHHLAKSISDASWSICLLPILHRIGDFNSKFPVRSLKK

SEQ ID NO: 31980 - protein, 425 aa, Anabaena sp.
MKQVEKHIIKKGHSYFDYCAEITAVSKRLYNAAQFTQRQGFFYGWGTQSQAKLDVMFKQNDHYKALPAKVAQLVLKQNADAWASYYEAVKAYKLEPEKFTGEPKPPNYIDGEYNIIKFNNQAVGKREFGKGWIVPSMSPIRMPIKPGLSKDDLCEVRIIPKIGCFVSEVVYEVLQNAFFCSLNPQLAAAIDIGLDNLATIVFNDPTIQPIAVNGKPLKSVNQFYNKQVAKYRGFIKVGSSRRIANIVRNRNNFVDSYLHQATKMIVDEMVRLGVTYASIGKNDQWKTHLNLGKRTNQNFTQIPHARFIEMLTLKLERVGITVAIGEESYTSRASFIDRDIIPTFDRNTKVKHRFSGRRVARATYVSASGLKIHADINGAFNIGRKCNPKGFDCLKSILRDRGCLVVHPRRITPLFRRVRAQSGVA

SEQ ID NO: 31981 - protein, 372 aa, Clostridioides sp.
VIAVEKAYKFRVYPNKKQQELINKTFGCCRFVYNKYLAKRIDVYKNDKETFTYKQCSSDLTNLKKELKWLKEPDKFSLQNALKDLDNAYKKFFKEKAGFPKFKSKKINRFSYKTNFTNGNIMYCGQYIKLPKLGMVKIRDKQVPQGRILNATISKEPSGRYYVSLCCTDVDIEAFENTNNHIGLDLGIKEFCISSCGEFIENPKYLKKSLNKLAKLQRELSRKTIGSLNRNKARLKVAGLQEHIANQRNDFLQKLSTKLIKENDIICIEDLQVKNMIRNRKLSRLISDVSWSEFIRQLEYKANWYGRKIVKVGKFFASSQICNKCGYKNEEVKDLNIREWICPSCNETHDRDINASINILKEGLRLITIQNK

SEQ ID NO: 31982 - protein, 404 aa, unknown
  TnpB Polypeptide
MTVTRAYKTELDLTDRQITACKRHAGAARYAYNWGLARKQEAYKATGKSPSAIDLHRELNALKKTELPWMYAVSTCAPQEALRNLDNAFAHCFCRCTLKQEGKLKGKLGYPQRKTKKKGLGSFHLTGFVVVSPDAIQLPRLGRLRLKEHGYLPVAGVKMLSATVSKQAGHWYASVQVEQERAMPSNSGPVVGVDLGIKTLATCSDGTDIPNPKPLKRRLKKLKRLHRAVSCKQKGSNNRKKAAHRLGKEYRKVGKQRADTLHQVTTRLATTKSVIVIEDRHVASMLTNHHLAQAIADVGFAQFRRQLLYQAAWYGSRVVLASRWEPSSKTCSACGWYDADLELADRVFRCQNADCGQILDRDLNAAINLSKLAGSSSESENACGVGSAGRSREAAVKLPTQAEA

SEQ ID NO: 31983 - protein, 383 aa, unknown
  TnpB Polypeptide
  misc_feature (231)..(231): Xaa can be any naturally occurring amino acid
  misc_feature (240)..(240): Xaa can be any naturally occurring amino acid
  misc_feature (256)..(256): Xaa can be any naturally occurring amino acid
  misc_feature (261)..(261): Xaa can be any naturally occurring amino acid
  misc_feature (264)..(264): Xaa can be any naturally occurring amino acid
  misc_feature (271)..(271): Xaa can be any naturally occurring amino acid
  misc_feature (339)..(339): Xaa can be any naturally occurring amino acid
  misc_feature (363)..(363): Xaa can be any naturally occurring amino acid
MKRTVRLKLHPTPDQAETLCETLAMVRDCFDTVAAYGWEQGVKNGVALHKATYYQLREKHPSLPAQLVCAARVKATEAIASVFALKAKGRKAHCPRTKAGSIRYDARSHRILPGEANLATTVGRIKVAWTANSHAAVILAKAVEFDSSDLLYRDGAWWLHSVLTLPDEPFSPTGQAVGVDLGINRPAVTSGNVFLGDARWKKIEKRYFRLKRNLQAKGTASARRHLRRVRXRQQRFRRDXDHVLSKRIVDMAGNGXVIVLXNLXGIRSTTXQRGKRQRRRHHGWSYEQLKSFLEYKAEAAGCRVETVDPRKTSQRCSKCGYTARSNRKNQSLFVCGACXFSLNADLNAARNIAWKYLAQGGMXALSGPSVNRPIVTHVEAKTS

SEQ ID NO: 31984 - protein, 386 aa, Paenibacillus sp.
MQHSQDFLSENLNGQDFSLKNLIHKAYKYRIYPNRMQQQLIHQMFGCCRFVFNYFLGQWKDTIAATGKGLSYNACATGLPALKQQCDWLKKVDSIALQSAVRNVADSFGRFFTKQNRAPRFKSRKHPVQSYTTKFTNSNIAIQNNKLKLPKLGWIRFANSRALEGRILSATVRRNAAGKYFVSIVCEVNVQQLPLTDKEVGIDLGLKEFAVCSDGVRIANPKVFRKYEQKLAFWQRRLARRTKGGSNWNKAKQKVAQIHEKIVNIRHDFLHKLTTMLIRENQTISIEHLRVANMLKNHKLAKSIADAAWSEFKRQLIYKAVWYGRILKMADTFAPTSQACCVCGFIHKEVKDLSVRQWTCPSCHTTHDRDENAAHNIKQMAGSWSV

SEQ ID NO: 31985 - protein, 391 aa, Paenibacillus sp.
MYRGKKILFTASKEVIQQLFACNRISATIWNACLDAAKQHHLTTGKWINQTQLQQAVKGKFPLHSQSVQAVCHKYLFSRDSMHQAKKKGIATARYPHRKKKHFNTKWVDKAFIIHPNGKIELSLGIQNGKRVKPLVLFAKNLPDGDIKEIELCFDRKLYLSVTYDDGQVAKSASGAYGAGVDMGEVQAIASVCENGEGILLSGRKLRSIHRLRNKKIAQLQRLMSKCKKGSHQWKKYNRAKQYVLSKSERQLQDGSHKITKAFVNWCVAQSIQEVFVGDVGSVSQGTKKKRKLRRKQRQKVSNWNVGQQMQYLTYKCQAQGIAVAKVSEAYSTQTCPVCQKRHKPTGRMYRCRCGYVSHRDTHGAKNILSEQRYGIFTPIEEKNLTYLRVA

SEQ ID NO: 31986 - protein, 386 aa, Paenibacillus sp.
MQCSQDFLSENLNSQDFSTKNLIHKAYKYRLYPNREQQQLIHHMFGCCRFVFNHFLALWNDTYTATGKGLSYNTCATRLPALKQKYDWLKKVDSIALQSAVRNVAESFDRFFTKQNDRPRFKSRKHPLQSYTTKYTNGNIAIVGNQLKLPKLGWLRFANSRSCEGRILSATVRRNAAGKYFASIVCEVEIKPLPQTSKEIGIDLGLKVFAVCSDGVRIANPKVFRQYEKKLAFWQRRMARRTKGGSNWSKAKLKVAQIHEKIVNIRHDFLHKLTTMLIRENQTVSIEHLRVANMLKNHKLAKSIADASWSEFKRQLIYKAVWYGRIVKMVDTFAPTSQACHVCGEINPEVKNLQVRQWICTSCHTTHDRDENAAQNIKQMAASWSV

SEQ ID NO: 31987 - protein, 276 aa, Paenibacillus sp.
VQSYTTKCVNGNIAVVEHFVKLPKLGLVKFAKSREVEGRILNSTVRQNASGKFYISILCEVDIHPLTERSEAVGIDLGVKTFAVCSTGEEVANPKHLRQYEKQLVFWQRRLSRRTKGGANWQKAKLQVARIHEKIANSRNDFLHKLSTKWIHENQVICLEDLQVENLMKNHKLAKSIAEASWSMLRTMLEYKALWYGRIISVVAKNYPSSQLCSGCGHRHKDVKNLNLRQWVCPNCGTIHDRDANASKNILKEGLRLVGTKDVPTELREPQGSLGC

SEQ ID NO: 31988 - protein, 386 aa, Paenibacillus sp.
MQLRQDFLSENLIRQDFSTKNLNHKAYKFRIYPNREQQQLIRHMFGCCRFVFNHFLAMWNDSYAATGKGLSYNTCATGLPNLKQQYNWLKKVDSIALQSAVRNVADSFDRFFKKQTQAPRFKSRKHPVQSYTTKYTNGNIAIQTNQLKLPKLGWIRFAKSRALKGRILSATVRRNAAGKYFVSIVCEVEIKPLPQSSKEIGIDLGLKDFAVCSDGVRVANPKVFRKYEQKLAFWQRWLARRTKDGSNWQKAKLKMALIHERIANIRHDFLHKLSTKLIRENQTLSIEDLKVSNMLKNHKLAKSIADASWSEFRRQLTYKAEWYGRILKMVDTFAPTSQACHRCGAINPEVKNLQVRQWTCPSCHATHDRDENAAQNIKQMGLIWSV

SEQ ID NO: 31989 - protein, 372 aa, Paenibacillus sp.
MQHGQDFSSKNLRHKAYKYRIYPNRMQQQLIHQMFGCCRFVFNHFLAMWNNSYAATGKGLSYNTCATQLPALKQQCDWLKKVDSIALQSAVRHVADSFARYFKKQTQAPRFKNRKHPVQSYTTRYTHGNIAVNGSKLKLPKLGWLRFANSRQCEGRILSATVRRNAAGNYFVSLVCEVEVAPLLVNDKSIGIDLGLKTFAVTSDGMRVSHPKALSQYEKKLACWQRRLARRTKDGSNWQKAKQKVALIHERIANIRHDFLHKLSTKLIHENQTISIEHLRVANMLKNHKLAKSIADASWSEFSRQLTYKAEWYGRTLKMADTFAPTSQACHVCGEINPEVKNLSVRQWVCPSCKTLHDRDVNAAHNIKDVAI

SEQ ID NO: 31990 - protein, 372 aa, Paenibacillus sp.
MQRSQDFSTKNLNHIAYKYRIYPNREQRLLIQQMFGCCRFVFNHFLAMWNDTYTATGKGLSYNTCATRLPALKQKYDWLKKVDSIALQSAVRNVADSFARYFKKQNQAPRFKSRKHPVQSYTTKYTNGNIAVNNTQIKLPKLGWLRFANSRTPKGRILSATVRRNAAGKYYVSIVCEVEIKPLPQTVKHIGIDLGLKEFAVCSDGLRVANPKAFRQQEQKLAFWQRRMSRRTKGGSNWQKAKQKVALIHERIANIRHDFLHKLSTKLIRENQTISIEHLRVANMLKNHKLAKSIADASWSEFRRQLTYKAEWYGRTLKMADTFAPTSQACHVCGALHQEVKNLSVRQWVCPSCQTLHDRDVNAAHNIKDVAV

SEQ ID NO: 31991 - protein, 367 aa, unknown
  TnpB Polypeptide
VLSQKFRLYPSRFTEQKLCDHLELCRWLYNRLLEELNVAKSQGLKLSQKEMQHLIMELKKQKPELNQVYSKVLQMVNHQLWSNIRALSKMKAKGRKIGKLRFKGAWFKTLNFNQSGFRLNGKQLCLSKVGAISIKLHRSIEGKIKGVIIKRQLSGKWHAIFQYESTAKPLPRTNKSIGIDVGLKHFLSDSDGRQVENPRFDEKTLSRIQVAQRKLSRKKKGSKNRGKQRVRLARLHEKLVNQRNDFLHKLSRFYVNNYDVIAVEDLNITNMVRNRNLAGKILDASWGRLLQMLAYKAENAGRSIVRVNPRGTSQEYKHGDLNRDYTASLNILERGLAGLGRPLEPVETKPLLEVSASVVVEAGSPSR

SEQ ID NO: 31992 - protein, 518 aa, unknown
  TnpB Polypeptide
MSAVLRQCSLISRPTTAWRSSRTIGDCERSPTDSGDGDRNDRRDRQCGRGGALRRRRENGRASRRRAQASQAVQADATGLDPWRKPPLHSTNHARWQGRLLPTRKLLLDIGSKCESRMDDAPRRTVKIKLDVPEERRGDFHQTKTQFLPTAPARGGDGDTTTTASKHPTRHHCQPVQKAVTSGVEKLEAGQEDESTRVRRMERRLRQRSATFNDDHATLSTPNGRVTVEYVLPPKEEREETPLGRYYGSDDWDASSATLQYDEQDDTFYLHVTLKNPDYKVGGTERQEAGSRDDTRENGVVLGVDLNVTGTFAVTSTGEFIGSADYLTHKRDEYERRRGRLQQTGTRSAHLTIQSIGSRFSDWSLDWLHNRANDLIAEARDADVDGIIFEKLDHIRENIANGSKFQQWAYAKFVELVEYKVESTALFVDTVTPAYTSQRCSHCGFTHEDNRDDKQFACQDCGYEVNADYNAAKNIAVRYCGYIHRGQKSRGGWGTSQLALKSGTLNMNGDYTPTELLG

SEQ ID NO: 31993 - protein, 280 aa, unknown
  TnpB Polypeptide
MPKFYQDNVKIRFSNTHVKFEGFSSSRKANKQKMNWVRLAEHGRIPTNAKYMNPRISFDGLNWWISVCVEFPDCREILNDDGVGIDLGIKELAVCSDGTKYKNINKSQKIKKLEKQKRRLQRSISRSYEKNKKGESYCKTNNVIKKEKLLLKRNHRLTNIRKNYLNQTISEIVNRKPRFICIEDLNVSGMMKNRHLSKAVQAQGFFWFRKQLEYRCSDKGIQLIVADRFYPSSKLCSCCGNIKKDLKLSDRVYRCACGNMIDRDFQASINLKTYGEKFAS

SEQ ID NO: 31994 - protein, 442 aa, Nostoc sp.
MVKNKKSIGVQQILLYPNDETKALLDYLCQQSGKLYNTGIYFARQTFFKTNKLLTGKFDLAIEPSIAKSILAQSLPSTPMQQTLMSVTEAFKSFRELRELYLKGELHFKPKPPNYLQGSKLFKVAYPNSGGQKPTLADGQLRFSLGLTVRRWFGVSEFFLPMPSNIDYSKVKEFTILPKNGAFYLEMSYEVAKQKHDLDINQALSIDLGTADNLAACVDTLGNSLLIDARAMKAMNQLWNKKVSTRKEGKPEASKDNWLDRVTRKRNHQMRDGINKAAKLIIDHCLIYNIGTLVIGWNEGFKSNANMGRLNNQKFVQMPLGKLKDRLKQLCDLHGIRFQETEEAYTSKASYLDGDSLPVYGQKPVGWKASGKRIKRGLYESANGSIVNADLNGSANILRKVASNLSLDLGLLCRRVLTTAARVRIWILPNSPLSAESQSLQG

SEQ ID NO: 31995 - protein, 656 aa, unknown
  TnpB Polypeptide
MLTESNIENKFKKMNTISMETDVVVEDKQKELSLDCYCRKTTLKSITQDHDIVSTLEQLVVNTSHIIRDTYNFVRLYMIHLLSNNEKLPIINKEFMRAVFTLVSNRKRIKGTKADIIYGQLEQFYDEEYKPFQRIKVDAVPKDILEYESTTIITSIENHIKVSLFSYVKKLAFVLTYDDPLQYKKVLTDLLNKDLLSKKKVKKNKTSDRTKTNKKQGECDVFKSNEQYHTVIRHFNPLITNAIKETISVSGKPQLCFPLMYTIASMVEEKRLENDINAKARKLRSCAIIPLRRSLVPKYIRLDNSIFTRVFRVMMKEKKLDIWENIKNEVAKTMKSKEGFMLSSFQTDGVACSLVFKKGNRYVEGTKRPKARFSEKYFEDLGLYDEFKGKRIVAIDPNKGNLVYCFDGKTTLRYTQNERRKASKKTIHKYRRKNKENTIGEGIIKNRLDDLSGFNSRSCSYVGFKDYVGTKNLYNRDFCSLYQDTMFRKNNWHSWINLRRSEDKFANRFKDTYVDKISVDGRDVYDMKNTVVVFGDWEERPSFLRGKEPTKGKGMRSLLRKAGLTVYLLDEFRTSKTCHICNSENESNVISREDPRPWKKGESQLVWGLLRCTNGDCRRIHNRDFNSASNILEISRTIICSGNRPNIFDRSLCCND

SEQ ID NO: 31996 - protein, 211 aa, Bacillus sp.
  misc_feature (192)..(193): Xaa can be any naturally occurring amino acid
MTKQNKAYKFRLYPTEDQAHLMRKTFGCVRFVYNRMLAERKEAYEKHKDDKDQLKKQKLPTPAKYKAEFEWLKEVDSLALANAQLNLQTAYKNFFRGQNDFPTFKSKKDRKSYTTNVVNGNIMLLNGHIKLPKLKMVRIKQHREIPQDHIIKSCTISMTPTGKYYVSILTEYEKEIVQKEVETIVGLDFAMXXSKGATSIIKKNKRFYSLE

SEQ ID NO: 31997 - protein, 402 aa, unknown
  TnpB Polypeptide
LLVNRVEQHQINKNHQYWKVIDEYCKRSKDLYNSANYVIRQEFINNKNYINYYTLDKIMQNTDQYKILMSQASQCTLQVLSRSWKSFFRVTRDYSKNSNKYLGKPKIPKYKKKEGRFTWFLKNNQTYIKDGYLYFRLKVFEGYGFKTNIEDRLISVRFVPNGSNYTMEIVYEKEIEKDLKEPKNICSIDLGVNNFVTMVNNINERPIIINGKGIKSVNQYYNKRKAKIQSELNRHSRYWSNKLDNLNLKRYNRIKNFIHNTSRYIINYCNNNDIDTLVIGLNKAWKQDCVMNDKATQNFVFVPYDMLLKQLGYKCEENNINLIITEESYTSGTSYLDNEQPTKANYQKKRRIKRGLFKSDKGILINSDVNGAFQIMKKVFSEIEYEIEGCLSPIILNVVNIA

SEQ ID NO: 31998 - protein, 527 aa, unknown
  TnpB Polypeptide
MRHTPTPSFVTEIPLRVDSAAARTLGVRFDCARMVYNACLGEALRRLDLMRQSKVYQRARALPKQSKEQQKARAAAFTAADVAHGFREYDLHAWAARFTHSWLGPHLDANTIQTLASRAFRATAQHAFGKRGKPRFKGPHQLDSLEGKSNKQGLRWVADRLVWKDLQVPGIIDRRDPVIAHGLRSRVKYVRLVRRKLNGVPRYYAQLVCEGVPYRKPANCVGDGVIGCDPGPRVFTFTGAGWAVRVDLTNKADQRAIRQLQRAVDRRRRANNPANYLPDGRIKPGRHAWKISARQKRAERQRAEIQRKAAATRTTRHGRLVNKLLRRGNVIQVERNSYKSFQRNFGRSVGHAAPGGFVRLLERKAASAGAQVHRLPTTLRLSQVCHGCGEINKKVLSLRVHQCACGVGPVQRDIYSAFLAQCATAIEGLDGPEWHLDAARAAIVWAGMELCLSAASGLLAVEEFTASQPANVSSPGEARLLAQASGIERVADAGAPPGREAPDAVRQRKRDGEPGKAQRPVPGTPRA

SEQ ID NO: 31999 - protein, 318 aa, unknown
  TnpB Polypeptide
MNQTMRNANARIKVKQFTCLPLETNNQNWTLHKVGATYSLGFGLVRGLKKRVPLAVHHAGQQRWLETILDGTATQGALKLWRSRKGIWYACLSVSMEVPDAEGTGRWLGIDRGQNVPMAAATPAGPVIFYKAARIRHIRRVYAARRKKLQAAGKHRAVQKRERRERRMITHINHCLSKDLIALAQRCNTGIRLEALSGMRQRSRQRRTTRAEAGQNRDSWPFSQLEQFISYKAQLAGIVVEHVPAAYTSKTCHRCGALGIRKGHAFHCPRCHRHAHADANAGMNIRDWQGLCCPLVLEAPEDGAHDLPPNMVRKVAGA

SEQ ID NO: 32000 - protein, 443 aa, Lentzea sp.
MVTVIQAYRFALDPTAGQRAALRSHCGAQRYAFNWGLARIKANLDQRAAEKTYDIPVDHLTASVSWSAYGLRKDWNQAKDEVAPWWGENSKEAYSSGLANLATALTNWQGSRTGGRRGPPVRFPRFKGKRAGVSCRFTTGAFGLTDGDRRHVTLPRIGTVRTCESTRKPARHVECGTARIRSATVSCRSGRWFCSFSVENTRTDPAPTRPGTVVGVDLGVTSLAVLSTGEVIANPKHLEVAQRELRRLQRQAARRTGPDTRTGRTPSHRWRRTQARIAVLHARVANARRDGLHKLTTGLVRRFGLIVLEDLNVSGMMRNRRLARHIAGVGMGELRRQAGYKTTWGGGRLVVADRWYPSSKTCSDCGAVKAKLLLRVRVYHCDECGLVLDRDLNAARNLAALVDELAGDTSTASCAGTLNTPMETHVRPTPCGQRVPPREDPHH

SEQ ID NO: 32001 - protein, 137 aa, Lentzea sp.
MVNHRISKTIVAEAERTGRGIAVEQLTGIRVRVRLRKPQRATLHSWAFAQLGQFLTYKAQRAGVVVVQVDPAYTSQTCHACGHVDKRNRRSQAVFQCGRCDFVGHADHNAALNIAARGVERPGEVMRPDAAPILAAS

SEQ ID NO: 32002 - protein, 545 aa, Moorea sp.
MAPSDAKGLQAELDYFIQKMYSGSEQDVQNLINFVNGILKRSVTAESVPVSKETISTDKSPISIPSSLTPKSSKTSAQVSTTKGKGLEPYWSDLCAEISSRLLLPVETDLPDSGLNSLSTWSVSTVERSWFSANLKAAPNLNLPQIFSPSFTSSPVGFTDSGSTVKKSKKIRLFLNPDQRTLIRKWFGVSRYVFNKTVKILQIGVVKANWKAIKTGILHDLPEWCKDVPYQIKSIAIKDACTAVREAKKKSKKTSQINRVRFRSRKNPIQSCYIPKSAVSDAGIYHTKLGKLTYSEDLPGNICDCRMTSNNGSYYLVVPYKVTLKEADNQGRVVALDPGVRTFVTFFSKTSVGKIGHGDFSRIQRLCQHLDNLLSRISKAKRGQKRRMRKAARRMVIKIQNLINELHHKTARFLVDNFDVILLPTFETSQMSKKKGRKIRSLTVRNMLNFAHYRFKEFLKHKAQETRRTVVDVCEAYTSKTVSWTGELVNIGGSKTIKSKVDGKVMDRDINGARGIFLRALGDTPWLREQLALVSQDLPLVDFGS

SEQ ID NO: 32003 - protein, 398 aa, unknown
  TnpB Polypeptide
VSSKRSGTVKLTARFKLDGKVDEGLFETYKSIVNELLGYAHSKGITSFKRLRSEKYHRLRQRYSKLPSHYIYTACQMACSIYKSFRKLRRKGRVKSDKPTFKKDVIMLDDHLFRLNLENWVVRVSTPNGRVEFKVLHGEYHEKFRGWKIGQTWLVKREDETYLNVVFSKNVEMRDHEDVIGVDVNENNATIATNQSFITFVTRERVIRTAYFLKRRKIQSKIRCRRVKAKVLAKYRSRERNRVLNVYHEVANKIVEVALKANSAIALENLEEIRKRMDYSKELNGRLHRWGFRKFQQVLEYKARLNGIEVVYVNPHKTSSLCPICGRELSPNGWRQLECECGLVADRDVIGSWNIRLRGLKSLKIDVGSPAPPESPPMKSEEGKVVRYESTTYNKSSG

SEQ ID NO: 32004 - protein, 420 aa, Halobacteriales sp.
MSFQYHAEPASDEIARRAWSDIQTCREVYNHALTQRYHPAPDHDKPSYTRLQNKIPDWKHRWSEWGDVYSKCLQMALRRIKHGETVLDGLQANGYDVGRLKWKAPKEYRSITYNQSGFDVDSNTGRTAHATVNFSKIGRFHLTYHRSLPEDGTIKQIHLKKQKTGEWTVSIVVDYDPDHPEKPAVEDIDPEDCVGIDLGILSFVHDSDGRAVDRLDLSEDRERLAREQRSLSRKQHGSNNWERQRRRVAEVHQRMTDRKDDFKHKLAHFYTHEYDAVFVEDLDVRGMLEDGGNARNKAEVGWRGFIHVLKHHGERNGCRVVEVEPEGTTRECARCGVESEKPLWVRTHSCPSCGFKTDRDRNAAFNVLSRGLSKLGVVHSEGTPVETALPADTRRVSAKRVVEAGSPCLKEPQKAASRQG

SEQ ID NO: 32005 - protein, 206 aa, unknown
  TnpB Polypeptide
MEDFPLPPWKDGSVVGIDVGLESFETLSNGEKIANPRFFRVEEKALAKAQRKLSKAPRGSSERKKAKCVVERVHERIANRRNDFANKVSRALLDRFGVIVFEDLDIRNMLKNHRLAKSISDVAWNMLVKATESKAAYAGSKVALADPRNTSQMCSRCGLIAKKDLSERVHNCSECGLSIDRDLNAAINILRLGMQSLRKSDRSPAL

SEQ ID NO: 32006 - protein, 379 aa, unknown
  TnpB Polypeptide
MIQTLKIKIITDSEQAKALHKTMYQFNAACNYVAEVAFNTYISNKFTLQPLVYRDIREKFNISSQMAIRVISKVCETYKQNKSIKPIFNSNGAIVYDQRILSWKEPNIVSLLTVYGRIKIPVKICNYHMSKINQIRGQIDLIFKNKKFYLCIVTESPNPILITPKNVLGVDLGIKNIAVDSVGEIFSSEKIDKNRSKLDILKSNLQRCGTDSAKKHLKKLSGREARFKKDTDHCISKKLVMKAKDTSSLIALENLKGIREGTTVKTKAQRHRHNSWSFNQIQQFINYKAAIVGVPVVYINPAYTSQECPICHHISQSNRPTRDEFRCVCCGFSGQADIVAARNIAARVSVNMPIVARFFAEPQAHEFISGQLTSLKVRS

SEQ ID NO: 32007 - protein, 400 aa, unknown
  TnpB Polypeptide
MEQAFRYRFFPTAEQELLLRRTMGCVRLVYNRALAARTEAWYERQEKIDYVQTSSLLTQWKKQDDLQFLNEVSCVPLQQGLRYLQKAFSNFFSKRAKYPRFKRKRNGGSAEFTKSAFKWKDGSVWLAKCKDALRIVWSRPIPQGCEPSTITVKYDASGRWFVSLLVDNLEIKPLPAINKTVGIDVGITSLIATSDGEKIGNPKHFNRKYKRLKQAQKVLSRRQKDSRNREKARVKVARIHAAISDARKDFIHKLTTQLIRENQTIAVEDLSVCNMVKNHKLARSISDAAWGEFVRQLEYKSKWYGRTLVKIDRWFPSSKRCGNCGHIVEKLPLNIREWTCQKCGSVHDRDLNAARNINAAGLAVIGNTENVCGSNVSLDEHCVKEQLRKTRKGKKQKPES

SEQ ID NO: 32008 - protein, 448 aa, Deinococcus sp.
VLFRQSKNEKRRYFVRKLTLPGRLKPRLDELSLASGALYSAVVTAFWRTLRRSAGRSKKGGPRDPRRKAVFLSSGTLQKWFPKDAEGLLHSHTCDAVVDHFVAAMDSARTRKKHDPAARFPRRLKKYFKVTFKSTAVRVRDGQLLLSTGDKKRPVVIPWTFELPVAVEIGWRESGGYELRAMYPDTRGVQVAIGEKVAGLDIGELRIAAVYDGEEVELHSGRLIRARNHYANKQQAKLDVRISNKRKLTKAGTRSSKRLKRLQRARRLMRARIKRQNKDQLRKQARTIVSTLHERRVQTVAVGDLSNIRDSIDFGKKANQKLHLWAFGQFLAELKLQATKFGLSVKVVDESFTSQTCPWTGGRKKPKGRTFVSPCGTHHMDRDGVGAVNIRARYLESLAGKGSAYGRTPTLPWTPVIAGMAPVTRGRRYRVLHAQRSNPQGMEGSTRP

SEQ ID NO: 32009 - protein, 421 aa, Streptomyces sp.
MVAVQLRYNFRVYPGPGQRVALAKAFGCARVVFNDGLRARQEAHAAGLPYIKDTELQKRVITAAKRTDERAWLGEVSSVVLVQSLRDLHTAYRNFFASVTGKRKGPKAAPPRFKSRKDSKQSVRLTANGFSVRPDGRLYVAKVGDLRVKWSRTLPSTPTSVTVTLDAAGRYWASFVVEATADILPEAAADTGIDLGLNHFAVLADGRKIDSPRFLRRAEKKLKRMQKALSRKEKGSNNRDKARRKVARQHARVADRRRDWQHKLSTQIIRDNQAVFVETLSARGLGRTRLAKSVHDAGWAQFVGMLEYKAVKHGRVFAKVDRSFPSSQVCSACGMRDGPKPLHVRAWTCGNCGTEHDRDHNAAKNVLSEGRRIVAAGRAETLNASQSAGKTRTPVPAQRVEAGSPREGQPTLVGNPAPNRA

SEQ ID NO: 32010 - protein, 364 aa, unknown
  TnpB Polypeptide
VKQTIAVKLEPTAEQSQALRLTMEAFNRGCDYVAQVAFEKRLANKIAIQPFVYGALRADFGLSSQMAIRAIAKAIEAYKRDKTIQPTFYPHGAMVYDHHMMSFKGLSHVSLLTLDGRLILPLRYGAYQAARIDRIKGQADLILREDTFYLYLMVDMPTPPPIEPVDVLGIDLGIVQLAVDSDGEAQTGTGVKQCRRRFQGLRKGLQSCGSKSAKRHLKRNRRREARYQRHVNHCISKHLVQKALVGQRALAIENLSGIRERTQATVRKNQRYERLSWAFAQLRQFLAYKCEAAGIPLIVIDPRNTSRTCPACGHCAKENRCNQSEFLCKKCGFQDNADRVGASNIRRKGLEARATLSGPLSAIA

SEQ ID NO: 32011 - protein, 415 aa, Hyella sp.
MKARYNYRIYPKPHQIVPLAKAFGCARTVWNDALWLYKQAFINGEPRPKDVDKRVITQAKKTEQRAWLAEVSNIVLQQSFRDLQTAWNNYFNSQSGTRKGKEVGSPKFKKKSSRQTIRLRKGGFSVHSQSVKVAKIGHIKMVVSRPLPSAPSSVTIIKDSTGRYFASFVVEVPGQIAPQTDNSCGIDLGLTHFCILSSGEKVENPRLHKKMLKRIKKANRRLLLAKRDSKRRERRKRKLAKLHAEVKDQRTDFLHKLTTRLVRENQTLAVEDLNVSGMVKNHKLSRAISDAGWAKFKTMLAAKCDKYGRDLTIVDRWFASSQLCSECGKSGGKKELDVREWECLFCNTIHDRDINASINLSRWVGGQSDQDGAYKLRGKPTQTAPHKNGRGASVSLPKVAVRREASTTYEQLSLF

SEQ ID NO: 32012 - protein, 411 aa, Trichocoleus sp.
MLVREAKLKNGTKEQYLALDDAVRTAQFIRNKAIRYWMDNRGVSKADLYSLCKNLAAKFPFAKKLNSAARQASAERAWASISNFYSRCKKGDKKKGYPQFKKHGRSVEYKVSGWKLAQDCESINFTDGFDIGTLSLYCNKATRIDLHTLKINRVRVVRRADGYYAQFCFDADRKESGEYTGNVVGLDLGLKYFTKDQNDNAVIYPQFLRKSERRLKKAQRRLSKKFVKGAKPQSNNYHKARERLGRVHLKTSRQRKDWAIKLARCVVHFNDVIVYEDLKIANMVKNHRLAKSIQDASWYQFTQWLDYYGRIWDKAVVAVSPHYTSQDCSNCGWRVKKSLSTRTHSCPSCSIEICRDRNAAINILKKGMGILGIEWQNSTFGQKGSASQEGKPGEKTASIAEGKPSTVSGFL

SEQ ID NO: 32013 - protein, 525 aa, Lachnospiraceae sp.
MPEDMKRRTFALSDRLRICGNGLTARLSGTLEQLARDKKYRGLSKDYGKLSEQLKNHPDDKAAKAERRETAARMTGLQKQYHVTWEDARRYMVYLKSRDGIDSIFALTRAEDIWSGVEKVLYSGADKIHFKRRGDLPEIRAKQPNRGIVITVKDGRLWFSCSAIGKESFTNLPPDKFQSDELAAVLRYLEAPKVNDKAAVGAMLENGKITDTYRPCFASLVCKEIRGRLRVYIHLTIEGRPLPKYKSDGITPRHKYGKGRVGIDIGTQTIAYTSDTEVGLRNLSERGMPIQKSERKERLLLRRIERSRRAMNPQNYNPDGTVMRGSKTWDKSKRGIALEKQYRELCRKNAASRHYAIHEDINHLRSLGDTVITEPPNFKALQKRAKPEVSAPDTPAKKPKRRKRFGRSLQNRSPGAFQAALKQTFESTGGSYHEVDKNFRASQYDHTGDVYVRKKLSQRMFDLADGSHVQRDWYSSFLMYNTDDECFSPDQDRCSSNFDTFYDMQNTMIAAIKKSGIHVMNSGIR

SEQ ID NO: 32014 - protein, 390 aa, Desulfofaba sp.
MKILRAFKYRIYPNEKQRGNLAVQFGHARFVYNNALNARKEHYRETGKGLSYSATAKMLPGMKRELEWLREADSQVLQQKLKDLDRAYVNFFQKRAGYPKFKARHGNQSIRYPQRFRIEGGRIHLPKVGDIRIILHRSIEGAAKNVTVSKTKSGKYFVSIQCEAEAFAFDNDLPPVGVDLGIKDFAVLSTGEKIPHPACLKKFLDKLARLQRGLSRKKKGSENRRKSRLKVARLHERIANQRKDFLHKLSHRLTTQHGGISLENLNVRGMVKNHRLARAISDSGWGEFGRQCEYKAATAGATVLRVDRFFPSSKTCSVCGAINQSLKPHHRFWVCENCKTGHDRDINAAVNLRNQSTVGTTESKACGEGVSPGILRGIRRSSAKQEAQEL

SEQ ID NO: 32015 - protein, 585 aa, unknown
  TnpB Polypeptide
VLHTFEARLTVDPALDALLASNAKHLSFGLRKAWALLYRQGLSKPQAYAELCKLGFTSHQVGSLLISAEMKHSSLVELKKLEIRNHQLAIIKRDDALLDKARKAVALQKRRAKLRAKRDAFAPSEGRERSKRYLEALRVLREVNAELAFCLNWMAQKKRVLRDKRGRLERAKAALASGRMSLCLGSKKLLAQRPGPHNPDSPFASLEEWRTAWADAREGQWWSVGRKDTTQSNDEVKWHAGTRQLRIRLTDQLAHQRMDEGGVPRSGGPQSSMPRRMQCRFITLDGVDFVSHKGAARAALEDAFGNRPVTMRVLSRRQEDGTRAWYVQASVDLPSGFDTARVATRESGVLGLDFNARGVAWCAVKPDGNRVRDQNGFLSWDLKGLPAGERRRAIGTVVAQLARQAKRLKLSVAIESLDFSTKKLMARAGRVNKRYNGMLSSLSSSQFEEMVSRACEREHLMLYSVNPLYSSVGGFAKYGRSNRMNADTSAALWIGRQALFGELGKTEPTRATVKHVDERLVFSHLTATPMQSMTALAGVQWRDVAWGLGSNRALWGLKLRRWFDLQVEAASRSKEQPAPALSPAG

SEQ ID NO: 32016 - protein, 362 aa, unknown
  TnpB Polypeptide
MDSFEAGVPANYNASSAALTAQKKLPEFSYLKEVSSVPLQQSLRHLQTAYSNFFAKRAKFPKFKNREGKQAAEYTTSGFKWDATNKNLTIAKLGRLRIHWSREFKSDPSTVTLAKTPDDKYFVTLTLEEQINHLPKTGKEVGIDLGLTRLATLSDGQRVPNPRHTRKREKRLAFLQRRLAKKTKGSNRRKKAKLAVARCHAKIANCRKDTLNKLTTRLVREFDVIAIEDLNVRGMVKHPTLAKHISCASFGMFRSMLEYKCAWYGKELRVADRFFPSSKRCSGCGFTVAKLPLDVRNWTCPECGEAHCRDENAAKNILKFAAGQVVATRVVKARGESVRPIRASALKGATLRSVNQPALCDV

SEQ ID NO: 32017 - protein, 563 aa, unknown
  TnpB Polypeptide
MKVLTELNLLQAAADSSQAVRRVSRRLSPFRLCLLKSCSISAILHKSSSTSDKEQGLMAKATTTIRQVLNHQPSHGAWFAATQALFNQVAAFYFEVALANLPILALSNQEALTALERLTHATKKNPHPVMPLSAIAEHIPAMFRRAAIHAALGSARSFHTHLSKWRKRKEQALTRGKTFTERPPVPPRSWNKSATLYAGMWKERTASSIVLKVWTGSCWSWLKVRITGRDLPTDGTELGSPQLVRHGEHWWVHTPVEKQFSRPAKLEQQVTTHGETNICAVDLNLGEHLAVCTIQTVEGSILATRFIDGGNAIAGFRKQLLGRIARNRARTGIIAAGEQDNAALWRKIRARDEQVAHLVSRRVVQFAQEHGATILVFEHLGTLKPTKGKYSRRGNRKRAFWMKGRIFQYAKYKAWNERIITTRVNPRNTSRVCARCGAQVMRYAQGEVAEGYTPGAPLVLCPACGMRGHADRNASLRIGQRLIARYPSQEKPHAPLPPRETERELKDSGVVGSQDAKSFEQPSIAPASRHGNSNGHGTAHKGKRRRMGTPSLSIPPQLRLPLE

SEQ ID NO: 32018 - protein, 388 aa, Streptomyces sp.
VIDMMLRYQFRLYPSAHQRTQLAKAFGCARVVFNDALRARQDACKQGAKRPSAAELSKRFITEAKKTDGRHWLDEVSAVVLQQSLRDLETAYSNFFASKKGTRKGSKTGPPKFKKKASRQAVRFTANARFSLTEGGALRLPKIGDVKVRWSRSLPSAPSSVTVIKDASGRYFASFVVEIEGKPLPELDLDDTETGIDLGLSTYAVLRGRKISSPKFFRRQEKKLRRAQRKLSRAEKGSSNRRKAKLAVSKIHAKIADKRRDFIERETTRIVGESQAVYVEDLNVKGMGSQKSRRAKSVHDQSLGMFARTLEAKCGRYGRDFAKVSRWFPSTQMCSRCASIEGPKGLEGLKTRKWTCSSCGARHDRDENAELNIRREGRRIVAEGRPDT

SEQ ID NO: 32019 - protein, 384 aa, Eubacterium sp.
MLKAYKYRIYPNHEQKTQIAKTFGCCRFVYNQTLSYRKDNYEQEKKSVSKTDCNNYCNRELKKTYGWLKEVDKFALTNAIYNMDRAYRKFFKGARRLGDVCSAPTGVERRHAGYPKFKSKHDNHKSYTTNFTNGNITADFENGKIKLPKLGNIETKLHRSFKGQIKSATVSQVPSGKYHVSILVETEHIKMPDVAGKTGLDLGIKELCITSDGRKYENPKTIRKYEKKLTRLQRQLAHKEKRSKNYDKAKKQIALCHEKITNTRKDYLHKISHEIVSENQVIVSENLQIKNMVKNHHLAKSISDVSWYELTRQLEYKSKWNGREYVKIDTFYASSQLCSICGYQNTDIKDLSVREWICPVCGVKHDRDINAARNILAEGLSQIA

SEQ ID NO: 32020 - protein, 411 aa, unknown
  TnpB Polypeptide
MKIQNTIQFKIIHPNKNKALNLNTTMRQYRKCVNFYLHEIAKGTLLADIYLMAKQQYNLQTGLIQTARDVAKEQYDSYKNNPDNPKFPHFKGLMTVRFDHRSISFKEMPDGYFHWWANISTVSGRVKVPITSCSEYILKLKDNRFNTVQLKYRKGDFYLNVIFEEDKKIPKEKDFKHFIGVDRGSHNNIAVAVVQNRRGKILESKFFPAKQVFEKRRRYMVLRQQLGRKKLLKEIKKSKDRECNYVKDVNHKISTEIVSLASKYPNSVIVLENLKGIRKHMNFGKKGNRKGHSWAFLLLEEMIVYKAHRNSIAVRRVYPRGTSSVCKNCFGAIKRSPSILAVCEACKKKYNADWLGAVNITRRFFFYMSKNLGVSESHPKQGKDEQAGSAIAPNPLKDLVHHGLMARPIGI

SEQ ID NO: 32021 - protein, 371 aa, unknown
  TnpB Polypeptide
MHRSHVIRMYPTKEQEVVLKKTAGTTRYAYNWALATWKDMYAAWMDDHSKPKPTAFGLSKLWTKEKPAWAHEVAFCAQQNAIHNLGQAFQNLWRGVGRYPTFHKKGRKDSFSVANDKAKIYGKRILLPNIGRVRLAEVPRFEGKILNYTVSTYAGQWHVSIQYELQERASTHSDTSVVGVDVGLKHIAVASDGTVCDAPESLKKLDKKLRVAQRSIAKKQKGSNNRAKALLKKQRIQNKINNIRKDTTHKFTTALTKNHGIVVTEDLHIQEMKAKAEYKSLKRAYASSMMGMILWQVHYKALEHHKVDRFFPSTKKCSSCGAVKDHIDLGERVYKCEHCGAVIDRDLNAAINLKNAGPVRPEAPVDSAVNR

SEQ ID NO: 32022 - protein, 387 aa, unknown
  TnpB Polypeptide
MDRTLVVQLKPTPEQARVLKQTMHESTDCFNAVACLGFTRKCSNGIELHKQTYYELRAHYPKLPAQLVCASRVKATEAVKSALDRQKKGRKTGVPHSKVCPIRYDSRSYWVKWESMTCSLATVAGRVELPFTVPVYAQKYIGGKVCSADLCYRKGRYTLHIVLSLPDPAIAPSQEVIGVDLGLNRPAVTSNKHFLGERRWKEQERRIFRLRRNLQAKGTRSAKRHLKKVSGKLLRQRKDHDHVLSKRIVQYATPGSTIVIENLTYIRSRARMKKHTDTQRRLHSWSFAQFHSFLSYKAQERGIAVVKIDPRHTSQTCSTCGYQARNNRRSQSLFLCRSCGYCLNADLNAAQNIRSKHLANLGTPLVSGPSSAGLLCPPSGEMQAPSF

SEQ ID NO: 32023 - protein, 424 aa, unknown
  TnpB Polypeptide
  misc_feature (93)..(96): Xaa can be any naturally occurring amino acid
MLYAIRVRLYPNAAQREFFARTFGCCRWVYNDALAHCQHLYEAGEKRPSAYDLMKRLVSLKAEYPWLAEADIVVSAVFGHAALEVPKQALPHXXXXWLAEADSQALKQACTDLDAAYKHFFRRVKAGETPGFPRFKSKHRGDATYTATAAAGIALEPRWLKLPKAGRVRCRGGRAWEGRIKRATVRQTPTGKYYATVLIDDGRELPAQPETGLSPLGIDVGCKTDGFTHQFAALSTGEIITAPAEYKRQMKRLCRAQRRLARKQKGSANRAKQKRRVAQLHERISAIRRDFLHKLTHRLTCENQALAVEDLNVKGMMTKPTPKPDPALPGAFLPNGASRKRGLNRSLASVSLGEFFRQLEYKSAWRGVALLKVSRWEPSSKRCSCCGEINDALTLADRRWQCPACGAELHRDINAAMNIAARAA

SEQ ID NO: 32024 - protein, 395 aa, unknown
  TnpB Polypeptide
MYLIEKHIIKTKHSFYNECDRLCFQSKNIYNQALYNVRQHFFQTKQYLNYYSNYHVTKEQECYSYLPAKVFCQTVKMVDKNFKSFFALLKNKTVKNKIPKYLDTVKGRYLTIFPKQAIGLKEFKKNGKIHLSKTNIYINTKISNFNDIKEVRIIPRVSNYVIEVVYFTQEKKIEANGNIASIDLGLNNLATITYNNGYNPEIINGRPLKGINQFYNKKKGYFQSKLQSNKKTSKRICKLSYKRNNKINDYLHKASRELVNQLVSKCITTLIIGKNVNMKQDINLGKVNNQNFVQIPIMRFAEMIKYKCELEGITVTYHEESYTSKCSFLDNEEICKHEEYLGKRIKRGLFKTAQGKIINADVNGSYNIMKKAIPNAFANGIEGFGVNPIVLTIKK

SEQ ID NO: 32025 - protein, 376 aa, unknown
  TnpB Polypeptide
MHTICLKIRLLPSKAQETVLETTLETCRILYNRLLAERKDAWEESKLSLSCFEQQKHIKAWAEENEYLPRVHSQVRQNVAVRVDLAFKAFFRRVKAGQTPGYPRFRGRGRYDSYTHPQSGFELQDDAVKLSKVGVVKAIVHRQIEGTMKTCTVRRQNGKWFACLAVEVEDVPLEPNGLAVGIDVGLSNFATLSNGEQIANPRFYREEEVALAQAQRRLSQFDKGTVQRLKARKVVARIHERIRNRRHNFVHQEARKIVNRFEVIAVEKLNVKGMTKTHCLAKSIGDASWTMFRTVLSQKAESAARKFAEVNPAFTSQDCHACGYRAKKKLSERWHHCPMCAASLDRDLNAALNILSLGLQRIGIQSVEAPPFMAGE

SEQ ID NO: 32026 - protein, 263 aa, unknown
  TnpB Polypeptide
MDSASLNRRSPPKRWTTTRAATFYRNKVSLATVEGRVEPSFVLPADSPTPYERYVLSENYEFRESTLRYDAPLTSSISTFRCGGQTVTMRFRRYRAPRSNGLGIDLGVNSLAVSSTGTFWQGDDYDHWCREFEKRRGEMQHCGTQAAHKALLRLGKREEAWRKQYIHDRKRTRLEAIEHDCDVIAFEDLNDIREGLPQAKWHHVWAFRRLFEYVSYKAPEQGVSVEQVEPNHTSQRCSRTDCGFTHPNNRQENTLSARSAGTK

SEQ ID NO: 32027 - protein, 427 aa, unknown
  TnpB Polypeptide
MDYALKYRLFPDSQQREQLDWVRDTVRQLYNHALHRFNRIPESAGTVKQRVQKARDEIPALKDWWTDLTNVYSTVLQQAVEQIATNIENLGKLKENGFDVGSLNWKAPHEYRSFTYRQRGFELDEKSGPNGRGTLTLKKVNSETINIPIRLHRDLPNETAVKHVTVKKDKTGAWYACLNVEQDTPEKPDPEEIDLQETVGLDLGILKFIHDSDGRQINRLDLSNERERLEREQQNLSRKEHGSTNWEKQRRKVAEVHKRMRNKKADFKHKVAAFYTREHDAVFVEDLNVKGMLEGERKRRNTQEVGWRDFITILKHHGRKRGCHIVEVNPTDTTKECSQCGVTTDKPLWVREHCCPSCGYTVDRDYNAALNVWERGLQKLGVVHSEVTTPAETGTAVETEESPSVSASSVVETGSPCLKEVTRSVAE

SEQ ID NO: 32028 - protein, 375 aa, unknown
  TnpB Polypeptide
VEVVLGVPFSYEANSEVRKLLEDFRDMVNFCIDFSVKRRVTSYARLRRGVYEEWKRRWDYSTHFCHSACKIALAMIKGYRRRHREGKPEAKKLFMQLDPQLYKFYGDEIRISVKPRKFLFINLKYGEYQKKFIDAWKEGKLKTGEITINETKIIVPFKKEVDMSNPSDWIAIDINEGNVTAVSSNPHVLRVESNLRTIHTTYFNIIRRIQKLKKYKPKTAEKLVRKYSGRRKRKAMDECHKIAKKIVDFTKQHNMGIIMEDLKGIRKRIDRTKNLNRRLHSWNFRRLQFYIEYKAKLNGLPAIYVNPKGTSSLCPICGGRLASNGYRLKRCECGYEEDRDVIACLNMLRMRGVPLPQKATYEAFKAEVERIVIKC

SEQ ID NO: 32029 - protein, 377 aa, unknown
  TnpB Polypeptide
MLKTRRTFKYRLHPNRKQRESLMATLEVCRQLYNDALQERRDAWKTCHTSVTFKMQSAQLPACKEVDSPMQSVYSQILQDVLHRVDKTYKAFFRRGNGFPRFKGKGWFDSFTYPQLGFSLNGSQLSLSKIGNVKVNLHRPIAGDVKTLTLKNESGKWYACFSVIMDNEPLPENDSVVGIDVGLESFAVTSDAEIIDNPRWFRAAQKVLRRKQRHVSRCTKRSSGWRKACRLVAVLHRHVFNQRNDFQHKLSRAFVNNYGLIAVEDLNVKGLAGGMLAKSVHDAAWSSFIAKLVYKAESADRLLVKVDARKTSQQCPCGAPVPKKLWDRKHHCTVCGLNTTRDHASALEILRRGLRLRTSMPAIAGMALEAPSFSYGA

SEQ ID NO: 32030 - protein, 421 aa, Streptomyces sp.
MREAAVRASCPAGADACTGPAHGHSGTRGPHPVEPAARLVDDAAPGQAFPRGGGRRDPPGPQGDRLARRTARPGRPGRAQDVLPGMEELLGRPRGPPGLQSPLPHRDVRGHSPGPGPVHHPGAPPLGHGQHPQDRPGPVPLDQRPPRGKARRHRQPDHRSPAGQRRARLAHSLPRPDSRTRPRATPRPRSRHRRGRHRATRPLRRHDIRPTAWLTGKEQTKLGRLERRAAHRKSFRTRGERTSHRLRATYDQIAGLCARAKRRHLDWQHKTTTVIAAKYGVVVVEDLNITNMVKSAKGTVEVPGKNVAQKSGLNRAIIGEAWGRTVELLTYKTARRGGTLHKVPAPGTSQRCSMCGVTTPGSRESQAVFACKNPDCGWVGNADHNGARNILHVYRTGLALVPAAGRAVVRRARRVKPATAR

SEQ ID NO: 32031 - protein, 367 aa, unknown
  TnpB Polypeptide
MEYSYKFRIYPNTEQQTLIQKTFGCTRFIYNHFLAQRISEYDAIGKSSTRFQQDKSLTALKQEIEWLREPDKCALQNALKDLDTAYKNFFRAVKSGGKTGFPQFKSKRNRRKSYKTNSNIAISNSHVRLPKLGLVKCRVSKEVRGRILSATVSQNPSGKYFVAICCTDVEIAPLPCTGAAVGLDMGLKSFAITSDGVEYPNHRYLRKSQKKLSHLQRQLSRKSKGSNRWEKARVKVARLHERIANQRQDTLHKLSTQIVRKYDLIAIEDLAPQNMVHNHKLARSISDASWGEFRRQLEYKAKWYGKRVVTVDRFYPSSQLCSSCGARWSGTKDLSVRKWTCPVCGTVHDRDRNAAVNILNEGLRLLA

SEQ ID NO: 32032 - protein, 465 aa, unknown
  TnpB Polypeptide
MIQGCRIKKINNGYAVKETVFQNKEDAEIFAFYLKIVLNNKKKLVYVGSEEEAITKHLEIHPEKNNDNCIDWYHLCWQRNAERYYILALFVNFSYLYTMIAYKYKLYRTDKTKHLDKMLREACFVWNHALALQKRYYHLYQKYIGIGRMKAHFVKRIIRNLLHSQTTQEILERLDTAYQRFFKHLAARPPKFRKAKDFSSFLFKQGGYRLEGNSICINKISKTYRFSLSREYQGKVKTVAFKRSHLNEYYVIITTDAVASHYRKTHHGASVGIDFGLKTYMTMSDGSTVQSPRYLKTDLPKVQQKGRKLSLCKSQSNNRERRRLELNRQYEAIVNRRTDWQWKLAHELCRKCARIFIEDLRLTGMTKLWGRKMSDLAHAEFVSKLEQVAAKYDVTVHKIGRFFPSSKTCTCGHMNQNLKLSDRSWTCPVCGQTHDRDLLAANNILRQGIAELESGRKTTRSRKAV

SEQ ID NO: 32033 - protein, 389 aa, unknown
  TnpB Polypeptide
MRVYKFQLKPNKEQENKLLKTLNLCRFTYNKLLEELNNQTKIDRNKIQHKIVELKKNFPELKTVHSKTLQYENYRLFANLKGLSKTKNKRKVGKLRFKGYKWFKTFVMNQTGYKLIKTNKHYDKLKISKIGLINIRQHRKIEGNIKGIIIKKKVISWEAHIITDAKYQIKKGIDEIGIDVGVLNFLHTSNNEIINNPLYMNKELDKLKIIHRKISGTKKGSNNRKKKINSLLKIWEVIDNQKKDFFHKVSTHLVNNSKFIAVEKLNIKSMTKNKKKNHFYNHRNILDSSWGMFLQMLKFKAESAGIEYVEVNPKNTSKMCCKCGKLQDMPTNIRLYKCNSCNNIIDRDYNASINILAKGKGLAFVGEEWLHSLMNQEAITSTPKVLGYV

SEQ ID NO: 32034 - protein, 360 aa, unknown
  TnpB Polypeptide
MVLDYGSQNKVTRKLFLNNATYKQVREALPQLPSALVQTARDEASEMLKCYKRRHKGRFGHIQRDRLSVRYDNRCFKFYPDSNHIELTTANGRLSFGFKHHKLMDRWRGHYTNAQLVIRRHHISLHVQVQIPDFPKTKTKTKKTPTSFLGIDAGIVNTAVCSDNTFYNSRKLRAVKGRYQHLKRRLQHLGTRSARRKLQRLSGRERRFVLDTNHRISKSIVSKPYDAFVMERLTYIRRRGMGRKFNRRLGSWSFSKLQYFIEYKAEQLGKSVIYINPFHTSQACSRCGHSERDNRKGSTFKCRRCGFTLHADLNAARNIGVPGKPEYLRLCVNRPIVAPEESTLTGMVDDSYKPTPFTGG

SEQ ID NO: 32035 - protein, 478 aa, Burkholderia sp.
MILVYRYRVKSLNGLLNKQSRVVNYVWNFCNDTQKHALKWNKKWPTGFDLNVLTTGSSKELGIHSGTVNATCEQYAKSRSQRRRPYPRYRGRKSLGWVPLKGRDLKREGDAFRFAGNTFRVFNSRPLPEGKIKDGTNFAQDARGNWFLNIVIEMPDVQARPIRSGVGIDLGLKDFATLSTGEKLPNDQFGRRAAEKLAKAQRARKHKRHIAKLHAKVANSRADFQHKLALDLVRRFDYIAVGNVSAVKLARTRMAKSVYDASWSSFRNKLRYKAIAHGATFEEVDESGSTQSCSSCGSKDSTTRPKGIAGLRIREWACSRCGVEHDRDTNAALNILRCGRASPGVGILSLSGEEDVKELHATVGTATSDLDDDESFANIYCHDAEQDYCFALSRFPDDARIEVMVRDQLNVRVKDLSVCLTDDTIDVEIEPGIAARLDGQTRYVIHLAPGQYDPGTLRAALKEIFVGKSGYRDDSTGG

SEQ ID NO: 32036 - protein, 484 aa, unknown
  TnpB Polypeptide
MARLEIPDGWVAQAYRYALDPTPTQERAFCSHAGAARFARNHMLGLVKAVLDQRAAERSYNVAESELTPRLGWSLPALRRVWNKRKNAVAPWWGQNSKEAYNTGLDSLARSLEAWAKSRRGERAGRSVGFPRFHGKRERASVRFTTGVVRVEADRHHVTLPRLGSIRTHESTRKLGSRIEAGTARVLSATLTRDSAGRWYVAFQALVQRAAVRPAHVGVRGPLVGVDVGVKNLLVAATPDGSEFERFHAPKSLASARVRLRALQRKAARQVGPFNTEAKRRQQPSKRWLRTRARISKTYARTANQRRDALHKATTRLAQRHQTITVETLNVSGMRTGGGARKRGLNRALADAALAQVRRMLAYKTAWYGSRLVAADRWYPSSKICSGCGSRKPRLLLAERSYGCEYCGMVLDRDLNAAINLARLGEIHAQGEQSPAGSGPVEGRGAMPETEPATAGDAAGCEASTPPQYLLDQTGSASTQGEAV

SEQ ID NO: 32037 - protein, 402 aa, Streptomyces sp.
VTVTHVKRAFKYRFHPTDAQTAELSRTFGCVRKVYNLALAARTEAWTRQERVNYNQTSAMLTAWKKTEELAYLSDVSSVPLQQCLRHLQTAFANFFGKQAKYPRFKSKKKSRKSAEYTTSGFRFRDGMLTLAKMTEPLDIVWSRPLPEGASPSTVTVSQDAAGRWFVSLLCEDPSVQPLPATGAAVGVDVGLDHLLTLSTGEKVANPRHERKDRARLAKAQRNLAKKQKGSNNRAKARLKVARVHARIADRRRDHLHKLSTRLVRENQTLVIEDLTVRNMLKNRALARAISDAAWAEFRSMLEYKAAWYGRDVVVVDRFFPSSKLCSNCGALQGKMPLHVRTWTCACGAIHDRDVNAASNLLAVGLTASVCGAGVRPQRSTPSGQSAVKQKPQRATAGIPRL

SEQ ID NO: 32038 - protein, 402 aa, Escherichia sp.
VKRLQAFKFQLRLGGQQECEMRRFAGACRFVFNRALARQNENHEAGNKYIPYGKMASWLVEWKNATETQWLKDSPSQPLQQSLKDLERAYKNFFQNRAAFPRFKKRGQNDVFRYPQGVKLDQENSRIFLPKLGWMRYRNSRQVTGVVKNVTVSQSCGKWYISIQTESEVSTPVHPSASMVGLDAGVAKLATQSDGTVFEPVNSFQKNQKTLARLQRQLSRKVKFSNNWQKQKRKIQRLHSCIANIRRDYLHKVTTTVSKNHAMIVIEDLKVSNMSKSAAGTVSQPGRNVRAKSGLNRSILDQGWYEMRRQLEYKQLWRGGQVLAVPPAYTSQRCACCGHTAKENRLSQSKFRCQVCGYTANADVNGARNILAAGHAVLACGEMVQSGRPLKQEPTEMIQATA

SEQ ID NO: 32039 - protein, 306 aa, unknown
  TnpB Polypeptide
MQTAQAMVKQAVTDFKNWLASLREYKKHPEKFLGRPKMPHYKKQDLATVIITNQDAVLYPSETGVSLKLPIIKKRLSFSNISEHAFLKEVRIKPYHGRFLFCLTFEEPEPVIETSMPYTCAIDFGTDNFAAIVCDDGSSAIYKGGAVLSDTQWFHKQKAKYVSILTKGYKSQYAASKRSSDLSYRHANFVKDQCHKISRSIIDFCVDHQAGTLIFGVNPLWKQNSRIGKINNQKFVSMPIAFLRSMITYKALNAGIKIIEQEEVIPPKQISQQKTIFLPMVWMIKMHSFPGFVSNEVCIVVQMERS

SEQ ID NO: 32040 - protein, 387 aa, unknown
  TnpB Polypeptide
MLIAKKIRLEVSAQDAATLEMMQGKCRGLYNWWVMQLREGKRWHWQDAKKTLAESRKFDPELDQVYGKLLAEVYFRLDQAMRAFWRRVAAGEKPGFPRVRPRHQFFTLCYPAMYLHIEGKTVLLPTGGGRGKKDKPYPTIAAALTETPSKGYKEVAISRDARGHYHASFVYEVQEAESRAGQAVAFDLGIKTLATGVNEQGRFYHVGGFKGYQWYNQQLDKIRSKRDRCKKMSRRSIHLSQVYQRVSEKKRNKRRDCLHKASHLIAHRLVESTVVVGDLSQRQMVTKQHVERRKQLNRSVYNDWGLYAFIQMLTYKCQLAGKAVVLLDERDTSKTCSGCGCKQDMPLSKRTYRCGTCGLVMDRDENSAVNILRRFLARPGPRATDVA

SEQ ID NO: 32041 - protein, 284 aa, unknown
  TnpB Polypeptide
MVVQRVGILLDHVSIAEEYRATMEQPLPIRWSRPLPKDVQPTTITVSRDTAGRYFVSFLVEENFKPLAVTPQTVGIGLGLHDTVTLSTGEKTGNEKFFHQDEKHLARAQRALCRKQKGSKNRTKAKQRVARIHARIADRRQDFLHKLTTRLIHENQVLCVESLNVKGMLKNHMLAKAISDVGWGELIRQLQYKAAWYGRAVVAIDKWYPSSKRCFDCGHILDSLSLDVRQWPCPECGIVHNRDVNAALNIKAAGLAVYACGEVARPGWAKPNRARFREAGSSSW

SEQ ID NO: 32042 - protein, 390 aa, Clostridium sp.
MKKLKKAYKIEIKPTNEQKQKIHQTIGVSRFIYNFYIARNKEVYEKEEKFVSGIDFSKWLNNEYVPNNQDKVWIKEVSSKATKQAIMNGEKAFKKFFKGQSRFPKFKKKKKQDVKSYFPKNNKTDWTIERHRVKVPTLGWVRFKEFGYIPVNSMVKSGTISQKSDRYYVSILVEEEIKVNDKAFSKGIGIDVGLRDFAICSNGVTKKNINKTKKVKRLEKKLKREQRKLSRKYESLKLRNKKEKGEAARQNIQKQVVKVQKLHQKLGNIRTDYVNKTVNEIVKQKPSFITIEDLNIKGMMKNRHLAKAVSQQKFYEFRTNLISKAKHNDIEIRLADRFYASSKICSCCGYTKKDLKLSDRIYKCDNCNTSIDRDLNASINLANAKKYKIA

SEQ ID NO: 32043 - protein, 416 aa, Haloferax sp.
MDVRRTAVVKLDLSDEQRDVLHRTAEQYLYCANRTADYCWSDTSYTECKTNKRQVRDALYADLREETDLQAQLVQAAIKRAVEAIKGVIERWKKGQRVSCPTFTAETMDYDARSATFSRNKVSLATVEGRVEPSFVLPADSPTPYERHVLSEDYEFRESTVRYDAVDDEFYIQISTRRIDGDDDEVPADIGHPDQTVLGIDLGVNSLAVSSTGTFWQGDDYDHWCREFEKRRGEMQQRGTQAAHNALLRLGKREEAWRKQYIHRVANELVTEAVEHDCDVIVFEELTDIRERLPQAKWHHVWAFRRLSEYVKYKAPEQGVSVEQVEPNHTSQRCSRTDCGFTHEDNRHGEHFCCQKCGYEVNADYNGAKNIGLRYVRKRTHRLRSSPTSGSGDAPVDVRVNGGTLNGKSHQQIAGD

SEQ ID NO: 32044 - protein, 425 aa, Haloferax sp.
MTDEQALIKTLDFQLDIRSDNESLLHDACLESRSVYNETIRLAKEDEDWDAIPDRMADDANLVKNTTQRVVAKALGAMENYYEYDDFGQPSHTKDGAYPLRANYEEGYNLSLTDDSNVAFRISAKPYKHVTGVLKGSDGHLDILTTALESGQWEIGTAEALFHNDNPELHVTVTNTEQTVRNKQDSQTVVGVDVNEDNVALTALSESGVEDTLVIDFPEIKFERHRYFTMRKRVQNAGKDSIHDTLDGREERFVRDRLHKVSRHIVEWSRQFEKPCIVFEDLKEMRDSIDYGTRMNRRLHHLPFRALQFYTSYKASFEGIPTGWINPEYTSQQCPLCGHTERANRNKKRFKCKDCAHQDHSDRGASVNIAVKGTKKHQDWNVSALNSLPTVRKVRRQASGAVDAPTVTHPTVRGSSADGQMGVSD

SEQ ID NO: 32045 - protein, 342 aa, unknown
  TnpB Polypeptide
MIKTQKARLYPNRAMKKVLDDLCDYRRYCWNQGLALWNDMYDAFLILEDKELLPNERKVRNELVADKADWQYQLSARCLQLAVSDLGKAWKNFFNKAQPDWGKPQFKSKKAPRQGFKTDRAKIVNGKLRLDKPRGIKKWYDIRLKGAASLKGELKVVSIYRENGKYWASLPFEIEIKTKAKAGKKTAVDVNVGHFSYTEGQVKTLPNNLKFLYERIKHYQRLLAKKRAANGKKAAQSNNYVETKAKLQRDYRKVANIQHDIVQKFTTELVNNYDQIAIEDLDVKRMQMSHVASKGLQRSLFGCFRQVLAYKCQWYGKELFIFSRQILSKHATVFPMRIRQDW

SEQ ID NO: 32046 - protein, 369 aa, Phytomonospora sp.
MALTVKRAYRYRFYPTGEQAALLTRTFGCVRFVWNKALEERTRRHRDLGLATNYVETAHWLTAWKQDADTAFLAEVSNVPLQQALRHLQSAFSRFHARLARYPRFKTRHRGKASATFQSNAFRFRDGRLHLAKLAEPLDIVWSRPLPAGVDPTTVTVSRDAAGRWFVSMLVEERLSPAPPVEGRVGIGTGANALITLSTGEKITVPRQERADRRRLARARRTHDRTTPGSRNRAKARVKVARIQARIADRRSDHLHKVTTSIVRENQTIVIEDLGPRDTAGDHDQGTSDAGRVRLRSLLEYKAAWWGRTLRVVDRWYPSAELCSTAACGHLNTSLPPSARSWKCPRCGVLHDRDLNTARNVLAAGLAES

SEQ ID NO: 32047 - protein, 396 aa, unknown
  TnpB Polypeptide
MRLVKKHIIKDNRFEDICLKSGLLYNYVLYNARKGIFNKEYLNEYEFSTKLCRENQFDFRNLPTSVSQQVVGQVFKNIKSWIRLKKDFENNPSKYDNCCPHLPSYKKGKKQNMVVFTTSACRLKKDGCIHFVKNIIQPIKTEIGDSKLCQVRIIPQSTCYVVEVIYEKKEHNLSLDKDNVLSIDLGLNNLCSCISNAGLVPFIVNGRIMKSFNQWYNKRKAKLMSYVEGKGTSERLRQLNNYRNFWIEDYIHKVSRYIVNYCITNNIGSIVIGLNKGWKQKINLGKKINQKFVEIPFSRLIDKISYKCKLVGISFQINEESYTSKVDHLAFEKLGKHDVYLGKRKKRGLFQSSVGKLLNADINGAIGIGRKVFGDSFVNMIIDSGFAFNPIRVNIL

SEQ ID NO: 32048 - protein, 384 aa, Nonomuraea sp.
MSGRPRRVAVRRSYKFLMRPTARQQAALTACLDDHRALYNAALSERREAHKRSQVSIRYGDQSAQLKEIRAYDPDQAHWSFSSQQATLRRLDKAFRAFFDRVKAGRAPGFPRFKGRGWFDTVEWPKDGDGCRWDSQPEHPSATFVRLQGVGHVRVHQHRPVRGRVKTISVKREGSRWYIVLSCDDVPAEKLAAVQQDLARKKRGSKRRRKAVARVAALHGKIRRQRLDGAHKAANALIRDYDMIVHEDLRIANMTKSPAPKPDGEGGYLPNRAAAKAGLNKSILDAGWGVFLGILAHKAESAGRELISVDPRNTSRTCAQCGHMAKENRATQAEFACTACGHTAHADVNAAINILGAGLALREAAAASREAALFRGRRSHETLP

SEQ ID NO: 32049 - protein, 372 aa, Moraxella sp.
MKHRAYKFRFYPTDEQAKLLAQTFGCVRFVYNTILRWRTDEYYQSKTKIGYIQANARLTWLKKQPQFAFLNDVSCVPTQQVLRHQQTAFKNFFEGRAKYPTFKKKTHKQSAEFTKSAFKYTDGQLFIAKSKQPLNVRWSRHLPSKPSTITITKDCAGRYFVSCLCEFDNQILPKSDTAVGIDVGIKHMFVTDSGLKIDNPRLTAKYATKLAKAQKALNRKKLGSANRTKARMKVARIHAKISDCRLDNLHKLSRKLINDNQVICVETLRVKNMIKNPTLAKHIADASWGRLIQQLEYKADWAGRSLVKIDQFFPSSKRCCNCGYTLPFLSLDTRHWDCPECKTTHDRDVNAAKNILTAGLAGLAFGENVSLV

SEQ ID NO: 32050 - protein, 424 aa, Chloroflexi sp.
MNTVRVYQLNHLAPVLFQRLKEAQMEAARVWNLCMELHKDARMTHARWPGRRELEQATKGKFALNAQTVQQITHTFLANIETTGKIRRQHPELRMKYPWRIKRFYPVKWPAQAVHKQAGRVVLPMGRGRPSLVLPITLPEHAGACTLVWNRGYALHVCIEVEEAEHAPGTAIATVDLGEIHLAAITTNTSAALLVTGRGIRSLKRQRSKQLGHLAKKQSRCQKHSRRWKKLQCAKSKVSKRAERRIRDVRHKATRAVIDFCVEHKVGTLFIGNPHGVRSRDTGRHHNQRMSGWEYGKDIDYLTHKSKQARISCFTGSERGTSSRCPRCGHRHKPRGRTWACHACGFTGHRDLVGSINMHTLVFGTHPKFPRSFTYLRPGNPRRSSRADTPRSCLGQPTVQPPIVDTVSPETGHPVGVAQKPVPF

SEQ ID NO: 32051 - protein, 418 aa, Sharpea sp.
MYLTQTNIIRGLSKQQYLMLAEMCRYANNLYNVALYNIRQYYFENKKFLTYESNCHVCKENENYGLLQAGVSQQTLKVADRSFKSFFNLMRKAKHNEYRFQDIRMPHYRKKGGMFNLILSTNAITIKNGYLQMPISRAFKKLHPDCDIKIPFPKRLDGKAIKEVRILPIRNGKCFKVQYVYETEIKKASLSANNNMAIDLGVDNLASCITTLGTSFIMDGRKLKSINQGWNKEKARLQSIADKQGNKHTDRLSRITEKRNNQTKDIMRKAVRYIVNYCLKNDIGTVIVGYNPDFKRNVNIGKVNNQTFINISFGDFRQLLSGLCEQYGINYFEQEESYTSKSSFLDDDELPEYKAEQPYTGKFSGRRVHRGLYKSSDGTVINADINGAANILRKSKQNFNFEELCRGLLASPQRIRLL

SEQ ID NO: 32052 - protein, 245 aa, Bacillus sp.
LPKLSLVRFAKSREVKGRILNATVRRNPSGKYFVSLLVETEVQEFPKTYSYIGMDVGIKDFAILSDGTIYKNPKFFRSLEEKLAKAPCVLSRRTQGSSRWNNQRIKVARIHEYIMNSRKDYLDKISTEIIKNHDVIGIEDLQVSNMLKNHKLAKVINEVSWSEFRAMLEYKANWYGKQVIVVSKTFASSQLCSYCGYQNKDVKNLKLRKWDCPSCCTHHDRDINASINLKNEAIRILTARIAGLA

SEQ ID NO: 32053 - protein, 498 aa, Mycobacteroides sp.
VFNAVLGEFIARSWAVKTDPGWRSARELPGRTQAESKARGAAFRAIEQAHGFTVDAAQSFASSLRKSWVREHLPAQEAQSLGARAFDAVRQWHVGRKGKPRFKSARRGLHSLSGKDGNGALRPKTDSAGRLVGLQWGAGFVIPIVAAAVSGRRGREQAAELVEIETLIAAGKVLSTRIVRTVINGRETYRMQLVCDGHPTRRHQVGAGRVSFDLGPSQIAVAVEHSEGSWSGWIEPLADQIRLDTKRLRQVQRKLDRQHRAGSPACFNPEGTHKRLRCCWQRSRAAQRIAVELAELHRRLAEHRKTLHGALANRLLGHGTDICCERLDYVSWQKNFPRSVRDRAPGLLVEMLRRKAESAGGTALYEYNPRTTALSQTCLCGNRKKKSLSQRVHRCACGVTEDRDLFSAYLGLHVQVAADGSDRLDLQAANHGWLHRQDVDESPKSSRSAQARKRRGRRHPPSRRSVARINARRKAKTAMRQSCSAHTSTTDQPTAIAA

SEQ ID NO: 32054 - protein, 426 aa, Mycobacteroides sp.
IAPTPTAGPVGNSRARKRPKGAPTHVRSWPLRPAPAQCGEIGVRFFTGVRVFNAVLGEFIARSWAVKTDPGWRSARELPGRTQAESKARGAAFRAIEQAHGFTVDAAQSFASSLRKSWVREHLPAQEAQSLGARAFDAVRQWHVGRKGKPRFKSARRGLHSLSGKDGNGALRPKTDSAGRLVGLQWGAGFVIPIVAAAVSGRRGREQAAELVEIETLIAAGKVLSTRIVRTVINGRETYRMQLVCDGHPTRRHQVGAGRVSFDLGPSQIAVAVEHSEGSWSGWIEPLADQIRLDTKRLRQVQRKLDRQHRAGSPACFNPEGTHKRLRCCWQRSRAAQRIAVELAELHRRLAEHRKTLHGALANRLLGHGTDICCERLDYVSWQKNFPRSVRDRAPGLLVEMLRRKAESAGGTALYEYNPRTTALSQ

SEQ ID NO: 32055 - protein, 382 aa, unknown
  TnpB Polypeptide
MLTAIKCRIYPDENQIILIHKTFGCARLVYNLMLSDFYNNNLLKTPAKYKEEYPFLKEVDSLALANSQMHLQRAFRNYKKNKDHFQKPTYKKKSRYKLSYTTNNQKGTIRIENNRLILPKFKSGIKIKVHRHIEGVIKSVTIGQVSSGHYTASIMYKVPDNQEKPALSKDSAVGIDLGLTHLAIISNGKKYENPQQFHELQRKLRKEQKILSRRFEQNVKERIYDEDGNCIEIIYKKPLRECKNYQKQRHKVAKIHNKIKNKRSDNLHKVSTEIIKNHDYITLETLKVKNLMKNRKLSKSIANVGWSKFINMLRYKAERYGKQVIKIDQWFPSSQICSHCCHNDGKKALNIRKWTCPNCQTYHDRDINAAINIRNKGLEMIS

SEQ ID NO: 32056 - protein, 411 aa, unknown
  TnpB Polypeptide
MIVQRVEKHVIKMSNPYYSLLCDYTHKAKNLYNHANYLIRQEFFTNNKWLRCGELDKILRGDLVYDDYRQMPSAQSAQQLLRLVDKVWVSFFRSIKDWSKNPDKYLGKPKVPKYKSKDGKYVLVLTSQEVKVKNGSLKFPRKFNGFEVKPRFIELSNFVDFKQVRVIPNYNSLCVELVYTVEIPDNNLEDNGCYLGIDIGLDNLATVVNNKGYEPFVINGKGLKSINKYYNKQMSYYRSISKKVNNKDYTNRLAKLTEKRNLKVDDYLHKASRRIIDYAIENNYNTIVIGNNKNWKQNSPLSKVVNQSFIGLPHAKLIALLQYKAQDVGINVILTEESYTSGTSFLDNELPVKVNYNKKRRVSRGLFISNKGIKINADVNGAYQILRKVFPKVSSDGIEGVALHPVKVGIV

SEQ ID NO: 32057 - protein, 407 aa, unknown
  TnpB Polypeptide
MKLNLQVRLYPTKQMRTYLDSQCDYRRYCWNKALSVWNDLYDQRVVALPRELKLKIKDSATDKTIHFTDGEMNQRERFPSPTERNVRDELVANKSDWEYENSSRVLQLAVKDLSNAWNNFFKKAQENFGKPKFKSRREPKQGFKTDTARIKCGRLLLDKPRAYTGKWESIRLKGYNIPEGPVKLCAITRVKNQYIATLTVEVETTPLKSTGKVTAVDANVDHFDYTDGVYTLRPKELNRLYGKVRHYNRVLSRKRKECGIHSKSYQKTRAKLQMTYSRIQHIQNNLLHKFTTGLYQDYDVIVIEDLSVKKMQMSKKAKGLHRSLFGRFRQFMEYKAEKFEKRLVIADKYYPSTQRCSACGYIKSGDEKITLVGNMKHGTKHQEYHCYECGYKVDRDYNAVLNLLALI

SEQ ID NO: 32058 - protein, 412 aa, unknown
  TnpB Polypeptide
MRSQKLRLKPTKEQESLMLWFSKVSRNYWNLLVDIDKRNNKGDFDNILSKTGSKTYYSKFYDRDIYSLNQSDYLNFAKIVVAKNYEEDKEKWSWYYKPNQSFIYTSIAREMVRIRRQNKGKLNFRSIDKISPSFNVRCDMSANKKRPSRIYLKDNGKLQIPTIGDVGFGSTRTEFDLSCKKQVANISFDGKYWYLSYTEDVELQEVDLPEYTSGVGVDLGIKTLATVSDGTTVPNIKTFRRVRILNKRLKRLQRKVAKKYLINGCNKHNKTKNIIKLERQIKLIYRSLRNIRINHIRKFVSELVKKQPQYIAIEDLNIKGMMKNKHLAKDVANCSFYTIREHLIRKAGERSIVVRLVDRFYPSSKTCFNCGSYKKDLKLNQRVYHCNTCQEKIDRDLNAALNIAKADNYILA

SEQ ID NO: 32059 - protein, 382 aa, unknown
  TnpB Polypeptide
MATVQKGIRVRLYPTEKQEVLINKTLGCCRFVHNQTLADCKQSYEQTQHFPSKNERIKNLVQLKEINEFLKEVDSTALQQSVRDFNSALDNFFRNKRHFGFPRFKLKHDSKQSYRTPGGRRNAKVLDNKHLKLPKLGKIKTKKFSMPDEYKILNITVERTNTGKYYASICIETEVQSLPKTGKQVGFDLGLIDLLICSDGTRYERPKFAYAFKDKLTQEQRKLSKMRTKLERVNANLDKCKNYQKQKHKVAKLHEHISNCAKDFNHKLSRKLVEEYDFLAFENLNIEGMKQNRKLAYSISDVRWSQLLNFIQYKCQWYGKEFRQVDRFYASSKICSCCGTYHKDIVNSLSIREWVCPDCGTHHDRDVNAAKNILNQALSVGV

SEQ ID NO: 32060 - protein, 465 aa, Streptomyces sp.
VENHLPVKRAFKYRFYPTDAQAAELSRTFGCVRKVYNLASAARGDAWTRQERMGYGQTSAMLTGWKRTEELAYLAEVSSVPLQQALRHLQSAFVSFWGKRSRCPRFKSKRKSRASAEYTRSAFRYADGRLTLAKTAEPLDIVWSRILPAGAQPSTVSCDRAGRWFVSLLCEDAPAPAPATTDAVGIDAGLTALVTLSTGEKITNPRHEHRNRERLARAQRALSRKEKGSKNRAKARMRVARVHTRIADQRRDFLHQLTTRLVRKNQTLVIEDLAVRNMLKNHTMARAITDAAWRELRSMLEYKTAWYGRELITVDRWFPSTHLCSACGTMTDKMPLTVREWTCDNCGTTHDRDGNAAMNLLAAGLAVAACGAGVRPHRESSSRSGRSVVKQETPPARVGTPPAVGGEKSIPDSLDPQDSGGETHRGADGEQVDDRLGHLLLLEGVDAAGQEQADEDQDGVEAVHG

SEQ ID NO: 32061 - protein, 300 aa, unknown
  TnpB Polypeptide
MIANQILRKYSSDLKAKQINKVVLTVPNQGVNVDKGSREIWIPSLKLKLKYQFRNDFEKVNQIEIDKEYAFISVSLPEPEEYETEVYIGVDLNTTGHCAVVGNPKTGKVLKMGKMAYQIHKKYKSIRRYLQKKGKYRKVKQIRNREQRIVSDMNHKISRKIVDMARENQSGLKMEDLKGIRNAKSTKSFRYSLNSWSFYQLRQMIEYKAKLLGVHIVYVDPQYTSQECSRCGLIGNRNGKVFKCPHCGHVDHADVNAAFNIALRQGIGQSVADRDVTEGNTDIPKEATSGTMETLEPHEL

SEQ ID NO: 32062 - protein, 387 aa, Solobacterium sp.
ITIIGEKKSLQKIWYEKEEISMEVTRSYRYLIMPDAAQKQKIRDIIRLSNKAFNMYMEEVKNGSRQTRVTDIVKRYKNICPEFKSTDTSALYNALFQATDKIEHPYFRRNNVEVASYTTAVLERANNAARLYEDKEILYLPYVGDVKIKMHRPLPENIRIKTFTVKKDNDTYYGIVTFVKNVLNAFDSNLDLKNSIGLDYSSSCFAVDNHGLRYDVPHFLRSNLDSIKKMMICLEKYEKGSDDYNAIIRKLRKLHRKIANRRKDFLHKLSCEIAENYDYVFVEDLDMNQYTGKSNLSRATYDNSYAKFVNMLQYKLEDKGKKLVKVNRYFASSKICSECGCLNENLKLNEKNWTCPHCGSYLDRDVNAAVNIRKEGMRKVKEESWNQ

SEQ ID NO: 32063 - protein, 442 aa, Ammonifex sp.
MKEVKGVAWSDKSHPHRLLLTKQFPLGLEMLLVFQPVMQAANRIWNSCVWHSRETFKQEDRWPTEAELKAKFKSFAAWKELHSQSAQAVVEEYFEAVSSYRKHRENGHHEMNPPGFKPKNHLRTVTWKRQGFDVEDNTLVLKLSRKKEPIKVALPEGWNVVTLPDGTGVRGIPVEVKVKAVVRRRKVENLVLHVTFDLGVMPVYRTGAVSAYDYNSATFARAASNGQLDLFVCRELLSLVQYRNKILAEFQEKISRCKEGSRRWKRLQAAKVHRLRRLDRRIRQMEHALTKLFAQLDEAEGVAFAVVGDLTSLRRSARTGMKGKKASQKINQMAYERLQSEQRYKNLMRGIETDPWTEKYTSTTCCTCGAYNPGWRKHRGLWVCGRCGLVLQADLNGAANLLKQYLFGTCTGRGLPSAFGEPRVWRWDGRHNRFVQVSSRAA

SEQ ID NO: 32064 - protein, 402 aa, Escherichia sp.
VKRLQAFKFQLRPGGQQECEMRRFAGACRFVFNRALARQNENHEAGNKYIPYGKMASWLVEWKNATETQWLKDSPSQPLQQSLKDLERAYKNFFRKRAAFPRFKKRGQNDAFRYPQGVKLDQENSRIFLPKLGWMRYRNSRQVTGVVKNVTVSQSCGKWYISIQTESEVSTPVHPSASMVGLDAGVAKLATLSDGTVFEPVNSFQKNQKKLARLQRQLSRKVKFSNNWQKQKRKIQRLHSCIANIRRDYLHKVTTAFSKNHAMIVIEDLKVSNMSKSAAGTVSQPGRNVRAKSGLNRSILDQGWYEMRRQLAYKQLWHGGQVLAVPPAYTSQRCAYCGHTAKENRLSQSKFRCQVCGYTANADVNGARNILAAGRAVLACGEMVQSGRPLKQEPTEMIQATA

SEQ ID NO: 32065 - protein, 384 aa, Proteobacteria sp.
MIQRQGYHYRLKTTPALRRSLAQYAGACRFVWNKVLALNEGRYLAGAPRLTYYEAAWLLTQWRHSEEYGWMAQVSIHALQHCLRDLERAYTNLCAGRTAPPRFRKKFLSDSFRFPTDFQRDGDRLKLPKIGWMRFWKSREIEGTIKNVTIRRDGNHWTVAFQTEREVETPVHPSTSALGIDLGIATFAAVSDGTLYPPLHAYLRLQAKLAKAQQRMSTKVKFSKNWQQCQTVIRRIHATIARCRKDFLHKLSTTISKNHAVLVVENLQIGHMSRTARGTVEDPGRNVAQKTGLNKAILDQGWGMFRQMLEYKQAWRGGIVLAVNPRYTSQTCPQCGCLSAKNRLQQALFSCIDCGYTSHADVNAAQNILALGQRERLNAFALRT

SEQ ID NO: 32066 - protein, 430 aa, Sutterella sp.
MCDDFQIMKIFCSFKFELLANDVQRSALSRNAGCRRFVFNKALALQNERKDQGLKLLSYCEMASELVRWKKGDETSFLKEAMSQPLQQALRDLDQAIRNSFRPKSDPARKEWPRFKVKDIGDGFRIPQFKPGDIDDANGCVKLPKIGWIRYRKSRPIAFKSADGSLTPGTVKQIHINKDCGRWFVVFTAEFDVVRPEMKALDVGIDIGVVHAVATSSGKFYDLDTERLKDIEKRIAVLQRKLSLNLSSRKKLAKKGLAEAFDKTKPSRKRRRLKKRIQKLFRRMRCIRQDFNQKTARALAQEYGCVYAEDLKTKNMTKSAKGTVENPGKNVRQKSGLNRAILRTGFYGLSQAVDWQLTKADGMLEKVAPAYTSCTCPICGCCDKGNRPKQAVFHCIACSHNENADIVGAKNVLRKGRTGPSAHVKCASPV

SEQ ID NO: 32067 - protein, 395 aa, unknown
  TnpB Polypeptide
MLRGMKIALVLTDEQEQQMWKSVGVARWSYNYAITRAKEHYLNSLEDESLSKTLSEGVIRKELTVLKGTTHPWLKEVGSNVIKQAVKDWGEARNRFFKGLGKAPKYKSKATSKPSFYVNYETLRRVNGGFRGEKLGFVKTSQPLPKIPKGSYYKNPRISFDGKYWCLSFTYEVPTISVELTDLVIGVDLGIKTLATLSTGEFVENINKSRRVKQLEKQLRREQRHLARQLQANTKGYLTTENGSRKPIYERSLDLCSNIQTTKRKIQLLYRKLRFIRLNHIHQTTSFLVKQLPKGIVIEDLNVKGLMKNKHLSKYIQNAMFYEFRRQLKYKCSRYGIELVVAERFYPSSKTCSYCGSIKSDLKLKDRVYKCGSCGLEKNRDLNAAENLAYYFHRG

SEQ ID NO: 32068 - protein, 459 aa, Actinopolyspora sp.
MSSTVVQAYQFALDPTPQQRAMLSSHCGAARFAYNWALAQVKAVMNQRDTERSYDVAEDDLTPTMNWSAYGLRKAWNATKNEAAPWWGENSKEAYSSGLVNLATALDNWHKSRTGKRAGRRVGFPQFKSKRHRSSCRFTTGSFGLSDSDRRHAKLPRIGTVRTHESTRKLARHVERGTARIRSATVSFQRGRWHVSFSVEITKTEPAPATRGGTVGIDLGVKELAVLSTGETIANPKHLDRTQRQLRRLQRQAARRVGPDKRTKRPPSNRWRKTQRHVSRLHARVSNARRDGLHKLSTRLVREYDTIAVENLNVEGMKRNRRLARHIGDVGMGELRRQLDYKTTWHGRAMILADRFYPSSKTCSDCGVVKAELRLSERTFTCDHCGHTADRDLNAARNLAGLTASTASCVGTENTPAGNPRKTSHAGDGYRHGKTQRHTDAGPTMVEQSAKSPEQLSIF

SEQ ID NO: 32069 - protein, 158 aa, unknown
  TnpB Polypeptide
MSLLGMHLKVQGSKDVFLQKNLFAVNLLNYRRKKRGYLHKESTRLADKYDAILIEDLNMKAIANKGFGNGKATLDNGWGMFTKMLDYKMAERGKCLQKVDKWYPSSQTCSVCGCVNEDLKNLSIRKWTCPHCGAEHERDINAAINIKQEGLRLLNEAS

SEQ ID NO: 32070 - protein, 442 aa, unknown
  TnpB Polypeptide
MKSRKFTVVAQLHEEQNHDLIEYVDSCFATYGKAKRETFYVIKRDNNFNKSAFNKHLQTKYGVLRRTANSIISDAQGTLNALIGLKQYEKSQLERKISSLETMIDRLEMKVADNKALLRLNDKTVSLVTHRNLKRKLVAKKNHLNHKKQKLENLNYQIEHGDYKLCFGTKYLLNRDYDKFVERRDGQLSFVGTKTETSGNQLLQLSYNHRNNQFGIKLRKDIGGFKDQRDSCVIGKVHFNHHKQELISILANHNSPLSYKVVKKNGRYYLYCTFEIQRDDASFITCSSHGVIGLDFNKGFVTLTETNQYGHMVDTDLIRYRFKRGTATQTDLEAVATLVKERALATGKDVVIENLNFKDTKARTVSKKGKKYNDMLHSLAYHKFTDIMENVCYRNYIWLRKVNPAWTSWIAEQKYCPQMKLNTHTGASFVIARRGQGYTDKV

SEQ ID NO: 32071 - protein, 430 aa, unknown
  TnpB Polypeptide
VEDKRHLQNQVQQKGYGYSMGKKQGYIITTKCLRLRCKHPEWLSETQDFYNQIQKFYYDLFLEHSKLREENSQVCLREMERLSIRGRDGKEVPSPLPWEKVPLYFRRAAANAGIAAAKSHLSRQENSYAGKAESFHSAVTYYKGMYRDFESGEITLRIWNGSEWRWMRCRLYGKAFPEGAQLMSPSVVLDQKYEMLHVPVKEIVQDASIAKERIVEGRNVCGIHFTNGDAFAVASVMNSEGKELAVRYFKGGKEYTHRCGKVLEKIDKSRKSRGENAGGRVNQKYWMHLKHLGEQYAHQISLNIVTFCKEQDVSVIAFPKYDEEYRRHVLKGAGNFGTMHLSTRIREYLTYKAWKEGILVLDVNAKEMHRICAVCGSEIVQQDKQSKRFVCEEGHQGDAYLNVARNAAKRCMEQFRKKAGKEKNVSAKKS

SEQ ID NO: 32072 - protein, 347 aa, unknown
  TnpB Polypeptide
MIQVQLKLRVKPKQEVILNEWLLVLTRVWNWAIRKIELDGKDGIYHTKKEFQNLLANHGKKLGIPSHTLQGMLIVAWESWKRCFKKLAKKPRLKGVRNRLNSIPFPDPIRRSQGVHIKMPGLGILRFHKQDVPDGKIKCGRIVRKASGWYLCLFIEADVKTIPSKSDGVVGIDPGYKSTLTLSSGEKLDKPKQLQNAEKRLAQAQRGKRKNLTSRLQERIKNRRKDDNHKLSRRLVQENKVIVFSKDNIKGIAKSYGKSVAEASHYQLRKMLSYKCTASGRKYIEADSKSSTMTCSHCLAKTGPTGKAGLSVRQWECTECGILHDRDHNAAINTLLVGLGTSLERCA

SEQ ID NO: 32073 - protein, 293 aa, unknown
  TnpB Polypeptide
MKHYYKVRVPKNEYIQNIISSVDLKEDVVYSFLKRIEFNSGFKYYVVITLRGDAPKRIRLSEDGGHRTGVDFGTSTIATVSNNEVHLEELAPDSVQYEKEIRHKQNLIDASMRKHNPENYNKNGTVKKGKHKWKTTKRCRRLKRQVRVLYRKQSAYIKTSHHTFINRVVQNTSEFILEPMNFKALQKKSKKTERKDEATAIKQKDGSFKMVRKYKRKKRYGHSIKNRSPGLMQADLKTKATQYGIPYYEIDIHQYRASQLHHDTGEYIKPTLNERFKTIEGCKVQRDLVFCLF

SEQ ID NO: 32074 - protein, 361 aa, Escherichia sp.
  misc_feature (242)..(294): Xaa can be any naturally occurring amino acid
VKRLQAFKFQLRPGGQQEREMRRFAGACRFVFNRALALQNENHEAGNKYIPYGKMASWLVEWKNATETQWLKDAPSQPLQQSLKELERAYKNFFRKRAAFPRFKKRGQNDAFRYPQGVKLDQENSRIFLPKLGWMRYLNSRQVTGVVKNVTVSQSCGKWYISIQTESEVSTPVHPSASMVGLDAGVAKLATLSDGTVFEPVNSFQKNQKKLARLQRQLSRKVKFSNNWQKQKRKIQRLHSCXXXXXXXXXXXXXXXXXXXXXXXXXXXXXXXXXXXXXXXXXXXXXXXXXXXXXVRYWIRAGMKCAASLSTSSSGVAVRYWLFRQRTQASVARAVVIQRKKTACHKVNSDARYVDIQRTPM

SEQ ID NO: 32075 - protein, 403 aa, Oscillatoriales sp.
VLKATKVRLYPTPEQELALAKSWGCARWYWNFALNACIGHYQETGKSLKLESYKGMLPQLKKEYPWLKEDCYSSVLHCVAINLDRAYKNFFEGRAKFPKFKSKHNKQSIQYPQNVTVNSEYLKVPKIGEIKAIFHREITGKIKTVTISRTSSNKYFASILCEVEPSEVKESGDKIIGIDLGLKDFAIVHNGENVTKYANPKYLKRHQKNLARKQKKLSRKTKGSKSREKFRKNVAKVHEKIANSRQDFLHKLSRKLVNESQVIVVENLNVKGMVKNRKLSQSISDVGWGKFINFIDYKLKQKSGELVEIDRFFPSSKTCSCCGHILDELSLDVREWDCPSCQTHHDRDENAALNIRNEGVRILTKGGGNPVFADGGCVRPPACKSKGHRSVKSEAYTEPIRAV

SEQ ID NO: 32076 - protein, 369 aa, Planococcus sp.
MANRAYKFRLYPTNEQEQLLLKTFGCVRFVYNKMLAERKETYEKFKDNKELLKQQKFPTPAKYKTEFEWLKEVDSLALANAQLNLQKAYTNFFAGRAKFPKFKSRKAKQTFTTNRVNGNIQLSDRHIKLPKLGLVKLNQHREVPSHHTIKSCTVSRSATGKYHISILTEYNCEPVPKEIKEMVGLDFAMNGLYVESEQGEKANYPRFYRQTQQKLAKEQNVLSRKTKGSARYEKQRIKVAKLHEKTANQRKDFLHKKSFQLAQKYDAVVIEDLDMKGMSQALNYGKSVADNGWGMFSAFLHYKLGEQGKKLVKINKWFPSTKTCSSCGQRRDMPLSERTFSCVCGFVSDRDWNAAINIKNEGRLLLGLS

SEQ ID NO: 32077 - protein, 382 aa, unknown
  TnpB Polypeptide
MRRTLRVKLAPSTAQAALLAETSRLFTAAFNAVCQVGWEQQITNGVALHHATYYATKATYPALVSDLLVQARVKATEAVKSACALQKQGRKVGMPVSDACSPRYNLHTYKVDWASQTVRMSTTGGRQTIRFNVPSYHAHYAGYPVDTADLINRDGGWWLHVVVTVPAPAVEPTEAVVGVDLGIAQPAVTSTNRFLGKPAWKAIEGRLFYLKRQLQRKGSKSAKRHLRKVRGKQARFRRDCDHVLSKQIVQAASPGATLVLENLTGIRTRTKIRKRTPISRRVHGWSFAQIKVFIAYKAEERGCTVAGVDPRHTSQTCSCCGHVARNNRRSRGRFVCRVCGFELHADLNAARNIAAKYHASEGRPLAGGSLSTDQSYPSDSSE

SEQ ID NO: 32078 - protein, 378 aa, unknown
  TnpB Polypeptide
MRKTFQYRIYPTPAQETTLLRQLDECRWLYNHLLEQRMLYWEEFGVSVSLYDQQAYLPFIKQERPALAAVHSLVLQNVNVRIDLAFAAFFRRVKAGETPGYPRFRGRGRYNSLTYPQYGNGVKLTGDRLYLSKIGNVQVVLHRPLDGTPKTVNVSLSSTGKWYVAIVCELAIAPLPIQPDKVGIDLGLHTFATLSTGEPIANPRFFRREEKALAKVQRKHARLEKGTPARRKQRKRIARVHERIAFQRGNHAHQHSRDVVDRYQVIAMEALVPSTMVHNRCLAKSISDAAWTQFRSYVMYKAAWAGRRFIAVNPAYTSQDCHACGHRQKIPLSERTYACPCCGGSWDRDHNAALNILARGLASIGTQSVEAPPFTAGE

SEQ ID NO: 32079 - protein, 370 aa, unknown
  TnpB Polypeptide
MRKTYKYRVYLTNGQRRILNTMLSECRWVYNQTLEAREFAYEQDIKCGLYDTQAMLPGWKETRPSLKLVHSQVLQNVQVRVDLAFQAFFRRVRVGAEEVGYPRFKGSHRYDSITYPQYGNGVRLEGNRLILSKVGAVHVVLHRPIEGTPKTVTLRCAGTGKWYVSFSCEVELSRLPPSPHVVGVDMGLESFLTTSNGEKVENPRFYRRDEADLKRVQKLKDAAKNAQKWDENRRRKKALAHIHERIANRRSDFAHKQSRKLIECYQVIAFEELEPQQMGRSRGIRKSIRDVAWTQLIQYTCAKAEEAGRTVVLVNPKNTSKMCSNPGCGKLVEKDLSVRVHRCPHCGLVLDRDQNAAINILRLGLQNLRL

SEQ ID NO: 32080 - protein, 468 aa, unknown
  TnpB Polypeptide
MGQASRTTKLLLDLSDRSQGGANREKRAALEQTVKLLDAARTFYVAFFLAHAEKVTERVAYFSEHHQEMRERLLSTDKLLTWAEFQTVETAEHPHPLPDWNFSRAFPDFPFVYRRSVIKDAIGKVRSYLSNLANWQRSGKKRGKPGLPGAANHPTLYQGTFSLELDGLDLRESFVRLKIYTGERWTWANYPVKYNRYFEQRRTEEGWEQQSPKLILRPKVAALHVCQTKEIQAPKVRESKRNPDLVTVAVDLNVKHLAVITVRQQETILETVFVHDHGLDQARYQHLKRIAKKQWQSGKPVKGERNSQQLWRHVRRQNRDAAHKGARAIANVCAKYPGCVLLFERLRKIPAKGGSRSHRLNRKQANQLRGQINQLAREKAFAQSVVTVEVNPWQTSQRCSRCGARGERFSMRAGQRIKHKGGKLFGCPVCHYEAQADYNASVNLHHSFYGELCWQRKRTSTNGSGHSP

SEQ ID NO: 32081 - protein, 417 aa, unknown
  TnpB Polypeptide
MLVRQAFRYRLYPSGEQRHQLAVQFGHARHAYNWALACRQEHYRETGVALSFYDLKRAVTALKSEPDHLWLKEADSQVLQAKVADLEKAYKGFFTHRTDFPRFKTKKDRQSIRYPQRFRFKDNRIYLPKVGWVRAAFHREMVGTPKNVTVSKTAASNYYASVQCERELDIPVHTGPAVGVDVGLKDLATLSTGEKIPHPTHLRKAEKRLVQLQRSYSRKARGSKNREKARVLVARQHEHVANCRRDTLHKLSDRLTRENSVIRMENLNIRGMLKNHALAKGIADSGWATLVSFCQYKAMWRGGVVEQIDRFYPSTKTCHVCAYKNAALTLKDREWTCPQCGTVHDRDVNAARVILAAPTVAPRNRPAVSRPAAPSRSRTLPPERRNVKPVERPSDAKVVGRSAGLDEAGSPAPCKAG

SEQ ID NO: 32082 - protein, 368 aa, unknown
  TnpB Polypeptide
MIQRAHTIKLKPNKAQAILLSKTAGTARYAYNWGLAKWNELYEKGEKCDPYMLGRIWTQERPDWALEVYNGAARKALLNLGGAFKAFFQGFRRRPQFHRKGQRDSFYVSNDKARLYGSKIRLPNIGRVRMTETLRYEDCKIMSYTVRRKADGWYVSICVELEEERRTESESFVGVDVGCKHLAVASDGTICDTPGKLKDLERQLKRRQRLLSRKQRGSKNRQKARLRVSRTFQRIQNIKQDTVHKFTAAVAKNHGTVCLETLDVKDMKESSNKLVRKGVQNSCMSEILRQLRYKCNNYIEVDKYFPSSKTCSNCHSLEADLDLSDRTYSCQSCGLTIDRDLNAALNLRQEGFRIYTAGHAGSACREVR

SEQ ID NO: 32083 - protein, 379 aa, Roseburia sp.
MNKAIKYRLYPTTKQATMFANTFGCCRKVYNLMLNDKLESYKLTGKFVSVTPAMYKKDYQFLKEVDSLALANVQLNLQGAFKSCFNKSCKKKTGFPKFKSAKRSRKSYTTNNQKGTVAIIDNTIKLPKIGRVKAVIHRQPNADWVIKSATISQDNDGKYYASVLFEFEQNIISVPISDNAIGLDYASDGLYVDDKGNVGTNHKYYRESHKKLTKEQRKLSRMKGSKKGEAKSNNYIKQLHKVNKIHKHISNQRLDNLQKISTEIANQYDVVCVESLNMKAMSSKGFGNGKSTLDNGYGMFLNMLEYKLADRGKYLVKVDKWYPSSQICHCCGKKHPEMKDLRIRIFTCDCGFTISRDQNAALNIKNEGLRILKSETFAA

SEQ ID NO: 32084 - protein, 494 aa, unknown
  TnpB Polypeptide
MQLTANFNFYRRPENEEVYDWLVEACTVAKNLYNQTLYYAYEFKKAYDPVRDQYKKDTGKVFPWFPEEYVGYDAPVDDFFKVMCLRRYASEQDESGDYYTKNLEGKSNWELLKNLVGRDATSEVLRTMLAKNLKSYGKSLGDWSRHPEKYKGMPKKPGFYKSDELCPLYFSGATIKIDTKTCSIIFPKPRGTDGDRKAIYIPLQKLPHNSSYKSGKKIDQVRIIPKKGYFKVEIIYTYDEAIPLRDNGRYLSIDLGVKNFCTMITSDKNLNPVILDGNAVKTLNRYCHLVVDKLKHKIEVVTDKDGKKRSKQYTTKRIDAITKNNNNRITAIIEFYTKYIVRYCLHYNICRVICGWNKDMKQKINIGHKNNQMIVNFPFKKLLDKLEYKCKMRGISFEIVEESYTSKTDHLRNAPLATKEDPQTRDEANFGKRIHRGLFLSDTGKLVNADVNGAMGIMRKAIPDFSWVGYHPFYPVRMKVKDVVEGLKYSKFPK

SEQ ID NO: 32085 - protein, 279 aa, unknown
  TnpB Polypeptide
VDRGVIAVSGLGELVQTKQPRPTIDQVRIVPKGDHYVVEVVYRREARLAPVDPALFVAADLGVNVLAALTSNKPGFTPRLVTGRPVKAINQLYNKHRAHQQQHLAKANRFTSRQLDHLTTKRNRRVLYYLHTASRRIIELVVAEGIGTLIIGKNPLWKQGVELGRVTNQAFVQIPHARFINLLTYKAALVGIRVVLTEESYTSQSSFLDRDPLPTYDPARTDSPRFSGRRDGRWYRASGNRLIHSDVNGAYNIARKVFPTAFDGPGIGAAAVRPRQLAV

SEQ ID NO: 32086 - protein, 372 aa, Desulfosporosinus sp.
MILGKKVRLKPTEEQEHQLWKSSGTARWAYNWALDQQEKNYAKGGKFRSDNELRKELTQLKQTEEFSWLYDVSNNITKQAIKDACDAYKKFFKKLADKPNFKSRKKSKPSFYNDVVKLKVKSGIVLIEKVGWIKSSEQLPIGVNYTNPRVSFDGKYWYLSLGIEQEQSTEPLTREVIGIDVGVKELAVCSNGMIVKNINKSRVVKKLEKRLRRLQRKVSRKYELNKEGSRFVKTCNIIKVEKQIRILHRRLNGIRTNHIHQATKAIVKTKPCKVVMETLNIKGMMKNRHLSKAIAQQKLYDFKSKLQYKCEIQGIELVETDKWFPSSKLCSGCGAIKQDLKLSDRVYKCKCGLAIDRDFNASINLSRYQLVV

SEQ ID NO: 32087 - protein, 422 aa, unknown
  TnpB Polypeptide
LSHPWQSKGEKRTIVWSHQPDDEIITYLSDMQDAVRYALQVAYKDVIRDERHSLPSPIQLRREVREWFYSRYSYARHHINPVCRIAVAMLRSYRKNNHGALRIPKVKKLAMRIDAELFKIVDGRIRITLQPNQYEWIPINTANRHYEEYSKRKPSELLITDRKVCLTFVVGNGSKPLGSKLIASDLNFNSMDTTSAKLDHGKVELDAVKTESARRMVQIQNDFSRRRRLVQKHVMNPQKRVKKLRETRGRQRNRIRDALHKLSTGLVRENPDSSFTFERLTGIRSNGNSKGKRLRTYLNRWPYRMYQSMVEYKSPKLTLYVSPRGASSECPVCGGKPEHPSWAVSRCVKCGVDYDRDRLASLAILCRGLRLCGQPFAVSADASWPMLKNEYLYTADRPDVSRAGWTEWANALNGDVYENIYS

SEQ ID NO: 32088 - protein, 398 aa, Microbispora sp.
VQLRYNVRLYPTPGQRAALARAFGCARVVFNDGLRARTDARERGLPYISDGDLSKRIITEAKKAPERAWLGEVSAVVLQQALADLNTAYRNFFASLTGKRKGPKVAPPRFRSKRDNRQAIRFTRNARFSITTGGKLRLPKIGDVPVRWSRDLPAEPSSVTVIKDSADRYFASFVVATSDVSLPESAAEVGIDLGLSHFAVTSDGRKVDNPRFLRRAERRLGKAQQDLSRKVKGSANRAKARAKVAKAHARVADARRDWAHKLSTGIIHENQAVYVENLAVSGLGRTRLAKSVHDAGWSQFVGMLEYKAARCGRHFAKIDRWFPSSKLCCECGTVRDAMPLNVRSWTCPCGAVHDRDVNAAKNILAAGRADRLNACGAQVRPRHVPAQREEAGSLRGAA

SEQ ID NO: 32089 - protein, 214 aa, unknown
  TnpB Polypeptide
VLIAHRIALDPNNVQATYFARASGVARFAYNWALAEWKRQYEAWKADPSLPKPSQQSLRRQLNAIKREQFPWMLEVTKCAPQMAIIQLGQAFQNFFVGRARYPQFRKKGVHDRFTLTNDQFSIDGCRIFRRQLEYKAAMRGGQVVVADRFFASSKTCSACGHKLDDLPLSVREWTCPDCGSIHDRDANAAINLKKWPRVRLAAASPFSDKLIAR

SEQ ID NO: 32090 - protein, 413 aa, unknown
  TnpB Polypeptide
MEHSHRYRAYLSDEVAMAAEHHLDVHRQLYNHVRWDYEQAPEDDKPSEYQQNNKLPEWKRKWPVFAKLHSKAAQATVARFHDNLSNLRKKKEKGYNVGWLKRQAPSEYRSVTYNQSGFDLDNKRGRDGFAYVRFSKIGWVKIRYHRPLPDHASIKEVTLKKEVTGEWFVSFSLETDEEHVPDKPEVDTLDASNSVGIDLGIQNYIHTSDGNTVDWLDLEDEYGRLRREQRKLSRKEHGSNNYEKQRQIVAKVKRKIKRKVLDYQHKLTTWLVSEYDAVFVEDLNVAGMLQSEGNARNKQDAAWRQFITLLEYKGDLYGTHVVQVPARGTTKECASCGVETAKPIWVREHSCPACGFETDRDANAAMNALQRGFSELGLGWPESTPVETALPTDTASFQCVSAKRVVETGSLGA

SEQ ID NO: 32091 - protein, 383 aa, Psychrobacter sp.
MSKQIHKAYKFRVYPNEVQKVFFAKSFGCARFIWNKMLADKKEHYQLDKKSLKNTPAQYKKEFEWLREVDSLALANVQMQLHQAFQHFFKQPNVGFPTFKHKGKKDSYTTNNQKGTVAIDGSFIKLPKIGPIKANIHRSIHGLIKSATVSKSPTGKYYVSVLVETIAAPFPKTQSNIGIDLGLTDFIVLSDGTKVANPKFLSKLQNKLARAQKIMSKRALVAKKDNRKLRDSKNYQKQKLKVAKIHEKISNTRKDFLHKQSFNIVKNHDIIVIEDLNVSGMLKNHKLAKAISDSSWSAFTTMLSYKGDWYGKQLIKVDRWFPSSKTCSGCGHILGKNELKLSDRSWNCSSCKSENDRDLNASVNILNEGLRCLKLKEPLVQGS

SEQ ID NO: 32092 - protein, 435 aa, Psychrobacter sp.
MKISRAYKFRLEPNAEQEVILNNLVGSARFVWNQILAISFGMFAKNNFINATNLVNKIMDLKSNPDFAFLKSSANAVTLQQKIRDLASAWSRFFDPKAHARLKENKRKPKKPKFFKLSDGTEIQLLPLMPQFKRKSDGCDSIRLVQFDKYCRIDGNRVKLPNGVGFVKFRKSQEVIGTIKNVTISKKSGHWYVSFGTERVLLENPRHPATSALGLDLGITKLITTSNGQYIKPKNSFKANQVKLAKLQRQLSKKVRFSENWKKHNLKIQKLHSHIANIRHDYLHKITTTLSKSHAMIVVEDLKVANMSKSASGTAARNGRNVKAKSRLNKSILDQGWSMMTDMLEYKQQWRGGLLIKVNPRYTSQTCFKCKHVDKENRQTQARFECVECGCVTNADFNAARNILAAGHAVLSAEGGRSKSYPLMQKTSEIREEVA

SEQ ID NO: 32093 - protein, 392 aa, Desulfobacterales sp.
MELLVKKSFKYRIYPARSQISTLENQFSMCRHLYNWNLAERIDAYRKDGTTISYNQQQNRLPELKKERPWFRSVYSQVLQDVLKRLDKAYQAFFRRIKSGGETPGFPKFKKRGQWDSITYPQYKKRPASVIEIPRIGNVKLVLHRGIPEEAKVKTLTITREASKWFACFSVEIPATTEFKQNLLPPVGIDMGLIDFFYVSDGSQVSVPKYFRKKEKQLQRLQRRLSKSPKGTSQYRKILKALQKCHYRVKCQRNDFLHKEANRLLSKSDTVFHEKLEIRNMIRRPKPKQDETTGEYLPNGASAKAGLNKSIADAGWGRFFDILHYKAEELCKRVVPVPPHYTSQMCSSCGILVKKSLSTRTHRCECGFVANRDHNAALNILRIGMDTLQTPV

SEQ ID NO: 32094 - protein, 200 aa, Halarchaeum sp.
LVRVGSYSSGHVTVEPHGAERSTPRSPSYDTRTMTLFGDDTVSLSTTESRVRCSLALPDADDGYQRQYLDSDTWSVTESTLTARDDDYFLHIGFRRHKNDTERNTAEDGTVLGVDLGIETLAVTSTAYFFSGRELTHGLREFEKVRAGLQQTGTRSAHRTLDQSSGRELRYVRDVLHRASNAIVDEALRYECDVIASCFV

SEQ ID NO: 32095 - protein, 204 aa, unknown
  TnpB Polypeptide
LRCSCASRKTRVQRRLKHKVKGSKNRRKLGRKIARLHQRNNDTRKDFHFKLAHKLCDQAGMIFVEDIDFRTWAKGMLGKHTLDAGFGQLLTILQWVCWKRGVYFAKVDKDFTSQVCPSCDTHTGKKELSDRIHSCPECGYTTYRDVAAAQVIRNRGVLAVGRIVGEQIACGDVLTGTGNSLVKSQRSRKNGGEAREYDLLRNIV

SEQ ID NO: 32096 - protein, 374 aa, unknown
  TnpB Polypeptide
MVKLDSSEEQHKILLETMHRFNEACNYISEIAFSIKSANKIKIQQIVYRDVRDKFGLSAQHAIRAIAKVSEAYKRDRSIKPEFSPDGAIVYDQRILSWRKLEAISILTLEGRLKIPIRIGEYQTVRMDRIRGQADLILRNGTFYLAVVVDAPEPSKLDAVDTLGIDLGIVNLATDNDGDAFSGEKIDKTRERYSELRGRLQKAGTRSANRHLNKLSGREKRFHTHTNHVISKIIVAKAKDTGRMIALEELEGIRARTTVRKGQRSRHESWTFRQLGSFIEYKAALAGVPLVFVTAAYTSQTCPVCNHISKRNRPTRDSFRCGQCGFAGSADHVGAINIALKGEVIRPIVSRMFFDLNHVQPQLQGSGLYRLSYN

SEQ ID NO: 32097 - protein, 272 aa, unknown
  TnpB Polypeptide
MYFVRNNPKDCLCERHRIKIPTLGWVRLKEKGYIPTSRDGYIVKSGTISMKAGRYYVSALVEVTDPVRDSCFSDGVGIDLGLKNLAIISNGTVYRNINKTARIRKLEKQLRRAQRKLSRKYENLKKGEPTQKANIRKQKLKVQKLHQRLENIRTDYINKTISEIAKTKPSHITVEDLNVSGMMKDRHLSKAVASQKFYEFRTKLKTKCEEFGIELRIVSRWYPSSKTCHCCGHIKKDLKLSDRVYRCACGYTEDRDLNAALNLRDAKTYEIA

SEQ ID NO: 32098 - protein, 501 aa, Acaryochloris sp.
LPYQLVLDRQLEHKKKSVDRYKLPKLRIIIIVSECSEGIAAIGKLRSTPAIIVDWAGGVAEHDQKDQQRNTYNRDVNIVDMLNMTWEFKLEPTAEQVCEIERTLEICRQVWNFALRERKDWLNSRKCPINACSLRSEYILACDQPFPGYHRQAKSLTMAKQEIEHLRSVNAQMLQQLLRKLDAAWESWRLKRSGFPRFKKSGRMRSFLFPQMLRNCVSSEGIKLPQLGLIRVRWSRGIPDWFRIKQARIVRKASGYFVLVSLQSDVEIPAVMPHGHPVGIDVGLEYFLATSDGEQVKRPRFFNALHRKLKLLQRRLKTKVRGSNNWLKLQRKIARVYQRIADTRKDWQFKLAHHLCSHAGMVFVEDLDFRIMAKGMLGKHTLDAGLGQFVNQILPWVCFKRDVYYGKVDARGTSQECPDCGAEVRKDLGIRIHHCHACGSIKPRDVASGQVICTRGQRGIENACGVEVTGALVTVSSQLALKQELFGVTQGISNRTVRLVG

SEQ ID NO: 32099 - protein, 284 aa, Cylindrospermum sp.
VKSWFGLDSFQLPMPINLDYSKIKEYRILPRNREFYLEFVYKQDVKTPIVDKLKVLGIDHGLNNWLTCVSNIGTSFIVDGLHLKSLNQWFNKSVAKIKENKPQGFWSNRLAAITEQRNRQMKDAVNKAARIVINHCIDNQIGSIVFGWNTGQKDGANMGAKTNQKFVQIPTAKLKNRIEQLCEQYGIYFIETEESYTSKASFLDNDVLPTIGEKPDRHSRAEGIGWKSSGTRTNRGLFKTSTGIKINADCNGAANIIRKVEMMAKFDLAGISRGCLSQPKKVLL

SEQ ID NO: 32100 - protein, 411 aa, unknown
  TnpB Polypeptide
LVDFLPEVSWWRLIAIFHDYGVKTVKGVRFAYVQTPRTLELLSTFREMVNDAIRICLDERVRGRLKLRDRIYREFKERYGVLSCFPYSVAEVAWSIVKKHRHWQRKPYAKRLMFKMEASDFSLNYSILSLPFRKGARVLIPLRYGEYQRSFLLDKTLKRGSITMTESSIVIAFSKESLATEPSRRVGYDLNEKSIVGSDGTVHDLSEVARLHTLYGIKRSKFYERHPRDRRLKKKFASSRREKERVDQALHRVSTLVVEKARANNEAIILERLKGIRYAHKKGNGEGKARRRRISLWPFRQLQSYIDYKAKWAGVTVEYVSPSYTSKTCHLCGAINRKLRVIERSWLCPCGAELDRDLNAAINIERRGKIRCLGEVRPGARDTYEAVKGNETTRAPILRAEAPRSSLPKGQ

SEQ ID NO: 32101 - protein, 387 aa, Ruminococcaceae sp.
VLLLELTVTAKLLLRPTEEQKAMLFETGKAFSKACNYVSGIIFNSHNLNQFKLQDETYSDLRGVYGMPSQMAINVIRHVIGNYRAILATQSDWIEPEYKHTIYPLTWNRDYLLRENYFSIGTLKGRIKLSYENGGMEKYFDGSWTFGAAKVVNKHGKWYLHISMSKEFEQLDDYNVANVVGVDLGINFTATAYDSNGKTTFFSGKHIKQKRGHYKKIRQQLQKRQTPSARRRLKAIGSRENRWISDVNHCISKTLVDSNHKFGKAECGNTAFILEDLSGVRNATEKVRIKDRYVSVSWAFYDLRQKLEYKAKLNCDKVIVVDPKYTSQTCPKCGHTEKSNRNKKKHTFRCKNCGYTSNDDRIGAMNLHRKGIEYFESIAERVQQVQL

SEQ ID NO: 32102 - protein, 383 aa, Shigella sp.
  misc_feature (221)..(339): Xaa can be any naturally occurring amino acid
VKRLQAFKFQLRPGGQQEREMRRFAGACRFVFNRALALQNENHEAGNKYIPYGKMASWLVEWKNATETQWLKDSPSQPLQQSLKDLERAYKNFFQKRAAFPRFKKRGQNAAFRYPQDVKLDQENSRIFLPKLGWMRYRNSRQVTGVVKNVTVSQSCGTWYISIQTESEVSTPVHPSASMIGLDAGVAKLATLSDGTVFEPVNSFQKNQKTLARLQRQLSRXXXXXXXXXXXXXXXXXXXXXXXXXXXXXXXXXXXXXXXXXXXXXXXXXXXXXXXXXXXXXXXXXXXXXXXXXXXXXXXXXXXXXXXXXXXXXXXXXXXXXXXXXXXXXXXXXXXXXXXVRCLLFRQRTQASVARAVVIQRKKTACHKVNSDARYVDIQRTPM

SEQ ID NO: 32103 - protein, 408 aa, unknown
  TnpB Polypeptide
MEYSHRYPAYPTQAVTAELEYHIDVHRQAYNYTLYEYENVDADNIGSAYKHHYRLPNWKDEFPVFSEVNSKALQRTVTRFYDNLSNLKDQKEHGNKVGKLKWKSPREFQSMTFSQSGFELKNTSGRRATLWLSKIGDIKIRYHREIPDEADIKEVTVKKETTGEWFVSFGLETADADLPEKPDVESLDATNSAGIDLGIRNYIHTSDGKTVDWLDLEGEYERLRREQRKLSRKQEGSNNWEKQRREVANVKRHIRRKVLDYQHKITTWLVREYDAVFVEDLNVKGMLEQSHNARNKQDAAWRQFITLLEYKGNLYGTHVVQVEARGTTKECASCGVETAKPIWVREHSCPSCGFEADRDANAAMNVLQRGFAELGLGWPEDTPVETALPTDTTTVSAKRVVETGSLGA

SEQ ID NO: 32104 - protein, 420 aa, Pleurocapsa sp.
MSITRRVTFRLYPSASQNEKLHYWRKLHKLLYNACVSHRITQYKRFGKLINYFDQQNALPEFKQCWVEYKELGSHALQATVKRVDFAFQRFFKLKSGYPKFKSSRRYKGWTYPCKAGWKPRTEGKNGYLKLTNLGNVKMRGQARDWGTPKTCTIMFKQGKWYASITVDCVPTRVQTDQNAVGLDFGTHYAVAFSDGTIIDNPRFIKQSQDQVNRLAIDSRRKRAPNHKKRLKASRRWKKANKAVSKIRSKVARQRQDWQHKVATEIVSCNSFVATERLNLKNLTRKANKGSKRKKQKTGLNRNLLDVGIGNLKSLIEYKVTEAGGIYIEVPTRQLAPSQTCPGCGIKRKKDLSERFHVCNCGIQQPLDRDVAAAMVMLNYARGQELSSSVVESPNPTECGNMRQFGAKKRQKLIPSDSLV

SEQ ID NO: 32105 - protein, 373 aa, Pleurocapsa sp.
VKTYKFKLYQHKRNRHLHRTINAAGHVYNHCIALHKRYYSLFGKHLNKNKLMKHIAQLRHKNEYWQLVGSQAVQNIVQRIDRAYQLFFKHHQRGVRPPNFRKRIKYKSFTLKQAGYKFLDSNRLRIGKRIFKFWKSREIEGKIKTVTIKRNPLGELFVFVVTDCADQISAIMTGKSAGFDFGLKVFLSCSDSTEVKSPFFLKQSLKQLASASRKHSHKKRGSNSKEKARQNLVRVHEKVVNRRADWFWKLAHQLTDKLDYLFFETLNLKGMQRLWGRKIGDLALAQFLKILEFVAEKKGKIVSYIDRWYPSTKTCSECYFVIDKLGLNERYWVCPSCSTKHGRDSNASQVILRVGASTLRVGNVSLSQTAISA

SEQ ID NO: 32106 - protein, 437 aa, unknown
  TnpB Polypeptide
LDDCCSHGARSGGRRRCRVRGDETEQARTPIEFRAGARMIRAFRYPLRPTKAQEATLEAWLTASCTLYNAALQERRDAWSKQHVRISRFDQQKELTELRATDPEWEMIPLLVQRSALRRLDRAFLAFFRHVKRGEKKGYPRFRSRDRYDSFTLPPLFGVRAEGDHVRLPKLGLVKFHQYREMRGRMKQVTVGRSSTRGWYVSFVCDLGEAPTKIAVRSAIGIDVGLEAFATLSNGERVENPRFFRASEKTLARRQQLLARKQRGSNSRRQARTLVARTYEHIRNQRLDFARKFACAIFNRFDLVAHENLEIARMMRGHLSKSIRDAAWGVAIKALNCKAEGAGKWVVATDPRRSSIDCSGCGEPVPKDLSQREHRCPQCGLILHRDENAARNVLARGLRAGSLTEAVTTVGPEFMASLTEAVTTVGPEFMATLGACQ

SEQ ID NO: 32107 - protein, 404 aa, Frankia sp.
MPAVRYRYRAYPSPGQVRALARAFGCARVVYNDAIRLRDTAHAAGEKLSDAEVQRRVVTLARQAPQRVWLGEVSSVVLVQACQDARRAFRNWFDSLSGKRKGRRVGHPRFRSRKDNRQSVRLTRNGFAVTARGVRIAKVGDVELAWSRDLPSVPSSVTVIREADGRYYVSFVVDVADEPYPQVAGDVGIDLGLGRLATLSTGEVIVNPRHLRSQQRRLARVQRALARKEKGSVNRRKAVRRVAVLHRKVRETRHDQHHKIAARLVRDHQAVYVEDLAVSGLGRTRLARSVYDAGWASLVGLIEQKAGRRGRTVVRVGRFFPSSQVCSACGTRDGPKPLAVRTWTCPACNTTHDRDLNAARNILFEGRRIVAAGRAETENACRADVRPELVPAVGVEAGTQRGAA

SEQ ID NO: 32108 - protein, 382 aa, unknown
  TnpB Polypeptide
MKSIAAIKLKIPYKKELLETMKQYSQSAQYALDIGWDNGIYFKKELHHLTHYPIRETLGLPAQLVCSSRDKACESLKALRKTKKPTKPRFKEFLTIRYDARSFTFKKNFVTLASVEGRAKINIEIPEYYKQYLSWKPRSADLVFDRKKRLFLHITFFRDTDTPINSFTNGFVGVDVGINHIAVTSNRQFFSGNKIKSYRLKYKRLKAKLQAKGTQSAKRLLRKISGKERRFKAWVNHNISRQIVDNCKAGTIALENIKGIRSNKGRKFNFWLHGWSFYQLQQFIEYKAFRKGIRVVKVSPYFTSQTCSRCGQVGSRSKGFFSCSHCGYSLNADLNASYNLAKQHSNTDVVSASVTKPHIQTDELEGSLRTIESEVMDKSPLF

SEQ ID NO: 32109 - protein, 496 aa, unknown
  TnpB Polypeptide
MIDILSYFKKNEINGDEVVRLVKMHDKELSCKKRVVLKDENEDDDGKYLVEKHCYSEKSGVFAEMYPVLLQAALLRNVVVFITRQHFFHFTGRNYTCDVFEDEKKKYLSYETVESYLKYVEQPEFRIMPANVAQAVVRSVMTEWNVYKKLLKKKLNGEYDGYVGIPRYSDTKHNATYVAKYFKATLSKKHLAENIINIPKTSISIKTKIDPKLIRSVNISYSCGQCLVNVVYENKERIPAKQDNGIYLAIDPGLDNFLTVVSNSDYFRPFIIDGKEIKSLNRYYNKKISTYTEMMNARDESFASDERTRMLWAERKNRLDDIMHIISAKLVEMARIINANTIVIGHNSRWKDRLPFRKDIKQNFAFIPFDSLYKKIEYKAAAYGITVVRQEESYTSKASFLDKDEIPTYCEHDKTLYEFSGKRIKRGLYRAGDGTVINADVNGACNILRKYLKVNSIDANISGECMGAVIPPVRIRISELRNRKRLLNKINSFNAI

SEQ ID NO: 32110 - protein, 200 aa, unknown
  TnpB Polypeptide
VSSISTVATTHSSSFETTNAIASAQAKLPDGQHTSQRIKRLYRKRSRRRDHAVNALLRDLVERLEAAGVSTLYHGDLTGVLGEYWSVEANLKAQTFWAHRQCIDRLESVCEEYGINVETLSEAWTSQTCPDCGDRERTRRHRETLTCPCGFDGHADLVASRTLLEWATDTPVRPTARPVRFQWDDHQWYPVEGAAVTPNE

SEQ ID NO: 32111 - protein, 367 aa, Lactobacillus sp.
MVWNFVNGKNQILLCCVAKIIICWLMNERYQNNKALPFLGKFKLNYLLKPLKKEYPFLKNSDSSSLQVVNEFLTQSWKNFFQDKSGQIGKPRFHSRKYLKKSYTGYVKTSKTGVLQNTKIKRYTVLLEPTGKYYLPLQVEISESEKYSLTGKRVGIDVGVADLAILSNGLKYPSFNSSYFEKKAKVWQRRYARRRHLAKLLVLQDRNKKVLCPRSLESFTNWQKAQKSKTKCQAKAANQRRDYLHKLTTHLVKQYDVIAIEDLKTKNLQKNHHLAKSIANASWRMFRQMLEYKCEWYGKKLIAVDPKNTSRICSKCGYNSGAKPLEIREWTCSKCQTKHDRDINAAVNILHKGSTKPTGQGLAMVTS

SEQ ID NO: 32112 - protein, 365 aa, unknown
  TnpB Polypeptide
MQKGIKFRIYPNREQKNLINQTLGCCRLVYNKGLTMRKEAYANGEKVGYTQTSAMLTELKKSEDFSFLKHADSVALQQSLRDLDRGFVNFFQKRAAYPVFKSKHNHYQSYRTMNSKNNIRIVGRYIKLPKLGYVKIRQSMEVGKINHVTVEHTPAGKYFVVLNVEFEPQPRTNNGGCVGIDVGIKEFYSDSNGKTVANPQYLENSMRKLVREQRRLSRKQKDSHSREKQRIRVARVHEKIVNQRNDFLQKQSTILVRENQTICIEDLNVREMIWNHKLTKSIASVSWAKFFKMLEYKAGWYGNELYRVPTMYPNSQTCSCCGYRNSRIKNLSIRIWECPKCHAVHDRDTNASINILKKGLQMQFA

SEQ ID NO: 32113 - protein, 585 aa, unknown
  TnpB Polypeptide
MDGHRGELARLLSDLSATVIVVEHRDRLTRFGFEHLGASLAAAGRRIVVLDEREATDDLVCDGRGAHRPVRPPVRAPAGVALRGAGGRGGGGLRRRTGGRAGGGVKRFTARDGWALQAYRFALDPSPAQERALWSHCGAARVAFNWGLARVKAVMDQRAAEASYGIAAQDLAPAISWTLPALRKAWNQAKDQVAPWWGENSKEAYNTGLDALARALGNWNDSRAGTRKGPKTGFPHFKSRRTSAPSVRFTTGVIRVEPGRRHVTLPRLGTIRTHENTRKLQRCLAGGTARILSATVRRDRGGRWQVAFQAEVRRAAATPARPDAVAGVDLGIKHLAVIATGAGRHHAVDSPRHLEDALSGLRRAGRVLSRRAGPVACDPVTGAKTFRQPSAGWLEARNTLARAHARVARLRADALAKLTTTLARTYGTIVIEDLNVAGMLRNPKLARHLAGASFGEIRRQLGYKTGWNGGRLVVAGRSYPSSKTCSACQAVKTKLSLSVRVFTCEHCGLVLDRDVNAALNLAALAAISGPGAAGPTPRGGNARRADQKTRPRLAGGDETGTVHAPHPQDGKTRTVARKRRLTEVH

SEQ ID NO: 32114 - protein, 585 aa, unknown; identical to SEQ ID NO: 32113
  TnpB Polypeptide

SEQ ID NO: 32115 - protein, 370 aa, unknown
  TnpB Polypeptide
MKKMIRKSTVNLSYGNTNKISLVKDFLSRYSDCVNQFIDLLWSINKFSGSFVERNLLDEIKVPLTFSAKQSAAQTALHIVKSQRKKKNKVKPTFKGKSFDLDQRFIEIQEGKNSFDLWIRIRGIGSNSGERKSLLLPTKKHKHFLKYNDWIMKKSIRLRIKDNGKLMADIFFEKELPKPKEEGKIVGLDCGYKKLVVLSNGQYIGTELEQKCEKISKKKQGSKAFKRALVERNEYINREVKQIPFFELKAIIVENLKNVKHKTKGKIARKVMNKLQRWTYPYFLNRLALACETSGVHVYRVNPAYTSQRCWQCGSIHKENRNGEIFLCKECGYTQDADFNASRNILYRFLTGEAFGPCLKNSVEQEIRWL

SEQ ID NO: 32116 - protein, 257 aa, Natrinema sp.
MLEVHRTHQAKILNHGQVEESLDRHGWSASKLWNVANYHSREVWDETGEIPDHGDLKDELKTHNKYKGLHSQSSQRVLEELAEAFNSWYGSDDDRDNPPGYRKENYYDTEGRRVHEEHPRSTVTWKQKGIRHDSKNNRVRLSKGRNHKEYPRAREYILVEYETAPGVSVEKLQQVRAVYDQSQERWELHLVCKDEVETPDAPGNETAGIDLGICNFAAVAYSTEEADLYPGNRLKQDGYYFPKEIAKCDDSGGEEAT

SEQ ID NO: 32117 - protein, 287 aa, Natrinema sp.
MTATTTKPLEATLVPPTAHKERKLCDLLNSYRAGLHEAFEAGCETMTATSDVVTPYDLPYQAKAALCNYVPQLHGTYDAQELDDDHPVRLTNQAAEFDHSSERDYEFTWWVPQPGRGTNFWIPLRINPAQEGLWHDLLDGEASAGQLRLQRHRTSWTLHVTVKFSVEQPDYEPTDDDVTPVGFDIGEAHLLAGCACEQGTPADPLLINGGRARSLRKEMFTTLKRLQERDAAQWRIDDRFDHYQNALTDIIEKASDVASSTPNALRSQSSYWKTSRTSATTSIMGSG

SEQ ID NO: 32118 - protein, 416 aa, Natrinema sp.
MASNYLTRTAITRLRVSPTDARLLEKTSRAWREGCQLAADIGWRNDICGKRRLQSLAYDRIREDTGLGSMHATLAIHHAADALSAVATLEEHDQSVSKPEFTSPTIRYEPKTLSLFDDQTVSLTTVEQRVRCELVLPSDDEGYQWQFIEADAWEIGASTLVTRNDSYFLHLGFRRPRPSVEEREPKRVLGVDLGIENLAVTSTARFESGREFAHRQRQFEAVRSGLQKTGTQSAHRTLAAISGREARSHQQSLHEVANAILEETEEYDCSHIVFENLRHIQNRISADRTFHQWAHRTLVEFVEYRAEEAGIEVVFVDPAYTSQRCCECGHESRENRVSRDHFACEECGMEAHADYNAAKNIGWKFLRCGPQSSQRTGHGQLALKSGTVTPNRGFIPYSDSEAEAENIDKSGSESDS

SEQ ID NO: 32119 - protein, 387 aa, unknown
  TnpB Polypeptide
MRKLLKSFKTEIHPTPEQKHKINKTIGTCRYIYNFYLSQNKELYEKGESFLSGKSFSIWLNQEYLPRHPEKGWIKEVSSKAVKKAMEDGCTAFTRFFNHQSGFPKFKKKEKSDVKMYFVKNNPMDCLCERHRIKIPTLGWVRIKEKGYLPTTKDGWVIRSGTVSRKAGRYYVSVLVKLPDSKIINNAKEGIGIDLGIKEFAVLSNGTVYKNINKSAKIKKLEKQLRREQRKLSRKFENLKKGEAAQRVNLRKQKQKVQKLYHRMDCIRTDYVNQTIAEIVKTKPSYITMEDLNVKGMMKNRHLAKAVASQKFYEFRMKLKVKCEENGIELRVVDRFYPSSKKCHCCGRIKKNLKLSDRIYQCDCGYVEDRDFNASLNLRDAKTYKTA

SEQ ID NO: 32120 - protein, 342 aa, unknown
  TnpB Polypeptide
VTYRSPSGFVARNSAYTCSTRRRLASAAPTVVWYRTMTARLIADSSCPGGFAGGDQVGQQPRRLEAGTARIMSATVRREGHRWYCAFTAEVHRAQSTPARPDDRVGVDVGIRTLAVLSTGECVPNPRHLDRSLSKLRTAARTMSRRAGPDRRTGQRPSKRWQRARDRVSRLHARVGNQRRDGLHKLTSALTGSYGTVVVEDLNVAGMLKNRKLARYLADAGFAEIRRQLDYKTAWNGGRLAIVDRWFASSKTCSACQTAKPKLSLATRTFTCEHCGLVIDRDLNAAINLKHYVARSGRETRNGRGADQKTERGSAGGCEASTPHHRGGQDGDRPLVTASCER

SEQ ID NO: 32121 - protein, 404 aa, unknown
  TnpB Polypeptide
MLRAYKTELDPNNVQVTKMKMNCGAARWGFNFALNKKKKAFDKKEKIPNNIELHRELNKLKGTDALAWGYEVSKCSFQEALRDCDKAFDNFFRRCKQKKKGKKGFPKFKSKKNNKQSFRLTGSIHVLNGFIQLPRLGKIKLFEKDYLPKDVKILSATISTKAGKWFVSIQVEEEPKNNLFTTETVVGVDLGIKTLATCSDGVIYENPKALRSNLKILKRKSKQLSRKQKGSKNREKAKQRLAKLHYKISNIRKDALHKATSAIVNENQVIVIEDLAVGNMIKNRKLSRAISDVGMFEFRRQIEYKVKWRNKTLVIADRFYPSSKMDWKSKKVNKDLTLSDRVIRHDDGTITDRDLNAAINLEHYFYTLSSREIYDCGDRSSENVNSLSLSEKQESNRKSSFRFL

SEQ ID NO: 32122 - protein, 418 aa, unknown
  TnpB Polypeptide
MILRAIKIRLYPNKTQEQTLNKVLGCYRFVYNQMLARKQEAYNADKTNLGLCELSKFFHGTLLKDEQYSWLKEQNTKVMKQAIRQMLSAYDSFFNHGKGFPKFKSKHDNNSALFPCEAISKSNTFETKHISLIKSLKNLKFRCSNLYFNRLQRYKDNIKSATLSKTKSGKFYLSVLLSMNEEEFKQFRHTDNKVGIDLGVKDFIITSDGEVFENKHFLKKSENKIKKLQRQLSKKAKGSNNRYKTRLKLAKAFERLTNQRFDYIHNVVNSLLRTYDYIFMENLNVQGMLKNHHLAKAIQEVGFYTFKNTLRNKAMMNDKFVIEVDRWFASSKTCHKCGYVYKGLSLNEREWVCPVCGTKHDRDLNAAMNILIEGNKILVGSRTAEFTLVDYPTMDDRCESNLKSSDRLKQEVGTKSNS

SEQ ID NO: 32123 - protein, 391 aa, unknown
  TnpB Polypeptide
MMKERCEFEVSMLLSYKYRIEPNRTQQATLAEMLSGFCDLYNAALQQRIEAYKRRGISVSYYMQSAELRALRAEIPELARWSFSAEQQVLRRLDKTFRAFFRRGHGFPRFRAKARFHAAEMRVSDGLTLHKSGKLGIVGIPGEIRVRWHRVLPSKPASAILTRQNGKWYIIFHVEVAAGERERKSSVGLDLGLQKLVALAPGDPIVRPNWTKRALRELRRRQRAIARCKRGSTRRAKRVDQLAKMHEHVANKRRDHLHKVSRALVDRYDRIAIEDLQIKPMLAKRPYLARDIHDAAWATLTAMLDYKAERAGVELIKVESSGTSSTCPRCGAVVAKPLHQRMHRCECGFVGDRHEVAAMVVHHRAFGYWPGAGQKSLSQHNGAGLTQKPLP

SEQ ID NO: 32124 - protein, 406 aa, unknown
  TnpB Polypeptide
MCCKSYLLKIDKSHLNKKVAKQLNLLFLESKWFVNHAIAQGVFDVDYKTKTVLVKKGEGFEERKIQVLSSQMKQALLENLKKDIKALSIKKKNGHKVGMLKFKKFIRAIPLKQFKVTYSLCGKNHICIQNIGKKLRVRGLKQIPEGVEFANAYLIQECRDYYLRVVTYCLPDKNQQTEDKAVGIDFGVRNQLTLSNGISIQYRVPITKKLKKLYQKLSKKQKNSNNRYKARVKVQKEFCRLNRIKDDIKNKIVSCIKNNYSIVCYQNDSIKLWQTWWGRKTFETALGEIKNILKERISTPIALKREFPSTRRCFCGTENQIQLDEEIYSCINCGLRMHRDLKASISILLEGLNQLPTERREAALQYAERKACGEESSTLSMFEYLNSIPHVRARLLVETGSLSALA

SEQ ID NO: 32125 - protein, 406 aa, unknown; identical to SEQ ID NO: 32124
  TnpB Polypeptide

SEQ ID NO: 32126 - protein, 449 aa, Streptomyces sp.
VLTVRLPVRPDPVSRRDWHPVRIRFRLPPHVPAHAVLCTPTLRVRAGRLLLDVSYALATPKPKRAGHHIAVAFDWDLNTLLTGGTLHLTGETQPRVLTGGQPLSFRAAGVLAKADRLRLHAERIGARIDRLRILIASRQERGMRPSPWLVAKLAVLQAEWERIARRRTRLNAALARAAARFMVDHAVAAGASVIYLEDLRDMEARGKGRTLNTRLSQTVRGAIVTHTRHTAAALGIAVVIVPPRGTSAYCPRCLTAFRHHKAPDDRAAGWAWATCRNGACGYSTGRDHAAWQRIGTRGLTHQHTTHLDRSSKTLVIRSVVEALDRASQVQHQIRDRTKSRPTAKRPAPGKRRRVPAPPGHRTPTRARPGEKRPAGRTPTHPTHRSQQCARQQGPATIGTPTRLHRPDGARLGAGFRRHAHTTPIPGWPRPSHPQGRSRTPGTTQETQAD

SEQ ID NO: 32127 - protein, 405 aa, unknown
  TnpB Polypeptide
MIYNIAHKIELVPNKKQEEYFVKACGVARFSYNWALEQWNKQYQAYKRDNSLPKPNEFDLRKQLNAIKQEQYPFLLEVTKCASQQAIKNLGKAFVSFFKKQTKYPKFQKKGRNDSFYMDNSVIEVAGKKIRIPKLGWVKMRENIRFYGNIMSATISRTADKWFVSIQIAIEINPQPKAIENQEAVGVDLGVADLAILSDGTKFSGSKPLKKSLKKLKRLSRSLSKKQWVEEVYTDKNGVERKRKVPSKNYLKAKTKLARAHAKVANIRKDGLHKITTYLIQKYDIICIEDLNVKGMMQNKKLARAISDMGFYEFKRQLLYKAEMCGKHIVLADRWFPSSKTCSECGHKMEQMPLSVREWECPNCHTHHDRDINAAINLKKYGLEYHYGATPEPTENDNTASSAEI

SEQ ID NO: 32128 - protein, 462 aa, unknown
  TnpB Polypeptide
MNTIIKTIRQYSYKLNNNTLLELEYIANQYKNVKNYVYSRYSGINSILLLNKDRKIRDEWMKNKFFEQWKLPARYWKLALSEAISNIKSQWSNTKRKVKEQCKINNNLLNEDKHYINYILKFDNYYWKVLTNKSFDIPKTFQDRNLNYKYLHSLIKRYTRRYKGQISYSKIGRTFSIDEGLYSYKEGYIRITCTKKRTRLSIKLTDNNKYNKNLIVKITGNKIEIHKPLKIQVKKNNNQQNIIGLDKGYRYLFAVSSGNFYGDKLNGFLNKETERLNKVNQNRNRFWALYNRYLEQNNIKKANIIKENNLGKVKYNYNKEKYDQILKSYINYSLNQLIKIERPTEIVMEQLDFVNWYDRYPKNVRRKLSRWIKGYIRERLEYKCDYNNIKYTYINPAYTSKICNACGSFGKRDLDVFICPKCGTIHADINASKNILNRKYDKEITLYTNYKKVKKILKNRIG

SEQ ID NO: 32129 - protein, 349 aa, unknown
  TnpB Polypeptide
MMPIKHSDCFKDLGSNSAQMTLRRLDKNWKSFFEGVKKYKKHPEKFLGRPKIPKYKEKNGRFVLELTNMQTHIKDSYLYFAWKPLRHFNNKMKTNVKGRLLQTRFVPKNNCYILEIVYELNIFDIEDKESKNICSIDLGINNFVTIVNNIGIIPIVINGKGIKSYNQYWNKQISKYKSILKKINNKDWSNRLDRLTLKRYNKLNNFLHKASKQVIEYCRCLDIDTIIIGKNDGWKQNSKLNKKINQGFIQLPYNDFINMVEYKAENIGVKVILTEESYTSGTSFLDEELPIKENYNKTRRVKRGLFKSNNGRLINSDVNGAYQIMKKVFPKVFANGIEGVHLHPIIMNL

SEQ ID NO: 32130 - protein, 366 aa, unknown
  TnpB Polypeptide
MQHPSSGMSVITSVSITKKQGWNSIRTGIIRKKPIKRICGINSSRPRPPRFKQESIPITYMQMGIVHERDTDRVRLSLPKALKKYMEETYQIHENFLYLENKIFRGMDQIKQLRIYPPEKGNCKIIVVYEIPDQEELPQNGHELSIDLGLHNLMTCYDSKNGKTFILGRKYLGLERYFHKEIARVQAQWYGQQSGKGVKHPTTSKHIRKLYKRKHDSVTDYLHKVTRYLAEYCREQGITCVVTGDIRNIRREKDLGHRTNQKLHSLPYNRIYIMLEYKLKRYGIRFIKQEESYTSQCSPLSPKVEKRYAEPSKRKERGLYRDGNRTYNADAVGAYNILRKYHSVSGVKRELSVTGLKTPEIIKVAV

SEQ ID NO: 32131 - protein, 403 aa, Nocardiopsis sp.
MDCFDCGLSLAGCTMAGVSKIVVQLGLTPSPEQAAVLASTLRALNTHATRVAKVAHEQGVMRDYELRKHTYRQLRAAEVGSQAARHVIKKVCDAYRTRRANLDNGDYGPKGSVRRTRIGSTPIAFRAGSAHPYDARDLSFAMDARTISLWTFQGRLQDVPFTGSADQVKALAGHKRGEADLLRRDGAWFLAVTVEVPDAPEQEPDGFVGVDLRIINIATTSDGQVMAGRRINRYRRRRLRLRQKLQAKGTRSAKRLLRKRRRKEARHADTNHQISKRIVAEAERTGRGISLENLTGIRARVRQRRPQRATLHSWSFHQLGAFIAYKARLKGVPVVFVDPAHSSRECAACSYTHRANRVSQALFICRSCGVVAHADRNASRVLARRCQEAWNAGRKSHVPPGHP

SEQ ID NO: 32132 - protein, 410 aa, Nocardiopsis sp.
MARKSVKRAFRYRFYPTDAQAAELSRTFGCVRLVYNRALAEHTAAWNTEQRRLSYTDSSAALTVWKRTEELAFLTEVSCVPLQQTLRHLHTAFRNFFDRRAKYPRFKSKKKSRASAEYTRSGFRYRGGQLTLAKMTVPLDVVWSRPLPEGARPSTVTVSRDTAGRWFVSLLCEDTITSAQATRVVVGVDAGITSVVTLSTGEKVANPRHEQRDRAKLARAQRALSRKAKGSTNRDKARRKVARVHARITDRRRDFLHKLSTRLVRENQAVVIEDLAVRNLVKNRRLARAISDAAWRELRTMLEYKCAWHGRDLVVVDRFLPSSKACSTPGCGYLNASLPLRVREWTCPVCGVAHDRDVNAALNLEAAGLAVLACGAGVRPQRESFRTGRPVMKQEGHGATRDEALASSHQ

SEQ ID NO: 32133 - protein, 414 aa, Nocardiopsis sp.
LSQPLKTPGTRGAPGGYASRQEWHAKSRRLTTLEHRHAAAVAAWEEGRVRVVRGGKRLLHSRHHLERAQLTEAGWRARWEAARFFLSADGESGKRHGNETIRITPEGQVSIRLPAPLAHLANAARGRYVLSGRVVFAHRGAEWADRVEADGAVAYRIHLDTDRGRWYVSASWTLQAVPALPMQAALAHGVIGVDANADHLAAWRLDTHGNPIGNPHRCEFDLSGSASHRDAQVRYALSRLLRWATASGVRAIAVEDLDFAREKSREKHGRRKKFRRLVSGFPTARLRSRLVSMAHTLGVAVIAVDPAYTSRWGAQHWQRPLTTKCRKVSRHDAASIAVGRRAQGYPVRRRTAPPPHHQGDGVGHRTVQAAPGGSGREGNRPPVTERAHDARGRTGQERGDPAHPAPFGMGAVPA

SEQ ID NO: 32134 - protein, 410 aa, Nocardiopsis sp.
MTRKSVKRAFRYRFYPSDAQAAELSRTFGCVRLVYNRALAERTAAWHTEQRRLSYIDSSAALTAWKRTEELSFLTEVSCVPLQQTLRHLHTAFRNFFDKRARYPRFKSKKTSRASAEYTRSAFRYRDGRLTLAKMTEPLDIVWSRPLPADARPSTVTVSRDAAGRWFVSLLCEDTVESAPAANDAVGVDMGVTSLVVLSTGEKVANPRHERRDRARLAKAQRALARKAKGSANRGRARRKVARVHARITDRRRDFLYKLSTRLVRENQAVVIEDLAVRNLVKNRGLARAISDVAWRELRSMLEYKARWYGRDLVVVDRFFPSSKACSTPGCGYVHVSLPLRVREWRCPQCGTTHDRDVNAANNLRAAGLAASACGAGVRPQRKSSRTGRPAMKQEGHGVTRDEAVASNHR

SEQ ID NO: 32135 - protein, 410 aa, Desulfovibrio sp.
MKRLQAYKFQLKTKAAQKSLMRRFAGGCRFVWNKALALEKEAYEETGRRLGYSNLCVHLRDWKQEEETSFLKEINAQILQQTLMDLDRAYRNFFSRRATFPKFKKKGVHDSFRFPQGGRLEDSSRTRGFKLDEPNSRIYLPKIGWVSYRNSRKMEGKPKQATVSYSAGKWYVSIQTEREVDDPIHPSVTAIGVDMGVVNFATLSDSTCIKPLNSFRRYEKKLVKLQRKLAKRTRFSANWQKRKARVQHLHRKIANVRHNFLHKTSTTISKNHAVVIVEDLHVRNMTRAAAGTIEAPGHNVWATARRNLSILDQGWFEFRRQLDYKLKWLGGRLIAVPPQHTSQRCSRCGHTDARSRRTQADFRCTACGFESNADHNAALNILAAGQAVAACGSGRAQAPALNQEPTCGAA

SEQ ID NO: 32136 - protein, 363 aa, Lactobacillus sp.
LVLTDAGQQILRIVDRDMKSFFTLLRLKKDGKYSDNVKLPRYKDKTGLTSYAVQARSIRIHGDKARIGLSKNFRAMYGFTYRYMEFTLPKNVDAKSLKEVRIIPCFNGTEFDVEFIYNRKEAEASTADGVLSIDPGVSNLLTCTAFSNGKPDAFIIDGRHIKSINCYYNKAMARLKAIYAKDSKVQGTTARMRRLINGRKNRIDACFNSIAKYITDYCLANGIGTIVIGYNKGQQEGIDMGKMNNQNFAYIPFYKLRRKLMGRCALCGIKYESQEESYTSKASALSLDEIPNYGDKNIPEFNGYRQKRGLYKIKGEPVTINADVNGSINIYRKYLKCKSNADLSADDVRVFVNRPVMRISALH

SEQ ID NO: 32137 - protein, 431 aa, Lactobacillus sp.
MSVEKNIQIAETMRATYEKRSRQICRVFELKVHKQRLNLQQKETLKMMFVEAKWCYNYLLGRMNNEENFDIFSYKGKELLDITHRDKDGNDVPVHLSYITSSLKDSLVARMQSQIKTLSSLKKKGKKVGKLKFKSEYTALGLKQLGTTHKIISSNRIKIQGVKKPLPVNGLKQLSKYGIPDIANAVLVKKCGNYYIYLTVYYDKDTVQKCHKNLELGIDFGCETSLTLSDGRKINAIVEETDRLKSLQRKRDKRVKGSNGRWRLNYKIRKEYLKSTRKKDDLAHKIVHELLRDNETIVMQNEQINSWKRKHGRKVQHGILGRVKSELIRHPEQVFVMSRFVPTTKFCYDCGAIHKDISLWDRSFVCPECGVISDRDIHSAECMVWIYDNLRDKIGLGESEFKRADFDEEVSLIFGRWDSQRVKPEDATSLG

SEQ ID NO: 32138 - protein, 446 aa, unknown
  TnpB Polypeptide
  misc_feature (345)..(430): Xaa can be any naturally occurring amino acid
MKGGLFMHTMSQMPYHIGFKVKLYPSDYQKHLIAVNDGAKRAVYNHLVACGNERYRLAKAVDSILLSHPAAYVPMYLERIDYLQSVSFDVKGIQNALPFLYGKEIDSLAVANAVKNYRFAWKNQKEQHRGVPMFKKKSYEQSYQTNAQYNTRKGITTCNVRFLDKDHVTLPKLERIRIGASPKIIGSLLHRTADTRIGTITIQRDAVGEYWASFAIASDEPFHQKLEKTGSMHGIDLNLIDLINDSDGGIRENKRFYASSQHKLAKAQHKLSRRAEHARAEGRKLQGSVNYQTQRKKVAYLHRKIERQRTDYLHVLSKREVENQDFIAAEDLKVSNMKKNHHLAXXXXXXXXXXXXXXXXXXXXXXXXXXXXXXXXXXXXXXXXXXXXXXXXXXXXXXXXXXXXXXXXXXXXXXXXXXXXXXXXXXXXXXILNKGLQKAKDTGLCL

SEQ ID NO: 32139 - protein, 416 aa, unknown
  TnpB Polypeptide
MQRAYKYRIYPTDEQKVLLAKTFGCVRVVWNWALDARQTLYQETGETISNFDLMKRMKRELKAEKEWLGEVNSQSLQNSIVNLGQAFTNFFRGTAKYPRFKSKHDRQSFQCPQHCSVNFDRGTISIPKAKDIPAVFHRRFRGEVKTVTISKTTTGKYYASVLVNDDVPTPKKPTTSDEHTTIGIDAGLKTFAVLSDGREFESPHFARKEERKLKLLQRRLSKKTKGSCAYRRVKQRIARLHERVTNRRTDYLHKISHQLTHESQVRTICVENLNVKGMQRNRHLARSVSDAGIGDFMRMLEYKCEWQGVRLVKIGRFDPSSQLCHVCGHRYSGLRLSEREWTCPSCGTHHDRDFNAAVNIKNFGLGLNEALPSVRGKVKPAKQPPVDDRCPVQPKKQRCAEAGKAKVHRDPKPRSL

SEQ ID NO: 32140 - protein, 200 aa, Desertifilum sp.
VLAKNKETPWTKKLNSQARQAHADRAWSAIQRFYANCRLGKPGKKGYPKYKKFSRSVEYKNSGWKLSADRRQITFTDGFEVGTMDLWSSRDLVWYSEQQISRVRVIRRADGYYAQFLVDWDRREEHEFQGKMTGIDLGLKEFYTDSHGNTVENPRYLRKSERRLKMLQRRVSKKHTLGKKQSNRYHKARQALAKQHLMRQ

SEQ ID NO: 32141 - protein, 395 aa, unknown
  TnpB Polypeptide
MSRYRLTPSAAQEAALLGHCADARFVWNLCIEQESHWRPGRGKMPGFAGRCRQLSGARADNPWLAAGSVIVQQQAIRDHDQAMRNFFAGTHRRPSWRKAGRDEGFRIVHLKPGDVRRLNRNTGQVRVPKAGWVRFRWSRPVPQGVKSFRVTRDRAGRWHVAFAAVPAPVPTPGNGEVVGVDRGVAVSAALSTGELLCCPALTGREQQRMRRLARKLARARHGSNRRQRARRAIARLKARGVDRRKDWCEKTSTNLARRFDVIRVEDLKIANMTRSAQGTPEQPGRNVRQKAGLNRGILASGWGLLVRRLQDKAPGRVEKIPPAYTSQRCSACGHVAAGSRESQALFRCTACGNADNADVNAARNIAAGHAVTARGGVRDTGPVNREPQPVLLPAG

SEQ ID NO: 32142 - protein, 395 aa, unknown; identical to SEQ ID NO: 32141
  TnpB Polypeptide

SEQ ID NO: 32143 - protein, 433 aa, unknown
  TnpB Polypeptide
MTRVARTVMAKSTRLPRKLFRVLVELEDMYRNMVEQLTMYAVSNNIRSFIRLKALKYHEMRSIYTQLPSHYVYAACQDASTRVKSFLKLKKLRLTERDYPEIRRVSIWLDDHLWRPSGLTSIKIATHRGWVIVEFKPHRQYWKYINRGWKLASEAKIKLNKKNRQLTIYLTFIKELEEHKPRGYLPIDINENNVTILVDGIAHLFETDTEKLVLGYYYRRKRIQEKYDKLYGVKSRIKRKAMRKLKERKKKNVIKWKIANIIVRVAYEKRYTIVLEKLGKKPANNMVKRVKDRQLRHRIFQASFRGIQKVIEEKAREYGVPVIHADPRNTSKLCPVHKTSIKYNNGSRLGKCSKGGELWHRDVVACWNLLFKSLRGDGSNAPNPVGLLLLDGCLVPLGSTTTHDPIGISKSLWARWKSLPHTQKAIILNRMKR

SEQ ID NO: 32144 - protein, 395 aa, Lactobacillus sp.
MIMTLITYKIEIKPTRKQAYLIDRHLGVSRWAYNFFLEMNQQRYQDGYWYMGAYEFSKWFNNEYLPANPDDLWIKDYYAKSTKQAFIDADTAMKRFFKQQSGYPKWRSYKRHQGSYYFVKNGAKQVIACERHRIKLPKLGWVRFKEYGYLPTDTKYYVIKSGRIKEQAGRYYLTCLVEQPEQLHELLLGVPIGVDLGLKNFAVSDNGIIYSNRNKDYQVKRIRKQLRRTQRKLSRQYVAYKARKMKEGESATDLNLAKTERKVQRLYQRLHNIQADYQNQIVANLVRTKPNWVSIEDLNVKGMIKNRHLAKAVNQQGFYTFRTKLVNKCQQLGIPVHLVNRFEPTSKICHQCGYKKVDLSLGERIYKCPNCGNVVDRDINAALNIRDTDNFVLAY

SEQ ID NO: 32145 - protein, 396 aa, Rosenbergiella sp.
MKRATKVRIYPDSDQAAFLNAQFGAVRFAYNKALHISRHMYQRHGISLKPTRDIKPLLAVAKKSRRYHWLKEYDSLAMQQAVINLDKAFANFFNKKLNAGFPVFKSKQGKQSSYHPNGKVLTNAIQLPKISPIRATIHREIIGKVSSITVTRTQTGKYYASILSDDGLEAATKPTFITSVSGYDIGLKEYLISNDGNKTPNPRFLVNAYRRLRRDSKNLSRKKLGSSNRKKARIKLAAQHERVANARADFQHKLSRRIIDENQAVIVETLKSANMMKNRHLARHIGDAAWSGFVSKLTYKAEQAGVHLIKIDQWYASSKTCHCCGHKVAEMPLKLREWQCPICHANHDRDINAAINIRQKGITDLMAAGLVVKAHGGLRESGSAPVAAVEVGSIAL

SEQ ID NO: 32146 - protein, 253 aa, Streptomyces sp.
LDAAGRYFASFVIDTDDETDRARWAEPDPETAIGIDLGLTHFAVLSDGTKIGSPRFLRRAEKKLKKAQRELSRKRKGSKNRAKARLKVARAHAAVADARKEFHHQLSTRLIRENQAVAVEDLAVSGLARTRLAKSVHDAGWSDTGTGPSPCRYGSGPAPWDGVGRGPSPTTQEAPGRPWSTSTSCGPARGPATRTVRTTRRALDPLGRHAVGPGRAASPPQKVPWVLTGPTWKMPEQIVQEAGTRTAWCEAGG

SEQ ID NO: 32147 - protein, 384 aa, Streptomyces sp.
MRVKLLPTPQQATALEATMHACNDAANHVSAVAHTTGNKKNRDLRTEIYTHVKQNWCLGAQAAQHVIKKTCDAYEALKGSLKAGNLGRPGSKRHKAATSKPITFRPLAAQPYDDRMLSWQMEQRTISIWTTEGRLKRLPFTGDEQQLQLLAQYRKGESDLLTQDGQWYLLATLDVPEAPQNPHPQGFIGIDLGIANIATTSTGHRHSGRKLNRTRHNDRNLRTRLQKKGTRSAKRRAKRRAGKESRRTRDINHKISKHIVAEAQRTGRGIALEDLRGIRERARLKKPGGTSHALKAVGERHDQLLGLRPARRLHRIQGAQSRSASGVRRPGLHQPGMLPLPSHRQTEPAEPGRVCAASAEAIGGASCEPGRKPGQRTRSLVPRT

SEQ ID NO: 32148 - protein, 322 aa, Streptomyces sp.
MLTAWKKTQQLAFPNDVSSVPLQQALRHLQAAFTAFFGKHAKCPRFKSRKKSRKSAEYTSSAFRFSDGKLTLTKMSEPLDIVWSRPLPEGAAPSTVTVSQDAAGRWFVSLLVEDPAVQPLPANGRAVGVDAGLGHLLTLSTGEKIADPRHERRDRTRLARAQRELSRKAKGDGANRAKARRKVAKIYARIADRRRDHLHKLTTRLVRENQTLVIEDLTVRNMVKNRKLSRAISDAARREFRSMLEYKATWYGREVIAVDRWFPSSKLCSICGTTHDRDVNAAKNLKAAGLAVSACGADVRPQREFSRKGQSTTKQETPRREL

SEQ ID NO: 32149 - protein, 503 aa, Moorea sp.
MSELVETELLSTMKKLGVVRAESYNKLGSINHWGLDWKKAIPKVKSFRTPDTLGLPAKLMDWTVNDVAKAITASQAACKDAVIKKIYRRFPGKENQNTRKELCKQLKNLVFLDNPLLHRLVRKEFQRGHSWVKNQIVYQQDGYKCKRLYRHTYQLEISGLIKRKRNRIIVRSNRKIKGQIRLIYNQLLSRFEVHFLVDHGQVEIPAQRRNVGVDKGYTEAFYDSDGQAHGKKLGNVATNKSDRICGKNRNRGQLWALHRKLEKINPAKSARILRNNLTRKTENKRYRHNQSELKAIIGTASKSLFNGESLKVFAEDLTQPIKNKRQSKAMSRKLNSWMKGELRESLQKWANWTGSVVIEVQPSYTSQVDSRNGTLLGKRTGDNFTGFDGVVLQADCNAAKNILARGTDHEITRYLNKTEVQAVLLRRTARFLKGMGLSLLDAVELGWLDCKHRKTKAFKQLLVEMPGTPRQTGGRLDSNCCITTPHSGNNKLNLDRFVPDYLD

SEQ ID NO: 32150 - protein, 454 aa, Streptomyces sp.
VWWSSGSFRGNSRPRSGEEPNPCRTGLRKPVCRRSGPASTTDNPRTVTRWPDSLRAVPTHVKRTFKYRFYPTDAQAAELSHTFGCVRKAYNLALAARTKAWILRQQRVNCNATSAMLTEWKKTEELAYLNDVSSVPLQQALRHLQTAFADFFGKRAKCPRFKLRKKSRTSAEYTTSAFRFRDGRLALAKMAEPLDIVRSRPLPEHAVLSTVTVSQDAAGRWFVSLLVEDQSVQPPAANDRAVGVDVGLDHLLTLSTGEKISSPRHGRRDRARLAKAQRELARKAKGDGANRARARGRVAKVYARIADRRRDNLHKITTRLVRENQAIVIEDLTVRNLLKNGELARAVSDAAWSEFRSMPAYKAQWYGREVIAVDRWFPSSELCSTCGSVRNKMPLNVRTWTCDCGTTHDRDVNAARNILAAGLAVSACGAGVRPQRNSPGGQSATKQEFLRREP

SEQ ID NO: 32151 - protein, 374 aa, unknown
  TnpB Polypeptide
MLIQKSYQYELILNGEQVRKLKQFCGCCRFVFNKGLDEIKKYYESTGHFLNYAQLTALLPKWKQDADWLKDCHSQVLQQSMKNLSQALMNFSAGRANFPRFKAKGRKDSCRFPQGFNSDQNNNRIYLPKIGWVRYRNSRTIIGTIKNVTVTAKCGKWYVSIQTEYEQEEPVHYGSDIGIDMGIVRFATLSNGQYFNPVNAFKTLKGKLAKLQRQLKRKTKGSNNWKKLVAKIGKLHKRIANIRKNFLHQISNTISKNHATVYIEDLKVGNMSKSAKGTMENPGKNIRQKSGLNRAILDQAWYEFRRQLEYKLRWRGGQLIFRSGRWIGRLSEDVCQTSRHPILTQTKEPLNAVLFRLTILKITPLSCFIAGRFL

SEQ ID NO: 32152 - protein, 387 aa, unknown
  TnpB Polypeptide
MIKAHKIRLHPTPEQAIYFAKAAGTSRFVWNWALAEWNRQYEAGEKPTAFKLKKQFNAIRREQFPWTWEVTKNASDQPILDLGKAFTAFFEGRARRPRFKSKKRSKPSFYLANDQMELGDHRIWIPKLGWVNMAENLRFTGKVTGARITKTADWWFVSIQVEIPDTLPEKRQAAVGIDVGLNRLATLSTGEGYENQAFLKTALSKLRQANKRLHRRIPGSKNREKARRQVARLHYRITCMRDDALHKLTTKLANYYGIIGIEDLNLKGLLKNRRLSRAFSDAALGKLLNLLDAKVQQRGGQVIKVGRFFPSSKTCHCCGWKWEAMTLEDRVFVCQNPSCSYYRFPQDRDHNAGQNILREALRLIGLSDQAVDDIGSGDDVNLAVDAG

SEQ ID NO: 32153 - protein, 316 aa, Shigella sp.
MRRFAGACRFVFNRALARQNENHEAGNKYIPYGKMASWLVEWKNATETQWLKDSPSQPLQQSLKDLERAYKNFFRKRAAFPRFKKRGQNDVFRYPQGVKLDQENSRIFLPKLGWMRYRNSRQVTGVVKNVTVSQSCGTWYISIQTESEVSTPAHPSASMVGLDAGVAKLATLSDGTVFEPVNSFQKNQKKLARLQRQLSRKVKFSNNWQKQKRKIQRLHSCIANIRRDYLHKVTTTVSKNHAMIVIEDLKVSNMSKSAAGTVSQPGRNVRAKSGLNRSILDQGWYEMHRQLEYKQLWRGGQVLAVPPAYKTGLSCG

SEQ ID NO: 32154 - protein, 434 aa, Microcoleus sp.
MGRSSCQIKLSDSDKTFNVLAIFRQMETMRLVEKHVIRKGSREWKEIDDLSFKSKNLYNRANYEIRQHFFETNQILSYNEMASRMQLEDSYCALPRKVSQQVLRGLDRNWKAWKEADKAYNKNPSKFLGKPKLPKYKDKEKGRNLLIYTIQAISSKELRKGWIKPSGASLMISCKKQKINEVRIVPRLNYYVVEVIYEHPIQQLVSGKAVAGVDVGLNNLAAVTSNQKGFKPFLINGRSVKAVNNYYNKKKAELLSRLKGDRKTSNRIQRLSTKRGFKIDDYLHKSSRLIVNRLVENNISTLVIGKNENWKQEINIGKVNNQNFTSVPHARFIEMLTYKASLVGIKVILTLESYTSVASFLDGDFLPAYGSPEAKTAKFSGRRVKRGLYKSKIGVKFNADVNGSYNIIRKVFPDAFCNGIKGVVVHPVKLTLTN

SEQ ID NO: 32155 - protein, 365 aa, Microcoleus sp.
VETRQNALPKFKEHFPDYKELGSQALQAPIKRVNLAYHRFFQALGKYPRFKSSRYYRGWSYPGIAGWKTHSNGGNGHLEISKLGKIQMRGQARAWGTPTTCTIVWKNNKWYASITVKCDIQRQTGTGAVGVDIGTLTAVAFDNGDKIDNPRFLAKAQVDIRKASRELRRKRKPEKRKAKASRRWKKARKKVYKLQNQVAARRQDWVHQVAAQITSANSLVATETLKVKNMTAKAKKDKRRHQKTGLNRSILDVGFGMLRSAIKYKVEEAGGFFVEVPAQKVKPSQTCAQCLAQKKKELSERIHCCEQCGYTSDRDVASALVCINYVKGLGTSLLDVDDSSSTVKTRKSTGSLQQLGQAKRQKPRT

SEQ ID NO: 32156 - protein, 258 aa, Lactobacillus sp.
KIGLLRVAGSQARLLKRMCETRIGTVTLTKDPADHFFLSMQLASDKPFVKESKTNHGHIGIDLNTDNFLTDSEGNTVPNPQYYRTIKDKLAKEQRILSRRQRRAKKEHRSLRDSKNYQKQRLLVAKLHAKVMNQRHNFLQQISTALIKNHDLVVAEELRSKNMLKNHALALSISDVGWRSFLGMLAYKADLYGRQFITISPRNTTQTCHNCGFVMGTNGTDKLTLADRKWTCPNCGTHHIRDWNAAKNILDKGIAKLA

SEQ ID NO: 32157 - protein, 416 aa, Desulfotomaculum sp.
ISRCKNNAVKKLKSSPIEQPVYILVEKFPLHLNPEQITLARNLQMEAAKVWNATCNIHRTVYGRYHYWLKEGALKSLLKGKYGIHSQSVQAVVETYYECCERTRELHAQGGADWKYPYRRKRFFTVIWKEPGIARMGRILRLSNGRGREPLIVKLPERLVGTAIHQAQLVWHRNQYWLHVTVEKPALIKVRGDVTAAIDPGEVHAVTITGGNDALVISGRLLRSFNRLRNKGLRKFQRAISKTKKGSRKRKRLLVKKYRFLNWLERRLAHILHTISANTARWCLQRNVNTVYIGNPEGVRKKDCGRKHNQRMGQWAFGKLRGLLEYKLKRHGIELIPVDECGTSGTCPVCGEYTKQTGRVYRCGNASCGFTGIHRDVLGASGILDKSVNGGFTKGRKLPVTVDYLRPKVLAPKRAA

SEQ ID NO: 32158 - protein, 385 aa, unknown
  TnpB Polypeptide
MTGCEGVLTLSIRMRVSPEPDSYQELISLMKRYREALNYAIKVVVESNALSLGKAHKLLYNVLKEGYDLPSKVAQDCYREAIAVARSWLRNPNRGRMPRAKTLRLWLTHRYSYRIKGGYVEVLGGFKLRIIGWDRRYDSYPDGDARLLLKDGKFILEISKRVPRPAKYVPRGVLAVDINEKHIVVGNSQFEHMFETAVEEALHYKKLAENLQKEYSSPRYNAWLRRRGIRKRIRCFRRRARNIVEGWAKEVSHKIVTLAKQYQYAVAREDLTGLVESLRKLPKEHRVGLLILSYRRLEYWIDWQAEKNGVPPIVVEPVGTSSICPSCGTKLVKNGYRRMRCPRCSFEANRDTVAVLNIERRALEEVWGALTPLNAPQMTDVAPNR

SEQ ID NO: 32159 - protein, 251 aa, Clostridioides sp.
MYCGQHIKLPKLGMVKIRDKQVPKGRILNATISKEPSGRYYVSLCCTDVDIEAFENTNNQIGLDLGIKEFCISSCGEFIENPKYLKKSLNKLAKLQRELSRKTIGSLNRNKARLKVARLQEHIANQRKDFLQKLSTKLIKENDIICIEDLQVKNMIRNRKLSRLISDVSWSEFIRQLEYKANWHGRKIVRVGKFFASSQICNKCGYKNEEVKNLNIREWICPSCNETHDRDINASMNILKEGLRLITIQNK

SEQ ID NO: 32160 - protein, 504 aa, unknown
  TnpB Polypeptide
MRALRFCAVALGRSRCPQTHESRSESYAGPALRASAWASQADRDSASAPDSTEFAQGPCVIASGRSRTRTRENAARAFRYELHVTDVLEPSLWQHAGAARFAFNQCHQWFTQGLAAYRAELDAGVEKPDVEVAWSAFSFINRFNAWKNGEADDSPQAEDGTRGLPWKGELASQDVFECAANDYALAVTNWRESRKGTRKGRRAGFPARKKKFKSAPTFRLRNRHKPTQVTQAIRTDGNRHVRVPGLGNLRIKGSAKQLRRAMEQGRFHPDSATISYRNGRWWISIAGQAAEMHPATRSRKTRVEGRHGMDVGVSKLAVVANEHGDITHNFPATKALDRALRRLRRANKDLARATRDSKEWHRHKRRLQRIHGQVAFARRDALHKLTRQLATELEQLTVEDLNAAGMMRSKLARHLSGAALGELGRMLEYKAGWYGLELAKADRWYASSKTCSKCGVKNTEFGREPVFWCGDDTCGHRQDRDENAATNLARWRPQEDSLPLAAAA

SEQ ID NO: 32161 - protein, 410 aa, unknown
  TnpB Polypeptide
VRQGARPNFIDLRNALVKVQGDGDNGRPPCARGVHNKILARAVKQACDAHASNFAKMRKQGLSYKFSVRFRSLAKSSTEVLVLERGKEGPVKGFEAMAAPASAKRRDAARTECLLHLGGKSFKDMGGVRLQDHDEVIARMVSEGKVLQEDAKIKWDKRTDSFYFVYTYVLPVAADPDPEFKAKRVLSGDLGVAPFLEWYQPDGSHGACLDGINAELEARCAKLDALHSRVQRRKTAHHARRTEAHKARPRAKRRATARRLHQKLARERVRLHNWVEGAHYDAANFLLERADVLVIPKIASKRMSERATRGIRSRTVRTMLTLSPGEFCARLASKAAAYAGRHVFTHTGEPGTSKTTSCCGWWNWNLKVQDKVCACPRCDVTIDRQVNGARGNLLAALGMALGIGWDGASG

SEQ ID NO: 32162 - protein, 184 aa, Microcystis sp.
MRCSRIKVARIHAQITDSRKDHLHKLTTQLVRENQTIVVENLAVKNMVKNPKLSQAISDVSCPPLPPRPPRCRGGRGGGGWGGRQLAYKCRWYGRNYIEIDRWFPSSKKCSNCGYIAEKMPLNIREWDCPDCGTHHDRDINASKNILAAGLAVSVCRATIRPEQSKSVKAGAEPRKGKKQKPKS

SEQ ID NO: 32163 - protein, 377 aa, unknown
  TnpB Polypeptide
MILAKKVRLYPTKEQEQKLWQSVGTARFIYNYTLAKQEENYKNSGKFISDGTIRKELTQLKKSELTWLNEVSNNVAKQAVKDACNAYKRFFKGLANKPKFKSRKKSKPSFYNDTSKLKVKEKKVLIEKVGWIKTNEQIPRDVKYNNPRITYDNKYWYLSVGVEVDKKEEELTDISLGIDLGLKDLAVCSDGKIFKNINKTKEVKKLEKRLKQKQKQISRKYEMNKIKKEGGGSCQFIKTKNIEKLEETTKLIHRKLANIRNNYLHQVTTSIVKTKPYRIVIEDLNVSGMMKNKHLSDSVRKQCFYKFRQYMTYKTELNGIELIVADRFYPSSKTCSICGSIKHDLKLKDRIYKCPHCGAIIDRDYNASLNLSMYKLA

SEQ ID NO: 32164 - protein, 456 aa, unknown
  TnpB Polypeptide
MEITSSYQVEILSNTDMKNTVQIYRRALAFVIDVCNKEWIDISAIESQVQKKSFVEKLIHQTKSNQNPKYPFDIKGSEFYKFPSYLKRAVIAEAIGAVSSYRSNYKNWEDNGKNGKAPSLQMNMHAMPVFYNKNMYKEDAPKNAKYPKDMNPGDSNIRWIKLYQNNDWVWIPVRLRKTDINYINKYWGACEDKSAPTLEKIHNKYYLRFSFTETVILSDTPIAEQIICAVDLGINTDAVCSIMKADGTILARKFIDFTSDKDRMIHAMNRTRRKQSKYGPRSATSLWAYVKRLNNNRAKKTASAIVEFAAQNSVDVIVMEHLDFKCCKKRGSKAQKLSMWNHGAIRKCVEQKAHLRGIRIATIYAWKTSALAFDGSGSVARDDNNHALATFTTGKQYNCDLSASYNIGARYFIRELLKSLSATEESRVKAKVPDVGRRTSCTLSTLRTLVKELAAA

SEQ ID NO: 32165 - protein, 420 aa, unknown
  TnpB Polypeptide
MKLTGDLKALETSIGIYRKALRMLIPLINEHWESLSEYEFANQKCNRIEKWIHNTKSNQAIYDFDEQFPKLPTYLRRSVTATALGIVSSYRSNLANWEKEPKGQAPQLSLNHYAYPAYYKNNLFRNFDPIKQIIELKVFKNGDWVYEIYKLKTSDCRYYLKHLIGKKQNTPIIQKKGRRFYAAFSYEENVQLVSEESISKICAVDLGLNTDATCSIMDKDGTVYARKFISFSKEHDQLHTQLGRIKRNQKRGSRHNKTVKSIFDFGKEHGVDVFVLEYLDFKGKKAVKRAHFWRYKRIYKVLTQRAHQYGLRISRVNARYTSQLAFDGSGWAKRGSEIVPGTPYSTIQFTSGKFYNADLNASYNIGARYFIRNILKTITVTQRLALEAKVPQVTKRSTCTLSDLINLRSELVVLTAKTQA

SEQ ID NO: 32166 - protein, 520 aa, Desulfotomaculum sp.
  misc_feature (481)..(492): Xaa can be any naturally occurring amino acid
MKKTYLSNRIYKKDNFNISQVCLISNALIKFNQAKHKAYKLFLAEKNHKVKHNPSIHLKIKELFNFNDYWANSVVKEAKAQVSSQKELQKMYTAGVENQIRTKKKRVKELNNKIKHLEELLALIIKGRFKTWRGSDITKHKSGIISVDFRKKSLVYFNVYDFEHQYLCPEIKNLKNRVKLIEFSLTRLEEKLKKLQDNFLKGCVFGTKDLFKKQFTVEEYQNNHEAWLEEWYKARYSSLRISGRLDAKYGNFVFKYDVKTNILTFDLPDGTAVNIPVIFRYGQEEVDAAFIFQNERRKPIAWIIEDHEDYYIFKITVDLPGNPYVNYYKGNGVIGVDMNFDHAALAETNHCGNLIDWSSNDYNIEGKMSGQIIKILEQSAIDIVDIAKIKKKPIVIEDLDTTDSKFRLKYGSKKRNRKISLFAYRILTNAIYARANKEGVAVFKIKPAYTSIIGKLKYMAQKGISIHTAAALVIARRGMRXXXXXXXXXXXXAPLVALELSPGTGEERKNSLPVPIRQRV

SEQ ID NO: 32167 - protein, 422 aa, Halobacteriales sp.
MKRTNTFVVRPCSEQDKRLLREVLDASASLWNELTYERRQQYFDGESVWNTADYRKRYVGVLGSATAQQLIRKSKSAWESFFSLKEKGKQCSPPGYWGNEGDGRELRTYVRNDQYTLETGDRSRLEIPVGKELKAKYGLGHTERLRLEVAGVPKWDGKQGRLELYYDEASDQFRAFQPVTVDNSRQDSPLADETAALDIGANNIVACTTTTGQQYLYEGRDLFERFRETTREIARLQSELREGRYFSKRIRRLYRRRTRRRDHAMDALARDLIERLYEEGISTVYVGDLTDVLETHWSVRTNQKTHNFWAFRAFIDRLAWTAEEFGIAVEVRPEAWTSQTCPRCGSTEDTTRHQDTLTCSCGFEGHADLTASETFLRRQTDVPRPMARPVRFEWDDHDWSGTPHPHESPKEARTDRSILRPA

SEQ ID NO: 32168 - protein, 376 aa, Clostridium sp.
VIKSIKIRLKPTKEQEILMFKSVGVARFAYNWGLAKWEEMYKKGLKPSKAKIRKEFNNSVKKSDDFKWLYEVSGQITSQAFTDLEYAYKNFFNKTSDKPKFKTKKKSKKSFYVRYDALKFKDAKVNIEKIGKVKYSSNYNIPQLDNYVNPRCHFDGKYWYLTFGFEHSENKAKLDYNLSIGIDLGIKELAYVSCFNKPIKNINKSVKVKKLKKRLIRLQKQVSRKYEANKSGDRYNKTSNIIKLEKQIKLLHRKLNNIRNNHLHQTTKMIVKLNPYRIVMEDLNVTGMMKNKHLSKAIAEQKFYEFIRQIKYKCEFNNIEFLQVDRFYPSSKTCSSCSGIKQDLKLKDRIYHCDKCGLTMDRDKNASINLANYKIV

SEQ ID NO: 32169 - protein, 400 aa, Clostridium sp.
MKMIKGIKVMLVPNNKQRTTLFQYAGAKRFAYNWALARQQENYKNGGKFISDNDLRKEFTQLKKLEEYQWLNSVSNNVTKQAIKDCCMAFKRFFKDQAKYPKFKSRKHDEPKFYQDNIKIQFTGTHVKFEGFTDSKKKNKQQINWVRLAEHERIPHDKNIKYINPRVSFDGLNWFVSVGVECEDSLETPVNQGLGVDLGIKDLAICSDDNTYKTINKTKKVKQLKKRLKRQQRQVSRKYDNLKLDKVYKKGERPKKTKNIIKLERKINKTHKRLNGIRHNYLHQTTSEIINRKPMFVVLEDLNVSGMLKNKHLSKAIQEQCFYEFYRQMQYKCLWNNIEFIEADRFYASSKTCSECGAKNKKLQLSDREWACSECGVVHDRDKNAAINLMKYGQSIVTAL

SEQ ID NO: 32170 - protein, 543 aa, Eubacterium sp.
MARARRRKQTAFQTDVTKSVFLYGEPNKEKLSLLIEAQARFLSLVNEYIQLLAKTEGFTLQLVKNDKKDSGIRKLEKQHRKPDVNSAASQNAFDMAVTRLSARLDAIRIEMLSENATVFTRSKVLFAMSIEEKGQKEMEDAIAALSKKEGDFYDTCAAAIRAMDEAAFASAMREFHDSYTMCSIGYKIPELSSVEIPLDSRLMKILPSENIKAPYVLIVSDPFKKRDIFTIPLNTSKHSRHKIRSRKKQMAGAVSLSVWKGKVRVAWAYTQKMSQPKTAEINGVDVGVTDALYVSNGERYGSMQPVLDLYKDIVEPAFAGLSDLRNKKRKIRHFLRTHPDIPEDGRRSLIKKMDRLDHMIQTMQAPYRKRRHYLNDLKKMIADTVHGYIHALAPDTLTVLELLDIKEFDKSRKANGMLSTFARGELQKRLMQELNWHGFDFMGVDPAYTSQVCPVCGNLDKENRNGKTFHCTCCGHKDDADHNASVNIRARAMDKELLALCEKYKYSQKLRHEKIREYYQEKKEGYKQQNPSEAAHNDLHRLA

SEQ ID NO: 32171 - protein, 335 aa, Nostoc sp.
VFHLTYEFKLKPTRVQIAIFEDWLEQCRLVYNYALAERKDWIKSRSCRINACSLHSEYIIPADTPRPTYFNQSVRLTQARKKYPKLKKVSAQVLQQTLLRLENAFVAMWEQKHGFPRFKKPGKMRSFVFPQLKGNLIQKRRIKLPKIGWIKFHQSREIPDSGVVKQARIVKRASGWYVLLIMQWDVNVPQPIPQGKAIGIDVGLTSFIATSNGLTIKRPRFFVDAQSKLKLLQQRVCKKRIGSNNWLKAQKKVAKFHEYIARCRKDWHSKLSHQICNDVGMVFVEDLNLVGLSRSILGKHCLDAGFGQFFKILQQTCFKRGVYFQKVNSYKLIGI

SEQ ID NO: 32172 - protein, 231 aa, unknown
  TnpB Polypeptide
MEYSYKFRLYPNREQEKQILRTLGCCRFVFNHYLAKRKEVYAQDGKTLNYYDCAGDMTQLKKSLAWLREVDATALQSSLRDLDTAFQNFFRRVKQGEKPGYPRFKSKHNHRQSYKSKCVGTNIKILDHAVQLPKLGHVKCHISKEVKGRILSATVSQNASGKYFVALCCTDVEIAPLPSTGAVIGLDMGLKSFTVTSDGLEYPNHKFLTKSLRKLARLQRQRGVNAGRKQG

SEQ ID NO: 32173 - protein, 129 aa, unknown
  TnpB Polypeptide
LQEHISNQRQDTLHKLSTQLVRDYDLIAIEDLAPKNMVKNHSLARSISDASWGEFRRQLEYKAAWYGKQMVTIDRFFPSSQLCSVCGAQWPGTKDLSVREWVCPSCGAVHDRDTNAAKNILNEGLRLLA

SEQ ID NO: 32174 - protein, 428 aa, unknown
  TnpB Polypeptide
MRLAFKFKPKFNDKQLEIIKELSWHTTKLYNIVNYEVRNNENIKPIYTQLEKQFKSNWHNDFFHSHNRQQALKQLAQDWKSYFGSIKDYKKNPSKYKGQPRPPKFKNMDKNPNEIIFTNLATRVRDNHLLLSLAKAIKSEFDVKSLKFELPLAVQSIINLETPSMSNGHFVGNTLQQVRIKQDKISKEWYLLIIYKVEEVKENTNSNIMSIDLGLDNLATLTFKDDTKSYIINGKTIKSKNAYFNKAIAKLQSIRMKQLGISKVKDTNQIRNLRLKRRNYVKDYLHKASRKIIDLAIQHQVSNIIIGDLKNIKQGNSLKSFVQIPMQRLVELIEYKAELEGIKVVKINESYTSGCSSIDLEKLNKSNYDKSRRIARGLFKTGNKLINADVNGSLNIMRKYLKDKCIPKMLKQIRDNGLVASPKRIRIS

SEQ ID NO: 32175 - protein, 237 aa, Enterococcus sp.
VKLPKLGLVTFAKSRELKGRILHAIIRKNSSGNYYVSLLCKEEISELPKMNAAIGIDLGITDFAILSDGQKIANNRFTSKMAKKLNREQRKLSRRALLAKKKGLSLLEAKNYQKQKRKVARLHEKVKNQRNDFLNKLSTEIIKNHDIICMEDLHTKGMLRNHKLAKSISDVSWSSFVTKLQYKADWYGREIIKIDQWFPSSQLCSECGHKDGKKSLDIREWTCPICLTETSMQVSIF

SEQ ID NO: 32176 - protein, 380 aa, Enterococcus sp.
MKRLKAYKFRLYPTEEQEIYFAKSFGCVRKVYNLMLDDRMKTYEETKNDPSKKMSFPTPAKYKKDFPFLKEVDSLALANAQLNLDKAYKNFFRDKTVGFPQFKSKKNPVQSYTTNNQNGTIALIDNKLIKIPKLKSLVRIKLHRQPQGLIKSATISRHASGKYYVSILCEEEIIEHPKTNSAIGIDLGITDFAILSDGQKIDNNKFTSKMAKKLKREQRKLSRRALLAKKKGINLFEAKNYQKQKRKVARLHEKVMNQRTDFLNKLSTEIIKNHDIICIEDLNIKGMLRNHKLAKSISDVSWSKFVTKLQYKADWYGREIIKIDKWFPSSQICSECGHTDGKKSLDIREWTCPICHTQHDRDINASINILTEGLRIQALA

SEQ ID NO: 32177 - protein, 416 aa, unknown
  TnpB Polypeptide
MYLTVKQQIKHLSKEDYKSIKELCHIAKNLTNEAIYNVRQYYFTEDKFLKYEKNYTLLKSSPNYKELNSNIAQQILKEVDGSFKSFFGLIKLAKQGKYSFKDCKLPRYLPKDGYTTLVIGFVRLNGNKLILPFSNNFKKTHKVVEITIPPVLLDKKVKEIRILPKANARYFEIQYIYETECIQRNLNTQNALALDLGVNNLVTAVSSTGKSFIVDGKRLKSINQWFNKENARLQSIKDKQHFGKKPTNRQKAIARDCNNKVNDYMNKAARMIIDYCINNDIGTLIAGYNVTFQRNSHIGKQNNQNFVNIPYGRLRDKLAYMCELNGITYVEQEESYTSKASFWDKDNIPVYNNDNPKEYEFSGNRVHRGLYETANGKTFNADINGALNIMRKSSVVDMNILYGRGEVDTPIRIRIA

SEQ ID NO: 32178 - protein, 464 aa, unknown
  TnpB Polypeptide
MKEHKNLVTMKIKYTADEQSLECITSMLRKFNTLLRSTYNKIVKNPTCSAKELNSFQHELNNIDGCKSHLKNSAIHRSRELYSINRDFNPQKVVFGGRENFINRCQNKISYEKFAERRVFPIYSVGQCNCHGNRLFKIVDSHTIVFKPDRKHHIQLTLKNVGKNREEQLLKLIELQKANGIPITYELDLEYVYITFDNSLFENHKYSVRTDRTMQIDVNPNYIGWSVTDWKQDYDFHLVASGMFSLKSLNDYENRLSVNSDSKESKYVTNKRKHEVIYIAKELLKLCKHYHCEVFAMEELSIKTSSINKGKKLNRLINSQWNRKLLFQQIRKHILSSSTTLVEVQPQYSSIVGNLVNRRLELPDPVLSSIEIGRRGHEFSCQYIFKRQQQEKIVVLPKLETVKKSIIQSLEEFGIDAPEFNDWDELWSVVKKSKVKYRFPLLSKYGSSPFSKNYKRRYLIVYEF

SEQ ID NO: 32179 - protein, 521 aa, unknown
  TnpB Polypeptide
MQRTIKIRLMPTDKKRVEILSTMKVYTEVVNRFINKYNGYDYLDQLNYKHLYNPADKDTRIASNYSTNALAFAVTRLNARLDLIKKNCKARIYKHIKDKKEQHYLFYILKQQTYIKLLMQQKQFIVDKQFDILRIEYLNKYLHRILRHEFKNNNVPELKKQILRTDVVTAKIEPFKDSKKFSHIIKLSTINKGSRVIIPFNPNKYVQQYFNKKKGCYTIFLDEHNNPQLHIPIEVEVKVAVNNNTQELGIDKGFRTLIVDSNHKFYGEKWNKVEIALDNKFQKKQKQRNKLYALRTELYKRWITTKDKVILKKIKRIEKFNLGKDKFNTNRIKTKDTIKNTVNQSVNQLVKENPKLKILALEKLNRFNKDKKYSSRSIRLMNNWKRGFLEKKLTFISQLNSIELAYQNPAYTSQECLNCGYPDRDNRHNEEFICIRCGFSEHADVVGAKNILKRKYDTEIGLYTPYKQVKTILLKRYSVGDIKPPRLETLNSEKSCESYKQSIQEHKSELATVGGCDSAQS

SEQ ID NO: 32180 - protein, 483 aa, unknown
  TnpB Polypeptide
VRVTQAYRFALDPSPAQERKLASHCGARRFAYNWGLGLVKQRLDQRDRIRRAALSEQLADSEVEALARTVVVPWTLAALRREWNAAKGEVAPWWAENSKEAASSGLDALARALEAWSDSRHGKRQGPRVGFPRFKRRGRGRQSYRYTTGSFGISGRARVQLPRVGHVRTHEPTTKLVGRIEDGRARVLSSTVCRENGRWFCSICCEIQRTDEPARSEDVVGVDVGIKHLAVLSTGELIANPRALSVAQRRLRRYQRKLDRQRRANNPGCYDDRGRAINGRRPIQHSHRQARTERRVARLHARARNVRQDAIHKLTGGLAAQHQTVVVEKLNARGLCRGGNRGLRRALHDASLAEIRRQLAYKTLWRGGTLIEAPSLYPSSKTCSGCGTAKAKLPLSERTYRCEHCGLILDRDLNAARNLAAIAESVAPSGGETINARSRPPTRERTQNPCQTRPFSRAVGRPRSPHHQPVGQTGTAPEQSEAA

SEQ ID NO: 32181 - protein, 438 aa, Veillonellaceae sp.
MFCLFYDTIYRKEVNVKMQRAVKIRLLPTKEQEILFWKSAGTARWAYNYFLEANEKAYKEWLENGKVGKKNVSEGEVRKYINNVLKKTTHTWLKEVGSNVMKQGVKDANIALQRYIKGVSGKPKFKSRHKSKISFYVNYESFARRPNGFQGERIGYVKTALPLPRIPKGKKYANPHISFDGKHWYLSVGYEIQQKDVELTDESLGIDLGVKSLAIVSNEDATEIRFYKNINKSAEVRRLEKKLRREQCKASRRMEANIKGRDKNHRPIWIRPLRECKNLDKQNRKIQLIHKRLTDIRNNYLHQTTSEIVKTKPSQIVMEDLNVKGMMKNKHLSEAIAKQKFYEFKRQIQYKAEMYGIKVIEAGRFYASSKICSCCGHIKKDLKLSDRTYICPVCGARLDRDLNAAINLANYDEAMPHRNAEKNILPTAKFEQRRYKTA

SEQ ID NO: 32182 - protein, 414 aa, Sporolactobacillus sp.
MAKLKYHYGLKLRIYPSDKQKQIIKINSDASRFVYNERVAIDKEIYQLKLVKIPIDTVLDRIHQLTKRKNAREMSNHYPFLNDDHIDSLTKANAIQNYNRAWKMFRQVHKAGTPKFRKKSYIQKYQTNCQYPKQDHACLTNGTVKFVDKKHVTLPKLGRLRVSGSHKRILDRQTETRIGTVTISKDATDRYFLSMQLASDTPFVAVPEKTHEQIGIDLNTDNFLTDSHGIAVANPKYYRTIKNKLAKAQRKLSRKQNRAKKEHRPLGQSKNYQKQRLLVAQIHKRVSEQRKNFLQKLSTTLIKNHDLVVAEELRSKNLLKNHALALSISDVGWRSFLGMLKYKADMYGKTFITVNPKNTTQTCNECGFVMGTKGTDKLTLKDREWTCPHCHKHHSRDWNAAKNILDKGLAQLAN

SEQ ID NO: 32183 - protein, 416 aa, Symploca sp.
MIQRAYRYRFYPTTEQENLLRRTLGCVRLVYNKALSDRIEAWYERQERIDYKQSSRLLTQWKKQEDLKFLNEVSCVPLQQCLRHLQKAFTNFWAKTTKYPRFKKKRNGGSAEFTKSAFQWKDGQVYLAKCQQPLPIRWSRALPEGTTPSTVTVRLDASGRWFVCLLVDDQTIVTLPPTDKQVGIDVGVSSLISTSDGEKITNPKHFHRLYQKLRRVQKALSRKTKGSKNRYKASVKVARIHAQIKDTRTDFLHKLTTRLVQENSLIAVEDLGVRNMVKNRKLARSISDAAWGEFFRQLEYKCEWYGRKLVKIDRFFPSSKRCNNCGFVVERLPLNIRSWDCPECGTKGIDRDINAGKNILAAGLAVRQRGLGGFPHERLPNPFGVSVCGANIRPDNHSVKGQLRKTPRGKKQKPKL

SEQ ID NO: 32184 - protein, 231 aa, Symploca sp.
MQHYAIKVRLYPTIKQQQILVQHFGCARWWWNYGLNLCLETYQSTGKGLTRAALNEFLPKLKKQQETAWLKEFYSQVLQANTLHLMAAYKNFFYGRAKYPRFKAKKNRQSIPYPQSIKVVDNSLKLPGSVGVVKAKLHRPMEGVIKTVAVSMTPSGKYYTTILTEREGDNPTAKNEGKVAGIDLGLKDFTIVPDVRKTSKFANAKHLSKHERNLKRKQQKLARKIKGSNSR

SEQ ID NO: 32185 - protein, 430 aa, Symploca sp.
LEARRVTFRLHPTKSQTKKLHYWRRMHKDLYKAALYNRKTQYQRFNHSVDYLEQQNCLPAFKQVHPEYKELGSHALQATLKRVDFAFNRFFKGLAKYPKFKSGRLYRGWTYPCTSGWKTHTTGDHGFLELSNLGEIRMRGRARAWGRPTTCTILWKNHKWYASITVNCDPVRETSTGAIGLDFGCKTAVAMSNGTKVENPRFLAKASEKVQKASLRLRRKQTPNRKKKIKASKRWKQAKKLVSKLSSKVANQRDDWQHKVATQIVSSNSLVATEELNLKGMTRKAKKGSKRKRQKTGLNRSLLDVGIGAFKQKVKYKLEEAGGVYIEVKTTKVKPTQRCPKCWKTEPKDLSQRVHECKHCGFVEDRDVAVAMVCVLHAQGFGTNLSNRGASSSTPQTRKHTGAMAQLGAKKRQKLLITDSGGAETPLSTK

SEQ ID NO: 32186 - protein, 397 aa, Microcoleus sp.
MIVLEFKLKGKAEQYQVIDEMIRTAQFVRNKTLRYWMDNQGIKLVDLYKQCAVMAKEFEWAGKLNSMARQASAERAIFAIQRFFANCKAKQPGKKGYPQFKKHTRSVEYKTSGWALSADKRCLTLKDGFAAGKFKLIGSRELHFYAPNEIKRIRIVRRTDGYYAQFCINVERKEELVLTGKAIGIDVGLNHFYTDSDGETVANPRYLRKSEKALKRLQRRVSRKKKGSGNRKKAINKLGRKHLKVTRQRKDFAIKTALCAVKSNDFVAYEELQVKNMVKNHKLAKSISDAAWSQFAQWLEYFGKVYGKTVIAVNPQYTSQQCSNCGNLVKKKLSTRTHICNCGTTLDRDHNAGINIVRKGLKQAEISLNTAGHAEINAWGQNNLYSLVVTPTSKLTE

SEQ ID NO: 32187 - protein, 543 aa, Polynucleobacter sp.
MLNSSIFTYQTRLQNLSIEEIATLDKYCALQSKIERKLYAKIKTNPSNRNEIKRQLIEQFGISGRMFNSIAMTLDGKTKSIKELLPGYIDKAKSDIAKKEMQISKVLAKKSLNKKQLFSLHQMQRRLAILHLRLDRLTKQKEAKDYAICFGTRKLFHAQYNLEAHGYASHQEWQTAWRAERSKQFFVVGSKDESAGNMLCQLSEQGDTLTMKLRLPDSLNLGKHLNISKIDFQYGKDQIQKALRSSHRKQREDGKGTVRDGTALSYRFVKDKKGYRLFVSVDVTAPELLTNRNLGAIGIDLNADHLAVSEIDYRGNWIFSQRHDLPILGKTSHQASAMIGDEVAKMIELATMSCKPIVIEKLDFQKKKRDFNQYNPTGARMLSSLAYNKILQTIKAAAFRAGVEVIEVNPAYTSVIGQVNYAQVYGLSIHLASAIAIARRGLGFSEKLASRNGLVPIRNGSHLTFSLPVRNRKKHVWNHWQAIRKSVTAAHKAHARLGLSKTNPKPLRSIRPLGSSYCVLGTQFPYASRSLLLDGDIDSTIPY

SEQ ID NO: 32188 - protein, 215 aa, unknown
  TnpB Polypeptide
LPSPIKAFRFEDVPHSCRKCCIVGIDVGLIDFYVASDNTRITAPRHLRKAECKLKSAQRRVSRRKKGSNRRKKAIQKLGKQHKKVADTRKDFHFKAANNLLKKYDVIAVEKLNIKGLAKTRLAKSINDAGWGQFISILVVKAENAGLKVVAINPNGTSQECSSCGQKVKKPLSQRMHNCPNCNISLCRDLNASINIKNRGTHDLKAQIMSSMRSL

SEQ ID NO: 32189 - protein, 395 aa, unknown
  TnpB Polypeptide
MHKTFSFKLYRSEKNRCLHRQIEIAASIWNHCIALHRRYYRLYHKTLNKHRLQRHLTKLKHRPRFRYWNELGSQAVQDITDRIDRAYTLFFRNRKTGIKPAPPGFRPRRKYRSFTLKQAGWALQGENRLRVERQAFRFSKSREIEGTVKTVTLKRDSLGDLYVFFCCEVEDRPNTRVMSGQIAGADFGLKDFLRFSDGSREVSPLFYREARKTIRGAAKKLSSKQKGSNNRRKARTALARIHKRIADKRRDHHFKLARELTLRYDYLFLEDLNLKGMQRLWGRKIGDLGFALFVSILHHQASKAGSVVHHVGRWFPSSKLCSACGTVNEALNLKDRHWRCVCGAVHDRDHNAALNILLRGGVLSRVRRRKASRGGCRLTPESPSFGEGSTSMGIL

SEQ ID NO: 32190 - protein, 407 aa, Streptomyces sp.
VKIVTQVKLIPEADQASALSATLRMVNDLANWVSDVAFARDVPREYELRKHTYAHLKASGLGAQAAQHVIKKVRDAYTTLHANLKAGNLGKKGSKRRRKAESKPITFRPEAAQPYDDRCLSWQYDRQTVSIWTTAGRLKNVRFVCSADALKVLQQYRRGESDLIERGGVFYLIATCEVPEAETYEPDGFIGVDLGIVNIATTSTGYQAAGRGLNRYRKRQLALRAKLQKKRTKSAKRRLNGRSRREQRHVKNTNHIIAKTIVTEAERTSAGLSLEELKGIRQRVRLRKPQRVALHSWAFAQLGDFIVTRHAGPVFRSCSSTPPTPHGSARSADTSTGSTAPPKPSSHAGRAASLRTPTGTLPTSSPAEARTRGPRGVSHASLPPHNGCLDGGDHPAASWALPPSPVL

SEQ ID NO: 32191 - protein, 402 aa, Oscillatoria sp.
MLVFEAKLSGTDEQYKRLDEAIRTARFVRNSCLRYWMDNKGEKVGRYQLNIYCAVLAKEFPWARKLNSMARQASAERAWAAIARFYENCKKKIPGKKGFPKFKKYKTRDSVEYKTSGWKLSEDRRTITFTDGFQAGSFKMWGNRDLHFYQLKQIKRVRVVRRADGYYVQFCIDQERLEKREPTRTVIGLDVGLNHFYTDSDGQTVENPRHLRKSEKALKRLQRRFSKTQKGSKNRQKARNRLARKHLKVSRQRKDFAVKTALCVVRSNDLVAYEDLRVQNMVKNHNLAKSISDAAWSTFRQWLEYFGKVFGVVTVAVSPQYTSQNCSNCGEKVKKSLSTRTHRCPHCGFVADRDHNAAINILKLGLSTVGHTGTHASGDINLCLGGETPQGKSSRGKRKPHQ

SEQ ID NO: 32192 - protein, 442 aa, unknown
  TnpB Polypeptide
MQIISSYGVELRKQNIPIRQTLEIYRSAVSYLIGIYVQVWEELAEIPDAKRRFNAAEHLVHTTKKNHACFDFDIRFPKMPSYLRRSAIQHALGTVSSYKTRLDLWEKTDGKSGKPKLVYENHAMPVFYRDVMYREGAEGKDEAYLKLYDGHDWKWSCVRLDHTDMEYLRKCWSGKKASAPTLEKRHQKYFLRFSYKEEVTLTKTPVKEQIICSVDLGINTDAVCTIMRADGTVLGRRFIDHPSEKDRMYRTLGRIRRSQREHGSAQTQGRWAYTKRLNTELGKKIAGAIVRYAEENHADVIVFEYLEMQGKISGKKKQKLHLWRKRDIQKCCEHQAHRKGMRVSRICAWNTSRLAYDGSGAVTRDWENHSLCTFQTGKRYNCDLSASYNIGARYFIRELLKPLPATERSLLEAKVPPVKRRTSCVYADLRKLHSEMEFLKAA

SEQ ID NO: 32193 - protein, 560 aa, Rhodococcus sp.
MGHSAITRFWCAGRARWCRRPCSVSPSRVPRWRTSASIRTDGPIGYQNVRQCSAVHGGVKAHAGGPPGPSVPRRDDPAARCTAAAPRSGHRRPNQRSTTRTTIAVPASSAAPVQGTSAAIGATTRPRGSSPAFRHGNRRWEVHQQVHVVRLTVELDEFALDVDAHVPHDRLPPFDGGITEICRSPMTRWRGAVAIPVPRLSDARPAEHAGPGVGCARVVFNDAVAARDAARKDVQPYPTDAELSKALTAAKTTPERAWLSDVSAVVLQQALADTNTAYRNFFASITGAHRGRKVGAPRFRSRRDHRQSIRFTRNARFAITEGRKLRLPKIGEVKVAWSRELPADPSSVTIIMDAAGRYFASFVVDTTDEPLPELDTEIGIDLGLSTFAVCSDGAIIASPKFFRSAERRLRTAQQNLSRKQKGSKNRAKARRKVARAHARVADTRRDCAHQHSTTLIRENQAIFVEDLCVTGLARTRLTKSVHDAGWGMFTRMLEEMPPGTGGRSTRSTGGSRRRRCARPVDVSTGRNRCRCGNGRVRAGPCTIGMSIPRRIFSPPDGRRG

SEQ ID NO: 32194 - protein, 369 aa, Streptomyces sp.
VRKVYNMALAARTEAWARQERINYNATSAMLTAWKKTEELSYLGEVSSVPLQQALRHLQVAFTNFFGKRAKYPRFKSKKKSRKSAEYTTSAFRYRDGELTLAKMTEPLAIVWSRPLPEGATPSTVTVSQDSAGRWFVSLLCEDPGITPLPATGTAVGIDVGLDHLLTLSTGEKITNPRHERRDRVRLATAQRALARKAKGEGANRAKARRRVARIHARIADRRRDHLHKLTTRLVRENQTLVIEDLTVRSMVKNRSLARAISDAAWAEFRSMLEYKAAWYGREVIAVDRFFPSSKLCSVCGTLLTEMLLKVRTWRCDSCGTVHDRDVNAAKNLLAAGLAVSVCRAGVRPQRRTPGGQSATKQKPSQREP

SEQ ID NO: 32195 - protein, 252 aa, Campylobacter sp.
MNTFFKMRYHRDLPNTYKFNQITIIKNHNKYYLAFSIIYDESNISLISSKDFDIKKAVDIDLNINEITLSSGELIATNSKLLSRAEYDLAFKRLQRKQSRRILKTKKEKTKLSHNFKKTQLKLNKIYEKSSNIKKDSYHKITSKLIQEFDLLAVEDLQIKNMSKRAKLKNIKAKSGLNKSILNISFYQFSQYLEYKAKHNGKFFIKVNPQYTSKTCSVCGNIKKILCLKIECIFVKNVATLYIEILMLQIIS

SEQ ID NO: 32196 - protein, 330 aa, unknown
  TnpB Polypeptide
MARYKTVKQQLFQKPYKYKDQDGNWKYIPKTLEWLWKPIFFKRPQADLVRNRDYSFVDNGQILSINTLGKRTRCTFESKPFSEYLDGSWNLGTATLVELKGRWYLHIPVTKAVEGFQKENVRHVVGIDRGLRFLTVSYDEQGNTEFVSGRKIAVKRHKFLKVRQQLQSKGTKSAKRRLKALSGRENRWMSDVNHRISKTLVTKYGKDTLFVLEDLTGVSFEETNLSKTAKQNYDLRSWTFYQLEQYLTYKAHENHSEVLKVSAKYTSQRCPKCATIRKENRKPHQHLYRCQCGYQSNDDRIGAMNIQYLGTQWLSGNNHPRYERTTTASE

SEQ ID NO: 32197 - protein, 446 aa, Deinococcus sp.
MRVTISATLKLRHNAQQKAALDAISLAYRDALNYASQRAFELDKTSSAPRLHKAVYADLRAQFGLGAQLACTVERQVAATYQTQWTKLKQNLKAREASHTKRRYKGLDAAPKFVSRTLEYQHGRDYSWKKGGKVSISTLDGRLVLEYEGYQKHLDCIARGCETGAAKLYHQKSKKRYYLIVAVHIDLPDPQPVGHSNVVGVDVGQRYHFVATDKDGKSLFEKGAQVRQQKDHFARTKKALQRKGTRSATRRLVMLSGRERRFIADRNHTLAKMLLTRFPNSIFGLEDLSSIRERIERHADPKVSKKVKRTKRHQSQWSFAELQTMLAYKAPLYGSLAVRVDANYTSQACYKCGHVSRGNRPNAGLEFKCEACGHRGHADRVASVNIALRTLLVRQDWMSTGALSMRPDVSDGEASRPHSGCRSAQEVKAARLRRYAELRWNPDTSA

SEQ ID NO: 32198 - protein, 366 aa, Nocardia sp.
MYRSRGAWINYAEQAAQLPEAKSEHDWLKSVPAHCLQQTLMDLDRACRTQGTWKVRWRSRRRWAPSFRFPEGSKIVVERWGRKAGRVKLPKLGWVRFRWSRPLGGKIRSATVRRDGDRWMVSFLIDDGQARPRCHGRPGSAVGVDRGVSVAVACSDGATLNGSFGADGAVARLRRLQKKLSRQKVNSHNRADTVGRIRRLRRRERDQRKDFAAKVAHRIATANATVVLEDLKIRSMTRSAKGSVNAPGTNVRQKAGLNRAILAKGWYQLQLALEAKARYTGSTIVKVPAAFTSQACSACGAVDARSRKSQARFVCTRCDMTLNADINAARNILAAGLAVTACGDLDNGRSGKQEPAGNREELLPPP

SEQ ID NO: 32199 - protein, 522 aa, Alteromonas sp.
MRTYQTRISIPPESEKTLSDYASLYGKVERTLFSETIDKSIKPESVKSNYQRRFGLTARQFNAICRNLKGKVASIKELRKSHIKDRADKIKRLEKTVARIEKRINNIRDARRNGHQGVTDKKYVSLTFALHQKKRRLHALTLKQQRHIEEQKSGKVRLCFGSSKLFNAQFLLSKNSYDSHNQWKSDWQVSRNNQFYVLGSKDETAGCQGCVIRENDECFSLRLRLPDSLVSDNKYIVIPIALVYGAEHIREALTNKQAISYRFLKDNKGWRVFISTEVIQKENVTSTQAGAIGVDINEHHLAVTETDRCGNPVSSLSIPLSTYGKSASQSKAIIGDAVKALMAFAEDKGKPVVVEQLDFRKKKSSLENENAKRARQLSSFAYNQILSVIKARCVDNGIEYIEVNPAYTSVIGKCKFMTRYGLSSHQAAACAIARRALKFSERPNRRDHLASILPVRNRKEHVWSFWRKVARDKAVSESLSLLSKTQSSRLRTPLTVMQLRNDMAGRACHVSQKHCSFGEVLA

SEQ ID NO: 32200 - protein, 410 aa, Erysipelotrichaceae sp.
MKQTVSYSIKLKMTKASAEVLKQTCGVYRSAVAYIINFLPPHWDSVKAIDYSNAKMMYVESLIHTVGGQKAVCDFDQKFYKLPSYMRRAAISAAIGMYSSWKSNHDNWEKAGCEGAEPVMGTVNNICPAFFRGNTFRMISDDAAMVKVFAHNDWVWMPVRMNHSDLKYIRRKISEGWACKAPTVEKRFGHYEMRFAMQRANELNETPVLDQKICAVDLGITTDATCCIMDSHGTVLARKFINCGREKDLTEKMLQRVKEFQRLHGSHDSGVLWHLARNRNLNHAHLIAHRIIELAREYQCDVIVFEHLDTKGKKHGSKKQKLAMWNHQVVQNTAESLAHQYGIRVSHICTWNTSQLAYDGSGKVLRGRKAFRNTPYDMCLFRTGKMYNCDLNASYNIGAILVPATFCGQC

SEQ ID NO: 32201 - protein, 405 aa, Idiomarina sp.
MALRKYTYKLYPKQKQSEALLEQLRLHQQLYNAALQERIDAYRKCGKTITYNEQQASLTTIRSEMPEYKALPCTSKRMTLRRLDKAFKAFFRRIKNGESPGFPRFKSINRFSSFELLEPRFTHTDSGKHGRLFVAGVGHIKARGQCRINGKIKTSQIQYKHGHWWLSLAVEGDAVRRASASRACAIDWGVAHLLTIVEDDGRIEQIPNQRYYQSGKEKQERLQRSVSAKKRGSNGWKKACQKLSAFKRKQANQRKDAQHKLSNMIAGRYALIAMESLQIKNMSRSSRGTLEAPGKNVKQKSGLNREILDTAPASLISMIRYKAEEAGNEFVETPTKKLKPSQRCPKCLHTTKENRKSQADFTCVACDYRENADVVSGINSLSWALGLGQERVPEVYTSKPLLSVA

SEQ ID NO: 32202 - protein, 338 aa, Parabacteroides sp.
MLNLKTEVMVYETNCTEITQDKPRFKSRRDRQSFLCPQHCRVDFEKGTLTIPKAKDISAVPHRKFKGMVKTVTISMTPSGKYFASVLVDTTIQELPASAIQGNTTLGIDLGIKSLAVCSDGRTFDNPKNLQRSLDRLKLLQKRLSRKQKGSANRNEARIRVARLQERIANCREDNLHKITHALTHDSQVRTLCMEDLNVKGMQHNHHLAQAVGDASFGIFLMLLEYKCRWYGVNLIKIDRFVPSSKTCGKCGYVYKGLKLNERNWTCPECGTHHDRDFNAACNIKEFGLKALPTERGKVKPVDCPLVDDRPRVLKSNGRKKQEKRGGIGISEAAKSLV

SEQ ID NO: 32203 - protein, 347 aa, unknown
  TnpB Polypeptide
MEVKRALVIELNRLAKEQEIILGYLTYHAGKLWNQANYLVKNKLAKPDYRDLYNKLKDNSIHLRSLQSRCAQIILDELSRGWNNFFKFLKDPERYKKKGIETVRPPKYVNPQTPHRVVTWDKTGFKIEGSRIRLSLSKGLKEHLLKNFGFSPEYLWIETGYKELEKLKILNVQVVPYKSYGHISYKLVVVYEKEIPEVTLQKDKVLAIDYGISNFATCVIEGNPISYIIDGRGLKTLLRKRLKKIARASTGFLYMVAVFGTTGIQTKIHKYTIDAIKNAKKIIGGKLPIGIGFGVSTPSDVKKYVSLGVDAVIVGSANLKIIENTPSSKLQKRITEYTKKLKRSTRI

SEQ ID NO: 32204 - protein, 248 aa, Streptomyces sp.
VTVSRDAAGRWFVSLLCEDGIAPAPATAATIGLDAGITSLVTLSTGEKVTNPKHERRDRARLARARRELSRTAKDSADREKARRRVGKVHARIADRRRDFLHKLTTRLVRENQTVVIEDLTVRNLLKNGKLARAISDASWTELRSMLEYKCAWYGRELVVTDRWFPGSKLCGTCGAVREKLPLNVREGTCDCGTVHDRDVNAARNILAAGPAAAACGDGVGPQRESSRTGRSSVKQGNQRATAGIPRL

SEQ ID NO: 32205 - protein, 391 aa, Spongiibacter sp.
MRRATKVRLYPTVEQQSLLDRQFGAVRFVYNKALAIMSHRYKIRGQSLRASRDIKPLLAVAKRSRKYGWLKDFDAISLQQACRNLDTAFSNFFDRALPARYPTFKRKHGKQSSYHCTGATNFDADSVTIPKIGRIPAVIHRAIDGDLKSITVSKTRTGKYYASILVEDGQDAPPLIDSLEESQVRGLDVGLSSLGALDTGEKIDNPRHLARASANLRRKQKALTRKKKGSTNRAKARLTVARCHERVANARNDFQHKLSRRLVDENQAIVVETLRIKNMMRNRRLAKAIGDAGWHSLAEKLSYKASRAGKHLVKIDQWFPSSKQCSCCHAVRDTLPLSVRTWKCACGAIRDRDTNAALNQKQQGILMLKAAGHVVTAHGGLRKTGALPAVA

SEQ ID NO: 32206 - protein, 403 aa, unknown
  TnpB Polypeptide
VGTYGILHILWQQYQKIQKNKLEGIFKIRKESEVKSVEKAYKYRIYPNKQQEELIQKTFGCCRFVYNTYLAKRIKLYEESKKSLSYVQCANDMKKLKSELEWLKEVDSTALQSSLKDLDAAYQKFFKEHSGYPKFKSKKTHKFSYKSKCTNGNIQYCDKHIKLPKLGMVKTKNKLVPQGRILNATISQNASGKYFVSLCCTDVDIKPLEKTNNSIGIDLGLKEFCITSNGKMISNHKYLKKSLAKLAKVQRELSRKSKGGSNRNKARIKVARLQEHITNQRKDFLQKLSTDIIRNNDVICLEDLQVSNMMKNHKLAKSIADVSWSEFVRQLEYKADWYGREIIKVDKFYASSQTCNVCGYVNKETKDLSVREWDCPCCNSHHDRDINAAKNILNEGLRLLKVA

SEQ ID NO: 32207 - protein, 405 aa, unknown
  TnpB Polypeptide
MIRLQAFKYEIQPNGQQQRDMRRFAGSCRFVFNKALALQKEHYEQSKKKLGYAELCKELTAWKTQPVTAWLKETHSQVLQQSLKNLERAYKNFFEKRADFPRFKKKGQGDSFRFPQGFKIDQGNSRIFLPKLGWIHYRKSRDLLGTAKNITVSASGGKWFVSIQTEREVEQPVHPATSIVGIDVGITRFATLSDGSHIEPLNTFRKHQQRLARYQRAMSHKQKFSNNWKKAKARVQQIHARIANVRRDFLHKTTTTISKNHAIVCIEELQVRNMSKSAVGSNETPGRNVKAKSGLNKSILDQGWFEFRRQLEYKQAWLGGDVLAVPPRNTSRTCPACGYVSADNRQTQAQFACVECGYAANADLVGAINVLAAGHAVLACGGTAQSGRPMKQEPAEATTQELAHA

SEQ ID NO: 32208 - protein, 563 aa, unknown
  TnpB Polypeptide
VIVEMRTCAQAARVAEATGGCQLAGRPRKDGTVAVSRWVDVGPDFEVHRGAVESVSTLFSLYSGEACGYAGEGELGTPLPTGWTTTAAKFEVQWPAAPEHRSVIRSHFGARRRAFNWALDRVKADMDAANLDPEHVSVAWELGALRKEWNQIKAQVAPWWSENSKECYSSGIADVVTALNNWKSSRSGSRKGKRVGFPKFKSVRKDRPRVRFTTGTMRFDTDRRTIVLPVIGALRSMENTRRVQRHLAAGRARILNMTLSEQWGRLFVSVNYSVRTPNAAAAPKNPSVRAGVDLGLRTLATVSTIDTVTGEQTVTEYPNPAPLRASLRERCRTGRQLSRRIPGSRGAMSAKAKLTRLDRRCVHLRREVTHQLTTELAGTYGHIVIEDLDVAAMKRGMGRRAFRRSVSDAAMGLIRPQLVYKTSRTGATLTVADRWFPSSQIHHGCFQADGSPCRLESKRDAGKIKMDKVLRCPITGEDMDRDINAARNLRDWPDMPVDAQLGRRPRPSAVPETALETAAQTVGTTDRLGSSRKTTRCAGAASSEGKTKAARTRATEEPRKRSA

SEQ ID NO: 32209 - protein, 409 aa, Symploca sp.
MKARYRYRVYPTAGQKMALAKLFGCVRVVWNDALAFCINQYKTGEKKPNNAELQKQFITQAKKTKGREWLSEVSNIPLQQSLNDLEQAYQNFFKSCKGQRKGKSVKPPKFKKRHASSSARFRQGGFQVGQDEVKLAKIGKVKIVWSRPLPAKPSSVTIIKDAAGRYFVSFVVEIASDVLPKTENSVGIDLGIATFATLDNGQKIDAPKPLTHRINRLRRLSKNLSRKTRGSNRYERARKRKAKLQAKLKDTRTDFLHKLSTQIIRENQTIVLEDLNVAGMVKNRKLSRAISDLGWRQFRTYLERKAEKYSREFRVISRWEPTSQTCSCCGFRGGKLDLCVREWTCLNCGTTHDRDINAARNILVAGGHSETQTGRGGKRKTSVKEAVSRVSEADAALASKRQPTESTFS

SEQ ID NO: 32210 - protein, 522 aa, Symploca sp.
MAAFPLSAIQQDNAFSTLMPISEQVIKVPLFAIAEFPVPSNETIFNDKSPICSPSTRKPKLSKTLEADSTSKERVCGTYWTDFCAQISSRLLLPVVTDSRDLDLSLLSTWSSKTVAASWFLTKLYTAQAQNSPRIFSAFSTSSLVECTDSESTVRKSRKTRIYLSPEQRKIVKKWFGISRFVYNRTVEYLQQPETKASWKSIKTAILQSLPDWCKEVPYQIKSIAIKDACKAVNNAKKKFFDGGGISRVRFRSRKTPVQSCYIPKSAVSKKGIYYTILGEVSFREAFPPSFGDCRLVLAYGDYYLSVPREEPRQLAENQGRVVALDPGIRTFMTFFSEDSFGELGAGANLKIQRLCFRLDKVVSRISKAKCRQKKGLKLAASRMRGKIKNLVDELHKKVARFLVDNFDIILLPTFETSQMSKKAKRRIRSKSVRQMLTLSHYKFKQFLKHKAFETGKVVMDVNEAYTSKTVSWTGEIVPNLGGAKVIKSKLTGQMMSRDINGARGIFLRALVDTPSLRECIC

SEQ ID NO: 32211 - protein, 400 aa, Symploca sp.
MEYKAVINTIQETAINEAIRTSQFVRNKVLRYWMDNTRCAASASGYRGVGKKELYRYNTQIRDEFKFVKDLNSHACQASVENVERAIHRFFDNCKKGKPGKKGYPRFKKHSRSVEYKQSGWKLHPTKRRITFTDKKGIGEVKLLGKWDIHTFDKKLIKRVRIVKRADGFYVQFCVKVAHAQSSPPTDAQVGIDVGLEYFYSDSNGNHEPNPRFLRFAEQDIKRSQRNIYKKKKGSTGRRKARGIYARKHLRVTRQRNEHAKRLARNLCLVNAKVVLEDLNVSGLVRNHKLAKSIVDASWYNFRQWLEYFGKKFGREIIAVPPHYTSQECSNCGAKVQKSLSTRTHSCPHCGHVEQRDVNAAKVILSRATTGGHPGSNASGDVSSTLVGRKTCQSKKRRRS

SEQ ID NO: 32212 - protein, 404 aa, Symploca sp.
MMRISYQYRLKPNKEQQKNIDNTLELLRYQYNYQLAQRFDWYEQNRCSLDRCLLICHLPELKDRPNKASQEKSLVQLKKHRPWYKKVHSQVLQSVCDKVDKAFDRWFKGDRNGKKSGRPRFKGVGQYKTFTYKQFKQHHFVDNKITLSKIGEVKVIVHRPIPDGFVIKTVSVTKKANGYYVTLSLDNKEVPTIKPDFDANNIVGIDVGLIDFYVASDNTRIAAPKHLRKAERKLKSAQRKVSRRQKGSHRRLKAIKKLGIQHKKVADTRKDFHFKTAKKLIDKYDIVVVEKLNIKGLAKTRLAKSINVCAAWCDSSIAGWGKFISILINKAENAGLKVIAVNPNGTSQICSNCGHTVKKSLSVRMHDCPVCHTHICRDLNAAINIKNRGAHGLKAQLMSSKASR

SEQ ID NO: 32213 - protein, 384 aa, Symploca sp.
MLKAYKYRIYPTSEQQVLLSKSFGSARWFYNYGLELTSKTYKETGKGLSRNDIIKLLPRLKKEHDWLTEPPSQVLQQAALDLSSAFLNFFERRARYPRFKSKFNRQSIRFPQGCKLTEDYLALPKLKKVYCRVSRLPVGTLKSVTVSLTVAGEYYASCLYDDGKNKPKTSSDGKAIGIDVGLTHFVITSDGTKHGNPKYYRKYEKKLANRQKRLSRKQKSSSNRNKARKVVAKVHQKISRCRVDFLHKLSRKLVDENQVIVVENLAIKNMVQNHKLAKSISDAGWGMFCTMLKYKAEWDGKTYLEIDRFFPSSKTCHVCLNQVVNLPLSVREWTCNKCQTKHDRDINAAVNIRDEGLRFLAGGHLASASGVRVRPSKGTAFVRH

SEQ ID NO: 32214 - protein, 451 aa, Nonomuraea sp.
MSRMLAGRKYRLEFDSGQRAFAERLGGICRAVWNTGLEQRREYRREYRRRGQWITYAEQCRQLADAKKDPYCDWLADAPAQVIQQTLKDLDQACRKHGAWTVRWKSKAKWRPSFRFPTARHLPVERINRKWGRVFLPKFGWTRFRMSRRLGGSVKSATGSRDGRHWFISFLIDDGIAEREEHTCPQWAGVDRGVVTAAVTSDGEFFDRRHAGSDGVSSRQPPRKTKQDRKDDLGYLTPGEAERYLRLQRRLARTKKGSKRRKTVTAAMSEIMRRVRWRRADFNAQAAHRLTRMYGHVVIEDLNTKGMSAAVKPKPDPGWPGRFLRNGAAAKSGLNKAILDKGWYGLEVALRSKARYTGSAIHKINPAYTSQTCPEPACGKVDEKSRKSQAIFSCTSCGHTDHADIVGAKNIKSKGQAAGLVVSGRGDPPGSVKRQAPRSTARAAQAARAAA

SEQ ID NO: 32215 - protein, 461 aa, Bacterium sp.
MSEVIVTAKIQLLPDKETQKSLLDSMEQYRLACNFISENITENHSLSAQNIQKALYEEIREKFGLTAQMTCSAIRTVIAKYKTIKTTLKNKTVSENSKKLKKNKKSKETELWDFKPEFKVPQCDLLWNRDYSFIKGNDGIFSISTISGRIKVPFQNNGMEHYFDKSRYTFGTAHLTQKKGKFYLLVSVKEQVEECKPEEVKQLVGIDRGIRFIAVSHDKNNRSRFFSGAQIKQRRAKFKDLRRELQKKGTSSARRRIKAIGQRENRWMSDVNHCVTKALVEQYPSKTLFVLEDLTGIRCATERVRRKDRYVQVSWSYYDFEQKLKYKAMRKSSLVINVCPKYTSQRCPVCGHVQKSNRNHKLHCFCCKKCGYRSNDDRIGAMNLCLMGQEWLKTTETEPKEISIIRSKSPDYGAESCVPDVTPRKNTSCSCAKGRRPKKVITDTTGKLQVLRKSQSTLCTP

SEQ ID NO: 32216 - protein, 267 aa, unknown
  TnpB Polypeptide
MSIFYNRKIIIYTKYFTLSDGMSKYFDHTIYKFGTAKLVNKHGKYYLHIPVTYEVEESNISDICNVVGIDRGINFVVATYDSKHKSGFVSGKAIKQKRANYSKLRKELQMRHTPSSRRRLKAIGQRENRWMQDINHQVSKALVENNPKHTLFVLEDLSGIRNATERVKTKYRYVSVSWSFYDLEQKLIYKAKQNQSSVIKVDPRYTSQCCPCCGHVEKSNRNKKIHLFTCKRCGYKSNDDRIGAMNLYRMGINYLANSQVPNTVVAE

SEQ ID NO: 32217 - protein, 384 aa, unknown
  TnpB Polypeptide
MICGYRYRIYSNKEQKVLLEKHFGSCRFVYNKLLEIKSLVYKKCRINVSEFDLNKHLLVLKEIYPWLKEIDSQALQQISRNLNTAYKNFFNGSGFPKYKSKRDHNYSFQIPQRYRFEGKKLLLPKIGLMKIKLHRNMMQGKMKIATISKTPTGKYYISIIVENELEYPDPEPFSHATMVGVDVGNITFATLSTGEKIEHPKYLKNSLERLKCLQRRVSKKVLGSNNWKKAVKHVSKIHEKITNQRHDFQHKVSKRLISENQAVAVETLNIKGMMKNHKRAQSTSDSAWYSFVLKLQYKAEWLGKTVIKISQWLPSSKTCNICGYKHPNLTENIREWQCPDCKNTHDRDINAAINIKNFALAEREEGPGDSFPIGRGMNQEAPLL

SEQ ID NO: 32218 - protein, 406 aa, unknown
  TnpB Polypeptide
MFRSTRTTLKFANVGKREAIKGFIAEYRSVVSKFIKILWGQDKIPSLLPKDTTSQIKTWLSARAVQCAGKQASGIVRGTRRKQEKRLFILDRLKTQGNRKQARRLQAIIDRLEASKPNISRIEPELDERFVKQDWDNLTFFDGVVTLSSLGNRLNISIPVKRTKHFNRMLERGTLGKGIRLSEDSISFNFKIEGNPKKETGETIGLDIGVTNVFTMSNGVTSQKNKHGHDLASINFILSRKTKGSKAFKRTQEHRKNYINWSLNQVNLDGIKTLRVEGIKHLRFGKRSSRYLSHFTYTEIFGKIGSLAFDNGVRLEKVNPTYTSQRCSRCGWVRSTNRKGKQFRCVKCGFALDADLNASLNICADLRPIGTKERLFHKNRKGFCWSEAGKEPIVPSAQKPDGNKLP

SEQ ID NO: 32219 - protein, 387 aa, unknown
  TnpB Polypeptide
MLRHKAYKTRLDLNKAQEGQLWQCIGIARYVYNWALADRIEKYKADTPTNLYEQKRRFNAIKSEIAPFVRQVPYTVTDETFRNLDTAYKNFFRRVKQGTEAPGFPKFKSRYAPRKTFSVRGSIHVEPRRVKLPIIGWLRLHERGYLPTEGVKILKATVSNDQGAWWISLQVEEDIPEPPTPGTDVIGVDVGIKTLAVVSDGRQFENPKALAVYQQKLARAQREVSRRKKGSANRKKSQQRVTKLHAKIARIRAAAHHNASHKITETPGVGTIVIEHLNAKGMVQNRKLAKAVSDASMSELHRQIEYKAEWAGKTVLRADRWYPSSKTCSVCGHVKADLTLADRVYVCSECGTRIDRDLNAARNLAALGEPTNGRGLPGELGCDNALL

SEQ ID NO: 32220 - protein, 364 aa, unknown
  TnpB Polypeptide
MAKIVSSYCTKVIDENRIFKDTIRVYRDALSLLIRIVESEWDTGLGEFYAKSTLKAQRTVELLVHASRTSVAKYPEFDKQFYKYPSYLRRSTISEALGAVSSYRAAVSHWESAGRKGKEPKLQTSRSAMPTFYKDNMYEDNGDGTALLKLYHKNDWVWVKVLLRKQDTDYIREHWGEVSGSAPKLVKRNRRYALCFAFEETVAYGTKPLTDQTILAVDLGINTDAVCSVMRPDGTVLARKFIDFPSEKDRLNTQLGRARRGQRENGHRGGNRHMKKAVRINEDLSKKIAPAIVRYAVSVGADIIVMEHLDFIGQKPKHKSSGSTCGEIATFRKSSCIRPAAMEFMCVSSTHETPAGWLSMVLAK

SEQ ID NO: 32221 - protein, 516 aa, unknown
  TnpB Polypeptide
MSSVTRTISLRPFLCRETKTGINLDLHNILEEVRNDATLCATEAYKHITVENLEKLSEHDGVKPAVAGRRMGVRFSVPGRGTGRSRFEWMIRDYAVSQLRSWYERHKASTGKTDKYVSTGFKRTTTPNKPAFLKPRLALSVTDKQYHAIRLQDSIIELDMVVNKRWVTFKFRAPERFLEPGVRIIAPTISIDERNRVMFNWHVEIPVERAPFSDKHVIGIDVGITHHTTAVARDITTGEVVEASFMNRRVRSLENKIKRSKTQINALYRKGRADEVEPHRKALSNRRKELAILIGQEVADLSWRYDNALVAIEDLSFVTNTMKNGRWVRGMIVDRITDMVESNGGRVMKVNPAYTSQKCHRCDTQLDMTDYHTPICVNCRVGWDRDENASANIAGKLQEKERHKKACQTRKKHASKKCRKNSKGSLRPLKHPLKKTSPTPKAPQNQPKTNHTIHHKHVVIKHREGGVFPILCAAGWSLRDRNVRVPAVAHTHGSDKKPHDYPIDRYKPMVCICTKE

SEQ ID NO: 32222 - protein, 515 aa, unknown
  TnpB Polypeptide
MASVTRTHPLRPYACFDKKTGAGLDLYTILEELRSDAELCASEAHKHITVENLKIISQYDGLKPAVAGRRMGIRFSIPGRGTGRSRFEWMMREYAVSQLRSWRERSKASTEQTNKYVSTGFKRTATPNKPDFLKPRLALSATDKSYHTIRQVGSTLELDMVVNKKWVTFRFKTPERFFEPGVRVIAPTINIDDNNRVMFNWHIEIPVERAPFSDKYVVGVDVGLTHHTTAVVRNIETGEVVDVSFMNRRVRSLENKIKRTKTQISVLYRKGRVDEVEPHRKALSNRRKELSILIGQEIADLSYRYGNAIVAVEDLSFVTNTMKNGRWVRGMIVDRITDMVESNGGRVMTVPAAYTSQKCHQCGERLDMTNYHTPTCYVCQVGWDRDENAAANIASKLKDKHKKACTTRKKHASKTRRRNSKNTTRPLKHPLKKTAPTPKAPQNQPKQANTHHVHHKHTVIKKRGGGVFLVLCAAGKPLPYGGVTVPAVGSLSGTSDKKPHDYPTGRHRSNDVCLP

SEQ ID NO: 32223 - protein, 376 aa, Thermus sp.
MLKAFKYRLYPTQPQLRDLDRTLMLCRSLYNAALQERRDAYKKAGRTVGFYEQKRYLPEIRTELPEYKGVHSQVLQNVIERVDRAFQGFFRRVKAGQKAGYPRFKGKGRYDSFTFPQAGTTGVKLQGGGKRVLLYGIGSVKVKLHRPLEGRLKTATVKREGEHWYIVFTCEVEPRPLPPNDQAIGIDLGTNPHFLVTSEGERVEAPRYFQKAQAKLAAAQRSLARKKRGSNRRKQARKRVAKLHRKIANQRRDFHHKLARKLVNHYGTIAHEDLNILGLARSRTAKGVLDAGWAQFLAILAYKAEEAGRRVIGVDPKHTSQDCPVCGHREKRPLWVREYTCPQCGTLLHRDVAAARNILARARTEPAGTWAAWAVP

SEQ ID NO: 32224 - protein, 653 aa, unknown
  TnpB Polypeptide
MDIPEIEEPPDNPEPEEIPKKLGHRALRAKENKSSNEFVIKCSLNNGLKINDSFFRESFLTSINKRVEQISKMAHRMSIAVNILIRECIEKADDYSNVDMPLFLSEKGTGATFLYQLATETSNATKPDPHVSYFLSRNKDLLPGKTPLRYSGDRNSVVMMVQGYITNYRTFIETTFKKNQEKYIYKWLKIHEIDIKYTNFIRYKINIWDHSKLKNVMELDTNTEEFIKRQQQILGISHSQEKISPGWIKKNYEKVVVYYSFMSEFFIKNEIRGITVAPLCKMKASFLHIDTDVFYGILKGCKMINCNFSKFKENAREIYDEYFKPEKLLTNNQLTNKGFKFTGTINTDGTAINFHYRRPKLPNDKKETTLERNDPCIRVIANDPGRKTLFYGIEDLGENRIKTYIFSRNKFYEESGSTKATKKCNKWNEIYLKKELEELSTTNSRSLYLKDFLGYVSIIKTHYNSLWGEYIKKKYSKQRFNLYSGKKRSYDNFFQSLDDKSGRKLIIAFGDAGFASTAKNELSAPTTTLEKQCRKWYKIVKVDEFRTTQLHCESGSILTKIKEHSLTKEGKPFVKTIRGLLRYKTSKFCKFIDRDKNAAKNILKCYRMFPLRPSGFNREDEKQEDPEPFYIVSTPKRIVVEFIREECILSDLE

SEQ ID NO: 32225 - protein, 385 aa, Chloroflexi sp.
MSRKSFKYRIYLTNGQRRILEQQLEECRWTYNEVLAERKRAYEERGETLRRYDTQAMLPVWKRVRPTLKLVHSQVLQNVCVRVDLAFKAFFRRVKEGAQAVGFPRFKGFGRYDSITYPQYGNGAELDGERLILSKVGAVHVVLHRPVEGTPKTVTLTRSRTGKWYVSFSCAVKAKPLPPTDAVVGVDVGLASFATLSHGEEIENPRFYRRDEADLKRVQKLKDAAKHAQQWHEHRRHKKALAHIHERIADRRANFAHQESRKLVDRYQVIVCEDLAPMEMGRSRGMRKSIVDVAWIQFIEMTVAKAEEAGRRVILVNPHNTTKMCSTCGEIVPKKLSERVHTCPHCGLVLGRDQNAALNILQRGLQSLRLSHDECGAAYSEAQVL

SEQ ID NO: 32226 - protein, 236 aa, unknown
  TnpB Polypeptide
LTERQEAESLDGHEKNGTVLGVDVNVTGAFAVTSTGAFIGSTDYLNHKRNQYEQRRGRLQQTGTRSAYLTIKSVGSAFSEWSLDWLYNRANELVAEAHDADVDGIIFEKLDHIRETIANGSKFQQWAYAKFVEIVEYKVESTELFVDFVKPAYTSRRCSHCGFTHENNRDDKQFACQDCGYEANADYNAAKNIANRYCGYIHRGQKSRGGWASSQLALKSGTLNVNGEYTPAELLG

SEQ ID NO: 32227 - protein, 395 aa, unknown
  TnpB Polypeptide
MWWYSKISRNYWNLLVDIDKRNNKGEFDDILSNNENKTYHSNFYDREIYSLSQSDYLNLANIVVAKNYEDDSKKWSWYYQPNQSFIYAFVARELVKIRRQNKGKLNFRGINTMPPSFNVRCDMSTNKKRPSRIYLKDNGKLQIPTIGDMKFSSVIDGFDLSCKKQVANISFDGKYWYLSYTEDVDTQVIDSPNYTEGVGVDLGIKTLATVSNGTTVPNIKDFRRVRILEKRLKRLQRKIARKYRINKCNKHNKTKNIIKLERRIKLIHRSIRNIRINHIRKFVSDLVKQQPEFIAVEDLNVSGMMKNKHLAKDIGNCSFYTIRKTLIRKAKERHIAVRLVDRFYPSSKTCSYCGHYKKTLKLSQRVYHCNNCQETIDRDLNAAINLANTENYVLA

SEQ ID NO: 32228 - protein, 439 aa, unknown
  TnpB Polypeptide
VVYRSARAGLRITRGQRRRLLGLLVSAGDVWACVLELNAWRRARQDRPLVSYQALCRELASAGPGTFGELDTVGARSVLRRYSDAWFAAAKRRNEGDRTARFPRRRQALMPLRWYHGTFTLTGRRLRIPAMRGRQPLWVRLDRDPPYPPGQVRSVTLLYQAGRLWVDISAEVPVACYPAGQEPDPARAAGVDLGIIHPYAVAGPDGQGLLVSGRAVRAEHRMHLADRKARTRAVARRAPKPGQRGSRRWRHYRRRQRLAEARHRRRVRQAQHEAAATVIAWALALRVGTLAVGDPRGVLSIKAGRRHNQRTRDWRIGHLITVLKDKAEAAGISLALVDERGTSSACPACARRVPKPAGRVLSCPACQFTGHRDLSAAASIAARHGGGITPVIPTSVTHRRAGAHLPGVAPSRRDPRRRAHRRGARGSPGRHRPARTSPT

SEQ ID NO: 32229 - protein, 376 aa, Microbispora sp.
MARTVKRAYKYRFHPTPEQACELARTFGCVRLVYNKALEERTRAYTLEGRRVCYVESSAALTQWKKTPELAFLGEVSSVPLQQALRHLQAAFANFFARRAKYPAFKSRKKSRASAEYTRSAFRWRDGRLWLAKMDAPLDIVWSRPLPQGARPSTVTVSKDAAGRWFVSLLVEETITPLAPVDAQVGVDAGLTSLLTLSRPVDGLTDEDGKVANPRYERADRRRLAKAQRTLARKAKGSANRAKARRRVARVYARITDRRRDFLHKLSTRLVRENQTVVIEDLTVRTMVRNHSLARAISDASWRELRSMLEYKTRWYGRELLVVDRWFPSSKLCSACCTLQESMPLNVRTWECACGAVHDRDVNAAKNILAAGLAER

SEQ ID NO: 32230 - protein, 277 aa, Ruminococcus sp.
MTLSWNRDYSINADQFSVGTLNGRIKVDYAKTAMEQYFDKSVFRFGTAKVVYKHGKFFLHISVNYNTDELQNVNVCNVVGHDRGIRFIATSYDSNGKTIFFSGKQIKQKRAHYKTLRKQLQQVGTPSSRRRLRSIGQRENRWMQDINHQVSKALVENNHKGTLHVIEDLTGIRTVTECVRVKDRYVSVSWAYYDLEQKLIYKALERGQKVIKVNPRYTSQTCPKCGHIARNNRNKKIHLFCCKNCQYTSNDDRIGAMNLYRMGIEYLIESQVSTTDL

SEQ ID NO: 32231 - protein, 378 aa, Oligella sp.
MQLRKAFKFEIMPNGEQIRRIKQFCGCSRFVFNRALAWQNEQYEQDNSVKFSYTKIANLLPVWKKELPWLKDCHSQVLQQSLKDLESAFKNFFQKRADFPKFKKKGLKESFRFPQGCKLEQQNNRLYLPKIGWVRYRNSRAVVGEIKNVTVSQKCGRFFISIQTEFEYEIPTHRGGEIGIDMGVAHFATLSSGEYFEPLNAFKTYKGKLAKLQRRLKNKVKFSQNWQKLKAKIAKLHYKIANSRKDFLHQTSSKISKNHAMIYIEDLQVSNMSKSAKGTAEEHGKNVKQKSGLNRAILDQSWFEFRRQLDYKTQWLGGFLVVVSPQNTSRTCPFCGYTAKENRQTQAYFECVECGYTENADVVGALNVLARGRAIVQT

SEQ ID NO: 32232 - protein, 442 aa, unknown
  TnpB Polypeptide
MAHHFQYRPFLKWRLVRESSCVFRSVFHHRAPRGLPALAGRGIGAYLLALNLQNLYDVWYNISMDRTVRVRLLPTNEQANALEETIQQFTQSFNVVCRVGWEKGETNSYNLHHFTYRACKMALPQLVSDLHIQAIRKASESLKSAKTLIRKGRKVSCPQSNYCPPRYNLHTFKVYWDKGIISMSTTSGRKKIMFKIPEYAQYAIGCPTATADLICRKNRFYLHVVVSLPDIPFEDNGQAIGVDLGVVRPAVTSDNRFHGSRHMKEVTKRNLRLRRALQANGSKSAKRHLRHLAGREARFRRDCDHVLSADILRDVTPGTTIVIENLTNIRSRVKARRGEAKRRLHSWSFAQLKGFLEYKAEALGCQVVAIDPRHTSQRCSVCGFTYRGNRRSQSDFLCRSCGFHLNADLNASRNIRDKHLVGWGIPPSDAPPPTGVSSHPLG

SEQ ID NO: 32233 - protein, 378 aa, unknown
  TnpB Polypeptide
LCYNIFVHKITFRYRLYPTASQSAAMQHTLDECRWLYNHLLEQRKTAWEERKESFTMYDQINTFTALKQERPPLTTVHSQVLQNVAMRIDLGFKAFFRRVKTGEKPGYPRFRGAGRYDSFTYPQGGYSVNPDSIRLSKIGTVKAVIHRPIEGNIKTCCVRLTSTGKWFVTFACEVEAQPLPESSEAVGIDVGLESFATLSTGEAIANPRFFRKDDKALAKAQRRLSKEAKGTPARSKRRKVVAHIHERISNRRTDFAHQNSRRIVNRFGVIAVEDLNINRMIHNHCLAKSIADAAWGQFAAFLSYKAGNAGGKFIAVNPAYTSQDCSQCGHRQKMSLSEREYQCPCCGLILNRDHNASLNILAVGLDSLGIVPRSPLL

SEQ ID NO: 32234 - protein, 402 aa, Hydrococcus sp.
MRLVERHIIKRSHRSFKEIDMMAFKSKNLFNSALYICRQAFFAKEQIPGFNRLYHQLKASEDYKALPSKVAQLVFKQVDQCFKSYFEAKKAWLADPSKFLGEPKLPKYKNKDKGRNLLVFNNQAFSKTWLKKGYINPSGLNLKLKTKLTKIEEIRIIPKGNIYVVEAVYSRPETSLVNGDKIASIDIGLNNLATVASNDPSFKPFIVCGKALKACNQHYNKIKSKLQSLFPKNQYTSRRIEALTLKRNNKVDYYLHTASSFIIKQLVSQGVTHLIIGKNDNWKQNINLGRKTNQNFTNIPHARFIQQLEYKASLAGIGITITEESYTSKCSFLDLEPIKKQESYLGKRLKRGLFKSNSGKCYCADLNGALNIMRKVVGDSIFDRNSIERLVVSPLRFKPYQA

SEQ ID NO: 32235 - protein, 606 aa, Candidate division WPS-2 bacterium
MPAIVVDQLFKEAAAWQVRDRPARVTEVQAVRLDAVQVPDRREDVDVVDAVRPAPFLQVVMRRNEASRVRKDDRFALERVARREQRSTPAPTTLRHRLDHRVHIAGMVEVLVRKSDRVEFERLARRQRRERAHERAGPGIDVNLRDLRATLVAEAKPHPAGRANLPGDHESRAAGPKKTHRDHDVRLFALGARSDPHLIAKIVGCPLDAGTVPSIWHTRRLEDVTRDLYNAALQQRRDAFRHRGITVTEDLQYADLTDLRKGDSRVAAVYRECEDAVLWRLDLAMKAFFRRRKRGEHPGFPRFKPANRWRHLHFPHGDRAFKFKQNQRRVYVPGAGNIALRKGRKIPTKFGRGWVVERNGRWYLCVEYELCAPEKRSTRSVLGVDRGVHVLAATSEGELIRNLAVGERRKRAIARLQREMDARTSKDPHSRCINRNDPLRIAAVKRYARSREKAANARRDYAHKVSRRLVGSADCIALERLNLANMTRNAKGTCAEPGCGVSAKAALNRLILDSGFGLLQRMIAYKAESAGVTVVSVDARFSSQTCYRCGNCDRGNRRRRRFSCGSCGFTTHADVAAALEIRRRAQRTLSSEPIPVEEAGRRVTAA

SEQ ID NO: 32236 - protein, 446 aa, Scytonema sp.
MLKKKKGFRIATKSVKCKLERNGFDLNETKAAFNEVVHFYFALVNTHPSGVNIPVAEDGGWRYYEKLTIGSKTVYPFPFNGFPVQFRRAAIRKAIGAWQSWNSNYQKWLNRPNQQKHHRPPLQPRSFNFSPSFDAGVWKEDDGQSIILKILVNGQWKWVKFQYLAPLVDAEWVKGSPLVVVKGNAAYIVFPLQKYIPATGGIKTIMAQDSLRVLGVDMDLDRHIAICSVLEVNAKGEVFEVTRHFIKQTSHTKRRKRQLGRIAKKMQQTGTIHKGFASKMWENLHNREVELGRAYARQIVELAKTWGCSVIAFEHLGNLKPIRGKYSRRSNQKRAYWLKSSVYRQVSRIAYQDYGILTTRVNPRNTSRFDPWGNPVWRSNEFPKTLFDFQSYEKGANFVGTVNGYIAHSGLNAARNIALKAILRHRTNLVFRTGTKYQANSAREKA

SEQ ID NO: 32237 - protein, 346 aa, unknown
  TnpB Polypeptide
MAQQILKEVDGSFKSFFGLLKKANQGKHALKDCRLPRYLPKDGYTTLIIGDIRLKGNKLKLPYSNSYRKTHNAVKIAIPPILLDKKVKEIRIIPKADARFFEIQYIYEAECIQRNLNTTNALALDLGINNLVTGVSSKGETFIIDGRRLKSINQWFNKKNARLQSIKDKQDYGRKPTNRQKTLARRRNNRINDYMNKTARKVIDYCINHDIGTLIVGYNKTFQKDSNIGKRNNQTFVNIPYGKLRDKLEYLCELNGITLVMQEESYTSKASFWDKDAIPVYKSDDTKEYHFIGKRIHRGQYRTASGQVLNADVNGALNIMRKSSVVDVNILYSRGEVDTPIRIRIA

SEQ ID NO: 32238 - protein, 390 aa, unknown
  TnpB Polypeptide
MIETLKVQLNPNNKQLTKLFQYAGCHRFAYNWAIAREKENYKQGNKFLSDNELRKEFTQLKKQENYKWLNKISNNVTKQAIKDACNSYKRFFKGQSKYPKFKSKKHSKQSFYQDNVKIQFTDTHVKVEGFSMSHKRNKQKLNWIKLCEKGRIPTNCKYMNPRFTFDGLHWYISVSVDVEDDTSIPTNEGIGIDLGLKDLAVCSDGNTYKNINKSPKVKKVEKKKRRLQRSISRKYNMNKEGERYKKTSNIIKREKELLKLTKRLTNIRRNHLHQITSEIVKRKPSFICIEDLNVSGMMKNKHLSKAIQQQGFYEFRRQIQYKSEWNNIPVILADRFFPSSKLCSCCGMIKKDLKLSDRIYKCDCGNVIDRDYQASLNLKQYGESVLEQNL

SEQ ID NO: 32239 - protein, 426 aa, unknown
  TnpB Polypeptide
MLVQHRVVTEYRSYRERVNAANGETSRYVSQSWKRTVNASAPSYGGDYINLGAVDKAYAVIENDPFADGEIILKMVIQGAWYRLIFGFDNTRFTEGKVTLPVVKVQGGTPVFIFAVVTDNPVVQFSGDYVIGVDVGINNYATVVVRDTKTGRIVYETTLSQRIHSLWNSVRASERQVRALKKKSDRLLSQRQARMSALDEAQFHREAASRKKRELAILAAQEIANLSHTFDNAVVVVEDLGWIANTMQNGRWNRGELVKWLTHYVSQNGGWVVAVNPANTSQQCHKCDEKVAHPTHEVSVCPEHGAMDRDVNAAANIAARAIPHVVKARVTRAKNRKLRSQVPLRTPPARASLRYPGRDRTKNAPTPKRKKNRPRVVGEVILPISPARVIVSARVLADCGTQGAVGTCQAAIKQGNMTNECRLCDL

SEQ ID NO: 32240 - protein, 268 aa, unknown
  TnpB Polypeptide
MITLEYKLKGKAQQYQIIDDMIRTAQFVRNKALRYWIDNQGVKLVDLYKQCAIMAKEFEWAEKLNSMARQASAERAIFAVQRFFANCKAKKPGKKGYPQFKKHTRSVEYKTSGWKLSADKRCLTFTDGFAAGTFKLVGSRDLHFWAPSEIKRVRVVRRADGYYAQFCINVERTEEVSPTGKAIGIDVGLNHFYTDSNSETVSNPRYLRKSEKALKRAQKRVSRKKKGSSNRKKAINKLGRKHLKVSRQRKDFAIKTALCVVKSSDFVA

SEQ ID NO: 32241 - protein, 343 aa, Escherichia sp.
VKRLQAFKFQLRPGGQQEREMRRFAGACRFVFNRALALQNENHEAGNKYIPYGKMASWLVEWKNATETQWLKDSPSQPLQQSLKGLERAYKNFFQKRAAFPRFKKRGQNDAFRYPQGVKMVGLDAGVAKLATLSDGTVFEPVNSFQKNQKTPARLQRQLSRKVKFSNNWQKQKRKIQRLHSCIANIRRDYLHKVTTTVSKNHAMIVIEDLKVSNMSKSAAGTVSQPGRNVRAKSGLNRSILDQGWYEMRRQLEYKQLWSGGQVLAVPPAYTSQRCACCGHTAKENRLSQSKFRCQVCGYTANADVNGARNILAAGHAVLACGGMVQSGRPLKQEPTEMIQATA

SEQ ID NO: 32242 - protein, 332 aa, Helicobacter sp.
LLNAIKFRIYPNAQQKELISKHFGCSRVVYNYFLDYRQKQYAKGVKETYFTMQKVLTQIKRQEKYHYLNECNSQSLQMALRQLVSAYDNFFSKRARYPKFKSKKNAKQSFAIPQNIEIKTETQTIALPKFKEGIKAKLHRDLPKDSVIKQASISCIADQYFCSISYETKEPIPKPTIIKKAVGLDMGLRTLIVTSDKIEYPHIRFYQKLEKKLKQAQRRLSKKVKGSNNRNKQAKKVARLHLACSNTREDYLHKISNEITNQYDLIGVETLNVKGLMRTYHSKSLANASWGKFLTMLEYKAQRKGKTLLSIDRFFPSTQLCSYCGFTTGKKT

SEQ ID NO: 32243 - protein, 367 aa, unknown
  TnpB Polypeptide
MTVIRTITLKIDVTPDERQFLLHTMKDYTIAFNVCAEWGFDSRSCSKIRCHNATYCDIRQTVPNLPSSLVQSARDCACEALKATKCKFKPLRKEFSAMRYNQRVIRIYMETGYATIATSNGRIKAMFTVPGYYHKYMNWKIKSSTVSFRKRDKTFYLHCQLETPTPEQTNDINVLGIDRGIVNIAVCSDNTFYNSKLVKNTRAKFAHLRAELQSKGTRSAKRKLRKMAGRERRFVTDVDHCISKQIVNSDYTVFALENLSKIRVQKRRGKDFNRKLNNWSFYELERFIRYKSENLGKSVVLVDARYTSQKCSLCGHIYKGNRDGSSFRCRKCGFQIHADLNAARNIAHAGISGLGRLSVNQPNVACL

SEQ ID NO: 32244 - protein, 374 aa, Mitsuokella sp.
METYTLGYKFRIYPNRTQENLINRTLGCARFVFNHFLAVRRDEWKANHNSLTYVKTSKLLTDLKKREETRWLSEVDSMALQESLRNLDRAFQNFFAKRARYPRFKSKHSHSQSYRTRNQTNGIRIIGKRIKLPKLGLVRIKQSRDFGGRILSTTVSRAASGKYYLSLCVEVEKGSLSCPNDGKQIGIDVGVKVFYSDSNGDIVENPHPLKKLQRKLRREQRRLSRKMPKSVNRERARVRVARVHERIANIRRDFLHKISTRLARENQTVAVEHLNIKGMLRNHRLAKSISDASWSEFFRQLTYKTELHGGELLKVDTFYPSSQTCSVCGYQNPLTKDLSVREWDCPACGTHHDRDVNAAKNILRKALEDKSKVA

SEQ ID NO: 32245 - protein, 372 aa, unknown
  TnpB Polypeptide
MRKLFQYRIFPTKRQAQKLNEALDECRWLYNHLLEKRKNAYEQTGKGLSCYEQQSTYSILKQERPTLERVHSQVLQNVAVRIDLAFKAFFRRCKAGEKPGFPRFRSKDRYDSFTYPQSGFSLTHDDRVTLSKIGRVKMVYHRPIKGKIKTCTVQRRSTGKWYVSFSIECEPERMPETPIQIGIDVGLKTFATLSNEEEIPNPRFFRKEEKALARVQRKHSTLANGTPERRKHRKVVARVHERIAFRRDNFTHQESRQIVDRFGVICVEDLHVNRMTHNHCLAKSIHDAAWTGFFERLSSKAEEAGRTVVKVNPAYTSQDCSRCHHRQKMPLSERVYHCPCCLLVLDRDLNAALNIKALGLQSVGLPLETPRL

SEQ ID NO: 32246 - protein, 376 aa, unknown
  TnpB Polypeptide
MHKMFQYRIFPTKKQLHKLNETLDECRWLYNHFLEKRKTTYEQEGQSLSYYHQIDTLGLLKQERSTLKQVHSQVLQNVAVRIDLAFKAFFRRCKAGEKPGFPRFRGNDRYDSFTFPQSGFSLTHDDRVTLSKIGSVKMVYHRPIKGKVKTCTLRRSSTGKWYVSFSVDCEPERLEPIDNQVGIDVGLKTFATLSNEEEITNPRFFRKEEKALARVQRKQSKLAKGTSERRRHRKVVARVHERIAFRRDNFTHQESRQIVDRFSVICVEDLQVNRMTHNHCLAKSIVDASWSAFFGQLSNKAEEAGRQFVKVNPAYTSQTCSQCGHRQKMPLDVRIFDCPCCHVQLDRDLNASLNILRLGLQSLGLSIEAPGFSRGE

SEQ ID NO: 32247 - protein, 442 aa, unknown
  TnpB Polypeptide
MQIISSYGVELRKQNIPIRQTLEIYRSAVSYLIGIYVQVWEELAEIPDAKRRFNAAEHLVHTTKKNHACFDFDIRFPKMPSYLRRSAIQHALGTVSSYKTRLDLWEKTDGKSGKPKLVYENHAMPVFYRDVMYREGAEGKDEAYLKLYDGHDWKWSCVRLDHTDMEYLRKCWSGKKASAPTLEKRHQKYFLRFSYKEEVTLTKTPVKEQIICSVDLGINTDAVCTIMRADGTVLGRRFIDHPSEKDRMYRTLGRIRRSQREHGSAQTQGRWAYTKRLNTELGKKTAGAIVRYAEENHADVIVFEYLEMQGKISGKKKQKLHLWRKRDIQKCCEHQAHRKGMRVSRICAWNTSRLAYDGSGAVTRDWENHSLCTFQTGKRYNCDLSASYNIGARYFIRELLKPLPATERSLLEAKVPPVKRRTSCVYADLRKLHSEMERLKAA

SEQ ID NO: 32248 - protein, 340 aa, Actinomadura sp.
MSRYRLRPTLVQEASLLEHCGHARFVWNLAIEQHSWWTPWRGPAPSFAEQCRQLTQARAAFKWLRAGSNTVQQQALKDFAPAMANFYAGTHRRPSWRKAGVHEGFRIVGQRGNAWDLRLVSRRVGQVRVPKVGWVRFRCSRPVPPEVKSFRVTRDRAGRRHVAFAAIPDPIPAPGNGQAVGVDRGVTVSAALSTGELLHAPTLTSAEADRLRRLQRRLARAKRGSHRRARVKAAIARLKARESDRRKDWLEKTSTTLARGFDVIAVEELNVRGTCGHCAPGNRESQAVFRCVACGHQANADVNAACNIRDTAVGRTVAARGGRVLTRPANREPQPDLLSI

SEQ ID NO: 32249 - protein, 331 aa, unknown
  TnpB Polypeptide
MQVLSSYGVELRKQNIPIHQTLEIYRSAVSYLTEIYGQVWEELEQISDSKRRFNAAEHLVHTTKKNSARFDFDLRFPKMPSYLRRAAIQHALGSVSSYETRMDLWKKSGEKAGKPRLAYENYAMPVFYRDVMYREGEEGKDEAYLKLYDGHDWKWFCVRLNHTDMEYLRKNWSGKKASAPTLEKRYHKYFLRFSYTEEVTLTKTPVKEQIICSVDLGINTDAVCTIMRADGTVLGRKFIDHPSEKDRMYRTLGRIRRFQREHGSAQSREDGIYETSEYRDGKKNCRCDRKICRRKPCGCDRIRISGNAGEDIRKEKAETASVEKTGYPEAL

SEQ ID NO: 32250 - protein, 221 aa, unknown
  TnpB Polypeptide
MRSVPLCGQTELSWEENLSIIPVKKTGCTAHWDGSGDSRESTALRSHGKMAYTKRLNTEMGRKIAGAIVKYAEENHADVIVFEYLEMQGKISGKKKQKLHLWRKRDIQKRCEHQAHRKGMRISRVCAWNTSRLAYDGSGNVSRNPKNHSICVFQTGKQYNCDLSASYNIGARYFIRELLKPLPVTERSLLEAKVPPVKRRTSCVYADLKELHLQMEILKAA

SEQ ID NO: 32251 - protein, 388 aa, unknown
  TnpB Polypeptide
MIFHGYSYRLYPTDKQSEQMLQISSACRAIWNAALEQRIDHWRNYQARTGNNLNYVTQCRELTALRAEFDWVRAVSQTAQQRTLKDLDTSFRRFFSGQGGFPKWKVKGKHEAFSHVGREVHVEKINKRWSRVRLPKIGWVKFRRHRNLQGTIAEAAIVLMPLGWQISFGCKVDAETIDNGQVVGIDRGVAVPLMLSDGTSYALPDNIEAIQRRYRRACKAFSRKKRGSRRHDKARRRVAALKSRQARARKDWAHKATTDIASRYSHVVVERLRTKNMTARAHFKGVAQKRGLNRSILNVGWHQIETMLAYKCTTVTKVDPAYTSQTCSSCGTVDSRSRKSQASFVCTACGHRDNADRNAAVVILNRGNTPGTEMVRRAVDEVRTSQAA

SEQ ID NO: 32252 - protein, 563 aa, Streptomyces sp.
LACHHQPVRRRPSRLGLGPRPARPALILAQPPDGPGATGPGAVRHLVTRRGYRDSWAGRARSIRGGCAGFSAEAGGNGPAGTSSLNMVTKTANACDGSRYRSIGIFALEAPLDAGSVLAVQLRYAFRLHPTSGQRAALGRAFGCARVVCNDAVRARREARVQDLPYPRLGLLSRLLITEAKRRPERAWLGEVSAVVLQQALRDCERAYTNFFASLKGERTGTRVGEPRMKSRKDARQSIRFTANARWSLTACGKLSLPKIGAVRVKWSRALPAVPSSVTVVKDAAGRYFASFVIDTDPAADAARMPDTDQTVGIDLGLKHFAVLSDGTKIDSPRFSGCTTPDGHRSSACWRTKPSATAASWSGSAGSSGGDELRPEDRAHAREAEDYLGVLMLTKPGLDPRVQLGDLLAVGQHGVRQPGYEFGTELLTGQRRLLGLGSFHGPTRERSGVADLAVPQPVLQPLDAQATDGRRGLVSGQQRDGALLGQVQAPLQRREKRQEVGSQAVDLTGLVEHHVQASGGEKAQVDSKFVARPQHAHIASDAGLVGDDEGVTGIGLAFTSVGS

SEQ ID NO: 32253 - protein, 405 aa, Streptomyces sp.
VKRAFKYRFYPSDAQAAELTRTFGCVRAVYNMALQARTAAWFTERRRINYVQTSALLTEWKKTEEHAYLADVSSVPLQQALRHLQGAFVNFFEKRSAYPRFKSRKRSRNSAEYTRSAFTYRDGRLTLAKMPEPLDIVWSRPLPDGQTPSTVTVSRDSAGRWFVSLLCEDASVNAYPSAGTAVGIDAGITALVTLSTGEKIINPKFEKKDRPRLARAQRELSRKKTGSRNRDRARARVARIHARIADRRRDFLHKLSTRLVRENQTIVIEDLAVRNMLKNRALARAISDASWAELRSMLEYKTQWYGRELIAVDRWYPSSRTCSACGHLVAKLSLTIREWTCTACGAIHDRDENAAKNVLAVGLAVSACGAGVRPQRRTSGRAVGAEAGKLRRSAGQRRRVGDSPS

SEQ ID NO: 32254 - protein, 414 aa, Natrarchaeobius sp.
MEKRRTVPVKLDVDSDDAALLGDTVDEFLWTANEVTRHAFDGEYVTTSKTTLHHETYEDVRDETALHSNHVQAARNKAAEACKSVVAKWKQGKKASMPYFTSPHLVYDHRTATFHDEYVSLATVDGRIEADYVLPDKEPETPHVEYFFSDKYETTGAELHYTNGNWMLHIHCKTEVETDTSAQETTENGTVLGVDLGVNNLAVTSTGTFWKGDEFDHWRREYENRRGTLQECGTRWAHENIHSVGRKEEGRFKQTLHRISNELIAEARDHGCSVIAFEDLTDIRERTDASWGHKWAFNRLYEYVEYKALEYGIDVKRVNPKNTSRRCSHCGFTHPDNRDGESFECLKCGYENHADYNAAKNIGLRYLHRNQTGSGGGASVGIALNSGMLNANGGYEPPAESSAIAGVHAESPRL

SEQ ID NO: 32255 - protein, 402 aa, unknown
  TnpB Polypeptide
MTNNLAHTIRLFPTEAQETFFRKACGCARVAYNYGLSEYQRLRKEGQKPNILEIKKRFNAEKKVLFPWMSETNKDANQQPFANLQSAFSRFFKKQNKYPVFKKKGRKDSFYISNDKFGVEDKAFWIPKLGWVKGAEELRFKGKITSATVKRKANYWFVVISVETDKAFTTCDNQAVVGVDLGIKTLATLSDGKVLEAVKPLRAHLDRLKLLQRWASRKVKGSSNRHKANRKVAKIHYRVACLRKDILDKLTTYLCENYQAVVVEDLNVSGMLKNHCLALSLVDCGFGEFRRQLEYKSLLHGNTLIIANRWFPSSKMCSGCGHVKEALALSEREYVCEHCGLVIDRDLNAAINLRNYGLEQLRTACPEVTPVDKKALVYLSSIEVNETVLGEAGISEHSLVLT

SEQ ID NO: 32256 - protein, 313 aa, Symploca sp.
LPDWCKEVPYQIKSIAIKDACKAVSNAKKKFVDGGGISRVRFRSRKNPVQSCYIPKSAVSKKGIYYTILGEVPFREALPLSFGDCRLVFAYGDYYLTIPREEPRQIAENQGRVVALDPGIRTFMTFFSEESFGELGAGANLKIQRLCFRLDKIVSRISKARCRQKKRLKFAASRIRGKIKNLVDELHKKVARFLVDNFDIILLPTFETSQMSLKAKRRIKSKSVRQMLTLSHYKFKQFLKHKAFETGKVVMDVNEAYTSKTVSWTGEIVPNLGGAKFVKSKFTGQTMSRDLNGARGIFLRALVDTPSLRECIC

SEQ ID NO: 32257 - protein, 351 aa, Arachidicoccus sp.
METLEGMNNACNHVSALAHSHQVFDKLRVHHLSYYELRRLFSLKSQMAIRCIGKVVDSYKVRAKQSKGNIDTARRFRLKGAVPFDCRMLTFDMEKQRLSILTLEGREEISFKVGESGRVALQHQKGECDLFFSRGAFFLNVCCQVPVEEKIKCEDVIGVDLGICQLATTSDGRSFDGKEIQTVHQRNQAARDGLQKKGTRAAKRKLKKRSGREKRFKKNENHRISKIIVEQAKRTGRGIALEDLSGIRNRQRVSKKLRSRFSGWSFNQLRAFISYKAEIAGVPVFLVPPAYTSQRCNECDHIERRNRKTQNEFQCMKCGHTDHADFNAAKNIKLLGCRQSASGRVVGFIRQ

SEQ ID NO: 32258 - protein, 363 aa, unknown
  TnpB Polypeptide
MNKGVKFRAYPDKQQQNLINQALGCCRLVYNKGLAMRNEAFANGKKIGYKQTSAMLTGLKKEEEFSFLKNVDSIALQQSLRDLDCGFKNFFEKRAKHPLFKSKHNNHQSYRTLSINNNIRIVGKYLKLPKLGYLEIRQSMPVGHINNVTVERTPTGKYFVVLNVDFEPQPLKPKNDAIGIDVGIKEFYSDSKGRVVHNPKYLENAMRRLAREQRRLSRKQKGSNNRNKQRIKVALVHEKIANQRNDFLQKQSTILVRENQTICIEDLNVKGMLRNHKLAKAIASVSWSAFFNMLSYKAEWYGNKVIRVPTMYPSSQTCHCCGYKNPLVKNLTVRKWECPQCHTQHDRDTNASINILNKGLETA

SEQ ID NO: 32259 - protein, 439 aa, Haloquadratum sp.
MSEECKTLEAYLAPPTQHKQRKLRDEHDRYETLLRRSFNDKCDTMTAVNEVVSGEDLNWHSKNALKQYVPHLLDEDTYDAKQLADTHPIRYANTAAVFDHDEARRHEICWEVPLPGRGTNFWIPLQLNPEQEYWWHSLIDDKDDSVWAGELRLQLDGDRWVLHVTANYEVEADHKCSCDSDNVTPVGFDVGESKLLVGCALRDDTPVDPLFVDGGRVRHLRQKQASAEDRLKSRYASNLLDNLVWGRWQDAIEDEIEKASARAVEYASQFENPVIVLEYLDGITDEDIGKYWNRRLGKWLFSRLQSRIEDKAAERGIPVEYVYPHHTSKTCNAYQHVGYRPHQGTFNCTNESCWVGEYQADLNAAANIANRLNPWGESLPWKSAGDDSPQSGGQWQAHKDTSLSEGLSSERRTSDDKVSSSSPAVGAGTEPETGGTHTS

SEQ ID NO: 32260 - protein, 481 aa, Haloquadratum sp.
MLKPEITENRGESLALQRGNESDELSTVHRLITLQDIPRCGNTHPINYEYCHRVPMAKQVVTRTYTASIRNQSRVSDDLDALGFAASKLWNVGRWTCSRIWGEIGHIPNHTELTAYLKTHERYDDLHSQSSQRVLQELAEAFRGWYGKRRNGDMRANPPGYRKHGDEHPRSTVTFKAAGFKLDTQYNRVRLSQGANLKNYWSDFILCTFHTRPDVDLSTVETVQQVKAVWTGDEWELRFVCKVEIEASESPGEKTVGVDLGIKNFAALAYEDGHSELYPLNCLKQDDYYFSKRIARCDDSNSEQVTRLNHKKSARRTHYFHTLSKHIVERCVEEGVGTIVVGNLSDIRVDEETNEAKNWGRHGNLDLHSWAFDRFRKLLTYKSETEDITVEQESERDTSKSCSCCGRKRDGNRVERGLYVCDTCGTVANADVNGAENIRQKVSLSSPNLSVNRSNGWLAQPSTFLFDKETGAFAPEERVRS

SEQ ID NO: 32261 - protein, 412 aa, Haloquadratum sp.
MKHTLRFRVYLSDDVASEAWRHIDILRQIRNHAVRDYYRSDYNNRPSDYDQHNTFTDWTERWSIFAEPSQHAAQQAISQIHSDLVTLQERRNNGSDVGRLQWQAKGEFRSVSYNQSSRFNVDHNTGDNRFVRLRVEKIGWFKIRADRDIPPVDEIDKVILKKETTGEWYVSLVTTVEDTPDKPPLSQIEPENCVGVDLGITSYIHTSENLSVDMLELSNEYDRYAREQRKLDRKEHGSANWEKQRRKVAQAKRTIKRKVCDYQHKLTTWLVTEYDVVAVEDLDVKPILETSQNAKNKQDAAWSRFLELLEYKADLHGTHVEKVKPEGTTKECAVCGVETAKPIWVREHSCPACGHTEDRDLNAAKNILNRGLKQLGAGRSESTSVQTALPTFTPHREAVDAKRVIEPGSPGA

SEQ ID NO: 32262 - protein, 395 aa, Haloquadratum sp.
VRRTHRHLLEDASAHRHADCEKYQSTWKSTRETQTTGLQGCELRWKSPREFRSFTYNQSVFELDKKGGQTVLSLSLSKLDDIRIELHRPLPDDATVEQVTLKKAKTGEWVAIFGIEMNTEPPAKPSLEDIDTGDMVGVDVGILKYAHDTDGTAVESLDFSEEHSRVEREQRKLSRKEYGSNNWEKQRQRVAECHQRIKRKRRDFLHKLSNYYAREYDLVTVEDLNVKGMLESTGNSRNTASVAWNTFTNLLEYKCKHEGTHFVEVDPEDTTKECASCGVKTDKPLWVREHSCPACGFEADRDANAAWNILSRGLTDIGVGHSEGTSQKSEISGVRTNRGAIRQRLWRLCSLWEPRWFLQSAFTRLRLVGCQTQSDNVVETGSPTLSERVSASRVG

SEQ ID NO: 32263 - protein, 400 aa, Haloquadratum sp.
MASDTEYYRRTAITRLDGLSHQDHDLLNATVEEWLDGCNIASNLAWKNEHTQSGVRSVAKDAVRSDTGLNSQHSILACHEVSSSIQSCIERRKNGEKATQPHFTLKSITYDRRTLTVCPEKEQVSLTVLDDHSRVRAYLTLPSNEDGYQYQYLDDEDWEYTESTLHYRDGEWYLHLGYRKEKPELDQRVGSTTQNGTVLGVDLGVNQIAVTSTARFFSAGKLNHARREFERTRGNLQECGTQSAHRTLQEVSSREDEFVKHILHSVANGIVQEAIEYDCDGIIFEKLDGIRKELPEADWHSMWAFRKLKKFVEYKAEERGLFVDTVNPKNTSKRCNECECVRDGNRHGDEFECRRCGKQNHADYNAAKNVAELYLLRGHQPSRGRSLSQYALKSGSRTPS

SEQ ID NO: 32264 - protein, 449 aa, Haloquadratum sp.
MLEVHRTHQAKICNHAQVADSLDRHGWSASKLWNVANYHSREVWDETGNIPDHGDLKNELKTHNNYKGLHSQSSQRVLEELAEAFNSWYGKRKSDSRANPPSYRKKNYYDQDGRRVHEEHPRSTVTWKQNGIKHDIKNNRVRLSKGANHKQHPKAWEYILIEYETAPGVIVENLQQVRAVYDKAKQRWELHLVCKHEIGTPDAPGTETAGIDLGICNFAAVAYSTEEADLYPGNRLKQDGYYFPKEIAKCDDSGGDRATRLHAKWSERRTHFFHSLATHIVERCIENGVGRINIGKLAGVREDETGESKNWGKHGNLDLHGWAFDRFSNILEYKAKGEGIEVVEVSERDTSKTCCVCGRTDESQRVERGLYVCEEHDDGDGDGNGDAFNADVNGAENIRLDINHTESNSESAPDLGGDRSTGWLAQPGVYLHDLSRGFQPRIEVVDCKP

SEQ ID NO: 32265 - protein, 441 aa, Haloquadratum sp.
MYIHRTYRAKILNHQQVEEPLDRHGWSASKLWNVANYYSREVWDETGEIPDDSDLKSELKTHNKYKGLHSQSSQRVLEELAEAFNSWYGKRRNDSRANPPGYRKKNYYDNQGRRVHEEHPRSTVTWKQKGIRHDANNGRVRLSKGANHKQHPRAWEYILVEYETRPGVTVENLQQVRAVYDKAKRRWELHLVCKHEVETPDAPGNETAGIDLGICNFAAVAYSTEEAELYPGNRLKQDGYYFPKEIATCDDSGGQEATRLHAKWSERRTHFFHSLAKHIVQRCIENGVGHINVGKLAGVREDDNGNGNSKNWGKHGNLDLHGWAFDRFSNILEYKAKVEGIEVGEVSERDTSKTCCVCGRKDDSQRVERGLYVCEEHDDAFNADVNGAENIRLNINDESNSESSASLDEDRSTGWLAQPGVYLHDLSSGFQPQGQVVDCKP

SEQ ID NO: 32266 - protein, 388 aa, Actinobacteria sp.
MIKIVKRAYKYRFYPAPEQAAELARTFGCVRKVWNLALEARTTAWHQRHEHVTYRQSSALLTQWKRSDDLTFLTEVSSVPLQLALRHLQTAFDRFWHKQACYPKFKSRKKSRAAAEYTRSAFRYRDGQLHLAKMTAPLNVVWSRPPPDGTEPSTVTVSRDPAGRWVVSLLCQCAVEPHPASDSVVGVDVGITSLVTLSTGEKIPNPRHERRDRARLALAQRRLARTQKGSANRDKARLKVARVHARITDRRRDFLHQLTTRLVRDNQAVVVEDLSVRNMVRNRHLARAISDAAWRQLRTMLEYKCEWYGRDLMVVGRWYPSSKICSACGRTAASLPLSVREWDCGSCGVRHDRDINAAVNVRAAGLAVLACGAGIRPEREPSRAGSRR

SEQ ID NO: 32267 - protein, 417 aa, Mycolicibacter sp.
MLTGRRFRVEFTGEQEMFAERIGSVCRAVWNTGLEQRREYRRGGAWMNYGPQARELAEAKTEHPWLKDVPGHCLQQTLMDLDKACRTHGTWKVRWRSGRWWSPAFRFPEGSKMVVEKLNRRHGRVKLPKLGWVKFRMSRFLDGEVIRSATISRDGGAWFVSFLVDDGRQAPSAHSVPGTAVGVDRGVVVAVATSDGQLLDREFVTAGERRRALVLQRRLSRSAKRGRNRDKARAALTGLRARERHRRTDFCAQSAHRLTVGNALVAVEDLKTKQMTRSAKGTLNQPGRNVAAKSGLNRAILGKGWHQFSLALQSASRYTGTLVVKVPAAYTSQRCSACGQVDPKSRESQAVFRCTSCHYGPVHADVNAAVNILAAGLAVTACREPTTPAGVVGPLKQEPAGNREELLLQPRNAAPAA

SEQ ID NO: 32268 - protein, 442 aa, unknown
  TnpB Polypeptide
MQIISSYGVELRKQNIPICQTLEIYRFAVSYLIGIYVQVWEELAEIPDAKRRFNAAEHLVHTTKKNHACFDFDIRFPKMPSYLRRSAIQHALGTVSSYKTRLDLWEKTDGKSGKPKLVYENHAMPVFYRDVMYREGAERKDEAYLKIYDGHDWKWFCVRLEHTDMEYLRKYWSGKKASAPTLEKRHHKYFLRFTYTEEVTLTKTPVKEQVICSVDLGINTDAVCTIMRADGTVLGRKFIDHPSEKDRMYRTLGRIRRFQREHGSAQTQGRWAYTKRLNTELGKKTAGAIVRYAEENHADVIVFEYLEMQGKISGKKKQKLHLWRKRDIQKCCEHQAHRKGMRVSRICAWNTSRLAYDGSGAVTRDWKNHSLCTFQTGKRYNCDLSASYNIGARYFIRELLKPLPATERSLLEAKVPPVKRRTSCVYADLRKLHSEMERLKAA

SEQ ID NO: 32269 - protein, 388 aa, unknown
  TnpB Polypeptide
MDTNRCYKFRIDPTPEQEHSFAVFAGCRRFVWNWALARKQEVFKSTGKGIGYNALASELVALKKTDAPFLTNCQSQVLQQTLMDLEKAFKSFFEKRTRFPRFKSQKRTRHAFRIPQNVSIVDGKVFIPKIGLVRARLHRDIEGSVKSATIKQEADGYWYVVFVSRIEIPDWVPACDQPCGIDLGLESFLTLDNGTKVKPPKFYRRGHRKLKLLQRRLSRCQKASRNRAKAKARVARQHTRVANRRNDFLHRLSHGLVARYDTICVEDLNLFALVRTKLRGHSKSWADASVRSFLRMLEYKSLCNAGQVVKVGRWFPSSKTCHKCSRIQHLALSDRQWTCGNCGACHNRDHNAAINILTEGLRIVAAGSAETQTASGESISPAMAGGSR

SEQ ID NO: 32270 - protein, 427 aa, unknown
  TnpB Polypeptide
MILILIYIIKELIMLLTFKIQLRLNDEQQSIIDAISNDGRLLYNYFLGKLKEQYEKDKTFISYYIQQKELKDYKSDYLTFDIKKDILRTLHNNYSSFFKLVKQNKDLNPKPPKFRGKDYFFTLSFTQDFIIKENILRLSYSNYRKLDVKLDFIKPIKNLICLRNKTKESEIKQLKIYKKNNHHFASITYEKQENILKNIDKTKLLSIDLGKKNLLSIYDVENNKGIVYSSKYLSKNQKFLDKRLDELKSLKNSKKKYSRKFKQINKKLKKIYNKKKTQTNLTLQKVSKDLSNQNKTILIGELTNLKKNIKSNYKYLNRQMQNNWNLQTFIHLLEYKNKLKGNQVIKINEAWTSKTCCKCGNINHDLDLNDRQYICDCGNDINRDINGAINIYKHFMGDYNPPFETLVVSERFDWCHINQMNRNYKFY

SEQ ID NO: 32271 - protein, 447 aa, unknown
  TnpB Polypeptide
VTLLAYRFALDPTPAQERALRSHAGAARVAFNWGLARVMANLSQREAERSYGIADLTPGMSWSLYSLRKEWNQAKATVAPWWPECSKEAFNTGLDQLARALKNWGDSRKGQRKGKPAGFPRFRSRRTARPSIRFTTGAFRCEARHAVLPRVGRVKLHEPGTRLTGLVAAGTARVLAVSVRFERGRWFAAFTVEQDISRPAAADPDAVIGIDLGVKTLAVLSTGEEIPNPRHLGTSLRKVRRLSRTVSRRRGPDRRTRQVPSNRWRRAATELGKAQGRVADQRRDALHKATTNLTGRSGTVVVEDLHVRGMLANRRLARHVADASFAEFRRQVEYKTAWRGGTVIVADRWFASSKTCSGCGAVKAKLPLSDRAYVCTACGMVADRDQNAALNLAGYGKHQLAGSGPDSNGRGADRKTTPGSRVAVKRQPGTGHAGQTGTVPRQRGTAV

SEQ ID NO: 32272 - protein, 391 aa, Oscillatoriales sp.
MAEKAYRYRFYPTTEQVLLLRQTLGCVRLIYNRALAERTQAWYERQERVGHAQTSSLLTTWKKDEELAFLNDVSSVPLQQGLRHLQSAFTNFFAGRTQYPTFKKKRNGGSAEFTRSAFCLKDGQVFLAKSDQPLKIRWSRPLPDGVEPSTVTVRLSPGGHWHLSLRFDDPRDLTLPESSNAVGLDMGITSLVTVSTGEKVANPTHLKRHHKRLRMAQKSLSRKVKGSRNRDKARRKVARIHQWITDSRQDHLHKLTTRLIRENQTIAVESLSVVNMVKNHKLARAISNAGWGELVRQLEYKAQWYGRSVVKIDKWFPSSKRCGSCGHVVDKLPLKIREWDCPSCGMHHDRDVNAARNILAAGLAVSVCGATVRPEESKSRKAGAMKQKPRS

SEQ ID NO: 32273 - protein, 462 aa, unknown
  TnpB Polypeptide
MNDTTKKIKSNEKSAIRLNITLSQQHQAYFKHSRDFQRKMSEKVYSMLKAKEIIEIQAHSLIIPEQVSLTNGATSGEEKKKVSGVLTFTGRHSLGDRQLKYLPEIKEIIEEFFTEDYLKSHVDALLWEVCRRYKSYIGRNNKLPKSSIKIRDKSMAYKSDIFRLNVETKEVLIKKMTKDKNEPDVLVPYDAEDFYLEKIGLLGFGKSKKLEHLTEAKGGIISFKKNELVLVADKVVTYDKVKTWVGIDINKSPDNWLYFSKKIDGKYNFPKPKDILEIEEYIRSTQKKISKDRSIKSKQRSGLRKKWNKAHARHQKMISDFIFEKLEKLKTSSKSSVGIGIDTVGTGQKNGTFGQDKVIVAAQKFCRANGMAHYFVPTPFTSQRCNKCGNVSKQALRKLIKDKYICVKCSHKCHADLNAARNIAAFAKVLQDSDFEMTGTLNLDYKVKSWEILNDKFKLKKK

SEQ ID NO: 32274 - protein, 421 aa, unknown
  TnpB Polypeptide
MRTKKHPHPQLAIRIQMKPRPIFTDLCACAKNLYNRATYVVRQTFFQTGKWVQYTTLYHQLKAEPVYLALKTLSDSYLPQQVLRQVEQTWRSFFNGLKAWKKDPTKFQSRPRIPGYKPKNGLHMLNFPRPRVRIRENQILFARNLMLRGFPTFLLGTLPLTAETCVGARLVPFYDRFVVEILYEVQVQHFPTSDSPPRAMGLDLSLNNLVTSSDGLLVKGGVVKAINQWYNKQLAHYRSLATIHKQQVTTRRIQRLSRVRTNRLRDVFHQTSRQIISYCVQQNIDTLIIGYNPLWKQHCNLGKRTNQSFVHLPFLQFVKMLEYKAKLVGMTVVRVDEAYTSQQCSQCGCVDKRNRKSRGCFVCRACGFFLNADYNAARNILQRYICKFKVVPMVPTPFMVSGLPDSGYVTHPVQNFISKVV

SEQ ID NO: 32275 - protein, 197 aa, Azomonas sp.
VVEVEAVVPAGQDKIGIDLGLKDTATCSDGTKLEAGRFYRDLEPKLAIAQRAKNKKRVQAIHAKIANRRKDALHQFSRQLVNRAGELYVGHVKPSSLTQTKMAKSVLDVGWGMLKTMLEYKCAGAGIVFKAVNEAYTTQTCSNCGALPDSRPKGIAGLGIREWTCSACGVRHDRDINAAQNILAVGHGRPVVGIPVL

SEQ ID NO: 32276 - protein, 402 aa, Escherichia sp.
VKRLQAFKFQLRPGGQQEREMRRFAGACRFVFNRALALQNENHEAGNKYIPYGKMASWLVEWKNATETQWLKDSPSQPLQQSLKGLERAYKNFFQKRAAFPRFKKRGQNDAFRYPQGVKLDQENSRIFLPKLGWMRYRNSRQVTGVVKNVTVSQSCGKWYISIQTESEVSTPVHPSASMVGLDAGVAKLATLSDGTVFEPVNSFQKNQKTPARLQRQLSRKVKFSNNWQKQKRKIQRLHSCIANIRRDYLHKVTTTVSKNHAMIVIEDLKVSNMSKSAAGTVSQPGRNVRAKSGLNRSILDQGWYEMRRQLEYKQLWSGGQVLAVPPAYTSQRCACCGHTAKENRLSQSQFRCQVCGYTANADVNGARNILAAGHAVLACGGMVQSGRPLKQEPTEMIQATA

SEQ ID NO: 32277 - protein, 384 aa, Ligilactobacillus sp.
MIRTQKVRLYPNQTMKKVLDDLCDYRRFCWNQGLALWNDMYDSSLILEDKKLKPSERKVRDELVANKEDWQYQLSARCLQLAISDLGKAWSNFFNKALPDWGKPKFKSKKAPRQGFKTDRAKIINGKLRLDKPLGIKTWYDISFKRAKALDGDLKVVSVYRENGKYWASLPFEVEITKKDKTSNKTAVDTNIGHFNYTEGKVNTLPNHLKKLYKRIKHYQRQLARKRVVNGKKATKTDNYVKTRTKLQRDYCKVANIQHDIIHKFTTKLVSDYDKIVIEDLDVKKMQMTHVASKGLQRSLFGYFRQVLTYKAEWYGKEIVLANQFYPSTQRCSKCGYIKTGKDKVGLDGNQKHKTKHNEYICYECGFEIDRDENAVKNLLALIF

SEQ ID NO: 32278 - protein, 401 aa, Kribbella sp.
MSAMSRFRLYPSLAQRNALLEQCKHARYMWNVALEQWSMWTRDKGPTPGYVEQARQLTEARAAFAWLREGSQTVQQQALRDFDRAVKNFYSGTHRRPTWRKHGLHEGFRIVGPQTNRVVTLNRKWGRILLPKVGWVRLRLSRRVPEAKSYRVVRDRAGRWFVAFAVIPQPVPAPGTGEMVGVDRGVTVSAALSTGELLICPALSEREKERLKQLQRRLARCVRGSNRCRRVKVAIGKLHAVARDRRTDWVEKTSTDLARRFDVIRVEDLRIPQMTSRPKPRADPARPGAYLPNLRRAKAGLNRGILANAWGGLVRRLEDKAAGRVEKVDPAYTSQTCSSCGHCAPENRESQAVFRCVACGHQANADVNAAVNIAAGRAVSARRETPIRVSPKREPQHATSA

SEQ ID NO: 32279 - protein, 467 aa, unknown
  TnpB Polypeptide
MGRRYAMTVPVTMAKAEKYAVRTGSISAAGMTYLRKNFGCARKVYNLYVDFLYGKLKACGYTGGAELPEIKLPEVTEFKKQYPYLKEVDSLGLANVKNSFSSAVRRYNEGYDHKAFRKSAVKRAEAGHGKLTFRDLKGMPRFHKKGRCTDSYTTNCQYPDENKDLKRPTIRLEGDKLYIPKLKEGLPLVLHRPLPDGAVIKNVTVSMDTDGQIFASVNYQYTAMMEMGIREACLSGDSSIIGRLAFLGLDYSQEHFYVDSEGRKANCPRSYRCSEEKLARLQKDLSRMQKGSRNYERQLQKLQKRHVKVRNQRRDFVCKEALRLSVEYDVVAVEDIDLRAMGGSLRLGKNLHDNGFGLFRDRLAQKLREKGSVLVKVDKWYASTKTCSTCGFVDPDVKLGVMEWTCPQCGAVHQRDLNAAINIREEGRRIFIDYFTHAMAEEERSRQRAGKLHKARKAVRRRRSAAA

SEQ ID NO: 32280 - protein, 457 aa, unknown
  TnpB Polypeptide
MAKNITRSDDWKLDHSNQLPVILNTLQIYRDFVQCLVGIVYANWADIGKISNSNYRQTFVEKLIHSTKNNKAKYSIFDKRFYKFPSYFRRAAISAAIGVVSSFVSRYNKWQGGIRRWKDEKPPKLTAKTNLFPSLYSYNCILYYEESVEIKVFKDNDWKWISLPILKKGKRHLKHKALAPFLIVRGQKVFLSVPFNIIVTKENAPDLQKDPVACFDLGINHGAVGSILHSNGTVTARQFIDRAADIDRRDRRLSLIRSKAKKSMGKKGKLTEGFCRGLYRKSTNINREIAQRLANEIVEFALAHGASVIVFEHLKGFRPRGGRKGSTLRQRFHGWLHRRVVQLVENKMEELGKRVYFVDPRGTSKYAYDGSGEVKRDKKNYSIARFPNGKEYHSDLSSSYNIGARYFHTLMFRERHKSRRDRKSLLGPRMPVTLSSLWEVSHNDARREAPSISEESC

SEQ ID NO: 32281 - protein, 384 aa, unknown
  TnpB Polypeptide
MNMRLTRTIKLKLDIPIEIVKPTIKAYTKAFNFVCKIGWDNSDSNGVSLHNKSYLETRKYLPSQLAVSARMKATEAIKAVKTRLKKKLKATCPQAEQSSIRYDARSYNVWFERNELSLLTVGGRIKIPVFVPEYFQQYLTWKRCSADLFIRKNKVFMNIVFSRDITDPELTGKVVGIDRGIKKIAVTSENQVFGGGKIKKVSKRYEKIRSALQPRGTKSAKRHLQKISKKENRFRADVNHVITKQIVESLNPGTVIAIEKLTGIRQSVRLRKKQRKDLNKWNFFQFEQYLTYKAEARGMKIEHVDARYTSQKCSVCGYISRSNRQSQSVFKCKQCGFSLNADINASRNIRQNYLDAICYPSRVPVNEPIAGGRLQPTYLQATGL

SEQ ID NO: 32282 - protein, 400 aa, unknown
  TnpB Polypeptide
MIIRKAFKFQFKTNPAQDRLLNQAAGCCRFVWNKALALQKERLDAGLPILKYTEMAALLVEWKTCPETEFLNLPPSQPLQQVLKNLARALKDAFNKKSPKQFPQFKKRGKHDSFRYPQGFEVDEVNQRVKLPKIGWVSYRKSQGVTGVSKNVTISRICGEWYVSIQTESEIEQPHHPSVTSVGVDLGIAKMAVLSDGMIYEPINSFRRYEQKLARLQRELSRKVKFSSNWQKLKRKIAQLHHRIANLRMDYLHKTSTQISKNHAMIVIEDLQVSNMSRSAKGTPEEHGKNVKAKSGLNKSILDQGWYEFGRQLTYKQMWRGGILVKVPPQYTSQRCSVCGYTSPDNRKTQSHFVCQSCAHTENADVNAAKNIAAAGHAVFACGGSDSSPPLKQEPAERVA

SEQ ID NO: 32283 - protein, 422 aa, Lactobacillus sp.
VNIIKGVIILDQSITIKAQLLNIDGETASAFRDTVLMYRDACNFISQYVFDHDFELHQAKLNKALYHDLRDKFALKSQMAQSAIKTVIARYKTVKTQLSQKPYRYDTGKTDSKGHAIWSQFSRGLSWLWQPIFFKRPQLDLQRGRDWSYKATTNQLSLNTLQGRKAVDFACKGFDQYLDESKWKFGSLKLLQFENKWYVHLSATISLPDFQASQAEHVVGIDRGLRFLASCYDEQGKTLFYSGQKVLRKRRKYKKLRAQLQAKGTKSAKRRLKKIGQRENRWMSDVNHCLTKTLIDHYGKNIIFALEDLTDVRFATEKSSKDRRYEMVSWAFYQFEQFLTYKANLNSSAVVKVPAKYTSQRCPKCGRIRKENRNHDLHLYVCDKCGYKSNDDRLASMNIQFLGTLYRSGEETPQFNKQASAE

SEQ ID NO: 32284 - protein, 351 aa, unknown
  TnpB Polypeptide
VVGRPLGRVLEGAPNRRGTPVRQPQRALSTQGQGLWRRYLAWKPPREFRSFTYSQSGFKLDKKGGQTVLSLSKLADIPIRLHRAIPNDAQLKQVTLKKEPTGEWFATFGVEMDREPPDLPENPEKCVGIDVGILTYAHDTDGTAVGALDLSDERERLEREQRKLSRREHGSNNWEKQRRQVAECHADLRRKRRDFLHKLSAYYAREYDLVAVEDLHVKGMMESPSNSRNTAYAAWGTFLSLLEYKCERAGTHFVAVDPRGTTTECASCGASTDKPLWVREHSCPACGFEADRDANAAWNILSRGLDDVGVGYSEETPVETALPVDTHVSAKRVVETGSPTLCERVSASRAG

SEQ ID NO: 32285 - protein, 396 aa, Catenibacterium sp.
  misc_feature (262)..(355): Xaa can be any naturally occurring amino acid
LRQGKYLKFELNYALLKSSDNYRTLNSNMAQQILKVVDGSFKSFFGLLKKAKQGKHALRDCRLPHYLPSDGYTTLVIGFVRLEGNKLILPYSNSFRKTHKAVEITIPPILLDKKVKEIRIIPKADARFFEIQYIYEAECIQRNLNTTNALALDLGINNLVTGLSSKGETFIIDGRRLKSINQWFNKKNARLQSIKDKQHFGKKTTNRQKALARRRNNRINDYMNKTARKVIDYCINHDIGTLVVGYNETFQKDSNIGKRNNXXXXXXXXXXXXXXXXXXXXXXXXXXXXXXXXXXXXXXXXXXXXXXXXXXXXXXXXXXXXXXXXXXXXXXXXXXXXXXXXXXXXXXXXXXXXXXLLFLNLQKGDYISYSQAAGEASVQGRLSFHQGIMSYCKESY

SEQ ID NO: 32286 - protein, 387 aa, unknown
  TnpB Polypeptide
MKKAYKYRIYPTKEQKEFFAKTFGSCRFVWNKMLVEKLYHYEKKNPIPQITPAKYKEEFPFLKEVDSLALANVQLQLEKAFKNHLKNRKHFGLPKLKRKREKQSYTTNNVNNNIKVNFEKGLLYVPKVRDGIKIELHRNFTGKIKSVTISKTKNDKYYASILVELDDPRNKVVEPKSKSCGIDLGLEDFVTITNDFGTKKIKHPKYFRKAEKRLKKLQRKLSRKRRGSKNYEKARRKLAKLHEYISNMRNDFLHKLSKAIIDENQVVVVEDLNVKGMLKLNLAKSISDSGWSKFLEYLEYKANWYGRAFIKVDRFFPSSKQCHCCGYKKENLSLKERIWTCPLCGKTHDRDANASINLYLVGLERPEFTPVERLKASLKQEALPSIG

SEQ ID NO: 32287 - protein, 400 aa, Microbispora sp.
MRTAYKVRIYPTPEQAAVLNRTFGCVRLVWNTILAWRQARYRAEGATTSYVQTDRYLTEPKRDGGHNFLYEVSSVPLQQALRHQHTAFVNFFAGRARHPRFKSRHGRQSATYTRSAFRWRDGRLHLAKMDGPLEFVWSWPEVAPAMIDPTTVTVSRDPSGRWYASLAVEADADPEPLPCTGSQAGIDLGVTDFVVLSTGEKIPNPRHLGCKARNLARYQRRMARKQRGSANQAKAKAKVARARTKVRDARADFLHRISTRLVRDHDLIVIEDLNVKGMVRNHSLARAISDCGWGEFRRQLEYKTAKYGRTLVVIDRWYPSSKTCSACGHLLAQLSLSTRTWQCPSCGTRHDRDVNAAKNILAAGRAVSACGADVSPQGSSLRRSAVKQEAQPVRVGIPRL

SEQ ID NO: 32288 - protein, 425 aa, Halobacterium sp.
MTDSQALVKTLDFQLDIQSDNESLLRDATLEARSVYNETIRLAKQGVDWDTISDRVAADANLVKNTTQRVVAKALGAMEKYYEYDDFGQPSHTKDGVYPLRANYEEGYNLSLTDDGDVAFRISAKPYKHVTGVLKGSDAHIDILKTALESDEWTIGTAEALFHDNTAELHVNVTNPEQIVRNKQDSRTVVGVDVNEDNVALTALSEDGVEDTLVIDFPEIKFERHRYFTMRKRVQNAEKPSMHDTLDGREQRFVRDRLHKVSRHIVKWSRQFERPCIVFEDLKEMRDSIDYGTRMNRRLHHLPFRALQHYTSYKAAFEGIPTAWINPEYTSQRCPMCRHTERANRNKKRFKCKDCGHQDHSDRGASINIAVKGIEKHQNWNVPALNSLPVVRKVRRQASGAVDAPTVTRDTATGHLADGVAGVSD

SEQ ID NO: 32289 - protein, 430 aa, Halobacterium sp.
MTYKYSPRYPLLPTDEHDEKLSWTVDVVRQLYNDRLKRFNEIPEDQGTLRQRVRKARNELPAMKDWWSDLNDVYSTVLQNAVMRIHDNKESLRALKRKGYDVGELRWKSPRDFRSFTYNKKGFELDKKSGPDGYAELILKKVAGDTITVPIRLHRDLPAHESIQQLTVKQDATGEWFATFTIKTETPPKPDVDEINPEDCVGIDLGILNYITDSDGRAISRLDLSDERERLEREQRALSRKDHGSNNWENQRIRVADVHKRMTNKKDDFKHKLAHFYTTQYDAVFLEDLDVKGMLEGAGNARNKHEVGWRDLITVFEHHGEKNGCHVLTVDPEGTTKECASCGVVSEKPLWVREHACPTCGFTADRDENAAYNVLARGLKELGVVHSEGTPVETATATSTNGGDTSVRVDASRVVEAGSRALKAATVVAE

SEQ ID NO: 32290 - protein, 405 aa, Halobacterium sp.
MEIQRTAVVKLTVPDERRDDLKRTMNTFRDAAQQFANRGWKGDDDGYVIASRSRLQPLVYDDIREDTGLHSDLTVAAVNHAAAALTGCVDKLKEGKRTSKPVFTSNTTVYNTNAISYFEGYCSLAAYGDGRVHAEYVYPDNSPQAEYIESDEWTKQGAKLRYDHQTDTYYLHVSVKQERDESSGKAKSRTVLGVDRNVDGYLAVTSTGAFIGNADRLNHKRREYERRRARLQQQGTRSAHLTIQSIGDTFANWSENFLHRASKQLVKEAASQGCSVIVFEDLEQIRERISNASKFQQWAFRELKRQTEYKARAEGIAVKSVHPAYTSQRCSHAECGFTHEENRDGDNFTCQKCGKELHSDYNAARNIAHRYIQNRLKSGSGRATHHLALKSGTLNGNGEYSPSTV

SEQ ID NO: 32291 - protein, 426 aa, Halobacterium sp.
MAKQVVTRTYTASIRNQQQVQDDLDALGFSASKLWNVGRWVCDRVWSEIGHIPSHTELTAYLKSHERYDDLHSQSSQRVLQELAEAFNGWYTKRRNGDTRANPPGYRKHGDEHPRSTVTFKQKGFKLDTEYGRVRLSKGSNLKEYWSDFILCEYQTRPDVDLSTVENVQQARVVWTSDEWELHFVCKVEIEVSEAPGEKTVGVDLGINNFAALAYEDGHSELYPLNCLKQDDYYFNKRIARCDDSDSEQATRLNQKKSARRTHYCHTLSKHIVERCVDKGVGTIVVGDLSDIREDEENGESKNWDKHGNLDLHSWAFDRFTSMLEYKAEMEGITVEQVSERDTSKSCSYCGRKRSANRVERGLYVCDECETVANADVNGAENIRQKVSPSSPNLSVNRSNGWLAQPSTYLFDSESGCFAPREQVTS

SEQ ID NO: 32292 - protein, 441 aa, Halobacterium sp.
MKRVNEFEVRPRTPGQREVLLELLDASAALWNELTYNRRQAFFDDNPVWHATNPSDRYKDVLGSATAQQIPRKNSEAWRSFFALNEKYHDGDHDEKPNPPGYWGNEEDGRERRTYIRNDQYTLQWGDRSRLEIPVGKALKDEYDITGRLRLEACGTPTWDGEQGRLELIYDETDDTFRALQPVTIPDFRRDSPLASEEAALDVGANNLVACTTTTGTQFLYEGRSLFKRFHETTEKIAHYQSQLDDQRRTSRRIDRLYRQRTARRNHAQDALVRDLVEQLYKDGVSRVYVGNLEDVLETHWKCVVNEKTHNFWAFSRFIDRLECVCEEYGIDVVETSEAWTTQECPECGEQEKTYRNVDVFRCGACGFEGHADLKASRVFLDRETGGEGGSMARPVCLKWDNHEWRPATTAPPMRRTNIKEDRTDQSTRPKVGKIASGEAA

SEQ ID NO: 32293 - protein, 412 aa, unknown
  TnpB Polypeptide
MRSQKIRLKLTKEQEGLAWWYSKVSRNFWNLLVDIDKRNNKGEFYEILNKNGNKTYYSKFYDREIYKLNQSDYRKLAKIVVAKNYEDDKDKWSWYDQSNQSFIYAFLSRELVKIRKQNKGWLNFRSIDKIQPNFNVRCDVSANKKRSSRIYLKDSGKLQIPTIGDVRFGSVREDFNLSSKKQVANISFDGKYWYLSYTEDVESQVADLPDYTEGLGVDLGIKTLVTVSDGTTVPNIKTFRRVRILNKRLKRLQRKISRKYCINKCDKHNKTKNIIKLERQIKLIHRSLRNIRINHIRKFVSKLVKKQPQYIAIEDLNVKGMMKNKYLAKDIANCSFYTIKEHLIRKATERCIAVRLVDRFYPSSKTCSNCGSYNKELKLSQRVYHCSHCQEKIDRDFNASLNIAKADNYVLA

SEQ ID NO: 32294 - protein, 578 aa, unknown
  TnpB Polypeptide
MEEENTKQEKIQTKKLRKTERKSIQFDTTKKPCKYIIKKNFNGKIYGRECGDITETESVNQFCIDHINKNENVKYDILTENTCEHIISQMSRGKDRKGMKCGKFTLDSTDKKYCTDHVKRHKDSENKNTETVERTIKIRYYPRSDEKKKLEKYYGCCRKIYNMLCDSEKGYNIEDEIDVNLMKNIIKRSYEISPNIMDPIEIKRKDEFTELRDKYVTYLGNKDGNEYMKDVPKEIRAFAVKEYITGKQNSKMQYKKKKAINEFCIKEYGKKYKPKKIKKSEMKYRKKKEEQSITINKDAITVENGNIYCYKKSFTEKPLILRNATKEKREKKYKEIIKNGIKHDIKIIKNKINKYYMCITYDTIKKKNEIDNKKVIAVDPGSTNFLTVYKENEILEIGRDNIKILEKLRKKIKELKKKRNGNEAKKLQIKLKNKVDDLHYKTITKLISENDLILIPKLNVGKIVRNKTLPTPVKRNILDLSHSRFMVRLKNKADIDKKIVLNVKESYTTQICSRCMNMNKVGNSKIYDCKKCGLRTGRDMNASKNILIKNIKEIKVEKMKEMPLEILKKKEKKSIKIE

SEQ ID NO: 32295 - protein, 578 aa, unknown; identical to SEQ ID NO: 32294
  TnpB Polypeptide

SEQ ID NO: 32296 - protein, 389 aa, unknown
  TnpB Polypeptide
VKIVKGVKFVYQPTPRTLELISKFRDMVNDAIRICLTENIKGRLKLRNRIYKELQVRYGVLSCFPYCVAEVAWSIVKKHKRWHRKPYAKRLMFKMDAANFSLNYSVLTLPFKKGESIHIPLKYGEYQRSFLMDKTLKRGSVTMTESSIVIAFSKEPPVAEPSKKVGYDLNEKSVVGSDGTRHDLSEVARLHTLYGVRRSRFYERHAYDRRLRKKFAASRKEKERVNQALHRASTLIVEKARANREVIVLERLKGIRHAHKRGNGEGKAKRRRIALWPFRQLQSYIDYKARWAGVPVEYVSPSYTSKKCNVCGCINRKLRVTDRSWLCPCGAKLDRDLNAAINIERRGKTPCLGEVRPGARGTYEAVKGNETTMAPILRAEASKSDLRLP

SEQ ID NO: 32297 - protein, 403 aa, Microcoleus sp.
MLVFEFKAYGKKQQFDAVDEAIRTVQFIRNKALRFWMDNSKVNKYDLNKYSAVLAKEFPFCDELNSMARQSSAERAWSAIARFYDNCKKKTPGKKGFPQFQKDNRSVEYKTTGWRLTTDRKSITFTDKKGIGKLKLKGTRDLHLYQVTQIKRVRLMRRADGHYVQFCIQIDRNERIEVTGNSIGLDVGLKEFYTDSNGVTVENPRFLHKGERRLKKAQRRVSKRVKDSQNRKKARVTLSKRHLKISRQRKDFAVKLARCVIQSNDCVAYEDLRIKNMVKNHCLAKSINDASWYMFRTWIEYFGKVFGRITVAVPANGTSQECSSCGTIVKKSLSTRTHVCQCGCVLDRDYNAARNILSRGLSTTGHVGTWILDPNACGELTATDVEVILHRQVESMNQESPRL

SEQ ID NO: 32298 - protein, 404 aa, unknown
  TnpB Polypeptide
MIVIQAFRYELKPNNHQKELLMKCCGVARFVWNWGLARRKELYRTQTGNDRFISAISQYEEIVILKQDEFLWMKEVSKCIPQQTLRDLDRAYSNFRRGLKSHEDIGLPKFKKKGKHDSFWLQGCIKVSDKNIQLPKLDKVRTKESTEKFVGRILSATISREADRWYCSLRVEVDRKKVSSFANEIVGIDLGIIDFAVIFNGVEYSHKQSPRPLKSKLKKVKRLSRQQSRKKLGSRNRKKANFRLARLHRRIKNIRKDYVNKLTTELTKTKSVIIIEDLQVKKMMKKKNRHLSRSISDVGWGEFRRQMEYKTIWYGSRLIKTPKSYPSSKLCSVCGYVKNDLTLNDRIWTCPVCGTEHQRDENSSANMRNYGLKILSTESCSGSCACGETVRPNQEASLAEAGIK

SEQ ID NO: 32299 - protein, 363 aa, Providencia sp.
MSIYTKTLSVRVKDKHAALLRQMAYEVNQAFNLANEITYKAYSNVGEFGAQVPKWLTAFDVQKLTAGIQKERGWTIGSATIQEVIAEHGKARKQFKRAKLRWRISGGTKRSLGWIPFKSRAATWQNGQVKFAGHLFKVWDSYGMSGYKFRAGSFSEDSRGRWYFNICVQAESQPTEGKTAVGLDLGLKDYATPSHGEKLARGNFYRDLEPVLGKAQRANKKARVRAIHAKIKNRRKDALHKYSTALVKHNAAIFVGNVSASNLAKTKMAKSVLDAGWSMLKTQLEYKAIARSVVFAVVNESYSTQVCSCCGAISANSPKGRAGLGIREWSCCECGTTHDRDVNAAKNILAAGHRRLTVGIPAL

SEQ ID NO: 32300 - protein, 440 aa, unknown
  TnpB Polypeptide
MKLTYQFRIDKFVSEEQFNKIKNAMSATSNFYRYCINAFTFEDKAKKKHNVETIKELFLALKKKDFCTQYQINTQYANSISRDAKDKVELFNAQKESGLKRIEFSIYTLSKENDELDKQISLNQENLTYKDRKDLLRKIYFNNREIERLNKQHKKISKYTITCGEKKLQKTNIEQWKQLRKDGNFIVSLHDSFASYGNHHFKFQHIEINKFNLNLEVCNGEKININLQVKLDNKSRQNKICEILKNPIKHKVSYRLIKKKDKLFVQIGVIINNENNKLNENDNANVNIAGVDFNNGHLDFCIIKNNENLSFETIDFLYKNATSNQRKESLLLAIKQMFKQLKNNDVVVLKMENLDFSKLKLKHRKNSNNLKAMNRMIHSLPYSRYEKLMIIEAYKNNIKLILVNPAYTSRKAKDNLNPVYKQIDNLSIHQMAAYSIVIRN

SEQ ID NO: 32301 - protein, 526 aa, unknown
  TnpB Polypeptide
MNSEVAITETKAKAQSKKKVQTYNNAVKFKIIDLKLINYLNYIHEIFLNEYELIHQQNIQLSCFTKDELSHQFRGHFTKKLAELRNKNYLVWDLNNKAKYFRMFSLHLRQDFKSLDYRQKITQVLEKYDFNIQDAKTKKKIQDELIQLNLYPTKQELMNICRCHENKEHQNNHDNDKKELKVIPLDFTLGQDKQTIFQPNKKEPVFHINFNGNWVWLNFIDEINKLQYFKNKINQDNFVRFTKPKFVFNHEQNCWFVILTIESKVKSDESNDSDESKSSIKKMTVAGVDIGQVKPYSAVLMDITQNEQNVVESAKLASKELVCSKETKRINTKLSEVKFHLSNVYRKLDVYSGIIKNNINPEFTQQILVKQESLINEKRCLRRKRKELQKRKSYLAVRDLMKQLNFFNVKKINIERLNWVENTGGSWDFSQQQEILQQKAIEFGIKVTKVYAANTSKENPFTRKRLLCEANTKTRMVQFSGRKYKIDRDILGAINVALRNKVNNQYTKTVLNFNENKKILKGLIAF

SEQ ID NO: 32302 - protein, 232 aa, unknown
  TnpB Polypeptide
MHRKVQGCIKAILIKREGRQWFAIVQADQEPEPLPETGKSVGLDVGLKSFVVDTDGNSIENPRFAKKSADKLAKAQRRLARAEQGSNNHRKIKEQIETIHKRINNQRADFLHKLSRLYVNNYDNICVEDLDVKGLKEKGHDKGKHRSIHDAAWAKFTFMLSYKAESAGRKLIKVDPRNTTQRCSSCGCIVKKELSDRVHECPYCGFSCDRDYNASRNILIAGAATASQLPST

SEQ ID NO: 32303 - protein, 637 aa, Streptomyces sp.
VLRTGVEEKTGELLSAEGLAERVGWAADLVSGMVAALLAEHWNSLDVEVLAGGEDTAGRPLPSSAWMALRRLGWTASPPEGIRVNDRIVRIAQEQAGRTLRSAKWRADLAVGVLTTWPATPAKRTPSEWDAVREAVPDGRSMPSSIISSRTRQIATFARKHGRMPADVFEIEAKPRIARMLLLSACDGQQATIERADEPDRALLRLQLPTRPDPRSYADWTWVAFHIKLPPTIPTNAVLHLPTLRVNHGTVWADLAYTHAVPQTQRSGHRVALGVDWGLNTLLSAGAARLHDDGTVTALGAGGMFRAAGVLAKQHRLRRLSEHLHVKACRYQRLIGDTAQHALAAKHAVLVEEIRHVSHRRSNLNDALAWAAARWAVDQAIAAGASVIYTEDLRSMEARGMGRTHNTRLSQTVRGQIVGRMRHLAAETGIAVVTVPARNTSKHCPQCLAPLRHRKAPDRPTTPGWKWALCGSCGWQGDRDQGAWKRIAARGLTHQAKTVTDRTTGAMRIRAVIDKLEAGAVITPTEPKTRRADRSKTGPTRRHTTRPTPRRRRTPSPTRPSGPAGQRPEGHAHTDRTRLPRAAHRHQSVTTISTPTTSRHRPRGTALGGGFHHHAHATPPRWTEPMADTMSCTGSFN

SEQ ID NO: 32304 - protein, 417 aa, unknown
  TnpB Polypeptide
MYLTIKQQVKHLTKEEYNILRELCRVAKNLTNQAIYNVRQHYFQEKQYFRYEANCYEMKSYKNYKLLNSNMAQQTLKDVDAMFKSFFALIKLAKQGKYSFRCIKLPNYLPKDGYANLIIAEFRVKDGTLTIPYSNTFKRERSRTKVQIKVPKVLEDRKIKQIRIIPKFNARFFEIQYTYEFQEENTNLSTNNALAIDLGVNNLCTCVTNTGKSFIVDGRKLKSINQLFNKQNARLRSIKDKQNIKRQTEQQFLISRKRKNRVDDYINKACRCIINYCLSNNIGTLVVGYNQSFQDKSSLGKKNNQVFTQLPFGMVRERLEYLCKRYNINYVLQEESYTSKASFFDNDELPIYNADNPQIYEFSGKRVKRGLYRTKDNYLFNADCNGALNILRKSKAVDLTVLCNRGELDTPKRIRVL

SEQ ID NO: 32305 - protein, 282 aa, unknown
  TnpB Polypeptide
VRYKGLIHLKGKQGRMEIRYDPDRRKWYAHIPFEVEEKAVRGEWFKVPREPKGSLTAGIDVGINNLIAVYIENGLAKLVNGRPLKSISHYWREAVAEYQSKLNEDLKKPGSKTSKRLRFMYGRWRKQIKSFIDSRVRQTVEWLYEIGVSTVKVGYPKNIARDKGNFDNVHVWTYRYLLSRIREVAEEYGMVVVEVEETYTSQTCPVHRTIECTKRITRGLLKCFILNKVFNADLVGAFNILSTPITPSPERGRGNGPKTRPTGAGETPAPNLPALTGGTLAL

SEQ ID NO: 32306 - protein, 669 aa, unknown
  TnpB Polypeptide
MGVVQDKGDDDINISVVKKTLNSLCMDVSRHQISSRIQSMVLLINHAVAEAYLFANFHITRCLDDGDFDVKQLPHLDRNFYYRCLLAVSTSNVRKDTLGQSFNDTMVAFDALRPAGYVKVDVRPWGQVIADVSIQMATMACNSVWANVDRVVIKYLRLKHPSLKKHFKKIVKAVVQYPESKIDTIIPEGLVHAIHIKEVVSHLRALFPLPRGKQFNTRAHLTMRLFHHVLTELGEVGRVDPKDKKTRKSHPRLFSILPRKNGFTISYVPISSMTFMKLLSMGDSPLESVSGDGRYENHTMLWRKYFNVQGLETKRSRFDNRILSDGKGVSVQMKQKGKEEVVEEGENAGYPKDANIVECKDAVGALRVGVDPGMTDIVTVASSAGRIESFSSARFSEVAGYNTSKRRTYKWNDETQDLVKSIPSPNTSNMSDLQDHVRAYLKALPILLQHRANKGYRSMRFFRYVGKQKTIEKVCDVIAPRAQTTVVGFGNWSNQGYGISRSCSGPIKEIRRCLSRRKNVLFKNVDERNTSCKCHGCFQRLVNMKADSVVWRGVCKESPIDGSITVEKQKMVVKNVKVHKVLHCRDSVKSASSNVRCGATWNRDVNAAKNLLLLLTTWMDGRERPEAFCVPSPPPKTTVSIEASVSAKPTDPPGFVSSLPCYPLGQLKC

SEQ ID NO: 32307 - protein, 414 aa, unknown
  TnpB Polypeptide
MTLCSYKYRLMPTEEQQVLLAKHFGCVRFLYNHFLEQRINAYKGENKSLNYYDNATSIPELKKTYEWLKEAGSQALQYSAKALQNGYDNFFRKVKLKAQGKHKGKCGFPRFKKKHGKQSFKVLQNIKVIDGKLSIPKFKEGIQIILHRPLEGEIEFATISKNKAGQYFVSITANKVMTPLPTTDKTIGLDLNVHGIVGSDGTKYKNPLPKTKYKERLKFLTKAKNRTQKESKGRAKAYLKLNQLEQHIHNIREDFQHKVSRKIIDENQVIVVETLCVSDMLKNADPEIRKIERWRERAYHRKQADACFSSFFQKLKYKAEWYGRELRQVDKWYPSSQLCSVCGYQNKELTLEDREWTCWNCWTNHDRDENAATNIHNEGINPCWNTGRAVCLGIRPVLDGLLIGTEAPPSLGAG

SEQ ID NO: 32308 - protein, 398 aa, unknown
  TnpB Polypeptide
MYLVERHIIKSNNPLYKELDNVCFLSKNLYNKALYLVRQHYFSTKEYLDYYKVNRKLIDSKDIDYYALPCKVSNQTLRLLDRNFKSFFSLIKKKKNKDYDKSVRIPKYLDKEGRYIAVFEKNAVSKRFLKKGLIKLANISNTFVTKVTIDNIVEVRVLPRNNHHIVEVVYKKEEKPLLVNNERYASIDLGLNNLATVSSNVEKPFIINGRPLKSINQRWNKHKANLQSRLTDNKKSSKQIALITNKRNNRVKDYLHKSSRKVVNFLVSKNISTLVVGYNEEWKQNISIGKVNNQSFVSIPFYTFIQQLQYKCKLEGINVILTEESYTSKCSFLDNEYIEKHDSYLGKRIKRGLFKTVKGRLINADLNGSLNILKKVIGEFEYPIEACCTPVRITPSLH

SEQ ID NO: 32309 - protein, 301 aa, unknown
  TnpB Polypeptide
MQKAFKVTLIPNHNQQVLINKTIGCARFVYNRFLALRQELYTTEQKTLNYNACSQQLTLLKKEIEWLKEVDKFALQNSLKNLETAYKNFFADLKKSKIKLGVGFPKFKKKHGCKQSYKTNLTNRNIEVTENRLKLPKLGWIKFHKSQDITGKLVNVTITRTSSGKYIASILCETEIEKYPQATQNIALDLGIKSYLVTSDGEVVENPKYYRLQLRKLRKANKKLSRSTKGSNNRVKAKIKLARAYERITNLRDDFLQKLSTRLIKENTIICIEDLRVANMVKNHKLALTISDASWSKFVGL

SEQ ID NO: 32310 - protein, 348 aa, Chloroflexi sp.
VPLDPKVKEPQWREWNLPELRVPAIVANANVVVLEPSEDSTFDYWLRISTLEKGNPLRVPVKLAAYHRKALAGRAINTSTALHQRQGVWWLTLSFDENVSLQTEPRAPRVGVDVGIANFLTTSTGKQYGTFHGKLAKRHKRDREKRRRKAKLRACLKKKGVGKLPSTSSASGQRLGRHVRQEINRAINQMLQEHADARIIFEDLSVASMRFKARAMNAYVHASNLAHIPKQLAWATAKRGMAAHTVKAAYSSQACHRCQYVDRANRPDQSTFICGVCGYRNHADRNAALNLSSRFGDQELATCKSKAEVKALLLKRHEAWMKNNGLFVVQPPAQLGLWDEPEASTGLG

SEQ ID NO: 32311 - protein, 393 aa, unknown
  TnpB Polypeptide
MYRSHVIRLIPNDKAQTHFAQACGCSRLAYNWGLAQWTAQYRAGGKPSAYDLKKQFNSIKREQFPFVYNVTKSACERAFTNLGVAFERFFKKLSKYPKFRKKGIRDAFYIAGQSVKIDGRRLWVPKLGWVRMAERLRFLGKVLSVTISRKVGKWFVAVVVELPDSACSDNQVRAAVGVDVGINSLMVLSDGTTIPNTRVTKRYERALRRLNRSLSRKVKRSRNWQKTKARLAKIHYRIRCVRQDHLHKATAKITGAYSDICMEDLNVKGMVRNKCLAKALSDAAFGEVRRQLAYKAKRIHFVNRFFASTRLCMNCGQLHDMSLSERIFVCDCVVGPVDRDLHAAQNILRQGLSEVTPVEMEALASSSTVGETTIVEAGNTQKGCRKDNPYNFL

SEQ ID NO: 32312 - protein, 402 aa, Paenibacillus sp.
MFVLIEAEGGENEMIRCIKTAFQASKTIVNRLFECNRISAEIWNECLNIAKNYSLHHDGKWIGRSQLQAELKDEFPLHSQSIQAVCHKYLFSRDSAHQAKKKGFKNKYPYKKKKHFNTKWVDKAFKIDGNTILLSLGNWDGKRQKPIQIRVPNLPDADIKEIELVFDRKLMISLSYEDGKAASENRGNQLAGVDLGEIHSITATTTENKAVIITGRKVRSIHRLRNKKLAEIQKLMSKCKKGSRQWKKYNQAKRYILSKSERQMKDAIHKTTKNFVEWCVKNSIKEVVIGKVEGVQRNTKKKRRKIVSQKLSNWSFGKIQKQLEYKLEEHGTSVKTVNESYTSQQCPCCDRRKKTSTRNYKCSCGYEEHRDVHGSKGILSKYLHGDIRYLGETKELKYLRIA

SEQ ID NO: 32313 - protein, 390 aa, unknown
  TnpB Polypeptide
MTTTYKFRMYPNKPVREKLDFALDICRQTYNNLLEEMNNQVKINRGEIQHKIVTLKETRPELKEVYSKTLQYECYRLFSNLSALRELKKHGKKVGRLRFKDRDWFKTISYNQSGFSLETIKNKKGILHLSKIGDINIKVHRKVEGKIKQITLKKSLGKWYAMIVTDFMQKRTCGEKEIGIDLGINNYIMDSEGNSIAHPKTIDLYAEELKTAQQDLSRKKKGSHNRSKARFRVAKVHEKIERVRNDFLHKLSNQYVKDCKLIVVENLAIKDMMQSSYNAKNIADASWNRFIQFLCYKAESAGCKVEKINPKNTTKQCSHCGNLQKMPLWIRTYKCSSCGFEIDRDLNSAINIKSKFIGSERANVENNSSVQFEQELSMKQEAITSTGVRL

SEQ ID NO: 32314 - protein, 236 aa, Raoultella sp.
VRWSRELPSAPSTVTISKDAAGRYFVSCLCESEPVSLPIAASTVGIDVGLKDLFVTDTGFKQSNPRHTAKYAARLALLQRRLSKKARGSKNRARARLKVARLYAKIADCRLDALHKATRKLINDNQVVCVESLKVNNMLRNPSLSKAIADASWSEFVRQLRYKGEWAGRSVVAIDPYFPSSKRCSCCGFTMQKMPLDVRKWHCPECGADHDRDINAARNIKAAGTGSVSLWRVCKS

SEQ ID NO: 32315 - protein, 117 aa, Pseudanabaena sp.
VLIGKLGLRPRASSTTWGEIVRQLEYKCNWYGRTFVKIDRWFPSSKRCGDCGYIVDKLPLDIREWDCPKCSTHQDRDVNAAKNILAAGLAVNVCGATVRPEESKSRKAGAMKQKPKS

SEQ ID NO: 32316 - protein, 450 aa, Bifidobacterium sp.
MSQKVRIDGVKHAGASVFLGVDHCGNPCWTRNPERIMVWLCDGWRTRFNQRRERRTRNIPIKDEAGEIVDWRKEPLGGPNVPELISDKEARLQCSWMAGIPNPILSSTDRIENTEWSAGLKRKKTAGGRVPGFKSRHRGLGFVCWRNKTKTGNAIFQKTGRKSGVVVITGMNPKRWVKPGEKAHWRVVIHVRASQPIRPYTSVHVDWTHHSLVFVNMPLPLPRTGDGVIGLDRGCVHTLASSDGTFMDMPKPSKAELKRLKYLQRKMARQDRVNEARGGKSAKFASKRRQRTLVKFNALQGCIVRRRNDWIEKTTTRLAQENVLVAMEDLDVKAMTRRPKPKPDPAKPGQYLHNGAKAKAGLNRSILSNNWSRLMKRLQDKMDANGGRLVIVPAAYTSQTCHKCGHVASENRDSQAVFECVECGYEANADVNAAMNILDRALVKTGGGTA

SEQ ID NO: 32317 - protein, 503 aa, unknown
  TnpB Polypeptide
MAQSDAKKLLVEQDSLTQQIFSVLEKLQSLTDHAVTPSATAELVAENSETILPAKSPTSNPSSQRRKSLKTSGQDSITKGKVLEPYWNELCAEISSRLLLPVETDLPDLGLNSLSTWSVSTVEKSWFSTNLKVVPSSRLPQIFFPSFTSSLAESTDLGNTVRKSKKIRVFLNPEQRTLVRKWFGVSRYVFNKTVKILQNGEIKANWKAIKTGILNDLPEWCKSVPYQIKSIAIKDACTAVREAKKKYKKTAQVNRVRFRSRKNPKQSCYIPKSAVSEKGIYHTKLGEISYAESIPDNIGDCRLTSHNGEYYLVVPHEAAKMKTDNQGRVVALDPGVRTFLTFFSETSVGKIGHGDFSQIQRLCQHLDNLLSKISKAKRGQKRRMRKAARRMIVRIQNLINELHHKAARFFVDNFDVILLPTFETSQMSKKGNRKILSKTVRNMLNFAHYRFKEFLKHKAKETGKTVVDVCEAYTSKTVSWTGEMVNIGGSKTIKSRVDGRSMD

SEQ ID NO: 32318 - protein, 435 aa, unknown
  TnpB Polypeptide
MGSYEAVKIRLDPTPRQERLMVSHAGAARFAYNAGLAHVKEALDSGESPEWSHYSLLRWWNKNKDTLAVNGDTGEVWWSQNSKEAYSGAFRSLAQGFSNWSKSRKGQRKGKKVGFPKFKSKNTAMRFAYSTGFTAPKAGDPYGLKLPRIGRVHCMGNVHERVNGVHLVRVSVSRRAGRWYASLTVEREPAAPASPPKGGVVGVDLGVKNLATLSDGTVIPNPRALGAGLKALRKAQRALSRRVKGSVRREKAKERVARLHARVADVRADAIHKATSMIAGNYSVVCVEDLNVAGMVKNHSLARSLVDASLGEFRRKLEYKTARTGAVLCVVDRWFPSSKTCSNCGVVKAKLSLSERVFHCDACGASMDRDLNAAINILVAGSATETLNARGGDVRRADTMLGDADPCEARTKRAQKSAVRLGAGLGNGAMQPRVS

SEQ ID NO: 32319 - protein, 266 aa, unknown
  TnpB Polypeptide
LNGIFKSKIPDDAKLIQCRFVPKKDEYVLEVVYEISLLNINKKKSQNIAAIDLGVDNLITLTTNCGTQPIVINGKPLKAINQYYNKVISDMRSDLKLRNDMNWSHKMQKITTKRNYKVEDYIHKATKIVIDFLKDNDIDTLVCGYNTGWKQETNIGKINNQNFVYIPHSSIIEKLSYKCENEGILFKTTEEGYTSGTSFLDEEDPCEENYDKSRRKYRGLFISNNGIPINADVNGSYQIMKKVFPNAFKNGVENAILHPIVVNIPA

SEQ ID NO: 32320 - protein, 446 aa, unknown
  TnpB Polypeptide
MDVLLTAKLKLQTTPEQFRALRQTQLAYRDALNHVSLYAFAQGRMSNQIALRERTYLDVRARFGLPAQMATNVPRQVGATYKGLWTKVKANAAARAAGKTKKRYRGLDQAPKYVSPTLAYDYQRDYSFKTGQQVSVLTLQGRVIVPYTGYTPHVALIRQGTQMGGHIGAAKLWYDKPHKQFYLLVSLEIAGPDPVPESHQHIVGVDVGQRYLAVATDTLNRTHFFPGREARAKADHYARLRKRLQHKGTRSATRLLTVIAGRERRLKHDRNHLISRQLVDAYPHSLIGLEDLTHIRERTKRKRRHGKKATVKQRRANRHASQWAFAELQGYIAYKALLAGSMAVKVDAYKTSQACPRCGYTAEDNRPEKGLVFSCQVCQLVLHADLIGARNVALRTLLARQDWVRTGVLSERPEVSDDEAKAVQRRRYAELRWSLDTSPRAVAGGI

SEQ ID NO: 32321 - protein, 257 aa, Shimazuella sp.
MEQEYRKTRTTVSLINYHFVFCPRYRRKVLINKVEERFKQLVAGICQENDWIIVAMEVMPDHCHLFLNCLPTDSPSDVMARVKGVTSRRLRQEFKQLSHLPSLWTRSFFVSTAGNAKKLQAIKKSKDKESHWMKDQNHKIRRQIVNYAISNGVGVIRMEDLTDIRNTAKSKKTDQGRNLHSWSFYQLKEFIKYKAEMFGIRFELVNPEYTSQTCKNGHQARANRNGLKFRCKECGHACHADVNGAINIAKAISGLAS

SEQ ID NO: 32322 - protein, 397 aa, Shimazuella sp.
MFERKDESMKIAYKTEIHPNPEQIKKIVSSIGVCRFLYNQYVGQNLDFLQQKQQILSANQFDKQVNHELSLVYPWIKECGSKARKKSLVNAETAFQRYFQKKAGKPRFKKKQAQTVKLYFPKNNPRDLEIERHRIKLPTLGWVRLKEKGYLPIHGSASSCTIEQKANRFYVSVLFSSIYEKKRKNEKAKRVSDGIGIDLGIKDFVITSQGQVFQNINKTSIIKRTEKRLKRVQRALSRQYEFQNKRGEKPATKNGSNIVKNILRIQKIYQRLARMRDAYRAWVVSVIAKTKPTFITIEKLNVQGMKKNRHLAKSISDQGFYDFKQKLGNACRKMGIELREVALFYHSSKLCSHCGIKKVKLSLSERVFSCEHCGRNIDRDHNAAVNLMQASEYVLLP

SEQ ID NO: 32323 - protein, 559 aa, Streptomyces sp.
VVVPTGALTVRTRLRLSDRDAVVLRELAEYLSRLAARDLAERVALGPRHTAADFARRKRELTALTSSRWAGTLTRGSNDQWQLARRAQAAHLARLAAEIGTIERRLTAPVGGRDGSTRVKGYPTRRVRAAKQQRLQVLRARFARVAADAAAGRVHVVRGGKDLLRARFRPDRSGRAPEEWRDRWWEARNRIEADGEAGKTYGNQSVRVGLDGVVVIKLPAVLAERHREHCDRFGRYTLDARCRFAYRVAEWRAQVEAHRSVGYTVRFDGGRCYLMASFTPPEARPRVDADGPALMASALAGGVLGIDQNVGHLAVWRLDRHGNPMGRPGRIDTDWGGSASRRDAQVRRVCSELVREALRGGATALVVEDLGFDTGRERCGWSGRAGRRFRSSVANLSYARLMSRLVVMAHRAGLAVIAVDPAYSSRWGAQHWRRSTGTTRRKTSRHEASAVVIGRRGQGLGARRRAEKAVSRGKTEEAGRVRVETRRRAGTEIHRPAAYDEPGPLRAPRTADRPEDGARDAPRRRTPTAVQAAQDRSGQPAGRRGPPGDQGRLDAVIRG

SEQ ID NO: 32324 - protein, 381 aa, Streptomyces sp.
MKLRYNERIYPTARQRQDLARFFGCARVVYNDGLRERRTAWRNGEPYVSDTALQKKVITAAKRTEEREWLRDAPSVVLVQSLQDLHVAYRNFFASRNGVRKGPKIAPPRRKRKSGRQSIRFTRNGFSLRDDGPLFLAKLGDVRVRWSRPLPSEPSSVTVVKDPAGRYFASFVVETEEEALPELDLDETGTGIDLGLSSYAVLRGRKIGSPRFFRRQEKKLRRAQRRLSRSEKGSVNRRKAGLAVAKIHARIADRRRDFIEQETTRVVRENQAVYVEDLNVKGMARGRWGKSVHDQGLGRFVRVLESKCLRYGRRFVRVGRFFPSTQRCSVCGSVEGPKGPEGLAVRRWTCSCGAVHDRDENAEANLRAEGRRIFAAGLAEK

SEQ ID NO: 32325 - protein, 402 aa, Kamptonema sp.
MYVLEFKVKGKPAQYQAIDEAIRTAQFVRNKCLRYWMDNRGVNKYDLNKHCRVLAQEFTFANKLNSQARQSAAERAWSAIARFFDNCKKAMPGKKTYPRFQKNCRSVEYKQTGWKLHDPKHIEFTDKNNIGRLKLVGTWDLAFYRVEAIKRVRLIRRADGYYCQLCLDVEVKVAAQPTGKAIGLDVGLKEFYTDSNGNTEPNPRFYRQSEKRLQLYQRRVSRKKKGSSNRKKAINRLGRRHLKISRQREEHAKRVARCVIQSNDLVAYEDLRVKNLVKNHCLAKSINDAGWYQFRKWLEYFGSKFGKVTIAVNPAYTTQQCSHCGTIVKKSLSTRTHVCRCGCELDRDWNAAINILKNALSTLGHSGTWVNGPNASGDSTSTSIGAILLKQVESVNEESPHL

SEQ ID NO: 32326 - protein, 225 aa, unknown
  TnpB Polypeptide
MKIASAYSVRLRNFCRVFDDTVEVYRKAVDFFIEIMLRHRDPKFTELKHDNDCIRLAEGLNVVNMDIAVKTANFIVKLANEFKVDVIVMEHRDLTGRKRGSKRQRLHHWRAKYVQQIVEHQAHRCGTRIRRVCSWNTSKLAFDGTGDVTRDTDNYSMCTFQTGKRYSCDLSASYNIGARYFLREYEKSISATRWRCIAAKVPSCAKRITRTLDTLIRVNAELRSM

SEQ ID NO: 32327 - protein, 368 aa, Blautia sp.
VRKINRAVKVRIYPNAEQRVQIEKTIGCSRFIYNCMLADKMEHYKKEKKMLRNTPASYKKEYPWLKEVDSLALANVQMHLESAFHKFFREPSAGFPRFKSKKSSRKSYATNVVNGNIFLEGKYLKLPKMTAVRMKLHRPISEKWKLKSVTVSREPSGKYFASLLFCCENQAAEKRPAEKFIGIDFAMQGMCVFSTGERAEYPMFYRNTEKKLAREQRKLSRCQKGSQNYKKQKKRVALCHEKIRNQRKDFQHKLSASLAESFDAVCVEDLNLKGMAGGIHLGKGVHDNGYGLFLSMLEYKLEERGKYLIKVDRYFASSKICSACGKKKEKLSLSERIYYCECGHRMDRDVNAAVNIMNEGKRIFAECA

SEQ ID NO: 32328 - protein, 348 aa, Anaerobic sp.
LWKTLKNHEAYQSLQKMCGSHPPQQVLKQVDRNFKSFFKAIKVWKKTPFKFTSMPKLPHYKRKDGRNLVYFTSLQCWLKNGYVLLTQKMMNSGFPKIPTDLPCVKGVRIVPFGDRYNIELIYNYNPQNLHLNKSHILGIDLGLANIVTASDNIGNVPLIIKGGVVKSINQFYNKELAKYKSLSKKCNDKHITNRILKIHRKRNNKIRDFFHKTSRKIVNHCIENDIGTIVLGYNEGWKQNINIGKKNNQNFVSIPFLKLIQQIEYKSKMFGIDVVRITEEFTSQTCSHCGIVKKSNRKHRGLYVCSECGLVLNADVNASKNILQKGIPKSIWIGDRGRLGRPIVLKIL

SEQ ID NO: 32329 - protein, 418 aa, unknown
  TnpB Polypeptide
MLLSHKTSVKLNKDYSNIIGHMCYAAYKLWNVCNYERLHYKELGLGEYPDWYYQKKAHKNDLWYKNLPSQTAQEVCKLLDKSWKSFYKLAETHGVANPRPPKFKHSKMPVIYMQNGIVHAAGSDTVRLSVSKQMKDYISKTYEISENYIHLKNQIFKDTDNIKQIKIYPPVNGNCDVIVIYESEDIDVLPDNGRYLSIDLGIHNLMTCYNSVSGETFIVGRKYLSLCHYYNKEIARVQSQWSRIQNGKGIKYPKSSKHINKLYVKKNNAINDYLHKITRYTVNYCRDNNINTVVIGDITNIREDKDYGHVTNQKFHALPYKKIYIMLKYKLALYGINFIMQKETYSSQTSPFMDTVCKQNANKDNRVKRGLYIDGGYRWNADSVGAFNILRLYFQAKKIDTRLDPVSILSPEITKVAA

SEQ ID NO: 32330 - protein, 281 aa, unknown
  TnpB Polypeptide
MQIISSYGVELRKQNIPLRQTLEIYRSAVSYLIGTYVQVWEKLAEIPDAKRRFNAAEHLVHTTKKNHACFDFDIRFPKMPSYLRRSAIQHALGTVSSYKTRLDLWEKTDGKSGKPKLVYENHAMPVFYRDVMYREGAEGKDEAYLKLYDGHDWKWSCVRLDHTDMEYLRKCWLGKKASAPILEKRHRKYFLRFSYKEEVTLTKTPVKEQIICSVDLGINTDAVCTIMRADGTVLGRRFIDHPVKKTGCTHTGTDPQIPEGTWLCADTGKMGIYETSEHRTG

SEQ ID NO: 32331 - protein, 418 aa, unknown
  TnpB Polypeptide
VADDYVRRTAITRLQLTGEQCELLEETISEWKRGCQLATDMAWGKCNTKSDVQPLAYDDVRDKTDLGSQHAVLATHQAAQAITGCIERRSKDKKVSKPAFTAPTVKYDTRTMTLFEDDTVSLSTIESRVRCDLALPEADDGYQRQYLDSEKWNVTESTLTARDGDYFLHIGFRRHKNDTERNTAEDGTVLGVDLGIENLAVTSTASFVSGRELAHDLREFEKVRAGLQQTGTRSAHRTLKQSSGRELRYIRDVLHRASNAIVAEALRFECDVIAFEDLTHIRDSTGASWGHKWAFRILYEQVEYKAEAEGILVRQVGSAYTSKRCVECGFTADENRPTRNDFRCVKCESEANADYNAAKNIGMRYVRRDQQSSWRTGNSQLALKSGTVTPSGGFTAHPDGFETEFMDKSHPPRANPSG

SEQ ID NO: 32332 - protein, 415 aa, unknown
  TnpB Polypeptide
MLIAKKIRLEVSDQDAATLEWMQGKCRGLYNWWVMKLRDGERWPGWKAAKKTLQASKEYDPELRWVYGKCLAEVYFRLDGAMQAFFRRVKNGETPGFPRVRPRHCFFTLIYPAMYITVEGRHVTLPTGGQGKNKRFPAVVAKLMEEAPSGYKDVAISRDGQGHYYASFVHDEQEETHEHEGVLAIDIGIKTLATGVNEQGRCYHIGGFKGSTWYTKQLDKIRSKRGRCKKGSRRYKHLSQVYKRVSQQKRNKQQDCLHKASHLIAHKTVERTIVIGDLSQRQMVMKEHKERNKHLNRAVYNEWGLYTFVQMLSYKCVLYGKELVIIDESDTSKTCSGCGHKQAMPLWKRTYRCPNTICRLVMDRDENSAVNILQRYLARLGPHTGDPVRCAAVFTAIENQCAEVSTTTDNGVEYI

SEQ ID NO: 32333 - protein, 400 aa, unknown
  TnpB Polypeptide
MSAAAEQRDGEVLLRRSYKFRLRPTCQQESRLVEMLGDFCDLYNAALQERRDAWKVCGHPVRMGEQSADLPWIRANLEQHGRWSAWAQQEVLRRLDRAFQAFFRRVKAGQTPGYPRFKSKARWDSAVLCQSNGARWIADTSRVSIVGVGHVKVHAHRTMKGRVKTITVRREGRHWYAVFSCDQVPAEPLPATGAEVGVDVGINSFAATSDNELVPNPRHARRSSDKLAALQRAHAATGRRSKKRHRQISELHRKIARQRRDHHHKTARSLVNSYDTIVVEKLTVANMVRRPQPKPDPDRHGQWLPNGAAAKTGLNRSISDAGWAQFLNILDAKAEEAGRRVIRVPAHHTSQTCANCGHVHASNRDGEAFQCRSCGHTAHADINAAINILRRGLAPQQAAA

SEQ ID NO: 32334 - protein, 335 aa, Blautia sp.
MCYAASKLWNVCNYERQHYKETGMEQYPDWYYQKKAHKENLWYKHLPSQTAQEVCKLLDKAWKSFYALKRSGGIETPRPPRFKQESIPITYMQMGIVHERDTDRVRLSLPKALKKYMEETYQIHENFLYLENKIFRGMDQIKQLRIYPPEKGNCKIIVVYEVSGQEELPQNGHELSIDLGLHNLMTCYDSGNGKTFILGRKYLALERYFHKEIARVQAQWYGQQSGKGVKYLATSKHIRKLYKRKHDSVTDYLHKVTRYLAEYCREQGITCVVAGDIRNIRREKDLGHRTNQKFHSLPYNRIYIMLEYKLKRYGIRFIKQEESYTSQCSPLSPKV

SEQ ID NO: 32335 - protein, 377 aa, Pyrobaculum sp.
MKAYRTLVIRRGVEEIPPEKLVKFLEVQRKFREWATKWYKSGFKEPMPAESSLKYFAKELKFALRLLPTNGLKNGVWKVPLPFSAQLRENNERDQSRGILVDLSRGDIRIRKWGGGTIEIRLRKSEMKWILKRLREGAQLKLAFAWVGSRTNLVTFNVALAFARETEPYLPERVLAIDLNALHNGVVWAIVDRERVLRKGIYRPDLNKISRMQREIATLDSLCAKRGEPYCREAVELKSRLWRLLRRFEDEVAKKLVVSAMRRKCTIVVDVPEDESVRGLKEGHYAPEKKIFLNMGRLRRRIRQLAEWYGVPYREERLYSTVCPRCGSKMEELPNRKVKCHCGFETQRDEVPILWAQRRFSELTPSFSPALSPVPVM

SEQ ID NO: 32336 - protein, 361 aa, Nostoc sp.
MLLGFKTELKLNNKQLTAFLKHCGVARHAWNWGLALTKQILDHNKANPAEKIKFPSYFDLCKWLVALVKKENPWYYECSKSTPQQSLIALRIAWDRCFKRISGIPKFKKTGQHDSFTLEGDVKILGNNKIQVPKIGVLTTYERLPQVTPKSVTISRKADRWFISFRLEVEQQESNLKSIVGVDLGIKSLATLSTGEVIEGAKSYKRYESKLSRLQWLNRRKVIGSNNWKKIQLKIAKLHRKIANIRKDTLHKLTTLLAKNHGTVVIEDLNVKGMLANRKLAKAVLDMGFYELRRQLTYKCKLYGSKLVVVDRWFPSSKTCSHCGTKKETLLLRQRVFECKYCGFTSDRDLNAAINLSKAVS

SEQ ID NO: 32337 - protein, 399 aa, Streptomyces sp.
VKATHVKRAFKYRFYPTDAQAVELSRTFGCVRKVYNLALAARTEAWGRQERVSYGQTSAMLTVWKKTEEFAYLNDVSSVPLQQALRHLQVAFSNFFGKRAGYPRFKSRKRSRRSAEYTASAFRFRDGCLTLAKMDQPLDIVWSRPLPEGASPSTVTVSQDPAGRWHVSILVQDPTLAPLPTVDTAVGIDVGLDHLLTLSTGEKITNPRHERRDRARLAKAQRRLARKAKGEGANRAKDRRKVAKVHARIADRRRDHLHKLTTRLVREHQTIVIEDLSVRNMVRNHSLARAISDAAWSEFRGMLEYKAAWYGREVIAVDRFFPSSKLCSTCGTVRSEMLLHVRVWTCDGCGATHDRDVNAAHNVLAVGLTVSVCGAGVRPQRSTPGGQSASKQKPPRREP

SEQ ID NO: 32338 - protein, 420 aa, Symploca sp.
MKARYRYRIYPTAGQKMALAKLFGSVRVVWNDALAFCINQYKAGEKKPKNAELQKQFITQAKKTREREWLSEVSNIPLQQSLNDLEQAYQNFFKSCKGQRKGKSVKPPKFKKRHAKQSARFRQGGFKVSQDEVKLAKIGKLKIVWSRPLPAEPSSVTIIKDAAGRYFVSFVVEIASDVLPKTENSVGIDLGIATFATLDNGQKIDAPKPLTHRINRLRKLSKNLSRKTKGSKRYERARKRKAKLQAKLKDTRTDFLHKLSTQIIRENQTIVLEDLNVAGMLKNRKLSRAISDLGWRQFRIYLEGKAEKYGREFRVISRWEPTSQTCSCCGFRGGKLDLSIREWTCTNCGTTHDRDINAANNILVAGGHSETQTGRGGKRKTSVKEAVSCEASTHREYVQLSLFDAFGIPVLPGRGGCQSH

SEQ ID NO: 32339 - protein, 418 aa, Deltaproteobacteria sp.
MQELTVTAKIQVIVNDNEASLLSATTSAYRDACNYVSNYVYQTRILQQFALNQLLYNTLRKKYGLKSQMAQSVLKTVIAKYKTIIKNQNRWINAVFKRPQYDLVWNRDYSLTQERFSVNTLDGRLKLNYHANAMEDYFDSKKYRFGTAKLVQVKKKFYLHIPITSTVEDTQVSDICHVVGIDRGLNFIAVSYDSKGNTTFFNGRQIKQKRAKFKELRRSLQKRGTASARRRIRHIGQRENRWMQDVNHCVSKALVDSTPSKTLFVLEDLTGIRCATEKVRRKKRYETVSWSFYDLEQKLKYKAMRNQSITIKVDPRYTSQCCPKCGHIESGNRDKKRHFFCCRNCGYCSNDDRIGAINLYGLGLSFIHDQTVNSEHVQNLGVQSITPRCNVTLSGKKEAKGRRRNSRMTTGQLQANRL

SEQ ID NO: 32340 - protein, 414 aa, Microcoleus sp.
VYHAVKVRIYPSPEQEQYLAQTFGNCRWLYNFMLNKTTTTYKETGKGLSKAAMDRLLPDLKREFEWLGIAYSQSLQRVTFNLSTAFQKFFEGHAKYPIFKKKFGKQSVGYPQNVTLLTEEKAIKFPGTLGTVKTVFHRVLPTGKQGCVTVSKTTEGKYFASILFEFEPEKIVAKNPAIGVDLGLKDFAITSEGEKHNQTKPVQRKLKKLERNKKRKQRKLARKQGTSNRKKAKNLVAKVCAKIAKIREDFLHKLSRKIAYENQVIVVEDLAVKNMVKNPNLARAISDRGWGMFLTMLKYKAERYGHDYVEINRFFPSSQLCAETLLPIPELQKGFDSLKVRFVDCPNCGKKHDRDINAAINIKNEGLRMLALGTSATAIGGDVRPKRSGRKKSTVVEAISREDGSLHHTLSGLV

SEQ ID NO: 32341 - protein, 288 aa, Escherichia sp.
LTLPKKCGYIVHSKQPHTECKMLIQKAYKYRLYPTDQQAQRLRQLCGCARFVWNYALNETLSIHDAGGKIPSAFDLNKRLTGWKKLPELAFLSEGYTDNLQQKLKDLRSAWDRCFDKSLTAEKPVFKKKTKGCDSIRFVNFSKYCGLDYGRVKLPSGLGWVKFRQSRKIEGVIKNCTISQHAGHWYVSFQVELAVTDPIHASTSAIGLDAGITKLATLSDGTVFEPVNSLKKIRISWLAYSAVWPGWLNSPPTGKSRKRRFPVSTLISQTSAAITFIKPRRRSAKTTR

SEQ ID NO: 32342 - protein, 430 aa, Ktedonobacter sp.
MSMKAYKYRLYANKATTDRLHWVLDRCRELYNAALSERKDAYQQYQRNTIIAGSQRTVAATMVASQRVQSISFYGQKRDLVEMKEVLRPEYQEIASHVLQDVLFRLEKAFRAFFRRVRNGEEPGYPRFQGRNRYDSFTYPDGAGWKLDAHKRPSDKKGMVRVNLHLTKIGTVKLHLHRDLAGTIKTLTIKREGEHWYACFTCEIGKPEALPVSYEDVGIDLGVTHFAALSTGDFLDNPRHYRKAEKKLKKLQAALSRKKRGSHRRKKAVQAVASGHRKIRKQRQDFQHKASRKLVNQYQVIAFEDLQVKNLTKAPAPKQDENGQYLPNGARAKAGLNKSILDAGWSTFTEMVSVKAAWAGRTVILVDPFKTSQMCSQCHREGPHKDLDERVHICVHCGVVLDRDTNAAINILRAAYKQLSVGTRPTRATA

SEQ ID NO: 32343 - protein, 415 aa, unknown
  TnpB Polypeptide
MKIQKAYKVELKPNNIQSTLLEKSAGTARFAYNWGLARKIELWENEKKSISTIDQHKELCALKKTDFSWMYEVSKCSPQEALRDLDSAFKNFFRGIKKGQKVGFPKFKSKHKSKSAFSISAGFNIKYETINIPKVGYVRLKEKGYIPTKNIHINSMTVSKTAGKWFVSVQVEEEIPNIIINPETVLGIDVGIKTLATCSNGDVFQNNKYLKKSKKKLARSQRNLARKKFNKDTKKSSNNRDKAKLKVQKIFFKISNQRKDSIHKMTSILAKTKPRYIVLEDLNVKGMMKNHCLAGAISDASFAEIKRQLTYKTAWYGGGILDVGRFYPSSKLCRKCGNIKEDLTLADRIYICDCGHIEDRDKNAAINIENVGLSTLSSRGIKVCGESVRLLETLNLKAVSLNQEENIKLDHVKFI

SEQ ID NO: 32344 - protein, 429 aa, Calothrix sp.
MGVQQVLIYCDDETKAILRYLCEQSNSLYNCGVYWARQIFFKTNRIVSKFDVVYAVGGNKHAQAMPSVPAQQTLLSVSEAFKSYRELRNLSKAGGLKDKPNVPDYRESGGMYKVTYPNTGAGKPTLNKDGLIRFPLGLLVNCWFKVKEFFLPLPTNLDFTKVKEFTILPKNGEFYLECSYVIDPVVVKLDINQALSIDLGTSSNLMACVDTLGNSFLLDSKHAKSMNQWYNKSVANYKEGKPQKYWDDHLDALTRKRNHQMRDMVNKAARVAINHCLTHGIGTLVVGWNQGIKNGSNMGRRSNQQFVQMPLAKLKERLKQLCEIYGIRFVETEEAYTSRASYLDGDSLPEYGKKPEGWKASGDRYPRGLYTTKQGFRINADAQAAANILRKVAGSLGINLSNLGRVTLTSPVRIRLWHVRSNGPLHKRS

SEQ ID NO: 32345 - protein, 400 aa, Arthrobacter sp.
MIRLYKFRLYPTSKQQQLLVAMLNDHRDIYNAALQERRDAWTRSHVGIRFVDQDAQLTEIRACDPDLARWSYSSQEQTLRRLDNAFRSFFRRVKYGGNPGYPRFKGAGQLNTVDHRNGDGATWNSIVHPTQTKVRFKGVGHVKVKQHRPVRGRVTRVTVKREGQHWYVLLSAQQDLPTPLPKTGRMIGIDLATGSNGLAYTSLGERIENPAYGKAAQVRLAEANQAIARTQPGSNRRKKARGRFSALHRKISNQRLDYLHKAANHLVADNDVIVAENLNIARMTRRPKSRPDGAGGYEPNGRRAKTGLNRSILDAGWGIFLRLIRAKAESAGREFVQVDPAYTSQTCSRCGYREKANRNGKAFLCLSCGHRDDADINAAVNILRAGLVLRNLARVEPREA

SEQ ID NO: 32346 - protein, 468 aa, Streptomyces sp.
VVEAAGKDGRLRVTGAEAKSVKREALGVPDRAKHQQRATVPMQRRTPEADTHQRVYRYRCYPTPAQTEQLIKTFGACRWTYNEGLALRDKAWREHRVALGFAESCRALTGWRNAKGTQWLQEVSSTVLQQALRHLDAAFGRFFKSSGRQPKLKRKGRSRDSATYVRTGFRWVEDPEQPGTGLIALAKQSGPLRIRWSRPLPAGVRPVKLTVSRDRAGRFFVSVLVEERIEPLPPVFLRDGGAPKAVGLDLGLAALVTLDDGEKVDHPRLLRKYVAKLATLQRSLHRKERGSRSRDKARQEIARLYALIADVRRDTLDQLTTRLVRENQVLVVEDLAVASLVRSPRGKGRRRKAGLNRAIMDAAWGELLRQLRYKCAWYGRTLVIVDRFFPSTRRCSTCGAMGPKLDLSVRGWSCDGCGAVHDRDVNAGRNLREEGLRLYGLVASALLPGRVMPSVIKASEMPDMVLTA

SEQ ID NO: 32347 - protein, 411 aa, Fischerella sp.
MHLTKMSQEFSFHACMVGDELRPTNYDRSNNTLCLLKSDRCSRKAIVYQAYKFRIYPTQKQQTQLSKAFGCCRWFWNYSLNLIQETYKATSNFRSRGAIQGLLPELKKEHPWLKTDVYSQCLQVVALNISTAYKNFFEKRAGLPSFKSKHGRQSMGFPQNVKLGDRAIVLPKLGEIYCQIHRQIEGTIKTATISKNPDGKYYASILVDDGKEQPQANSEGKAIGIDVRLTHLCITSDGSKYSNPKHFAKHQRNLKRKQQTLSRKQKGSNRRNKARNLVARVHSKIARCREDFLHKLSRKIVNENQVIVMENLNLLGMVRNHNLAKAIGDCGWGMFGTMLKYKAQRQGKIYLEIDRFFPSSKTCNHCLHKVSDLPLDLRLWDCPKCNTRHDTDINAAKNIRDEGLRILSLLN

SEQ ID NO: 32348 - protein, 426 aa, Natrialba sp.
MAKQVVIRTYTASIRNQPRVQDDLDALGFAASKLWNVGRWTCSRVWDEIGHIPNHNELTAYLKSHERYDDLHSQSSQRVLQELAEAFNGWYGKRRNGDTNANPPGYRKQGDEHPRSTVTFKAAGFKLDTTYNRVRLSQGSNLKEYWSDFILCEYQTRPDVDLSSVENVQQVRAVWTGGEWELHFVCKVEIEVAESPGEKTVGVDLGINNFAALAYEDGHSELYPLNCLKQDDYYFSKHIARCDDSDSEQATRLNQKKSERRIYYFHTLSKHIVQRCVEEDVGTIVIGDLSGIREDEENDQSKNWGTHGNLDLHSWAFDRFTEMLTYKAEMEGITVEQVSERDTSKSCSYCGRKRDANRVERGLYVCDGCETTANADVNGAENIRQKVSPSSPNLSVNRSNGWLAQPSTFLFDKETGAFAPQEHVTS

SEQ ID NO: 32349 - protein, 453 aa, Natrialbaceae sp.
MRRVNAFEVRPLSHRDRLLLLEILDASAALWNELTYHRRQRFFDDRDVWSVDADEYRVKYKGILGSATAQQLIRKNDEAWRSFFKLLEKGDEPSPPGYWKDDGERELQTLVRNDQYTLTWGERSRLEIPVGFDLKEKYGLGYHDRLRLEARGDPRWRGEQGRLELVYDKSAESFRVRQPVSDAVPRRDDSLATTSSDEGVVAALDIGANNLVACTVSTGHQRLYHGRPQFQRFRDITEEIAELQSRLEYGEWSSRRIRELYRLRGDRRDHLQNALIRDLAEWFHGLGVTDVIAGDLDDVLRKHWSARVNEKTHLFWSHGRFRRRLREVLEGEYGIEVSEEDESGSSSRCPGCGGERVERDGDLFTCFECGFEGHSDVAASENLLQRYADVEVGPMARPVVSRENTTESGHREVPRLEWDDHRWRRRDRSTKEEPANQSTTVAAGGKFASGGVA

SEQ ID NO: 32350 - protein, 401 aa, unknown
  TnpB Polypeptide
MFCMSAINQVQYDPGMQLRYTFRITPTPGQRTALANAFGCARVVYNDALRTRETARSEGLPFPKTGDLSKLLITDAKKTGARAWLGEVSAVVLQQSLRDLDTAYKNFFDGLKGKRPRMGAPRFKSKRDNRQAVRFTANARWKITPDGKLSLPKIGEVPVKWSRALPSQPSTVTVVKDAAGRYFASFVVETDPHADLGRMPVSADKTGIDLGLTHFAVLSDGRKVTAPRFFRRAEKKLRKAQRNLARKTKGSSNRKKAVVKVARAHAHTANARRDFHHKLSTTVIRENQAVYVEDLAVKGIARTRLAKSVHDAGWSAFVTMLEYKAARYGRTFAKVDRFFPSSQLCSACGFNDGPKPLAVREWRCGNCGTVHDRDINAALNIRTEGCKVAAGQAETVNACGG

SEQ ID NO: 32351 - protein, 375 aa, unknown
  TnpB Polypeptide
VIATIKVRLEPNNVQKTKLFQSAGTARWSYNWVLSKQEENYKNGGKFIQDGDLRKELTQLKQTDKFKWLNKYSNNITKQAIKDACDAYKKFFKKLSDKPKFKNRNKSPPKFYQDTEKIKFKDDKVRLEKIGWVNLSEKDRILENSKYTNPRIKFDGVHWFLTVGVEVEQEVVELTDISIGIDVGIKDLAICSNIEKSYKNINKTKNVKKLEKKMRRLQRKVSNKYLKNKKGESYVKTSNIIRLEKNIKKLHRRLNNIRTDYRHKVTTEIVKTKPSKIVMESLNIKGMMKNKHLSKSIAQQGLFEFKIMIQYKSKKYGIEFIEADKWYPSSKTCSACGVVKPKLSLSERVFECECCGVKIDRDRNASLNLSRYKAS

SEQ ID NO: 32352 - protein, 373 aa, unknown
  TnpB Polypeptide
VKGGGFVERSYRFRIYPNVKQSVQIQRTFGCCRFIYNHYLAKRIASYEADQTTFGYNACSADMTALKKTLSWLTEVDSTALQSSLKDLDIAYQNFFRRVKSGEKPGFPRFKSKREHRRSYKSKGSIKVFENIIQLPKLGRVKCRISKEVKGRILSATISQNPSGKYFVSLCCTDVEIEPLPKTGCVIGVDMGLKAFAITSDGVEYQNHKYLSKSQKKLAKLQRQLSRKTKGSNRSEKARVQVAQLHEHIANQRSDMMHKLSTQLIRENDVVCIEDLAPQNMVKNHRLAKSISDAAWGEFRRQLEYKAAWYGKKVIPIDRFFPSSQLCSCCGYRNTDTKNLAVRDWTCPECGTQHDRDINAAKNILSEGLRLLA

SEQ ID NO: 32353 - protein, 504 aa, unknown
  TnpB Polypeptide
MAQSVRIEINEGHKLYKYCDRLTKAAGALWNAALSRITHGAAMCGKRESVMTAAERRVWNELIAVLPIIRSEPWFVVSPTVFLDSAFMNDFLSALGCEEYVFPFLPRSSARYIVKNAAAAVRSYRKALEAYEKSKKKPQIKPQPPKETKRGGRRSVTIHRDECAYHAWKRRNGEEARRIGLPLAKRKRRVDISGADAPGQLAQVTITPKGGGFELILAFEKELPPPAAKNDGAASYEPPVADCRSAAAEQNAAGSALRVEWDESLPNARRVCAIDTGTDNLAAITNNVGEPCFLLKKEMLSGELSRLRNEIKQMRGLPRVKPHIIAVERGKAAALLNTREIHRTLDMAAKIIIDWCARVETGTIFCGTASLRRQLVRIDTKSNASFYASVYNFISTVLIDKIRRKAAVSDIQFVAVDEAYTSLASFPDGDAIPSANSGIIEAVFSGKRVTQDKYRTANGTYIHADLNASANIARKACPSAFAGEHTPPDFDNIIVITDPFTQRM

SEQ ID NO: 32354 - protein, 400 aa, Chloroflexi sp.
MQLVERHVIDRHDTRWAAIDHASWLSKNLYNAANYRVRQAFIFHRQVVSYETLDKQMKRDADYCALPRKVSQWVLKQVAHDWQSFLAAQQAWHDHPETFTGRPKMPGYKHKTRGRNLLTYTVQAVSKRVFQQTGQLQPSQLGIRIKTRQASFDQVRILPRKTHYVVEVVYTVAVSPPELDRDRVASIDVGLDNLAAVTFNQPGFAPLLVNGKPLKAINQYYNKERARLQQALAEGQYTSWRLEALIDKRNRRIEAYLHRTSRRLINGLVFCNIGTLVIGKNDGWKQAIALGKRTNQNFVQVPHARFIDMLTYKAELAGIQVVLVEESYTSKCSFLDEEPIGKHVTYAGRRIKRGLFRASDGRVINADVNAAYNIMRKAIPNAFGDGIEAVVVQPVRVTPA

SEQ ID NO: 32355 - protein, 308 aa, Fischerella sp.
MIRVPLGKLCKVWFGIDSFTIPMPSNLKFDSIKELRILPRNGCFYAEFAYRLQPKKAEIKPNKVLGIDPGLNNWLTCVSNIGKSFIIDGRRLKSLNQFYNKRVATLKEGKPQDYWDDELAGICEKRNRQMRDAINKAARFVVNWCLKNRIGTVVFGWNVGIKDGINIGAKNNQQFVQIPTARLKNRLADLLQQYGIAFVETEEAYTSAASFLDGDSLPAFGEKPEGWAAASGKRVKRGLYRSAFMLAPPSADANGGANIMAKVATQLGFSLAEVGRAALTLPQRYDVFSDLSKAYREKCEATCIHAVA

SEQ ID NO: 32356 - protein, 367 aa, Blautia sp.
MLKAYKYRIYPNKEQEIQIAKTFGCCRFVYNQTLTYKKDTYEQEKKSVSKTDCNNYCNRELKRTYEWLKEVDKFALTNAIYNMDAAYQKFFKEHAGYPKFKSKHDNHKSYTTNFTNGNIAVDFKNGKVKLPKLKEVKAKVHRDFSGQIKSATVSQVPSGKYYVSVLVETEHEELPHTKQNIGLDLGIKDLCITSDERKYENPKTIKKYERKLTRLQRQLSHKKKGSRNYYKKKKQIALFYEKITNTRKDYLHKISHEIISENQVIVSENLQIKNMVKNHHLAKSIIDASWYELTRQLEYKAKWNGRKYIKVDTFYASSQLCSSCGYQNTDTKDLSVREWTCPACGEKHDRDINAAKNILAEGLRQIA

SEQ ID NO: 32357 - protein, 542 aa, unknown
  TnpB Polypeptide
MRTWRMTFNPKKQKDSVFCQYFLTNTTDARRMYNTANFYIRNTMTGIKKSPELRTPNEVEVLHDVFTGIQKANKAKDSKYQKDLEKYNKGLLDKHSKRPKHFPYPTTKEWFLTYNVLDAVFKYTNNEVYYSMNSQLNQNAIRKIAVAWKGYFKILKDYQKNPSKYKERPNMPGYLRNSQYVAWFSNQTAKYSVEKDGRAYLRFTKNKDLFCIGKASLYIGLRYVKTEIKPQHGCYLILVTFDDGIELPKVPEKPKRVIGIDPGVDNLAAVVNNFGVHPFLIKGGAVKAANQRFNKKRASLFSAVTTGSDSRHSVKNSHSLSALSRKRDDLLRDIFYRAAWYICRFAVRHQVDVIVIGHNKDQKQEINLGKQNNQSFVSIPFVRFEQILTNTAAKCGIPVVVQEESYTSKASVLDGDVIPTYGIDDDHVHFSGKRVKRGLYRSADGTFLNADVNGAANVIRKKYPDAFDGQDLKYLWETTDVVKFTDLYPGAKSTCQEHYNGKRHESSPASKAIHRYRKDTRLKYRILFGKSKYVHTSAKKSA

SEQ ID NO: 32358 - protein, 384 aa, Bacillus sp.
MLVKKAYKFRLYPNKAQEILIAKTIGCSRFVFNHFLAKWNDAYKETGKGLTYNACSSQLTELKKELVWLKEVDSIAIQSSLKKLADSYTRFFKKQNKAPRFKSKKNRVQSYTTKHTNDNIAIVGNRIKLPKLGLVKFAKSREVGGRILNGTVRRNPSGKYFVSILAEVEVHEFPKTGSSVGVDVGLKNFAILSTGQIFDNPKFLRTLEKKLVKAQRVLSRRQELAVKRTCKLDKSKNYQKQKRKVARIHEKITNARTDYLQKISTDIIKNHDIIGIEDLPVSNMLKNHKLAKAISEVSWSHFRTMLEYKAKWYGKQVIAVSKTFASSQLCSHCGYQNKDVKNLNLRQWNCPSCGTHHDRDINAGQNLKNEAIRLLTVGTTGLAY

SEQ ID NO: 32359 - protein, 308 aa, Halorubrum sp.
VSVRPSPSGSSPEALGLLYLVEQLRTALQDQDDEWRVGTAEVVPVDGGHELHVNVTRTTADVAPKEDAQAVVGVDINEDCVALAVLDEDDIIASVIIDYTLIKERRHEFFTMRKRIQQNGQTAFETVLQDREKRYVHDQLHKISHDVVEWVSQFENPIMVFEDLTDMREDIEYGTRMNRRLHSLPFAKLRSYITYKAAWEGIPSDAVDPEYTSQECPRTECEHRVRANRRGKRFKCVECGCQDHADRGAGISIAKRWMSKQERNVPLLKILPGFQQVRREASGRVDRPTATPSLAGGHQTESGAGVLR

SEQ ID NO: 32360 - protein, 404 aa, unknown
  TnpB Polypeptide
MQIVSSYGVEIKQKNIPLCSTLDIFRKAVSYLIPVYAETWKELSEIRNLQKRFNEAEHLVHETKKNHARFAFDRHFPKMPSYLRRAAIQHALGAVSSYQTRLGLWEKGDLKGKPKLVCENHAMPVFYRDVMYKEAEQGEDAACLKLFDGRDWKWFQVKLLHTDMEYLRKKWSGKKASAPTLEKKHHKYFLRFSYTEEVSLSKTDVKEQVICSVDLGINTDAVCSIMRADGTILGRKFINFPSDKDHLYHVLGRIRRFQREHSSRQVQSRWDYAKRLNMELSRKIAAEITKYALECQADVIVFEYLEVQGKISGKKKQKLHLWRKRDIQKPAGMSPVIAGLSVCLGAHSATFPTDVTFWFPSTYNGLNTKDCLMTTTVPCILSGIIGMIVLSVLNAFSGVLPGMF

SEQ ID NO: 32361 - protein, 388 aa, Streptomyces sp.
MIVVKIVTQVKLMPEAQQAAALSATLRTVNDLACWVSAVAFAHGVPREYELRKHTYPRLKAEGLGAQSAQHTIKKVRDAYTTLRANIRAGNLGKPKSKRRRKAESKPITFRPDAAQPYDDRCMSWQYDQRTVSIWTTEGRLKAVRFVCSADALKVLQQYRKGESDLIERDGVFYLVATCEVPEAETYEPDGFIGVDLGIVNIATTSTGYQAAGRALNRYRKRQLALRAKLQKKRTKSAKRRLKERSRREARHVKNTNHIIAKTIVTEAERTSAGISLEELKGIRQRVRLRKPQRVALHSWSFAQLGGFIVYKAKRAGVPLVFVDPAYTSQTCAECGHVDKRNRIDQGLFICRGCGVVAHADRNASHNIATRGEIVWNAGRESRVPATR

SEQ ID NO: 32362 - protein, 603 aa, Rhodococcus sp.
MSDTGSAQARQFSFTTRAYRAGDEAAGEAIGLDDVDIRLRWLLDLVTTAGSELLGRLWHPATFDVLAAGRDRQDRKLPAQGHVAAARLGWVPRYPDGVYAPSRVTRVVTAQVVATLRTMAYRDIAVVSLSARFDPTTGRLACPDTPGDFVPPGFARGVVRQLAACHRRRSSRQPITPKLRITDVQRPPQVAAMARLSAADRQLAQLAVTGDELVLTVKLPTCPAPQGPAQWQRVRLTAAIPDHLHHRAITDWHLPILTVDHRGLLWRCAATETVPDGYLGAAAVAIGVDWSPSTLGAAAITTDTSDGLVSTYLGWTYDDRGLGIKLARLQSEGQMLHRKSARLTRLAATAPPEVRARLEAKIAVLDAHRTALGIKRGKINRELAFHFARQVTDYAAAAGATVIAVEDLATLETRGHGRVNNNRAAQSARRQAVDALAHTAAGVGVTVVCVPARGSSALCPGCNEPLTRPGGYHTAWCPDCRVGGNRDHLAGVNLAKRALLGRCKVTRRRGKLPTVREAEHAPVRKSRDKTGPTAPRPRHRRVRHSTHPAPTRAEVNPNKHVPAPRASVWDTVKPAPLQGDTGSRDTHTPHIAATSVSGSVRSM

SEQ ID NO: 32363 - protein, 432 aa, unknown
  TnpB Polypeptide
LLEAVKVALDPSLAQERLLASHAGAARFAYNAGLARVKAALDAGEVLDWAFFALVNWWNSCKDELAVGGDGKPWWSENSKEAHCSGLRSLASALSNWSKSRKGDRKGRKVGFPKFKSKSGSVPRFAYTTDFKLIEGDPKGVWLPRIGRVHCMENVAERVNGAKVLRMTISQRAGRWYVSLTVEREDKPVMKPPNGGAVGVDLGVKNLATLSDGTVVPNPRYLKKSERKLKKAQQAPSRKIKGSNRRAKAAAKVARIHARVANQRLDGLHKLTTWLTEKHSDISIEGLHVAGMVKNHHLAKAVSDAAFGEFRRQLEYKAARTGARLHVVDRWYASSKTCSRCGSVKAKLSLAERTYRCDSCGLALDRDLNAAINIQVAGSAPETLNAHGETVRRGGQTGRATRVSVKCEPSGGANRVSLGAGDRKGALQANVK

SEQ ID NO: 32364 - protein, 409 aa, unknown
  TnpB Polypeptide
MTLAVRIEPTAEQQKLLDDTVVAFASACNWINDNVNSNLTNRNSIQAVCYSEVKSQFGLTANHVVRACARVGANRLTAKQKRRKVTGFKPTSFDCDARTFRIIEDGYLVSLSTTGKRVKVPMRVSNYHIGKLKNQNPTSAQVCKHKDGNFYLHIQLKFEAPKPRKTQNVIGVDFGRRDIAVTSTGQSWSGKDINNTRDKYTRTRASLQKKASQGKSASPRVSPGVYAGRTRSTRRRCREILKRLSGRERRYQTWLNHQISSSIITEAVSTNSIVAIEDLTGIRDRTNNQPRKKTEGRRSNSWSFYQLRTCLEYQGIKEGVNVIAIPPAYTSQTCHKCLYIHPVKGQSYRNNKTFKCGNCGKSCDADFKGSKMIKLWGASVTAPRGSEFLSCAVVLGLPKAHVERHSQCG

SEQ ID NO: 32365 - protein, 272 aa, unknown
  TnpB Polypeptide
MNYWFVTLVAHQEIEDKPKAILTEENTIGLDLGLKDACVTSEGKIIPALRSYRKTQVRRRKAARVVSRRKGAKKREKPSNRFKKAKAKAARIDRKAANQRADFLHKLSTGLVQDHDGIVIEDLSVKGLGKTNLAKSVFDAGMGLFRRMLEYKADRGSRTIIVIDRWFPSSRLCSVNGCDYRTQVLTLGDRVWTCPQCGTIHHRDVNAARNIEAEGLRIYRTWAQDQSPLDRGVVAAGQVETLNARGCCVSLPNGSSGRNTDVVGQKRESHEL

SEQ ID NO: 32366 - protein, 264 aa, Oscillatoriales sp.
VKSASPWYYECSKSTPQQALIALRKSWQRCFNKTAGVPQFKKKRQRDSFTLEGTVKILGDNKIQVPVIGILKTYELLPQVVTKSCTISRSARRWFISFRFDVEQKKPCQTSILGVDLGIKALATLSTGEVFLGAKSYKNYATKLSRMQHLNRHKVIGSSNWKKAQNKIARLHRKIANIRSDTLHKLTTILAKNHGVIVIEDLNVSGMMKNRNLAASIADMGFYEFRRQLTYKCKFYGSSLIVADRWFPSSKTCSNCGSKKKHSP

SEQ ID NO: 32367 - protein, 398 aa, Streptomyces sp.
MTTKQVKRAFKYRFCPTDAQAVELSRTFGCVRKVYNLALAARSEAWTLRQERVNYNATSVMLTSWKKTDELAYLSGVSSVPLQQTLRHLQGAFGNFWQKRAKYPAFKSRKTSRKSAEYTTSGFRYRDGKLTLAKMSEPLDIVWSRPLPEGATPSTVTVSQDPAGRWFVSMLCDDIPATMPQTTNTVGIDAGITSLVTLSTGEKVTNPRFERKDRARLAKAQRVLAKKARGDGANRAKARRKVAKVHARITDRRRDHLHKLTTRLVRENQTIVIEDLTVRNMVKNHFLARAISDAAWSTMRGMLEYKCAWHGRDLVAIDRWFPSSRLCSACGTLQGKMPLNIRMWTCRCGVTHDRDVNAAKNVLAEGLSVTVCGAGVRPQRSSPGGQSATKQKTPRREP

SEQ ID NO: 32368 - protein, 169 aa, Rhodococcus sp.
VARKHSRVRDARRDFLHKTSTDLVARFDTIAVEDLAPRNMVRNRRLAKSISECGWGEFRSMLEYKAERAGRRFVVIDRWFPSSKTCSVCGHLLAVLSLGTRRWSCPDCGTRHDRDVNAAKNILVAAGPVETRNACGGDVRRYGSSRPHSPVKQELPDVSPRIPVFQGGE

SEQ ID NO: 32369 - protein, 671 aa, unknown
  TnpB Polypeptide
MSDNAAPAKRTRGKTRSAGGNWRRGKDDSTAVIKLELDLSGDPFMLRRVEAMQEAAFRLRRALQRDARDRCAAYWRHSDARAADPKAVRERLALTRKGLEAAAKRHVDDSGWMRDHLTKALGLHIADEVWNTVDRHLFADASGKRHGAPRIGDWFDFARIPGRARSHTKLTPTWETFRLVGSLDGHLNTYRHPDLPAKDAAAASAATLPAGTPVLAQPQSIPAPVPHLKGRKADWRGYDGPLAVVFTGLPAGDLALPVRLPQGSGQQPHLAHFLADPDRWHKIDLVRVQDRKAPGGWRYYAHLMVLVPGYQSESTRLRRSAAAVGRIAGIDGNVSKLAIVSAPKSADGPVLADYVTVSVHERGAAQRAASKARQRQKALDRSRRNSNTAQYELGKRQAERAARRTAAGLAPKHVESPKGQRVSDTAGRPKRSYRRDELSAAYRRIRTDHAVDSRAASQAKQARARDLAGRIVATHGADLITEHVDMGAWARLWGRGIALFSPGMLIAALNAEAAACGGQMAKAATRHTAMSQHCLCGARVPKTLADRTHSCRACGFTWDRDLTSAALAACVNFANSDDPATARVNQNLADAMLRRLAAQQEGQVTVNRHEPPTSMQYHWQGATDGSSEPSLPLPDDASAHRRNPEQARPPGRRRKRAKTKREKHDLLRVNS

SEQ ID NO: 32370 - protein, 402 aa, Escherichia sp.
VERLQAFKFQLRPGGQQEREMRRFAGACRFVFNRALARQNENHEAGNKYIPYGKMASWLVEWKNATETQWLKDSPSQPLQQSLKDLERAYKNFFQNRAAFPRFKKRGQNDAFRYPQGVKLDQENRRIFLPKLGWMRYRNSRQVTGVVKNVTVSQSCGKWYISIQTESEVSTPVHPSASMVGLDAGVAKLATLSDGTVFEPVNSFQKNQKTLARLQRQLSRRVKFSNNWQKQKRKIQRLHSRIANIRRDYLHKVTTTVSKNHAMIVIEDLKVSNMSKSAAGTVSQPGRNVRAKSGLNRSILDQGWYEMRRQLEYKQLWRGGQVLAVPPAYTSQRCACCGHTAKENRLSQSKFRCQVCGYTANADVNGARNILAAGHAVLACGEMVQSGRSLKQEPTEMIQATA

SEQ ID NO: 32371 - protein, 381 aa, unknown
  TnpB Polypeptide
MRKQRENVASVALLCYAFNMLKLTAKVKLQPTPEQHAALLQTLEATNAACNTISDVAWSERVFGRVPLHRLTYYDTKEAFGLSSQLVVRCIGKVVDAYKLDRQTKRTFRPHGAIAYDSRILRWFVAEHAVTIWTVAGRVRIPFVCGERDRQLLQSQRGESDLCFVSGEFYLFTTCEVETPEPADVSEFLGVDLGVTNIAVDSDGETHSASHVKNVRNRHRRLRKKLQKKGTKSARRRLKRLSGKERRFAKDVNHTISKRIVAKAKGTGRGIALEELTGIRERVTVRRHQRATLHSWSFSQLRQYIEYKARLAGVPVVLVDPRNTSRTCPVCGCVDKRNRPSQSKFSCTSCGYAGFADYIAAENIRRAAVNRPNVSDTRFVA

SEQ ID NO: 32372 - protein, 406 aa, Cyanobacteria sp.
MQVFNLTYEFKLKPTQNQIATFEEWLETHRRVYNHALAERKDWYKSRSCQVNACSLHSCYIIPADAPRPTFASQCKSLTAARKENECLQRVNAQSLQQTLRRLEKAFVNMWEQNHGFPRCKKPGRMRSFSFPQLGQNPLSNGYVKLPVIGAVKVRQSRSIPDGGVIKQACVVKRVSGWYVMLTVQWDVNPPSPMPHGKAVGIDVGLTSFVATSNGLLVKRPRFFVDAERQLKLLQQRVSRKRIGSNNWKKAVKKVASLHEYVANCRKDWHRKLSHQICSDTGMVFVEDLNLIGLSRGMLGKHCLDAGFGQFFKIIEQTCFKRGVYFQKVNARKTSQICPNCNVETGKKELKERTHVCFSCGYTTDRDIAAAQVVAIRGLAAVGHTVKMLAEGKFIGIPKTQESPGF

SEQ ID NO: 32373 - protein, 479 aa, Tepidibacter sp.
MKITMRAILINLNDKQKSIIDNMMLVFCTAIRYSFNRLIEGNIKKDELEKIVAHKYNLNIRQAKDAVESARQTIISQRELLKENKDNYKKKVKVIEKQLKNDKLSQRKRNALKSKLDKRKRRLAYFQKHIDNKTIPPVTFGTKKMFIRRCKGLITNEEWKNCRNNRFYSRGDKTKKGNPNLRVIIKNGMSYLEISTLEKTKSNRAIKIQVPIYLPEKLSKKTGKINGNNYREMFLNHLQSGEAYQVELIKRNGKYYAHITFELPIIETLYTGHNGIIGIDTNPHGFALTMIDNKGNYKWHTYLKQGELQYARSNRRENLCGELAKQVILLAKTYGCGIAIEDLKFKNDKDVNSKFARIKHQFIYSKLLKMLESACIREGIEIIKVKPQFTSKIGLYKYCHQYGIVVHNGAGMVIARRSYGFKERVPKILVDKFIDDKEKFNKYNEWKKWTVINKNIKRKVGVKPDLWLINRKKLLGIAS

SEQ ID NO: 32374 - protein, 374 aa, Bacilli sp.
VILLEKAFKYRIYPNKKQQELIQKTFGCCRYIYNYFLDKRITEYKENKKTLSFYDTSKMLTQLKKENDWLKEPDKCSLQNSLKILDAAYQKFFKEHIGFPKFKSKKNRHQSYTTSYMKTTAGGNIRFESKHIKLPKLGCVKIRDKQIPQGRILNATISQEPNGHYYCSLCCTDIEFPQYPKTNKNVGIDLGIVDFAILSDGIKIKNPRFYEKSEKKLVKLQRELSRKTIGGSNWNKTRIKVANLQKHISNQRKDFLQKLTTNLIKQYDIICIEDLDVQSMKETDSSVRNKHVLDVSWSEFRRMLTYKSTWYGKILSVINRYFPSSQICHCCGVNGGKKSVEIRYWICSNCGSKLDRDDNASINILNEGLRILSV

SEQ ID NO: 32375 - protein, 394 aa, Lentzea sp.
MRAVTKTTVKRAFKYRFYPTEGQAAELSRTFACVRLVYNMALAARVTAWNGERRRVTFSDTSSMLTAWKKTEELGFLRDVSSVPLQQTLRHLHSAFGNFFANRARHPRFKSRKRSRASAEYTRSAFRWREGRLSLAKMTEPLAIVWSRPLPDGSEPSTITVSRDSAGRWFVSMLVETTVHHYAPVSAVVGLDVGLSALVTLSTGEKIVNSRHERKHREQLARAQRALHRKPKGSANRQRARLKVARVNARIADRRRDFLHKLSTRLTRENQAVVVEDLNVRGMLGNRSLARAISDASWSELRRMLVYKAAWYGREVIAVNQWFPSTKTCSACERVVEELPLKVRTWTCLCGAVHDRDVNAAKNVLAAGLAVAACGDGVRPTRRELVRQPSKLPT

SEQ ID NO: 32376 - protein, 341 aa, unknown
  TnpB Polypeptide
MMLTFRVKHCRNFCEELKKARQIAEFALMTRSSTSSDVKHLGLKSMIANQILRKYGRNKKAKRITHVNLIIPNQGIIVDKALKLITLPCLKLKLNYYFSGFEKINQIEIDDEYAYITTTRNDADLIDNGKFIGVDLNTTGHVAVVSSPETGKVWKLGKEANHIALKYRGIRRSLQKQGKYRKVKHMKNRQQRLIKNLNHHISRKIVQFAGSTKSGIRLENLTKIRQSKRISKSKSFRYCLNNWSFYQLQKMIEYKAKLQGITVFYIDPRYTSKTCSKCGHIGDRENKSFKCPSCGHVEHADANASFNIGKSVSHCILSMDQLHVDRDACKGSTDTPKVATS

SEQ ID NO: 32377 - protein, 416 aa, unknown
  TnpB Polypeptide
VDAELPAAVKNQAIRDAKSVLRRYAKKQRKVERKRAWFAEQGKAPRCPIRDAKAPILRRPVLLVNNQNFKIDFDAKTVSFPLFRKGETKRKTVQKEIHVAAVTPRQREILTTTTHFTTLRIVRRGDTLLAQVGYTVEEPEIAELNDFLADPNTLVMGVDLGIKCPAVSYSTDGTVRFFGNGRENRYKRRKFYARRKKLQKAKKLRAIKRVSDKEARFMKERDHQVSRAIVNEAIRQGAKVIALEDLDGIREGCTKSTPTRKSRKNVDKPKVDSVAESAKNSTDATTNIGEPVQLALFSESDALTKKERRKKRKLSKKQIAARRKNNRSLNSWSFYRLTKYITYKAALAGIRLVYVNPYKTSQRCPVCGMERKAKDRKYVCECGFHAHRDIVGAINIARNAFHSNKTDRTGDEKETA

SEQ ID NO: 32378 - protein, 577 aa, Escherichia sp.
  misc_feature (192)..(209): Xaa can be any naturally occurring amino acid
VKRLQAFKFQLRPGGQQEREMRRFAGACRFVFNRALARQNENHEAGNKYIPYGKMASWLVEWKNATETQWLKDSPSQPLQQSLKDLERAYKNFFQNRAAFPRFKKRGQNDAFRYPQGVKLDQENSRIFLPKLGWMRYRNSRQVTGVVKNVTVSQSCGKWYISIQTESEVSTPVHPSASMVGLDAGVAKLATXXXXXXXXXXXXXXXXXXALARQNENHEVGNKYIPYGKMAFWLVEWKNATETQWLKDAPSQPLQQSLKDLERAYKNFFQNRAAFPRFKKRGQNDVFRYPQGVKLDQENSRIFLPKLGWMRYRNSRQVTGVVKNVTVSQSCGKWYISIQTESEVSTPVHPSASMVGLDAGVAKLATLSDGTVFEPVNSFQKNQKTLARLQRQLSRKVKFSNNGQKQKRKIQRLHSCIANIRRDYLHKVTTAVSKNHAMIVIEDLKVSNMSKSAAGTVSQPGRNVRAKSGLNRSILDQGWYEMRRQLEYKQLWRGGQVLAVPPAYTSQRCACCGHTAKENRLSQSKFRCQVCGYTANADVNGARNILAAGHAVLACGEMVQSGRPLKQEPTEMIQATA

SEQ ID NO: 32379 - protein, 294 aa, Halorubrum sp.
LGYHDRLRLEVCGAPKWDGQQGRLEIQYDEIDDTFRAFQPVTVPDSRQDSPLASHEAALDVGANNLVACTTTTGQQYLYEGRDLFDRFRETTDEIARLQSKLREGRYSSRRIRRLYRKRTRRRDHAQDALVRDLLDRLYAEGVATVYVGDLTDVLSTHWCADVNAKTHQFWAFRAFIKQLSQAAEEYGITVEVRSEADTTRTCPACGERDATDRDGDLFRCPCGHEAHADLCASRTFLERQAGESVGSMARPVRLKWDDHNWSELPHSPERASPNEKRTNRSTGDGKLASVGAT

SEQ ID NO: 32380 - protein, 407 aa, unknown
  TnpB Polypeptide
VIKIKISRVERHNILRANPLWNELDSLCFKSKNLYNYANYIMRQSFINKQGIIKYGDLTYQLKHSEPFKDLGSNSSQHVLKMLCRDWKSFMELLKMYNKNPNSLLGRPKLPHYKNKNGRHICILTNWQSQIKDGYLFFAFKPLKPFNNKIKTKTKGKHMQTRIIPKGVCYILEIVYEIEVPDIKEESKNISSIDLGINNFVTLSNNIGAKSIIINGKGIKSYNKYWNKQVAKYRALAKINNALDWSKTLERLYNQRYNKMEYWMHKISKEVINYCIALNIDTLVVGLNKEWKQESKMNNIVNQTFIQIPYDNLINKLKYKCENVGIKFIITEESYTSGTSFLDNELPIKENYNKSRRVKRGLFKSNNGMLINADLNGSYQIMKKVFPNAFTNGIVGVDLHPVVINCY

SEQ ID NO: 32381 - protein, 541 aa, unknown
  TnpB Polypeptide
MYHVECIDIHKDDPLFPYVDRACLCANNMYNVSNFYIRNLMTGLKKDERGRTANEAFVIKTVSGSIPGINDRLREKYERKVRKIRDTKGLSDEERMDRIGEVKHLQFQAPTAEKLFASYGLLDAVFKFTDNADYRAFHAHVIQNAVKACCQAWKGYFESLKAFSASSGHTGKPKIPGYKKSGGRTTAVFSNIACSIKHGMLFFPYYTEDSTEGQQQKRKRRRHSLRIEGLPHAAGDKLIEVRIVPYFGICQVQIVTDDGLREEDLIPDQKDIIDAGGEPAGVMMLDPGLNNFAAIADNKGNGPIVVKGGAVKACNQWFNKRMAFLRSEQMKGHDPKTYHPPVTGQMKRISRKRDAFLRDTFYKYAHYIFRLMKERGLSYLIVGYNSGQKQGAGMGHRNNQSFVQVPFARFRRILQTVCVRYGICVILQEESYTSKACFGSRDRIPTYGKEDAEGVSFSGKRTKRGLYRQNDGKVMNADINGAVNTGRKYDERIFPAGMDCGYLYGKVRAVTYKDILKASQDHSKSNPGQTGQRASVCPVSA

SEQ ID NO: 32382 - protein, 371 aa, Cetobacterium sp.
MILSKKIRLKPNKNQELFLWQSTGTARFIYNWTLNRQKENYENGGKFLSDNILRKEITELKKSELEWLSQVSNNVAKQAVKDACDSYKKFFKKQSAFPKFKSRKKAKPSFYNDTSKLKVKENLVLIEKVGWVKTSEQIPMNTKYTNPRISFDGKYWYISVGIDSAKHVVELTDEKIGIDLGIKELAVCSNGRVFKNVNKGKRVKKLKKTLKRLQKQVSRKYYKNNGGENRYQKSQNILKLEQKLRLIHRRISNIRNNNLHQITNEIVKTKPSKIVMEDLNVKGMMKNRHLSKAIAEQNFHKFVVFMKYKCKFNGIEFIQVPRFYPSSKTCSCCGSVKKNLKLSDRIFSCECGNKMDRDLNASINLRNYRVS

SEQ ID NO: 32383 - protein, 393 aa, Erysipelotrichaceae sp.
MTGKSRNLRNAVLFRLRQWFTLEGKEKPQPLQEEVRKEVLLTCSATGRDLPGRVIRYSFMDRLLRVTKNPDYFNGLPMQSAQAAAKETVGEFGNWLKALQAYNKDPSAFTGRPKMPGYTKADHRTVTMTNQDCVIYETQDGRKYLKLPKTKERLNVRIPDGAVLKEVKIRPYYSDYEIILIYEQERETEECRGTYAGGIDPGVENIIAFVCNDGESPVLYKGGAIKAENQSYNKAKAKYTGILMKGHDPKTVNVHTSRLSAIGRKRSAFLLDEMHKISSHLVRECVRRNIGTLVIGKNTHWKTEAQMSKRSNQTFVQIPHGRLIDMIRYKAEREGIRVIMQEESYTSMASFIDHDEMPAYGEGNGYSFSGKRITRGGYQCGSEHPAQSDTGCF

SEQ ID NO: 32384 - protein, 348 aa, unknown
  TnpB Polypeptide
MLISKTLRCKVFNPTKRKLQSLTPEYLNFQIYVRSGRDFGIYSLTKATFDFKYKRKARKKKQPMPLHNQSTKFRITNNKLTPYWFRIPVKGKRGGIWLPIKPHENIDFTWEIREAKLFKREKDFWIYITIRKEVSLKTSYSSVLALDIGEKVIAAAVLSSVRKPIFLGREVRGIRRHHAWLRKRLQERGLFKKLKEMRGKEKRRVELVLHEVSKYIVELAEENNSVIVLGDLKGIRKGSKGKRFNRIINSFPFNKLSFFIEYKAHLKGIAVVKVKEDYTSKTCSRCGEKGKRIKQGLFKCPHCGYQANADFNGAMNILKRSLSYMLSDGAVAFSPEPPMTEMTRAEAH

SEQ ID NO: 32385 - protein, 484 aa, Mycolicibacterium sp.
MRRWSAMTRHTTFRFCLDPTVEQCEALARHAGASRFAFNQCLRIVKSALTYRRTVPDSEVPWTGFDLINAFNAWKKTDEAGRVFTADTDGGVEVVVTGLSWRREVCQQVFEEAAVDLGRGLAAWSDSRSGKRKGRRVGFPRFKKKTGGVVSFRLRNKHAKGRPAAIRVGDNDRPRSVTLPGMGAVAVHDDTRRLRRMLGTGRAKILFATISCHGGRWWIALNVEAADLHSTHRHPTRHPDDAGGWVGVDRGLSAFLVAATIDGTEVARIEDAPKALAVGMKQQRRLSKSLSRKEKGSRHRKDAAARLGRHHHRVANVRRHFLHQVSGELVKTHDRIVIENLNVAGMLANHRLARAISDAGWAEFARMVRYKQAWRGGQLIEADRWYPSSQLCSLCGLRRTDLTLADRVFTCPNGHVIDRDGNAATNLARWGHTHQHETSTDPRTPKQRGRATNARRRDGAGQHPRVGETSPKDAGTDVHTAPAA

SEQ ID NO: 32386 - protein, 397 aa, unknown
  TnpB Polypeptide
MSRYRLIPTPAQEAVLRDHCGHARYVWNLAVEQHSHCHPGRKSAPGYLEQCRQLTQARAENPWLAAGPQTVQQQALRDFTQAMAAFYDPGNPAGRPSWRKAGRDEGFRIVGRGRQWDVRRVSRHVGQVWVPKAGWVRFRWSRAVPPDARSYRVTMDRAGRWHVAFAVIPALVPAPGNGQVVGIDRGVAVSAALSTGQRLHCPGLGVRLRTRLRRLQRRLARARRGSNRRGRVRHAIARLRARERDRRKDWAEKTSTGIARQFDVIRVEELKITNMTRSARGTRENPGQNVRAKAGLNREILRSGWGLLVRRLEEKAPGRVEKIKPHYTSQRCSTCGQVDRASRESQAVFRCTACGYAGHADVNAAINIAAGHAVTARGGDGVARPVNREPHLLLQSV

SEQ ID NO: 32387 - protein, 384 aa, unknown
  TnpB Polypeptide
MITTKCRLYPNKQQTEKLDFALDICRQAYNIMLGELKDQAVIDRNMIQAILPDLKICESRFREVYSKTLQYECYKLFSNLSALSALKKQGRKVGQLKFQGKKFFTTMTYNQSGFELEHTFKKNGRLKLSKIGDVKLKLHRLPEGNVKQITIKRMNDKWFAFVISDGKVKLEHGNKVLGIDLGINHYLVDSEGNKVEHPKNYEKMLPKLRIAHRKLSKKKKRSNNRLKAKKNLNRIYEKLNNQRNDFLHKTSTNLIRECKIIVVEDLNIKSMMEQKYFNAKNIADSSWRKFVQMLEYKAENSGVEIIKVNPKDTTKTCSNCGHIQKMHLWDRTYKCKGCLFEMCRDENASINIKNLGLGQPYVEIIPDSSSEEQLSMKQEAITSK

SEQ ID NO: 32388 - protein, 398 aa, Brockia sp.
VKIHRAYRYELDPNKEQRILLAKHAGAARFSYNWGLARWKEIYEKEGRTTNAVELHRELNRRKKTDFPWMYEVSKWAPQEALRDLEKAFKNFFRGRKTGRKAGYPKPRRKKDGRDSFRLDNSSGTIRLLVDGLDLRHPGKARHIVLPRIGAVRLKEKPVCRKKSGSVRTYLPQGRILHATVSREADRWFVSVTVEEEVPDPAPPKGPAAGIDLGLNSFATKAEEGGGVTQIEAPKPLAKRLRLLQRRQRAHSRKERGSKNRQKSALRLARLHRKIRNIRLDFLHKLTAELVRLHPVIAIEDLNVAGMLKNDRLARHIADVGWGTFRALLEAKAKLRGVRLVKVNCFEPTSKTCSSCGYVLPELPLSVRAWTCPVCGAHHDRDENAAKNLLKFALAVGT

SEQ ID NO: 32389 - protein, 374 aa, Brockia sp.
MTEGKPYDRRRRRKTPGSGSVAADLRPEKMRAFPVGGRRKELIKLLSDPNVTTIVVEHRDRLTRFGFEYIEASLRAQGRRILVVEEREVDDDLVRDVTEVLTSLAARLYGKRSARRRAKRRWRRFSVKIHRAYRYELDPNTEQRILHATVRGEADRWFVSLTVEEEIPDPPPPRGPAAGIDAGLKSFTTLADETGAIRKTDAPRPLRHALKRLRRLQRKLSRRGVRDEHGKLKTRTKNYEKTRLEIARLHRRIRNIRLDFLHKLTTELVRTHPVIAIEDLNVAGMLKNDHLARHIADVGWGTFRALLEAKAKLRGVRIVKAGRFEPTSKTCSPCGHVLPELPLSVRAWTCPVCGAHHDRDENALSADHPITLIS

SEQ ID NO: 32390 - protein, 460 aa, Brockia sp.
MSRSESTFVLELPLRVQIWQAHILEKRFEAARNLYNAVLAEGFKRLRAMRRDPGYEAAKKESDPGERRKRFSGLKREYGFTEYDLHRYVTELRKSWIGDHLGPHEAQKLATRAFQALERWSYGRGGKPRFKGKNRIKSLVLSVEGKTASAGLIWKEDHLYWRGLQLPALIDRRDPVVRYGLDRPVKYARIVRRMGKDGWRYFVQLILEGDPFRKPPVPGSEAIGGMDPGPRHVAWYDGEEAGITSLVSPALKERRRELRQLYRKADRQRRAANPENYLPDGSVKPGSKIWRKTKALLRTEARIREIERKEKSERKRYLHELANRFIARTAFWKIEKPNVKAWQKAGYGKSIKRSGLGTFVGILTRKAERAGGWVLSFDPRKPKLSRTCICGRVESKPLSQRVHRCPECGVVMHRDLFSAFLAVFVDRDHALHVGEAQKAWPDAGPRLLAAWRAAGRSDSI

SEQ ID NO: 32391 - protein, 435 aa, Brockia sp.
MKLSEWAKKRGITYKTAWCLVRRRRCSGVKIHRAYRYELDPNKEQRILLAKHAGAARFSYNWGLARWKEIYEKEGRTTNAVELHRELNRLKKTDFPWMYEVSKWAPQEALRDLEKAFKNFFRGRKTGRKVGYPKPRRKKDGRDRFRLDNSSGTIRLLVDGLDLRHPGKARHIVLPRIGAVRLKEKPFRRKKSGAVRTYLPQGRILHATVSREADRWFVSLTVEEEILGPPPPKGPAAGIDAGLKSFMTLADETGAIRKTDAPRPLRRALKRLKRLQRKLSRRGIRDEHGKLKMRTKNYEKARLEIARLHRRIRNIRLDFLHKLTTELVRTHPVIAIEDLNIAGMLKNDRLARHIADVGWGTFRALLEAKAKLRGVRLAKVNRYEPTSKTCSSCGHVLPELPLSVRAWTCPVCGAHHDRDENAAKNLLKFALAVGT

SEQ ID NO: 32392 - protein, 507 aa, unknown
  TnpB Polypeptide
MSKKKNVRCYPIKTYQNKDKNNIIWDLYNEYKKYYSFQINKQYRLYQKTGYLNKQIDTKKDKSLLSERYRRCVVYQVCGQLQSWLSNRDNKIKDIIHNCKSLNDNEKRILHIIRRSPQDFKERKISILDKKTNDIKEEIYITKKYIQIYKSILRQVKWRLPSNKNISMQLNNNVIQLVQRKTNHKKQKATNFDYWFELSTLTKGRKTYIPAQMNSYLKTQLDKGELLNAVRIDFKYSHISFNLMIDKRQETYENEIESIGIDFGTKHLFALSTGNIFGVNFGKQLKSYDNKISTLQKRLQYQGIKPRQSKRYRKLVFTCREFIKNEINRNFNKIIKEIKPQKIVLEKLDFRHSKLNKTMNRILRKCGRSVVKSKLQTLEKDYGIKITEVNPAYTSQKCNKCGFVHRLNRNNRDQFKCKNCNYTKHADINASKNIETRSSCPLLKGKSGKRTIKKHLFKSFKQNILQCGVIDSNIKYISPNSRAIFLDFNPKDFQEFYELKSGDKLKV

SEQ ID NO: 32393 - protein, 454 aa, Haloarcula sp.
  misc_feature (247)..(247): Xaa can be any naturally occurring amino acid
MTDSQALVKTLDFQLDIQSDNESLLYDATLEARSVYNETIRLAKQGVDWDALPDRVADDANLVKNTTQRVVAKALGAMENYYEYDDFGKPSHTKDGAYPLRTNYEEGYNLSLTDDGDVAFRISAKPYKHVTGVLKGSDANLDILQTALESDEWKIGTAEALFHNDNAELHVNVTNTEQTVRDKQDSRTVVGVDVNEDNVALTALSEDGIEDSLVIDFPEIKFERHRYFTMRKRVQNAGKDSIHDTLXPEIKFERHRYFTMRKRVQNAGKDSIHDTLEGREERFVRDRLHKVSRHIVEWSQQFEKPCIVFEDLKEMRDSIDYGTRMNRRLHHLPFRALQFYTSYKAAFEGFPTEWINPEYTSQRCPMCEHTERANRNKKRFKCRSCSHQDHSDRGASVNIAVKGMKKLDWNVPALNSLPQVRKVRRQASGAVDAPTVTQPTARGYQADGRMGVSD

SEQ ID NO: 32394 - protein, 464 aa, unknown
  TnpB Polypeptide
MLRAYKYRIYPTDEQKVMLAKTFGCCRYVYNWARTLKEKAYKEGGENIKKFDMTARARHELRETAPWLAEVSSAAIEFAICDLYDAYDNFFEGRAKYPNYRSKHDRQHFHDRRGIHVNFKRGLISIPKIKDIPCVFHRRFDTNKCVIKQVGVELLPSGKYRVSILVNDGKPEPVKAPIDTDKTIGIDTGLKHYVVTSDGLTDEPTHEAKKQKRKLKLLQRRLSKKEYGSRQYRILKHRIARLHEHTANRRTDHIHKLTHYLAYENQATTICVEDLNVKGMVKNKHLAYNLADTSIGEFYRQLEYKCRWAGKNYIKIDRWAPSSKMCSHCGHIYRGLKLSEREWTCPECGTHHDRDLNAAINIKHFGLSVKETLPSVRREVKPVEQPLVDDRSSESKKPCRCGSTRRDREDNQQPTLRNRETSSSGRSRKSEGQRCSTRSTRRPDASIFTKATTSESRSTSETSG

SEQ ID NO: 32395 - protein, 720 aa, Streptomyces sp.
MSKKQLRAIDDAFVALGPAGVAIRDRLKHLAGEDEKVLRLVGEHLGRLASLDLKARCRDGLGHSSEAWAARKQGLTAESSSRWAGSITKATHDQWALSRRCQLAHIQNLEAGIRTLMHRLSQPIGEKGTKRAPGGYRSRGEWFHKSRRLAVLEHRLGVSRVERETGAVHVVRGGRRLFSNRHNLQTAQLTEEQWRERWEASRWFLAADGESGKRWGNETIRVAPDGEVSIKLPAPLAHLANVKHGRYALASKAQFQHRGAEWRDRTAANRAVAYRIHLDVERGRWYLTASWTRPVVKTIPLQTARADGIVGVDTNADHFAAYQLDRNGNPTGDPRGFFFDLSGTADHRDAQIRHAISRLLHWTKRCGVKAIGIENLDFTAEKTREKHGRRKRFRQLISGMPTSKLKARLVSMAAEQDLSVVAVDPAYTSMWGDEHWRKPLTSKTRKMSRHDAASIAIGRRALGHPIRRRTAPPRTHQSDGCGHRTVQTGSGVRGREETRPPITERAFDARPRTGTSQRTRGPAHPKPFGMRAVPGRGCKAHPWTLLRNGRSAVQQPLPWGHMTDLGIDFAQKVLDEQPFSRLLGARITAFADGAATLEVDIRDDLRQQFGYAHGGLLAYAADNALTFAAGTVLGPAVLTGGFSVQYLRPARDGTLRAEAYVVHAGRRQAVCRCDIYVVGKHTGSAADTADTADAAEGEGGAELCAVAQGTILTAPPRTDA

SEQ ID NO: 32396 - protein, 331 aa, Streptomyces sp.
MIRSYKFLMRPTVRQQIALGEMLRDHCSLYNGALQERRDAWRHVSKTSIKYGQQSAQLKEIRAFDPERQGRWSFSSQQATLRRLDKAFAAFFRRVKAGEKPGCPRFRGVNWFDTVDFPRDGDGCRWDATPHDPITRVRFQGVGHVKVHQHRPVTGRVKTVSIKREGKRWYVVLTAEQSEPEPLPATGSVVGIDMGIASFLTTSNGEHIANPRHGHKAAARLKAAQQALSRCTRGSKRRHKAAQKAATLHRKVRRQRLDHAHKTALGLVRAHDFIAYEDLKICSMSTAPAPKPDPGTPGAFLPNGAAAKAGLNRSIARRRMGGVPRDPERQG

SEQ ID NO: 32397 - protein, 354 aa, unknown
  TnpB Polypeptide
MIKRYKRTHSGWMRRTSRIYLKANKGKLIDLHNFLNNYTNAVNYSITRFWSEGNKSSELASKDVTDRIREQFGVTARLAQCIAKQAKEVVKGRDTMPRIKKHTAILDSRFVTIEAFDGHFDMCIKFGSGVPKIVVPFKTTKHMERYDDWEMGKSIRMGYDGNGVFVDLIFEKERPELRTVGDIMGIDRGYKSMLYTSDEQDIGNLSGSIKSAGKRRKSYHHYITTEENRCLKELNFTGIKAIVLENLKNVKRGKFRRNMNRLLSFWHYAKVGNRLEQICEELGIAIYFKNPAYTSQRCPDCGNIDRKNRKGKSFKCLKCDASYDADHVGALNLKTLGLAGAYSLRSLKNNGVIS

SEQ ID NO: 32398 - protein, 426 aa, unknown
  TnpB Polypeptide
MIIMSNTFKRGKKVLLIPTKEQEQLFWQFAGTRRFIYNWALDLQMKSYKENGKLIPFKELHHLIVNLKNNDNSFKWLKSVSCDITKQAIKDLETAYSNYFKKVKQPNYKPYSAKQIAHSKRIGNPLTIYDRNGHPKFKKKLNCDEGFHQDCMHVQFKGDKIFIAKIGWVKIGKHNPFPQGQSGKDFKIYNAKVKFSDNKWYFVAAIDVDIVNKEQSKSEPIGIDLGIKDLAILSTGEKYKNINKTNRIKKLEKRKIRLQRKLSRKFEANKVGTKFVKTQNIVKLQKQIYKIETQLKNIRKDYNHKFTSSIVKRNPIFIAIEDLNVSGMMKNKHLSKHIQNQSFNTIRTYFTYKCEEQNIPLYIVDRFYPSSKTCSCCGSIKHNLKLNDRIYKCDQCGNVIDRDINAAINLRNYGQQEYNKSIKSAL

SEQ ID NO: 32399 - protein, 380 aa, unknown
  TnpB Polypeptide
VDLEGTWDRYYERYKGLLGVNAQAVLQKNNEAWSSFFSLLKLRKEGKLPPYMKRVGPPRYWKDRGSKERKLILVVRQDRYIVDERNHRLILRDFGLEINFAGRLRWHGKQGRLEMRHDGARGAWYAYIPVEVGVETTRNGNGSKHIVRGERRSIQIAKSRGDEAAGVDLGINILASAVTSTGAWLLYRGSRAKEDFFYLTRRIAEVQSKADIARNAGDNGEFRRLNRKKRRLFRKLVGRMAHLYWNLANHLVRGLWELGVSRIYLGYPHDIARERGNKLTVNLWTYRKLMDAIELKAQEYGIRVYEVVEYSTSNHCAIHGVKVARGPRGVVTCPLGHRLHSDLNGALNILRRGAGSMPATLRGPLSFLVDHSGVAPVKGA

SEQ ID NO: 32400 - protein, 251 aa, unknown
  TnpB Polypeptide
MSERQVRFLKKKSDRLLSKRQERMAALDEAQLHRQAASRKKRELAILAAQEIAALSHVWGNAVVAVEDLGWVANTMRNGRWNRGELVRWLTHYVTQNGGWVVSVNSSNTSQLCYKCSSKGTHPTHKESVCPEHGVMDRDVNAAVNIAARAVPRVTKARVTRAKNRKLRPQAPLKTPVARNSLKYPGRDRTKNAPTPKRKSHRFISKGVILPSCPARAQVPRLVASVLADQGILGTVQAALKQGNVVYKCRL

SEQ ID NO: 32401 - protein, 495 aa, unknown
  TnpB Polypeptide
MSSITYVKGIPTAEQELNKLGFSEVEMFLTSYSKIFHAAACETANHLLSCSRFNFSKWNTYLQDKYGISRRHASGVIVFANCDVKSRKECRKEEISQLTRKLKSARKWLNSKVKSLKSSQKFYSNKKWFESKKGCLLYLACSLKYKDTNIKNLRFQIHHKKRYIYLLERKIEHLKEKPIHVKIPRSQCFIVGSKDEKWGNQICQWDGDNIKFRVPYCLEDKFGKYVIVKLGDFDRKVNRLPLSGAKTWHFYYKYEKWNAAVKFTPAPVQQVSKSIDYGCIGIDLNPTSIGWVRVDQDGNLKACGRIKLEQGLPQNKMEAQLTDACLQLQKLASQYACPIVVENLNFQAKKTRLKEEGKKYSRMLSEWAYARFYELLESIHGNRGIKVVRINPAYTSLIGLVKYSRLYGLGSDRSAALVIARRGMKLSERIKPSSITAYLGVKPGKHVWGQWNQLNNLTKVHRVKRHSYYSISNWESQVKEWMTARAEGQTKQMRL

SEQ ID NO: 32402 - protein, 374 aa, Desulfurococcales sp.
MPKIIADKETAEQFMYATVNGRLIPRSNEDYMKLCLLAYRFKQAVKHGVNLALRRVPQKEAYKELAKILPSSIYGETAYKYANLLVESAKEQIDNEIYINKITIKKKWIASRGGVTWRGNLNIKLTSTNKVLVRYYNSEWLEFKVAFGERYLSLIKELVKLAKQKKISYGVTISFRNGKLYIHIEIPIWLYLKYFSQPKSKGYGLIAGFDLNSDRLNVIVINGNGDIVASKTCWYSEVVSHGFPRNKARWRRLNVLSNILKWCKRIGVDYVVFEDLTKIKTRKFTHNPNINRKITKFPKKQLLRHGVIKALKLGFTVILVNPKGTSGSVTHRQIMREKGLDRHMASAYMIAYRGLKKLKEQDPSITPSTTPTIN

SEQ ID NO: 32403 - protein, 406 aa, unknown
  TnpB Polypeptide
VKRIERIRLYPTPNQERRLCFMLDVTRELYNALLQERRDAYRDRGITISTRQQYSELTGLRKEDARVAAVYRECEDAALHRLHLAMQAFFRRMKRGETPGYPRFKGYARWNQLEFSHGDRALRFDTLQGRLTVPGVGRVNVRKGRVVPACGRAWIVAKNGRWYACFECERAETPLPATGTLIGIDRGVHVLAATSQGELIDNRAFGERYRSRVARHQRNLESLTLRDNAGRVCNRRDPARKAAVLRLARAKEREANRRRDYLHKMARKLVRSADVIGIEALNLRAMTRSAKGTPEQPGRNVAAKSGLNRAMLDASFGQFERLIGEKAEEAARTIVRVDPRFSSQECSRCGHVAARSRRRRRFCCLSCGYTNHADVNAALVIRGRAQLALSRLPDAGAEPVMQHVAA
